United States Patent Application Publication US 2026/0103690 A1 - sequence listing, part 61

SEQ ID NO: 296242 - protein, 370 aa, unidentified
MQKGTAYIGLDVHKASIAAAIASDDGKPPTLLGTIANDPAAVRKLVAGVQHGFDEVRAAYEAGPTGYGVQRQLSAMGIECRVVAPAQIPRRANERVKTDRRDALKLARLLRSGDLDAIWVPDESHEALRGLVRARADAHADLLRDRHRLNNFLMTRGLHGPVGARMSSTRYDRWLETLHFERPAERVVFDDSRDVIRGGVQRERRIETALYECARDSRHAGLIRALQALRGVGELTAITIVTEVGDFRRFATAPHLMAYVGLTPSEHSSGAVQRRGHITKAGNHLLRHVLIESAHHARRTPQVSPLMQRRLADLPEPVVALSWRAQQRLHFRYRQLGARVGRPRAVVAVARELVGFVWAVGTMWEGLPAA

SEQ ID NO: 296243 - protein, 390 aa, unidentified
MIAPRAVGCNDGMDSSRFFRGMIAVNSWVAPRHQEEAKMDATTVAVDLAKDVFEVAVANRAGRITERKRLTRRQFERFIDTLPPGTEVIMEGCGTAHFWGRRCRARGLDVRLLPVQYVRPYVRRNKTDRTDTEALLEANRCSGIDPIPVKTVDQQALQALHRVRTQWQATRTARINAMRGVLREHGLPIGVGAQTALTRIPALLEDADVELPGLVRHVVSLLLEEVRGLETRITTIDRELAAIARDHPIAQRLQQIPGVGVLTATALVGAVGHIHAFRRARHFASWLDLTPRESSTGGRRYLGGISKRGDVYLRCLLSHGAGAVLLTAQRTVQSAPHRATPFQQWAVTLAARRGHNKAAIAVANKLARQVWAVWHHGVDFTALPRGSAAA

SEQ ID NO: 296244 - protein, 369 aa, unidentified
MRRCIGLDVHREFAQVAIWEDGVIWQAGRIQTTPEALREFADSLCLSDEVALEATCNTYAIARLLEQHVGQVVVSNPQKTRAIAEAKVKTDKVDAAVLAQLLAAGFLPAVWLPDEATFALRRQVVRRAHIVRQRTRLKNQVQSILHRNLIPRCPAADLFGVKGRAWLAAQDLPHDELQAVGALLRQLDFHGQEPRIVDAELGRVGRERAEVRRLLTIPGVDATVALAIVAAVGDFGRFSCPQRLVSYLGLNPRVRQSGGQPAQHGRITKQGRAHARGMLVEAAWAAAKTPRPPGRCAPSTNASAPGAACRSPWWPPPASSPPCAGTWWSASRTMPSSGRRSPTRSCGRWSCARGCLPGGARGARRPRIR

SEQ ID NO: 296245 - protein, 433 aa, unidentified
MEEVEDEPLFADRVAGLDIGKAGVEVTIRVPGKTAGRRRQQETRSFGTTRRELLELAAWLACWEVAKAGMEATGDYWKPVFFLLESQGLDCQLYNAGQVKALPGRPKTDRADSIWLAKITERGMIRSSFVPPEPIRALRTHTRYRRHLTQARTAEKQRVEKLLEDGHLKLSSVISDIHGVSGRDMLGALAAGQRDPRTLAQLARGSMRGKIARLEDALDCSFFTGQHAAVLAMMLATIDYYTAQIGALTAAIEALTAPYLPQVAQLDAVHGIGLVCAQDIIAETGTDMTVFPTAAHLVSWARWSPQVKQSAGKRKGSNATGRGNPYLGAALGEAVIAASRTPSFLGTRYQRLARRMPKKKALVATGNSMLTIVHALLADPGASYHDLGPGYYEQRMHARRQARNHVRSLERLGYKVTIQAINPDTGELLAPTG

SEQ ID NO: 296246 - protein, 359 aa, unidentified
MDLPIHTDEETLVTLGVDTHADAHVAVALDGFGKRLGSKSVPATEAGYAALVAWAEEFGELDRAGVEGSGSFGVGLARFLRARGVEVVEVNRPNRQHRRRFGKHDTADAEAAARALQAETATGEPKSADGPAEMVRALHVARRSAVKARTQAANQLHAWLVTAPEELRAELRGLSTAKLVAVAARFRPGALPKDLRAASKLAMRSVARRHQRLSEEIAELEGQIAGLVSEAVPALAALRGVGTDTAASLLVAVGDNPKRLKSEASFALLCGVAPVPASSGKTVRHRLNRGGNRDANRALHVLALGRMSWDERTREYVARRAGEGKSKREILRCLKRYVAREVYRILTAPGALPSSVSMP

SEQ ID NO: 296247 - protein, 337 aa, unidentified
MTIIRVGLDTAKHVFQVHGVDESEQPVLRRRLGRKEVERFFAKLPPTRIGLEACGASHYWARVLRGLGHTVMLLPPQYIKPYVKRGKNDAIDAAAICEAMSRPAMRFVAVKSAEQQAALMLLKTRDLLIKQRTMLINAIRGHAAEFGVTAAKGPVKVAELLQQAHSDEAGVPALARELLGVLSGQLAALDVKLKALEARLMAWHKADPVSRCLATQPGIGPIGAVSFALKVTDPKGFRSGRHFAAWLGITPKENSTGGRRRPGKISRQGDESLRRLLVLGATARIRFAKAGRASPWLLGLLARKPKKLAAVALANKMARILWAMMVRGQTYRHPKEA

SEQ ID NO: 296248 - protein, 331 aa, unidentified
MKNYLNSVGTDISKKYFDAVLFFSGEHAKFANEKKGFASFIKWLKKHDYGPGNVLICFENTGYYSLQLSFYLNEKGFDYVQEHALQIKRSIGFRRGKSDKADALDIAKYAWVNRENIKLSKPPSKSILKLQQIKTTRELLVRQMVAIKNQIQALAAIGDKNVSRVACRSLTFVLGTIEKQIQKLESEIELLIGQEEQLATTYHLCRSVKGVGLVLALELIIHTQNFTCFSDWRKFAAYCGTVPYPYQSGTSIKGKARIHKSCDQRMKCLLTMASISALRVDPELKIYYKRRVDEGKPKMSVINMIRNKMLARVFATVNRGTPFITLSKFAA

SEQ ID NO: 296249 - protein, 345 aa, unidentified
MEHFAGLDVSVKETSVCIVDDTGEIVREVKVASEPEALLAVLKSPAYRFKRLGLEAGPLSQWLFSALAEADLPVICVETRHMRAVLKARINKTDRNDARGIAQMMRVGLYRPVHVKTLRSQKLRMLLTHRKLLQSKAIAIDNDLRATLRNFGLKVGMVGAVRFEARIRELVEDLPDLAVLVEPLLIVRQALREQFGILHRRLLVVARDDEVCRRLMTVPGVGPVVALTYRATVDVPVRFRKSKSVGAVFGLTPARDQSGERDCSGAISRCGDEMMRTALYEAAQVMLTHSAKWSWLKAWAMQIARRRGKKKAIVALARRLAVIMHRIWVDGASFRWTREELATAA

SEQ ID NO: 296250 - protein, 369 aa, unidentified
MLYLGIDQHSKQLTICLRDEGGKAVWRRQVSTAPQRVREFLHQLENHCFESGGYVAVVEVCGFNDWLLKLLPEYGCKEVVLVQPEERDRRKTDRRDAHRLSELLWINRERLLTGQHVQGLRRVFIPSTDELHDRQLTQLRKRLGASRTRVINRVKHALLKHNLQHGCPTKGIRTQKARTWLRKLTLPAIDRLEVDQALAQWDLINEHIAAADEQIAERAEGNANARLIATLYGTEPGYAALALAASIGPISRFPRPRSLANYWGLAPGCRNSGEATQRLGSITKQGSRTARFLLCQLSLHVLRRDAWMREWYKRIKRRRGSKIARVAVMRRLATIIWQMLSRQQSYMTGDPARWRSATDSNRKRRQGAA

SEQ ID NO: 296251 - protein, 419 aa, unidentified
MRIIKTKKHEIVNGRTLLVAVDLGKSKHMGYYRCPDGTDIKPFEFSNNRPGHQKFYDRICQAKAVYHLEEVVVGFESTGVYGEPLIHFLNDKGIKLVQVNPMHTKRIKELEGNSPGKTDRKDPKVIADIMALGHFLTVVIPTGVSAELRRLTQARERSVERRTAFYNQLQDLVFIIFPEFLEVMKDIKTRSAQYLLRHYPTPQAILQCGVDGLSLVLRRVSRGKLGRQRAEALYEATVRSVGIKEGQRSIVLEIEEILLGIERCECFIAKLEREMRRLLDQIPYSRSILSVKGIKAVTAAGLIGEVGDFRKFRTISELLKLAGLDLYEISSGNHTGNRHITKRGRSLLRKLLFFASLNMIRKGGVMHEPYQRYIGRGMPTHKALVAISRKLLGILFALVRDHTEYVVNYSERENLKLAA

SEQ ID NO: 296252 - protein, 388 aa, unidentified
MHVVAAQSEAAIAIRTDLCATFVSLELSRSTWLLTSLSPGAGEKMSKHSVSAGDTAGLFSRFVELQQKARTRTGRTFPIITIQEAGLDGFWIHRLLQGEGIESWVVDPASVLTSRRRRRAKTDKIDGETLVRTLLAYKRGEPRVCAMVKAPTPEEEDRRRICRERKTLTAERVRHVNRIKGLLFAQGVGDYEPLRRNRRGRLKELATGDGRPLPEHLKAQISRELDRLEVILAQLKAVGSERDAMLEPAKEGPPTPASLLAQLKGIGPEFAAVLWSEGLFRSFNNRRQVAAYAGLAPTPWQSGSVAHEQGVSKAGNPRLRTTMIQLAWLWLRHQPGSALSIWFRERVQRNGGRGKKTAIVAMARKLLVALWKYAVHGILIDGTTAKAA

SEQ ID NO: 296253 - protein, 336 aa, unidentified
MRYIGVDLHTTQITVCYLKAEAEFEIRKYQLVEMDKFVNTLEAGDEIAVEATCNTRWFAEQVQEKVSRVVLVNPREFEVVKNSVKKTDKHDALNLARFLKADLLPEVRAKREETERVQSLVNTRTKLVRLKTSLINKIHALFVSNGRKLKKASLASDKGLEKVLLSEWSAIERIELEIIIEQIRSLKVSIKKLDTAIEAESGKLKGFESLVSMSGIGSLSAGILLAVIGNIKDFATADKLASYFGIVPRVSNSNEKVNHGRITKRGNKTGRTTLVQCSLAAIKKSEYLKKYYEQVKARRGHGKAKIALARKYLGIIYNTLSNNWVFADFNNFELAE

SEQ ID NO: 296254 - protein, 409 aa, unidentified
MITYIGIDWSAQKHDVCFVNAAGAAIARQVIAHTPAGFAEFERQREQLGVEPAECVIGLETAHNLLVDYLWGHHYSQVYVIPPNQVSRESQARWPSGARSDPSAAQLLAEMLRQDRTRFPVWCPDSLLTRQMRSRVSLIMHLTRHITALSNRLWAVLCRYYPAAITVFSELTAQIELAFILAYPTPQAAAQLTYAEFQAFAVQHRHTQPRKLPAAFARLQQPQPLADPDTVATFQAEAVQLAHLLLPLVQAKQTQLHELTRLFQQHPDAAIFDSLPGAGDFLAPGLLVKFGDDRQRFPDAASVQALAGTCPVTDSSGKRHVVRFRRACDHEFRTLTQQWAKATLTVSPWAQAYWQDMRPHCRSNSAAYRRLANRWLAIVWKLWQTHQPYDEAYHLQQRAARSQPRPTQR

SEQ ID NO: 296255 - protein, 337 aa, unidentified
MSSIHILGIDLGKHCFHAIAHNRSGAEVLRRKFNRNQLQHFLCKIEPTTIAFEACGGAHWLARKCGEYGHQVRLIPPQYVKPYVKGNKNDFIDASAIAEAAGRPTMRFVAVKSEEAQVIAVIHRVRDGYIKERTAAMSRIGAILLEFGLSFPKGHAKMKSLFQWLAEQKVSLPENLLCELVSIHEHYKYLNERVKAQDSKLQTVVNNNESAQLLKTIPGVGDLTSTLCVADVSSPNNFTNGREMAAWLGLVPRQFSTGGKTKLLGMSKRGNKHLRILFIHGARAVLSRLETTGKVFGEWLIKLRATKPFNVVVVALANKLARIAWAVLYHRQAFKAV

SEQ ID NO: 296256 - protein, 436 aa, unidentified
MFVGHRFRTDPDELDTLWARLPKDAERIEVVMEPTRNAWVALAAWFRRHGATVVMVPPEQSADLRDYYNKHTKTDRLDSKVLARLPLLHPEGLHREDSLGPGDELKRAVKIRSGLVHRRTACMARRDALLEILGPAWIAALGSDMTLTALRFLARYANPVQVKRLGKARLAAFFRRCSRQAWADERADAVTEATATTLRLWGADGGELDFDALAADIAAEARLALTLTDEINGFDKRIGALYDKADPAGIVRSVPGAGRVCAPQILGRLGDPTRFANLAAVRSFAGLVPAADSSGQADGHRGPTKAGDSCLREALFIAADHARKVDPTLAVRYQRLMLAGKHHDSAVCTLAAVLLTRIAACLRAGTHYLLRDTDGRVITEAHGRAIVAERYTVPPEVRAARRTVTPHRHPRRNERNERAKTGVATRSKASPVPQPA

SEQ ID NO: 296257 - protein, 375 aa, unidentified
MNNNNTLYVGLDVHKESITVAYAINSEPVELMGKIGTSPTDIQNLCKRLRSKSSQVSIVYEAGPCGYGLYRRLVKSGFDCMVCAPSLIPKKPGERVKTDRRDAIRLVRSLRAGDLSAVYVPGIEDEAFRDLARAWASARDDLRHARQRLKSFLLVHGAHYVGRADWGPAHRRWLSKYSFESPWRQLAFDEHRRTIEDRQAQCERLESALKEAVTEWRLYPVVEALQAMRGIQFITAVGLISELGDLTRFEHPRQLMSWFGITPSEYSSGGSRHQGSITKAGNSYARKLLVEAAWSYRHPARISPAIQKRQENLPRPVIDRAWDAQLRLCKRYRKLQAKGKNVNITIVAVARELAGFIWDMGRIAMSVAQQPQCHK

SEQ ID NO: 296258 - protein, 358 aa, unidentified
MNRKTGMNAGQILGTLDGLQVVGLDIAKLVFQMHTVDMATGEIVNVQIKRAKVLEHFANRAPCLVGIEACGGAHHWARELSALGHTVRLLHAKAVRPFVSGNKTDAADARAIWLAVQQPGTKCVGVKSLAQQATLTLHRQRELLMKMRTMQTNALRGLLYEFGATFAKGSRALLGEVEAALESLSNKLPQMVADSLREQVQRIKALGEDIAAIEKRLVLQLRQNADMQRIAEIPGVGLLTATAAIATMGDPRAFASAREFCAWLGLVPKQWGTGGKVRLQGISKRGDSYLRTLLIHGARSVLHHAKEPGQWLEQIQARRPANVVIVAQAAKMARTIWAVTARQQEYQRGYRSVRPQAA

SEQ ID NO: 296259 - protein, 337 aa, unidentified
MEQYVGLDVSQETTSIAVRQDGRRVWRGKCPTDPKALSEVIRKHAPHAVRVVFETGALATWLYHALQAENLPVVCIDARHAKAALDMAPNKTDANDADGLAQIAEIGFYREVRVKGYGPMLTRTLVGARSQLLRISVQLSNQIRGIMKTFGLIVPKGAGRIFERNARALLETNEAVARVVLPLLETWRVVRARAAELDRQLIAAARTGPSYRLLMTIPGVGAITAVSFVAAIGVPENFKRSRAVGAWLGLTTRRYQSGETDYDGHISRRGDRYLRALVYEAAVAVLTRTRTDCALRSWGLKLKAKVGFKRAAIAVARKLSVIMHTMLKTGAAFAAAA

SEQ ID NO: 296260 - protein, 312 aa, unidentified
MKNICGVDISKARLDACIEPGSIRGSFKNDATGIAELVALCQQHRVELVAMEATAGYERRAFLQLWEQGLPCAVTNARHVRLYAEAMGVLEKTDAIDAHIIARFTQAKNLRPTPLPSLTQQRLKALVARLRQLTDDLTVQKQRRSSLLDNAEMLASIDEVIALLKRQSRTLEGEIGSMIDDDPLWARLSDTFRSIKGVADRTVAWLMADLPEIGTYSNKAIAKLVGVAPIANDSGKRRGKRPVRGGRAGVRSILFLVAAIAARYDQSLREFRNRLVAAGKEKMVVRIALARKLLVRLNAKARDTRAQYAYAT

SEQ ID NO: 296261 - protein, 359 aa, unidentified
MRMASGSMPQGGTGVTIGVDTHGEVHVVAAFTSDLGRPLGHLEIPTTPAGYRRLLEWARGFGTDLRFGIEGTGSYGAGLARFLSDAGCSVIEVNRPNRQTRHARGKSDPVDAEAAARAVLSGEATGIAKADQERVGMIRALRVARRSAVKTTTEIANQLRALIVAAPTELREQLRELSRDQLIAAAAAMRPGPIITPTAAVKLALKGLAQRHQLLTDEIRVLDGELDRLTAEAAPKLRALRGVGTDVAGALLVAAGDNPERLRSEAAFARLCGVAPLPASSGKTTGHHRLSRGGDRQANNALWRIVMVRLAWHQPTKDYMARRTREGLSKRDVVRCLKRYVAREIYRVLVPAVELATAA

SEQ ID NO: 296262 - protein, 334 aa, unidentified
MENIALIGIDLGKNSFHIHCQDRRGKAVYRKKFTRSKLIEFLATCPATTIAMEACGGSHFMARKQEELGHFPKLISPQFVRPFVKSNKNDFVDAEAICEAASRPSMRFVQPRTESQQAMRALHRVRESLVQDKVKTTNQMHAFLLEFGISVPRGSAVISRLSTILEDNNLPLYLSQLLLKLQQHYHYLVEQIKELESQLKRKLDEDEVGQCLLSIPCVGTLTASTISTEIGDGKQYASSRDFAAATGLVPRQYSTGGRTTLLGISKRGNKKIRTLLVQCARVFIQKLEHQSGRLADWVRELLCRKSNFVVTCALANKLARIAWALTTRQQTYEA

SEQ ID NO: 296263 - protein, 315 aa, unidentified
MVNTPCFIGIDVAKAQWDIAIRPSGERWAVPNDASGVTLLVDRVQALHPTLIVLEATGGLERAATAALATAGLPVVVVNPRQARDFARATGQLAKTDALDARALAHFADVIRPTPRPLPDAQTQELRALLGRRQPLIGRRTAEQNRLAGTSGRLTQDIKAHIAWLNTRIATLDDDLETMLWASPLWRENDDLLQSVAGIGPVCARTFLLELPELGTLTRQQIAALVGVAPLNCDSGTLRGRRTIWGGRAHVRTVWYMGTLVATRFKPQIKAFYQRLLAAGKIKKVALTACMHKLLTMLNAMLKHRTSWQAQEIQN

SEQ ID NO: 296264 - protein, 343 aa, unidentified
MKVMTIGIDLAKNVIVVHGADERAKTVLKKQLKRDQVASFFANLPPCLIGMEACGSAHHWARKLQSFGHTVKLMAPQFVKPYVKTNKNDAADAEAICEAVSRPNMRFVPTKNGEQQAVLALHRARQGFVKARTAHANQIRGLLSEYGIVIPQGIGHIAKRLPDILEDGENNLPGPFRQLLNRLGEHLKELDRQVGELEVQIQRGHRENEASKKLAKIPGIGPITASALVASIGDAKSFDNGRQLAAWLGLVPRQHSSGGKPTLLGISKRGDSYLRTLLIHGARAVIRVVERKADGPDAWLRGLLGRRNKNVAAVALANKNARTAWALLAHERDYQPGYEPAVV

SEQ ID NO: 296265 - protein, 444 aa, unidentified
MTRRCFGLDVHREFAQVAIWQDGSVRQAGQIPATPEGLRRFADSLGPSDEVALEATCNTHAIAKLLEGRVARVVISNPQKTRAIAEAKVKTDKVDAAVLAELLACDYLPSVWLADDATHALRRQVARRAHIVRQRTRLKNQVQAILHRNLIARCPAADLFGHKGRRWLAAQDLPADERLAVAALLRQLDFHGHELRVIDAELGRVALASVEVKRLMTIPGVDATVALSIVAAVGDFARFGTPEKLVSYLGLNPRVKQSGGQPAAHGRITKQGRAHARGMLVEAAWAASKTPGPLRAFYQRVRARRGMQVAVVATARKLAVLCWHLVTKGQDYAFARPSLTAQKLRRLELKAGLPSKRGQKGKAAGYSLKEVRARENALNEQAERAYAQMVADWQAKAPATKTVGVAAANGARLSRPSDRATAARQASAPEPALRSGVDHAHSAA

SEQ ID NO: 296266 - protein, 351 aa, unidentified
MVIVGTDVHKRTHTFVAVNEAGAKLGEKVVPATTAGHHTALQWARSQFGQDLLWGVEDCRNLSARLERDLLSAGQRVVRVAPKLMAQTRACARTRGKSDPIDALAVAHAVLRYPDLPVAAHDAVSRELKLLVDRREDLVAQRTSTINRLLGRIHELDPARTPKRGALDRAKTRAELGNWLDTLHGLLAELARDELDDITRLTDTVNALAARIGQHVHDVAPELLALQGCGELTAAKLVGETAGVKRFKNEAAFARHSGTAPIPVWSGNTAGRVRLTRSGNRQLNAALYRIALTQIRIANSPGQLYYRKRLAHGDSSTEALRCLKRRLARTVYHRLHTDEQARLNDPHPAAA

SEQ ID NO: 296267 - protein, 335 aa, unidentified
MGPTHRPAPAAWVGIDVSQHTLDACYLPAPDARPRAASFANDAAGHDTLRAWADALAPDTLVGFCLESTGAYGEALALALRDAGRHVAVVNPARVKYAGLMRGQGNKTDTADARLIAEYATRERPPAWSPPRPEVRELQALTRRRDDLRALAAREKTRLAGPGLTAAERKSVRRTAAFLGREADRLERQADDLIAASLALRADRELLESIPGVGAATAQALLAELPEPARFATAQQAAAFAGLAPREYSSGTSVKKRTRLSKAGNARLRKALYLPALTALRFNPLLKALFDRLVAAGKAKMAAVGAVMRKLLMIAYGVLKNRAPFDPNWGSKMVS

SEQ ID NO: 296268 - protein, 343 aa, unidentified
MSVVRIGLDLAKHVFEVHGVDARDQTVLRKTLRREGVAGFFAELPPCVVGMEASNGAHYWAQVLADLGHEVRLISPQFVTPYVKSNKNDRNDAEAICEAVGRPSMRFVPPKTPEQLTIQAVHRIRQRLVSDRTRLVNQIRGLLAEHGVVIARDINRLRHALGRIADGAETDLNDMIRDLACDIREELDELDQRIATYNRRIRVLFRSNEACQRIGQIEGIGPVTATALVAAVGDRSCFRNGRQFAAWLGLVPRQRSSGGKSRLFGISKRGDRYLRTLMIHGARAVLGKAHGKDDPRSQWIGRMRERRHPNVVAVALANKNARIVWAVLSRGDTYNQAEGAPTS

SEQ ID NO: 296269 - protein, 433 aa, unidentified
MDIVHPRVAGIDVHKKVVWVAVRVPGEAPGERKVVTKRFKTFWRPLTKMAAWLAELGVTDAAMESTGVYWWPVYHALAGAGIEVCVCNAAHMRNVPGRKRDIADCQWIAELHEHGLLRPSFIPAAEVAALRARTRYRKRLIEARTAEGQRLAKVLEDAGIKIDSVASRLLGKSGREMIQALIAGERNPEQLADLAKGVLRRKTDDLQMACDGRFTDSHAQMCRLHLDAYDHLTAKIAELDALVAEAAAPFAAVIARLITIPGVGQRTAEVIVAETGGDMTRFATSARLAAWAGLAPGDNESAGKRRHAAARQGNRHLRAAMTEAAWATARTRTRPGARFRRLARRFGKDHEKKAATAVAHTLICIAWAVMAHGQDYADAGEDYYDQRDQRNREHLIRHHQQALARLGCQVSLIPPGDGSPPPGTASPHPGQAA

SEQ ID NO: 296270 - protein, 453 aa, unidentified
MGKAAGKVRSLSLDCIEANAAGMDVGATEIYVAVPPDRDGEPVRHFKTFTSDLREMASWLLQCGITTVAMESTGVYWIPPYEVLEEAGMRVCLVNSQHVRHVPGRKSDVSDCQWLQYLHSVGLLKPSFRPDAAICALRSLSRHRSSLVESAAVHIQHMQKALTQMNLQIHHVLSDITGISGMAIIDAIVAGQRDPGQLASLCHAKVHSDRQTVIKSLTGNYRTEHLFTLKQSLAAYRNYQLLLAECDQEIQRLTGTMAGKMESDRPAPQQNRRKRRKNQFHFDMASELHRLFGVDLTAVPGINELTAHALLSEVGPDLSCFPSAAAFANWLTLCPGTKKSGGRVLSSKTRPTNSRLSHALRVAAQTLARSRSHLGNFYRSMRARLAAPKAITATAHKLARILYHLLTTGSPYDETVFDREQQKQNLRLHKRLAKQAKLLGLQLVPINAGESCS

SEQ ID NO: 296271 - protein, 461 aa, unidentified
MRRKTKRKAKAKTTLPEGLETINLNAAGIDIGSTEHYVAVPPGGSSEPVRSFGSYTAALYEMARWLKECGITSVAMESTGSYWIAPYQVLEASGFEVILVNSRHVKNLPGRKTDVLDCQWLQKLHTHGLLSGSFRPVNKVCVLRSYLRHRENLVHAASAHIQHMQKALTEMNLSLHHVLSDLTGLSAMMIIRAILAGERDPWKLAGMKDRRVKKSQEQIARCLEGDYRDEHLFALTQALELYEFYQTKIAQCDLQIEKQLHTFKAQVDPKKNPLPENPKKKSLKAQSNFELKTHLYAICGTDLTRIDGIDVMSAQSLISEIGLDMSRWKSEKHFTSWLNLCPSNRISGGKPLTRQPRKGHNRAADILRLCAQSAIKSSSAIGAFGRRLKARLDAPTAVKAVAHKLARIVYRMLKYGRQYRDAGERYYEEKYRDHLLRRLQKQAAAFGFQLTPQQPIMDPVS

SEQ ID NO: 296272 - protein, 382 aa, unidentified
MSTAPIPASFLGIDIAKATFEACVLTGKKSAHGSFSNDWAGYAKLDRWLKKRKVEQLHACLEATGRYSEGVAEHLHAAKHTVSVINPARLKAYGETTLTRTKTDQTDAALLADFCRSQQPAAWTPPAPEQRALRALVRRRESLLQLRQQEANRLSSGEDSSAVRGSLEAVMAFLDEQIAWVEQAITQQVASDPKLKRQSELLDSITGIGPTTAAALLAEIDFGIYTSARQVAAHAGLTPRLRQSGTSVHGRPRISKQGASQLRRILFFPAISAMHHNAILRPFAQRLADRGKAKMAIVCACMRRLLHLAYGVLKSDLPFDPEYLSKRAKSTQPDQAAKPAQAAEPAKPAQSPKSSKATKAGKATKPGKPTKPTKPAKELQHA

SEQ ID NO: 296273 - protein, 448 aa, unidentified
MEPQEIDDEEHEQVLERVAAVDVAKASGMVCTRVPHQSRPGKRRTRVWPVDATTNAVLELADHLVAEGVEKVTLESTSDYWRIWFYLLESAGLDVQLVRAQDVKQAPGRPKSDKLDAVWLAKLTERGMLRPSFVPPAEIRRLRDYTRLRADLTCERTRHYSRLEKLLEDALIKVSAVASSLAAKSVRDMLEALIGGERDPKILASLARGRMRAKHDRLVQALAGRFDDHHGELARLLLDQIDTLSAQIGRLTTRIEELIAAIPPAQGIDADGTTGPAAGHGKNAPVLPAVDRLDEVTGIGRGGAQAIIAEIGLHMSVFPTAAHLVSWAKISPQTIQSGTRSRAGHTGKGNPYLRGLLGEAAAAAGKTDTFLGERYRRLVKRRGKLKALVAIARSILVIVWHLLDDPAARYHDLGAGYYASRVDKNRKMRNHVRQLEALGYTVTLTQAA

SEQ ID NO: 296274 - protein, 343 aa, unidentified
MQIRSVGIDLGKTTFHLVALGDNGKVLLKKKFAQKQLIAFTANMQTCLIGMEACSGSHFLGRALRDQGHDVKLIPAQFVKPFVKSNKNDFIDAEAIAEAVDRENMRFVPIKTDDQLDLQALHRVRDRLMARRTSLINQIRAFLLERGIVFAKSPIRLREALPEVLENVNENLTPRMRNLVAMLWSEWKDLELQIVQMNDEVERIASSDAACRRLRQIPGIGPLVATAIVASIGNGAAFRKGREFAAWMGLLPKQHSTGGKARLYGISKRGNSYLRKILIHGARAVVLRSKRDRIAMGAWMTSLETRAPRNVLIVATAHKLARIAWAVLSSGQDYRAVPEALTV

SEQ ID NO: 296275 - protein, 310 aa, unidentified
MAAVVVGIDVSKDHLDVHVRPGGTSFRVSRDGAGLQELLMQLEPLAPSVVALEATGGFETVVAASLGTAGLPVIIVNPVQVRAFARALGKRAKTDPIDAAVIAHFAEATNPEVRALPDEATRLLSDLLARRRQIVQMIVAERQRARVLTAPRLQKSIARLLKALQQELNALDKEIDDSVRGTPVWREKEDLLRSVPGVGPTIARTLLAEMPELGTLDRREVASLAGLAPFTRQSGQWHGKSFIGGGRSRVRAMLYMGALVAVRYNPALRTFYDHLLAAGKPKMVALVAVARKLLTILNAILRDQKPWLPA

SEQ ID NO: 296276 - protein, 539 aa, unidentified
MELGFPPSPLWRIQMPYQVKANRRRQSKSKPLPRLSLQKANGVISPRVQKVGGERFAIVCVDPAKHRSEWMMADYFGNLFIEPQTVEHQASSFKLAIDLIRQTKQQHNIQDMIVVVERTGNYYLPPKRAFASGGFETRVVHPFATKQYRMPADPGNKTDETDLYAQHRAAVAGFGLCEYELEPPYRELQLRERHRRNLVEKAAAIACQIREHLHLAMPGYANLFDRLFERQTPLAIASQCDSPAKLLQLGQTKLSRYLQKRKIRHQVRTIDKALAWAAQVANNPLQDGPMHHAIWTDLYELYQHFRQQIFALESLLASDLVQTPYVRLLAISGINVVSAADLAGEMGPISCYANANAITGRAGLYPSRHQSDQTDHDSGSIIRHANRRLRCVLMRIADNLACHCNYYRGQADADLARGIDKRASRVKIANRFSRLILACVGGDQPMRHPCFQKPDSILEKLREFHYLHETPLDRVLADLETTVEQLPYNTCGREAAIVAKVLEKHTPRHRGGVAIGELLPAVLARLNIRTTEDENRDRS

SEQ ID NO: 296277 - protein, 339 aa, unidentified
MFYSGIDQHKRDCFITTYGPDGAIVKQARVPNAPLPLQRYFGQFQGPHKAVVESTGSWYWLADLLGDLHVDLCLAHATRLKAISAAKVKTDKVDSDVLALLLRADLIPEAHMISPGQRGPRDLMRARLRLVEKCASAKNSIERLLEKFNIACLAELDEAYRLQAACHEAQIALLADQITTIERALHPHLIPNDDIQRLLWIPGIGKVNAFTIYTEIDGITRFPSAKQFFSYCRLVPGADNSAGRTRHRSGSKAGNRYLKLAFSHAGIRAVQYNPEIRAFFKAKARKKPIRVARTLVALELARIVYHVLTNNEDFNGQFKGRALSHRKLAQWPRRASPPA

SEQ ID NO: 296278 - protein, 370 aa, unidentified
MSIKRILVNTIDTDLEYEVIGIDLAKNCVSAILLTTDGEIFGIDRLDYQELEKSAQELSPTIFAMEPCTEMNYMVQKLEDWGHHCIVISGKNVKDYVESHFLNQKTDLNDAQALAFLTKDTQLRTVKAKDPEQLKYASLTTLREQYVKQYRQTMVSLKGICQVWGLSISKGISGKARLKDMIENHAAFPAELRTALVGMVAHAQAVQKDLKSVTKILEELAKKDKACQLIQTVPGLGTICSCRLRATVGDIQRFKHPKDFPAYYGLVPRSMATGHNEKKGKITHRGDKTMRSLMVQGAGIVINQATKGNLHSKQLTKWILKKQKEKMPWGKLVCAVAAKLLRIVRAILISGKPYNPKIAGVAKCSLPKAS

SEQ ID NO: 296279 - protein, 414 aa, unidentified
MEVVYRHCAGLDVHKKVVVAAIIVLDALGKLYRETRSFGTMTGDLLELSDWLLSLGVTHVAMESTGEYWKPVYNILENNFELLLINAQHIKAVPGRKTDVNDAEWIAELLRHGLLRASFVPPLGQRELRELTRYRSTFVRERATLVNRVQKVLESANIKLASVATDVMGVSGRAMLEGIVGGQATPEEMAELAKGRMREKRAELAKALSGRVKPHHRFVLTELLCQIDNLDEAVEHFNAQIEEYCRPFEQAVTLLDTIPGVGPETAQVIVAEIGVDMSRFPSANHLAAWAGVAPGNYESAGKRKSGRMRQGNKALKTALTQAAHAAARTKDTYLAAQAQHLTGRRGKKRAIMAVAHSILVIAYHLIQRQEPYRELGGNYFDQLRPEATAKRLVKRLERLGYQVSLQSQVAAVAA

SEQ ID NO: 296280 - protein, 417 aa, unidentified
MSNPLIVGIDVHSRTNRTCLLDREGEPLGQRFSTANNRPGTETLIARLEEALQQGQFDSLRVAVEATNWYWFPLYQALSQAPELALWPQTFYTFNPRVTARYKDSFSDKDKSDDVDAYVVADRLRTYSRQELPAPFVPDLRYLGLRFLTRYRYHLVKDLVREKNYCLSLLYLKANEYREAHPFADVFGATSRAVIAECASLEAVAAMPLAELAVWLDAKGKGRFPDPAKVARELQRVAQDSYPLDPQLQEPINYVLTWSFQHVNCLERQVQRVNTAVADTMRDIPHTLDTIPGFGPVYSGGIIAEIGHAERFDQDEAKVAQYAGLHWRQHQSADFKAEDTRLTKRGNAYLRYYFCEAANAVRMRDAEYAAYYQRKHDEVRTHQHKRAVALTARKLVRLVVRLLTTNQPYQPRRQPSG

SEQ ID NO: 296281 - protein, 365 aa, unidentified
MQKITTVRRGARNVFKGQLTIGLDLGDRSSSYCVLDEAGEILLEQKLPTTPEAMKQTFGRMLRSRIAMETGTHSPWVSRVLTELGHEVIVAHAQKVRLIVKSRRKDDRLDARTLARLARIDPELLTPVQHRSAQAQLHLAEIRARAGLVSARTALVNAARGLVKSYGERLRKCGTQQVRREITVGLSPGLRGALEPLLREVESLNERIQEYDRRIEKMAKETYPETALLKQVKGVGDLIALAYVLTLEDPHRFRKSRDAGCFVGLQPGRRNSGESEPQMHISKEGDEYLRTLLVQGAHYILGPFGEDSDLRRWGKKLATRGGKNAKKRAVVAVARKLAVLLHRLWVSGEVYEPLRNSQKAMTVAA

SEQ ID NO: 296282 - protein, 412 aa, unidentified
MKDLLEISCGLDVHKEKIVACILTGPLGKPTRSEIREFSTLIPDMIALRNWIVSKNCHHVAMESTGIYWMPIYEILEDAFSGDITLLVVNARHMKNVPGKKTDMRNSEWISTLLRAGLLNGSFIPEKRIREFRDLNRYRKSVIRDITSQKNRIEKFLQSSGFRLSSFISDIFGASGRNIILHLIEHGQIDKTALDSCLKTKTRNRIDEILMSVNGTLSEHQKAFLRILMTHYDSLKKHLAEIETSLEEDMAPFALQVEQLNSIYGISTTASCAIIAEIGIDMKPFKTAEHICSWAGLCPGNNESAGKRKSTSVTKGNPYIKSMLCEIAWVIAGKRNTYLSAWYWRIKQKKGAKKAIVALARKLLVIIYTMLKQGTLFDESCFETRRKHCEQKQLSRYIRELEKHGYHVEAQS

SEQ ID NO: 296283 - protein, 411 aa, unidentified
MQVIFERCCGLDVHKRTITACRLRWMGSEWEKEIRQFGTMTKELLGLMDWLVSEGCTHVAMESTGVYWKPVYNILEGQFELLVVNAQHLKAVPGRKTDVRDAEWIAELLAHGLLRGSFVPPPHVRELRELTRYRTSLIRDRARTMNRLQKVLEAANIKLANVVSDIDGVSARLMLERLVAGERDTEDLASLAKGRLKEKHAQQVEALSCRLQPHQSFLIAEHLAQIDYLEGAVERLSQQIEEKLRPFEQQIGWLDTVPGVNRRTAEVLLAETGGDMSRFASARHLTSWAGMCPGNNESAGKRLSGRTRKGSPWLRHCLVEAAHGAAHTKNKYLSSQYHRLAARRGKKKALMAVGHSILVITYHLLTRQQAYRDLGANYFDERDRQAVTKRCVNRLQKLGYQISLDKLQLAA

SEQ ID NO: 296284 - protein, 447 aa, unidentified
MEEAVAVRKRELAVLFPNAAGIDIGSAKHYVAVPPERCEQSVREFESFTADLASMAEWLASCAIDTVVMESTGVYWIPVYELLESRGFTVYLVNARHVKNVSGKKSDVLDCQWLQQLMSFGLLAGAFRPDGQVCALRALVRQRETLIAGQAQQIQRMQKALTQMNVQLVHVISDIAGKTGQDIVRAIVAGERDAGKLAQLRNYRVHASEEQIARSLLGNWREEHLFCLAQALRLFDTHQQLIDEADAKIEALLAHLQRHALGAIKPDKNKGRAKHAPRFDVRAALVRWAGVDLTRIGGIDVCTALKVLAELGTDLSKFKSAKHFASWLGLCPGTRITGGKRISGATKRVANRVAQALKLAAHGLHRSQCALGAYYRRMAARLGAGKAITATAHKLARLVYAILTRGEEFIERTQDHYEDQVRSRTIRYLQKKAASLGFNLLPNAVCP

SEQ ID NO: 296285 - protein, 356 aa, unidentified
MNKRSKLDFSGQPIYIGLDVHKKSWSVSIFTQSGEYKTFRQLPEAETLSQYLQHHFPGAQYRSVYEAGYGGFWIHDQLRDKGIQNIVANPADIPTRDKERKNKRDRVDCRKLARALRGEEIEGIYTPPRWKWEDRSLVRTRLSMGRKQTRCKNQIKSMLLFYGVGIPEQREMGHWSRRFIRWIEEIRMERASGDMALQSHVEELCHLRQLIAKLNRAIVALARTEQYRLWISLLKTVPGISTLTAMIVLTELHEITRLGSIDPLCSYVGLIPDTQGSGEKEHVGGVTQRRHSQLRGLLIEASWIAVRKDPVMMEAFQQYCKRMRKTQAIIRIARKLLNRIRYVLKNQAEYVTGVIE

SEQ ID NO: 296286 - protein, 509 aa, unidentified
MPKTSSSTHLNLSDLIHNPSSVVEDFNEFPDGSEDEYVKEYGIGIDCHSKFIEVCVRYRCGKMIYKAQSTFTTEWDNLVAARDWCFSVLKSKTDPVPDLSEPLHYLVESTANYHMPVCMAFGGNPTIINPTIAGATKRKTDVLDSRLLALHDQLNIWREFYMPDENIKTLRVMIAQRDRCIHDATAAGNRINNIITRFGFTVGRSGSVVKNPAIRAIVEDQISDHPSVIEGLCPVTIPMDVRIVLREEYAKYDFFTEQAEECRSKIFEKACSMEWETDTGTLPGTEMIRILSTAPQIGELTAIIWLARIVTPRRFRNAKALSAYCGLDPSLKISAGKVTSTVMRSGNKSLHRALNMSAHRLIHRHNEMFGIWGYNLQQQTGKKKKAANAVARKLSVAMYYMMKTGTEFTYDHYHSIRNIDVFDIPVEDLVLLNSDFKRYIRILKENNINTTVDLATAYITCSLGSCQGLGKKFFGLLKDFLDHHVTYKEMYDEIQEKLNRKEDNVNEQT

SEQ ID NO: 296287 - protein, 350 aa, unidentified
MDHIGIDVHKRESQIYILAEGGEVIERRIRTEPERFGAVLGTRPRARIVIEASTDSEWVARCLEALGHEVIVADPNFAPMYATRTRKVKTDRRDARALAEACLLGAYRPAHRLSDPQRHVRGRLVVRDALVQTRTRYISVIRALLRQHGYRVPSGSAENFVHRVQGLPLPGRLRSVVAPLLALMRPLNGQLAYSDATIEHLAVQDPRVPRLSVPSIGPVTAAAFLAAIDDAQRFRHAHQLEAYLGLVPGEYGSGETQRRGAITKAGHSRTRWLLIQAAVSILRRRPPQAEDLRTWALRIAARRGKQVAVVALARRLAGILYALLRDGTVFEPQRGRQPRRPAAAAAPGGR

SEQ ID NO: 296288 - protein, 385 aa, unidentified
MSAHPTQIQAAAQLQANTLFASLELSKARWLVTVSAPGSDKLSRHQVPGGDGQALLELLWRLQAAAARRTGAPVMIIVIQEAGLDGFWIHRLLVQNGITSHVVDPASIAVNRRHRRAKTDKIDGVKLLRTLMAWMRGERQVCTMVQPPSPEDEDRRRLARERARLLKERIQHTNRIKGLLSGQGIPDYDPLHRDRRRCLAALTTGDGRPLPERLKAEIGRELDRLEMVVSQLTVVERERDALVARTAEADACAAPAALARLRGIGPELAALLWLEALFRRFDNRRQIAAYAGLTPSPWQSGGIDREQGIAKSGNPRLRRAMIELAWFWVRHQPGSALSRWFVERVGTARGRVRRIAIVALARKLLVALWRYVTQGVVPQGAVLKA

SEQ ID NO: 296289 - protein, 342 aa, unidentified
MNGDYDGRQYVGIDLHRRRSVIVRMTEQGEQLGWVRIDNDPVALGLELAKAGPDPEVVLEATYGWYWAVDALQTAGAHVHLAHPLGVKGFAYRRVKNDVRDAADLADLLRMHRLPEAYIATPQERELRELVRHRAKLVALRSGLKAQVHATLAKQGRLPAASDVFGRAGMAWLRSAPLELVYRQRIDSLLELIDAYDGEIETFRTMIANRFTGHRGYRAIQQLSGIGPTFAAVFVAEIGDINRFSRPEKLCCWAGLTPRHRESDTTVHRGPITKQGSKLVRWAAIEACQHTRAGTKLSADRSRIIAARGRNIGIVAAARRLLTLVFYGLRDGEIRALAARAG

SEQ ID NO: 296290 - protein, 475 aa, unidentified
MKIGRRLGVTNPSTSLVSFSNEQVHVTEITNSRLHISRNLLPLPRKEGKEKMHSRVKIACGLDVHRSKIVGSIVTAEGTQETRTFTTNIDDTLALKDWILTHECERVAMEATGIYWYPVYNLLEDHVTIQVANPFYVKGIPGRKTDQLDAEWIATLSLNGLVKPSFVPGLQIRNRRDLVRTLNRLVQIRSRHKNRVHKVMVRAGIRIGAHLSDLFGPTGLRILHGLLEGESIDMILKDQKNARIARKRDELAASICGTLNENDIYLIRLELDAIRFINRQIDEIKQRISHLMSPLKDDLTLLMTIPGIGYDSAVNILAEIGDARQFPSGKHLVSWAGLAPGLNESAGQQTPGHITKAGSKSLRTFLIEPAHAIALMKQNNRLKRFFSRMHSNLGYKPAIIALARKLLMLIHHLLVNHEPYFEENLSMKKRVKIIPPSFSSMTPDQILNLISVAVAELSGIDRAEFVRKLNRIGTT

SEQ ID NO: 296291 - protein, 371 aa, unidentified
MEHTRFIGLDIHKERISIAVAESGRTGAVEYLGEVANDPGAISKLCDRLGRPGRPLAFCYEAGPCGYGVYRQLTSLGHRCDVVAPSLIPMKPGDRVKTDRRDATMLARLHRAGELTPVWVPDADHEAMRDLIRLRSVVRQIVTRTRQHLQGFLLRHGRKHGQGTAWRMAYRRWLSTLAFQHPAQQIAFQDYVDAVMDAERRLQRVEEQISCLLPEWNLCPVVDAVQAMRGIALINAVVLVAEVGDFTRFSNPRQLMAYFGLVPGEHSSGETIRHTGITKTGNSHARRALVEGAWAYRMKPRIGRHKVDRIEALPKIIRDIGWKAQVRLCARYRRLSARGKNANVVNIAIAREMVGFIWSIACTIQSAPRTA

SEQ ID NO: 296292 - protein, 340 aa, unidentified
MDKVTTIAVDIAKRVFSIYWVDAQTGEIESRTMTRAKFEEFMRTRTASRVVLEAGGSAHHWGRWLQAQGHRACLIAAQHVRPFVRTNKTDGADARAIWEAAQRPEVQWVAVKSAASQAVLALHRMRRQLSDMRRMQSNQLKALVYEFGVVTPLKTTAAHLQAWLASGQVPPLLAASLNQQLQRIAQLKRQEVELTRAIEQHNHDDALALRLLAVPGIGTLTASALSAELTAGAASYASGRQYATCKGVTPRLSGTGGKVRTGAISKRGDPYVRTLLIHGARSVITHQRRAQRLSPWLVQLLARRPLNVAVVALANKMARTAWALAAHQRTYQSNYGAAAA

SEQ ID NO: 296293 - protein, 317 aa, unidentified
MTYTSRFIGIDISKSSFDICVLPDMHSASFSNDAGGIARFIAFLAQLDGIERLVVEPTGGYERSVVHTLLAARLPVAKVNARQIRQFARACGQLSKTDRIDAFVLADYARRMETKDLAPSSPAQVVLIDLVSRYRQLSHMIVQEKNRLEKLGARADATARAWIEETLSFLLQQRQSVVDAMEACLQSDEDLAVKAKVLMSLKGIGLRTACLLIAGLPELGLLNKGQIAKLVGVAPINRNSGLMRGKRMIAGGRKPVRDALYIAALPAIRFDPAMKAVFERLKAKGKPGKVALVAVMRRMIIILNAKMRDYRATVIDA

SEQ ID NO: 296294 - protein, 345 aa, unidentified
MELHTIGIDLGKTVFHRVGVNLRGDVVVRKKFSRKQLLHFTANLRVKLIGMEACGGAHFLGRALQEQGHEVRLMPAQYVKPYVKTNKSDYIDAEAIAEAVGRPRMRFVPIKTDDQLDLQSLHRVRERWVARRTAVINQIRGLLLERGITLRKGRCHVDAALPGILEDASAKLSGALRVLLAQLRLELAHLETRINEADAVINKTAGENEACRRLVAIPGIGPVTATAIVAAIGNGAAFRKGREFAAWLGVVPREYSTGGKQKLLGISKRGNSYLRRLFVQGARAVLQQSAKQSSGLSAWLAQLTSRTHRNVAGVALANKLARMAWAVLAKNEKYRPPMLAGAATA

SEQ ID NO: 296295 - protein, 369 aa, unidentified
MTDNTLFVGMDVHKKTISVALAEAQAGAEVRFYGTIPNTPDSIRSLYKKLTKDGQALHICYEAGPCGYGVQRQATKLGHRCDVVAPALIPRKIGDKVKTDRRDAMMLAQTLRAGQLTAVWVPDEAHEAMRDLVRLRAQAMRDLRKTRQHLLSFLLRHGLVSEYGHWTLAHRRWLAALTFAHPAQHLAHEEMLQRIERAEALCERLKKAITDLVPQWSLAPVVLAIQALRGVSLIVAAVIVAEVGCFSRFDSPRQLMAYLGLNPSEHSSGATVRRGGITKTGNALARTCLVEAAWTYRFPARVTQIIRDRLKNLPEPIRNIAWKAQVRLSARYRKLAAAGKPLPKVVVAIARELVGFIWAIARMVEPKFA

SEQ ID NO: 296296 - protein, 463 aa, unidentified
MQEKRNKEVERHRGQLQGLPVIRCLVAGIDLGSEQHWVCAPTSDGSGREIADFGATTPELIRMAEWLKQRQVESVAMESTGVYWIAPHEVLEAQGLEVLLVDTRQLARVPGRDKKTDPTDCEWIQRLHSCGLLRGSFRPQEQICMLRTLVRDKASLVAESADWLRRMQKSLDQMNVRVHRAVSDLEGATGMAILRAIAAGERDARKLAQLRDRRCRQSEEQIAEQLSGHWREDHLFSLQQALKMYDAIHERIAAYEKEILGRLHQMERPDQPGQTAPPLGNANKAQKIKKHGQEAKRQALYRMSGVDATQIDAIGVDTVEVVISEYGLDLSRFPTEKQFVSHATLAPHVPKSGGKPLKKRKHNSASTRVAAALRMAALSLRHSDTALGAYYRNIAKRIGGDVAVFATARKLATLIYRLLRWGQPYVDEGAQAYENRYRQLRLQNLTARVNALGYKLTPINAGA

SEQ ID NO: 296297 - protein, 396 aa, unidentified
MLILAIDLGKFNSMACFFDTTKQKPVFQNTPTTRNAITTLLKLHHVDLVVMEACGPSGWISDVCHELSVKTLVCSTNEEAWQWKNVKRKTDKDDALRLARMTMMRDLKGVHIPKPEIREQRTLIKYRKTLDQRINRIKNAIRSLFANRGIEIDSGKRAWCLGRQLIDSYRKSLADCQLNELWKGQLDLELTQLDDLTEKLKTVEQRLELLAKANPHTQRLLQIPGVGRKTAEALVAAIDDPHRFKSGRQLSAYLGLVPKQYQSGQIDRNGRISKRGPRMLRSILLECAWCSTRYNEWAKQTFARIHGGQATRKKKAGIALARKIAVVAWAMMRDESDWDSKKLLPDLDPDQVKIKVKRPEVRPAGELHAGKPKQPCAPSRRKKPRAGSRRVSPVKT

SEQ ID NO: 296298 - protein, 323 aa, unidentified
MTRIICGVDVASQSLEARIGQHGPAATFANNPQGIHALAAFCHAHQAELVAMEATGGYEQQAFAQLSQQNLPVAIVNPRAVRQFAQSMGSLEKTDAIDAAMIAWYAETKNSQPLCLAPHTQLELRARVTRLRQLTELRTAQLNQQRLVTNRAVADGFRQMLAFLAAQMEELEQTVAQLIAADPLWRELDQAFRTIKGVADRTVARIMAEMPEIGTLSNKTISKLAGVAPLANDSGKHQGKRSVRGGRAAVREILFIVASVVGRYEPDFIAFQQRLRAAGKPPKVVRIALAHKLLVRLNAKAREVRQRVTVVQLPPLALAAGSL

SEQ ID NO: 296299 - protein, 308 aa, unidentified
MTIHHNFIGCDIGKEAVDIFDPRTARFCRIPNTEAQLSAFAKRLDPAGDLVVLEATGHCDRLVRLCLAQAGIAFARVNPKTARRFAEARGRLAKTDRIDARSLSHMGAMFGLSADAPPCPVHERLAALARRRDQLVDARAGERRHLGEAFDPAVRADIEAMIAILGERIAAIESAIDEQMQSGNLAEGARRLASAPGVGKVTALALLAHMPELGTLSPKAAASLAGLAPFNDDSGKRAGRRRIKGGRPRVRKALYMAALGAIRASSRLRTFYLAVKARTGAAKAAIIAVARKLITILNAMQRDKTDFR

SEQ ID NO: 296300 - protein, 419 aa, unidentified
MSFKIIKNNCCGLDVHKTWIFACIGITDSNNRTEYKQARFSSFTKGLNELCDWLAKYNCKDVCMESTGKYWIPVFNILEQHNLWVTLSHPKYTKPMKGNKTDRKDAKWICDLYMCGMVKPSFIPSADIRELRDLVRYRYKLTCMITGEKNRAQNCLTVSNLKLDEVFSDVFGKSSRSITEQILQHPGEAFDVAHFVHGRCKTPIEEIQAAVDGAISKEQAVKLRQCLDHIDELNKHISEIEQEILRLSDKYETALNLIRTVPGFDKNPLTAVQVLSEIGGDMSVFPTAKHLVSWAGCCPRNDQSNQKIKSTRISRAGSYFKPVLVQVANALIKSKKHSEFTNRYKRIKARRGHKKAIIAICRMILTAIWHILSDLKPYTPEGFLESRPVKEEKVLSTSQALNLLKQRGYIIKDKPLAVF

SEQ ID NO: 296301 - protein, 424 aa, unidentified
MKVTYQTCCGVDVHKSFLVATIVKTTGGIEPSYQKKHFSTFNNSILEFKQWLLDNDCHDVCMESTGKYWVPVFNLLEDDINVVIANPKWVKAVKGNKDDTKDSKWIGDLFRLGLVKGSYIPCKKVRILREYTRYRYKLVSCRSSEKNRYQNALTVCNVALDSVVSDIFGKSSTSIIDYLLEQSGSSINHEEIASKLLRSLKSKEDAVIESVEGYQMTDAQKYRMRLVRAHMDYITAEINDVDKMIENMISSNTDFENAVQFLCTIPGVKRDSAITIISEIGTDMSQFSSSRRLCCWAGLTPGSNESAGKKKSVRITRAGVYLKPALVQCAHAAVKSDKSPYYKKKYESLVKRRGKKRAIIAIARMILTAIYQMLSTGEQWNPSDLYKIDMPVALVEKQKAKAIKQAKKLLQREGLLPPDEPLAS

SEQ ID NO: 296302 - protein, 344 aa, unidentified
MTYYTGIDVSLRSVSICVVDDKGEVCLEARVAAEIDAIVDRLRRFSSDVKSVGFEAGTLTQYLTYGLQAAGFEVICLEARQVSVTLSAMRNKTVRNDARGLAQILRTGWYSRVHVKSLHSHQVRALLASRKAILKKCVDLENELRGLLKVFGIRLPSRVGHGSFDAELRETVSTDEMLACALVPLLDARTVLYKTYLKLDNAVKGLVRVDPICRRLMSIPGVGPVTALTFKAAVDDPNRFKSSRTVAAHFGLTPRRFQSGELDNSGHISRAGDADVRSALYVAAHSLLTRNAQWSTLKAWGVRLAKTRGHRRAVIAVARKLAVVLHRMWIDGSEFRWGPEAAST

SEQ ID NO: 296303 - protein, 401 aa, unidentified
MKEFNPERHRIETASALEVVTSAGHQEHHAAYVGLDVHKEAIAVAVAEPGRAEPVYRGEIANKPKSIEKLIGKLSAAYDGALLQFCYEAGPCGYVLYRQILACGHDCQVVAPSRIPRTPGERIKTDRRDALKLARLLRAGDLTAVWVPDRDQEMMRDLSRARDDMKGQERKARQQLNAFVLRHGHHWPRGKSRWTPAHYNWLESLRFERPWQHVVLHEYIDAVKAASARVAQLSDHLMRALPEWSLAPVVDSLIALRGIDKLAATVLLAELGDISRFDSPRELMAFLGLVPSEHTSGPRRRQGGITLTGNGHARRMLVESAWSYRFPARQTMHLKRKAVNASELAKKIAWKAQVRLCGRYRTLTRAGKNTKVVCVAIARELAGFIWDIVRQQMARPAPQAA

SEQ ID NO: 296304 - protein, 412 aa, unidentified
MRVVHSVCAGMDVHKDDVKVCLVWRDSAGERCDEVRTFSTMTRPLMSMREWLESKECKVVAIESTGNYWKPIFNLLEGDFEVMLVNPGHLKYVEGFKTDAKDARWLAELLEHGLLRGSFIPPRDIRDLRDMTRYRRRLIQERTAEVNRVQKILEDANIKLACVATDIFGASGRAILNALLSGEMTPEEMAELSKGRLRSKREELAESLVGRFRPHHALLLSRMLEHIDFLDVAVEDCDTVIDGMLRPFVSKIERMDTVTGIGVRAAQDIIAEIGLDMSVYPSHKHLGSWAAMCPGNHESGGKRKSGKTRKGNKWLRTILVECAHAAGHSRNTYLGAQYGRFAARKGKQRAAVAVGHSILDAVYFILRDDVPYQELGPEHFDKINKDRIIRNYKKRLEALGLVVEISEAPVAA

SEQ ID NO: 296305 - protein, 421 aa, unidentified
MKPQALEAFAAFVGLDWADAKHDICLQPAGTERREFLVLEHRPEAIDAWVQTLRTRFNGQPVAVCLELNKGPIVSALRAYDFLVLFPVNPFTLAKYREAFTPSHAKDDPTDAELQVELLLKHRDKLTPLSPQSPTLRALAQLVEHRRRLVGDKVRLTNRLTSALKNYFPHVLQWFQEKDTGIFCDFLSHWPTLKAAQLARRTTLERFFRAHHVRSADVITTRIEAIKSAVALTTDEGVITPNTLLVQALVAQLRVTLQAIADFDTAIAQRAQDHPDFPLFDALPGAGAVFAPRLLVAFGEQRERYASAEELQKYAGIAPVTERSGKKAWVHWRLQCPTFLRQTFVEWAAESTRHSFWAQVYYQQQRDKGKAHQAAVRALAFKWIRILYRCWQDRTPYNESVYLNALNRRGSSLIQNLAKES

SEQ ID NO: 296306 - protein, 401 aa, unidentified
MDNIKMFYVGIDVSKDKSDICIKDEKGNDLIHRFEITNKKADLEMLYETVESIKRNIPGNSDVVFGMEATGIYSLPLYSALKRDGYKVKLYNPIQTNGYRKINIRKTKTDPIDSAIIAEMLRHSEAPQVSEIQDMHLFQLRELVRVRHRLIEKQALCKVQMVRNIDTIWPGYGGVIKRVFGAASLAILKKYSVPSKLRSESFEHFYELVKKKSRSKISRSKAEEIYANAGNVLTIPELDSVIAIEIKTLITQLELYDEQIQSVEGKIDQMMKLTDTKIMSIPGIVDILGPTILGEIGIIERFSNVKKLVAFAGLDPVVNQSGRFENKSGKISKRGSPLLRHALFLAANSAIQNDENLKRFYTKKRSEGKHHFSALNAVAAKLLRIVYWVLKNNKEYQIQLN

SEQ ID NO: 296307 - protein, 449 aa, unidentified
MHGAHIGGQRAAAFFKLVADLDPRRVLLVGIDVAKATWFVVVSDLTGAVVADGVRLVADRAGLAELERVIAELRWRLAAELVVVGIEAAGHQHQGLTAHLADRDGLHVRLLNPGAVAAIRKQQGNRRRKTDWLDAAAVCELLARGEGTLVHLDASMAASLRPLWSGRKDLVDTRSRLRQQAGALVDCLWPGFSAADKQAGVSPVLCDLFKTKAGRVIAGLLAEGWTPARFTAAPTTQLQAIFAARGCRLTRPLASRLRARAAGALPAHPAATAGKAAALAGMLGVLDGIDAEVERLEAQMAPLLAATQGAKLTQIRGVGVVTASGFVAFVGRTDRWAEWSKVWRAAGLDPARSQSGAKDARLGISREGSAWGRRALLDLAAAVCRQPGRWGDGFRARTTQGRKPAKVALVATGNSIGRTCFALMRSGADFDPAWETKRTRSSKVGDEAA

SEQ ID NO: 296308 - protein, 422 aa, unidentified
MKSTAARKLRQVPQGYLVIGVDPHKKKHAAAVITQDFTTHSKFKFGNSGEGFEMMLQRAKAEMIKTGCRGVTFAIETGGHYWRNLAYFLDERGIPSRFINQFTLKRRREGKDLNRRKNDYQDSEVAAQLLCTGEFTDSKLPQGVYAELRAAHNAYRRLVKERTRITNLVKGLLDSLFPEFTNVFKDPCALTAMSVLSTCLIPRVVSSMAEEEEFVATIKAGHQGRLMRRKLRALHHIARTSIGIEASAWPVSMEISFLVEKFSLIKQYIRTIEGALVRLVDKTEEGKYLLSIRGLNYIAVAGLLAELGSFKQYRSAKQLIKMAGSNPTESESAGKRGAHTPMSKKGRPVLRYCAWTSVIPMLRLNSDFRAWAKKMRERPVHANPLNGREVVGAGLNRLLRLSFALVKKQTFYRLPEPTRIAN

SEQ ID NO: 296309 - protein, 417 aa, unidentified
MNEFAAYIGMDWSDQKHDLCLVDAATGDKEFLVLRHTPEAIEAWAASLRQRFDGQPLAVCLEQSRGPLIYALLKYDFLVLYPINPTTLARYREAFAPSGAKDDPTDADFMAEIIIAHRERLRAWQPEDEKTRTLAYLVEQRRTLVGERTRISNRLTALLKGYFPQVLQWFPDVRTFLVSDFLSRWPTLPAVKRAKVSSLEKFFREHNSNRQATVASRLKAIKESISLTTDQAVIKSSALMAQALAAQMKVILEALKEFDRQIEEVCNSHQDYHLFESLPGSGTVYAARLLAAFGSNREKFASADELACLAGIAPVIERSGKSKWVRWRYFCPKFLRQTFHEYAGESVLHSFWAKAYYESQRAKGKSHAKAVRALAYKWIRIMWKCWQTNSEYDEVKYLESLRKKNSPLLKYAASNPE

SEQ ID NO: 296310 - protein, 329 aa, unidentified
MSPDLQGRVADMINESFVGIDVSKAWLDVGFLATGSAERLAHDEVGIAGLCQRLCEQPPTLVVMEATGGLETALASALAAAGVPVAVVNPRQVRDYAKACGRLAKTDRIDALILAAFAQAIRPQVRVLKDEETQALAALLARRRQLIDMRVQEKLRLDRAEVVQRTSLKEHIAWLDERIAALDIDLTHRLRTSEVWREKDDLLQAIPGVGKVTRMTLLAELPELGKLDRKEIAALAGLAPFNRDSGKHRGERVIWGGRAQVRQVLYMAALSATRSNPPIREFYQRLCAQGKPKKVALTACMRKLLTVINAVVKNNSPWCASGLDLQHSC

SEQ ID NO: 296311 - protein, 342 aa, unidentified
MEYYVGLDVSLKQTSICVVDQTGSVVREGVVDSDPEAISVYVRSKAPDAVRIGLETGPTSTWLWTELKQLGLPVICIDARHAKAVLKMQINKSDRNDAIGIARIMQTGWFKEVHVKDIESHSVRALLASRALLVKIKRDLENHVRGLLKNLGLVIGRAKFNVFAVRAEELIEGRPELVAAIRPLLEARNAVGQQVSELDRKVMKLARHDAQVRRFMTAPGIGPITALAFKATIDDPARFARSRSVGAYVGLTSRRHASGEVDWSGRISKCGDAMLRSYLFEAAGVLLTRVPKWSAVKAWGVRLAKRNGLRKAKVAVARKLAVILHRMWIDGTEFNWSKEIAA

SEQ ID NO: 296312 - protein, 434 aa, unidentified
MAKVVNFEEIHSNCAGIDIGSREIFVSIDGEQVVTFKTFTSDYHLCCQYLKEKGITSVAMEATGVYWMSLYAMIEASGIKVCLVHPREIQQVKGRKSDVKDSRWIQKMYSAGLLRESIVANGLLKDLRILVRERLDLIEMGSTYINKMQKYLELMNIKLRNVISQIHGASGLRIIKAIIAGERDPQKLVLLCEESIQTNKREEVIKSLEGNYHSSYIMLLKENLRLYEEHNKSIQSVEHQIEQLLQVMNKDNKHIIVSTPSKPARHHNPEIKDLHKTMVQMYGGVSLTSITGINDSTMLRLLGEIGNDLSRFPTRKHFVSWLGLNPRNKQSGKMKKSIKSSSNNAGLIFRQSAQSLSITKNSAIGVFIRKLKGRKGPKVAIKAGARKIAEAIYDAMTKGIDYVEQGAKKYIEQQKERELYVLNKLAKKYNFKFA

SEQ ID NO: 296313 - protein, 411 aa, unidentified
MTSFNDTAPEATLVAIDVAKAKNDVVIERPGLATRQRLKVLNTSSEHQRLIQRLRDLGGPIQIGLEATGNYHRAIAWTLLQAGFDVRLISSVALARTREALHNGWDKNDPKDAQVMLHMLRIGATQRYYDPMVEGINDWQELSKTHETISKAKTEALHRLQTHYLPLYFPEIDRFRHNSRSEWFFVFLDRFPVPSAITAHSRDEFVEQAWPMIGRKVSKARILGDIYETARTSIGLPVAADSAAVMMYRLVIALIRQLIQQRDEIERRSHELLADHRDYQRLRQLPGVGPINALTVLAEAGDLRRFRHHRQFLKFCGFDLATHQSGQFRGQSKLSKHGNARLRRAFWMAGQIAVRQRENNFRDKYERYIARDRDNRDLKRKALTAVAAKMARTAHAMITSETDYRPFHGVR

SEQ ID NO: 296314 - protein, 308 aa, unidentified
MKQKEKHNTIGLDLGEGRHRFCVLDEAGEVIEQGSLSNERAALARLTQCYRGALVVMEAGTHSPWISRYLKELGSEVIVSNPRKVRAIYQHERKSDQRDAQMLARLGRMDRALLYPVRHSSEQAQQDLLRIKLRDSLVRARVGLINSVRFSLKSLGYTVRNPSSERFHKVVSGTLPEAVRQMISPSVQALAELSVRIKVLEHEINVLARTKYPQTLWLQQVPGVGALTALYFVLKIEDPQRFENVRDVGAYVGLCPRRDQSGGNDPQLRISKRGDAYLRRLLVSAAQYILGPFGPKSACLWIDVGGRR

SEQ ID NO: 296315 - protein, 349 aa, unidentified
MTMLAERIDAVIGVDTHKASHTAAVVTPTGGATAHLTVPSDAIGAKRVLAFARRRAPDRRVWAIEGTGSFGAGLTTYLLEQGEWVVEIDRPRRPARRNGAKSDELDAIRAAREALSREHLAQPRRRGGREALRVLLVTREAAVVERTRAVSALQALVVNAPEALRGRLRHLGTHALVLRCARLRIGPTQSLEQRATIAALRSTARRALACEAEAADLESALEVIVQQERPELLAESGVGVITAAAILNAWSHAGRIRSEAAFAMLAGVAPIPASSGQTVRHRLNRAGDRQLNRALHTIVLSRLTHDPETRAYAARRRAEGRSDREIKRCLKRFVARRLFRLLEDCAQAA

SEQ ID NO: 296316 - protein, 324 aa, unidentified
MIDGILGIDVSKNTLDASMSSCNKVRAKSFANSSDGWRHLLDWLITQKIRRVHACLESTGRYSLGIACALYEAGHVVSIVNPAQIRDFARTKLGRNKTDGVDASHIREYCELFKPQPWAPPSEAHRRLGELQTIRAGIVAGLTEWKNRKNSGMVDAVAQSLADVTISHFTSQLGAVDEAIAQTIDNDSSLRRKRDLLLSVSGVGETLAGVVLAELPGPDVLRSSAEVVAYAGLNPRQHQSGTSIDRVTRISKIGNAVLRAALYMPAMSAMRFNPAIVALVTRLKSRGRLNPKQIVVAAMRKLLVLCFGVLKTGKPFDPAIAMGC

SEQ ID NO: 296317 - protein, 337 aa, unidentified
MEYFAGLDVSMEETHVCVVDRDGKIILEARTPTAPKTIAAALAKGPPVERVLFETGRMAPTLFHGLTALGMPVVCVESRQAYQALRSMVTHKTDRNDARGLAHLARAGFFKPVHVKSLPSHAVRALLIARKKLVGQRVTLENQIRGLAVAFGVRLPRGLSSGFSEKAMAAGRGIPGLDGAMRGLLAARDAILKAIVAINADMKSLERSSAACRRLMTIPGVGRLTALAFVAAIDDPDRFRRSRDVGAYLGLVPRRYQSGEIDYTGSISKCGDGRLRTLLYEAANVMLTRYRGSLALKNWALDIARRSTLRKARVALARRLAVIMFAMLKHGTEFQPA

SEQ ID NO: 296318 - protein, 369 aa, unidentified
MKTYTLEAAPTASAVEIENNNKSTKAKRILMGVDVHLRGYQAARKVDGGVIGAVENCRSEVELLLHVEKQRQRAEQVVVVYEAGPLGYTLYRKLTAAGVLCYVCAPDSAAQKRKRRKNNNIDARSLTSKLFNYLNGDKEALQLARVPSEAQEQLRLASRQHDQLVEERKRLGAEGNAVLLSQGLGSWSNWWRTKAWAQLSAIVPQWLQERLLIWVGVLKVLDEQIAQAKAALARICSGPRPKGVGALSQVQLQSEVLDWSLYSNRRKIACLAGMVPSEWSTGDKERRGSITKVGVPALRRIIVEMVWRMVLFQPQYKPVQKWQTVLKGPNPALKKKAVVAIGRQLIVDLWRLQTGRVTAQDLNLIMVEN

SEQ ID NO: 296319 - protein, 389 aa, unidentified
MTQDTLYVGLDTDKKYVDVGIAEPLPGGEVRYFGKIANEPTALDRLMKRLRRDGRQLRVCYEAGPCGYGIYRRLNSKPGVICQVVAPSMTPRRPGVRVKTNRRDCLMLAKLLRAEELTSTWVPDAAHEAMRDLIRARACVGADLLRCRQRIASFLLRQEIRYDGKPWTQKHRLWLGRLELGALPHRLMFGEMLDGLDQAIARRKRLEDHIAELVPTWSLAWLVDAVQALRGYRLINAVTVVAEIGDPCRFDNPRALMGYIGLVPSEISTGDSVRRGALTKAGNGRVRKALIEAAWTYKRPAKAPSPRAAHQSAAVRAIADKAAHRLSGRYRRLVARGKLANVAIAAVARESLGFIWAIAHAARPTSLQSTSLAPGSRRQGRCAPPAAVA

SEQ ID NO: 296320 - protein, 356 aa, unidentified
MGLYAGCDLHARSNFWGIINGEGKRVFRRKLGNDPEGILEALRPFQGDLEGVVVESTFNWYWLVDLLVGQGYRVHLANPGAMQKYSGLKYMDDEDDAFWLAEMLRLGVLPEGYIYPKEERPVRDFLRKRAHLVRLRTSVLLSLKNIVSRNCGMQVRAYILKGRKGVGELLGGNDDLALAGQVSKEVMDYVSRKIEEVEEAILQRVEMQESYRGLLSIPGVGKILALTIMLETGPIGRFAEVGHYVSYCRKVPSRWVSDGKAKGGGNKKNGNKYLAWAFSEAAELARRFHAEPRAYYQRKMAKTNAMVAHSALAHKLARAAYYIMRDGVSFQSEKLFGLQRAGAESLKGGLVKNHET

SEQ ID NO: 296321 - protein, 352 aa, unidentified
MHKVDRQTRGCLSGAQTLLYRKVNVMSAVLGIDVSKTTLDACLLGDPGQTPGMIQIANTAAGFSALIQWLAQQGAADAPVVLEATGRYWLGVTHALNAAGHPVSVVNPARIKAFRGTLLVRNKTDAQDAALIARFGQLHHPEPWTPPEAAQERLRALFRHRQTLLKMRQQERNRHQAGSSAAWVTADREAHIEWLSGRLKAVEQEIHQHLKLHPDLWAAFKRLQTIPGIGPHSAVALLAEAGDLSRFDHPGQLVAYVGVNPQQHLSGSSIHKPSHISKKGNARLRCALYMAAVAAKQQAYFAPFVQRLEASGHCPLSIVIAVMRKLLHLAFGVIKSGQDFDPLYLDKRAAAA

SEQ ID NO: 296322 - protein, 406 aa, unidentified
MQKRENYLYVGMDLHKETHTAVMVNCWNEKLDVIVIENKPSEFNKLAKRVNKMAVKLGLSPIYGLENAYGYGRSLAVWLIEKGYTVKDVNPSLAYDQRKSAPMMKKNDKHDAYCVATVLINQLHTLPDAKPEDNHWTLSQLVNRRDTLVKDGIRLKNALHEQISATYPSCKKFFCEIDRKTALYFWKTYPSPGHLKNKSAEDLAAELKAISQNILKSKAELILECVHNDGNTIRDYQASRDFITQSLVRDLEHQAVELAQIEAEIEKMLACFDYKLTTMPGVGNAIASKLIAEIGDIRRFPNADKLACFAGIAPKSFSSAGKGRDESNKQGNRELHGLFYFLAVTMVSVSTKGKPYNPIFRTYFLRKVSEGKTKSQALVCIMRRLVNIVYGMMKNKTEYRPYVVEK

SEQ ID NO: 296323 - protein, 412 aa, unidentified
MDVYCGIDWAEDHHDIALVDQDGQLLARRRISDDAAGLAQLLDLLAGHGDTAEDPIPVAIETPRGLLVACLRATGRPVYPINPMAVARYRDRHSVAGRKSDHGDAVVLANVLRTDLHAHRPLPAGTELAQAIAVLARAQQDAVWDRTQAHNRLRSHLREYYPAFLAAFAPLKGGIMRPEARAVLAAAPTPADAARLTLAQLRGLLKKAGRSRGIDTEATRLRDAFRAGQMRQLPLVEAAMGRQALALLGQLDAACTAADDLEHAVTESFNQHPDAGIITSFPGLGALTGARVLAEIGDDRSRFSDAKGLKAYAGAAPITRASGKTKSVTRRKVKNNRLNAAGYTWAFSALTASPGARAHYDRRKDAGDRHAAAQRNLFGRLPGCLHHCLITGQHYDEATAFPAAAKKISKAA

SEQ ID NO: 296324 - protein, 428 aa, unidentified
MQVIHNRCAALDVHKKTAVTTIMITQADGSVQEYTRTFLTMTADLLALDDWLRSHDIKVIAMESTGVFWRPVFNLLEEGRQVILVNAQHMKAVPGRKTDVKDSQWLADLLRHGLLKASFIPPKPVRELRDLMRYRKTIVQERADEVNRLQKVLETANVKLASVATDVLGKSGRSMLDAILGGQDDPETLAELARGRLRAKLPDLRLALDGRVQPHHRVLLTRILAHIDFLEESLAQLQAEMEQYLHPFEEAMELVQSVVGIDETAAASILAEIGTDMTRFASEKHIASWAGVCPGNKQSGGRRLSGKTTKGNPYLRAILCEVAWAIAHTKDNYLSAFYHRIARRHGKPKAIMALSHKVLVIIYHILRTKKPYADLGAEYFDQRDRERIERHHIHRASTTRLYCDASAKGGGLRPDTTRQKGFRWRRRA

SEQ ID NO: 296325 - protein, 443 aa, unidentified
MTLTLGIDVAVRAAHQATLSRDGKTVWRGRKFMTRTEELERVWADAGVEDPAELTVVVEPTRNAWIVIAEWFRRRGAKVVMVPTTQSADLRKYYSKHAKNDRIDSELLARLPLLHPDGLREYSGQGPANPLRRLVKQRSTMVKRRTAVYARLDALIELLGPTWYAVLGSNYGNAALELLARYADPHAVIRLGQARLARFLATRSRGNWRDEHAAGLIAAARETLALWNVEGTDGMDFAELSADIAHEAEQALFLTRQIKAIDERIANLYTDADPQGIVASAPGVGPTISAVIAGRIGDPHRSTSLAAIRAYTGLIPKVSQSGVVKTESSITKAGDPLLREMLYTAADQARKVDPQFAAKYQRLMAGDRHHDSAICHLATMLVTRIATCMRAGQRYQLRDIDGTAITESEGRVIIKQRYQLDPRQRDHARHKLMHKRRNKAGQA

SEQ ID NO: 296326 - protein, 386 aa, unidentified
MIYIGIDISKYKHDCFIATETESFQFSFENSQSGFNELLGYFKPLIKQEMIIGLEATGHYGENLKSFLTFHGYSFMEINPFLVKKFSEAQSLRKTKTDKKDAQMISTYMRSVDYKAYHHQSYHISALKSLTRLRFKLISMRTKQYNMMTKVLDVIFPEYKPFMREQGYSETTLYILKRFSSPDKIAKMKDEHFDKLRRLSKGKFNYPKFIKLKELAKSTIGVTQDHQLFKLKTSISYVEKLNQDIAETEKQINSLMDKYPTRIQTIKGIGTISAAIILCEYGDISLFSNPSEMLSYAGLDSTIKQSGTMSSTGKLVKRGSKYLRATLINVCMMVMIYNPVFYVYYTKKKQEGKHHRVAMVHLAKKLVRVIHHLETNHVDFDSSKLI

SEQ ID NO: 296327 - protein, 422 aa, unidentified
MSLTKMNRNKCGWKQLQIQQRRLPMISVGIDVSKEKSTVCVLKPYGEIVMKPKDVQHTESELSKLVGELQELQEEIRVVMEATGAYHLPILSYLKEKGFFVALVNPLEMKRYRCQGIRNAKTDKIDSKIIANYGIDFWYHLSDFKGSEEHYLELRLLGRQYRQYMKFRVENVLALANMLDQTMPGIKTLLCDWNKYTGKDKLADFAYDYWHFDNITKKSEKQFLESYSKWAKKKGYRQDESKAKQIYALAKEGIPTLPSSTPSTKMLVQESVKIVREVDDTLTQILTRMSEIAKMLPEYQVVHDMGGVGDVLAARLIGEIGDVRRFHNAKSLIAYAGIDAPPYQSGKFTGTDRHISKRGSSTLRKVGFETMTCLVMQKKHGDPVYDFIKKKQNEGKACKVAKIAGFNKFLRIYYARVMEVYQ

SEQ ID NO: 296328 - protein, 355 aa, unidentified
MAALLQSWTVSEAKYEIFQLALPQGKATEGRPANSPKRLIGGFIIYYIGIDVSKKDLSVFDGKDLNFINKEGLKSFKKYLKKKYRFSEIAIIFEPTGIYSLYLKEFCAENSIKAYIVNPKQSHNFTRALGRRSKTDKIDARILYQFHRLINSKDIKVPKINQQAKTLSSYLVSYEFALKQRISLSHHLESLRDKSLIALMRKDLKRAKNLEDRIFDDIKEYLGKNQDLKEDYQRLSTIPGIGEKAAIALLALFKTYQGTNRAQITALAGLDPVRRESGTSVKHKVKISKNGKGIYRKILYLPTLCATVHNQKIRAFYQRLLANHKNKKLAVIASMRKILLIAHAMYRDKTEYVAV

SEQ ID NO: 296329 - protein, 323 aa, unidentified
MSSFVGVDVAKNTFDIATHLPNGKHKTKAKLPNDAKGFKEFEAWLNKQVEPTALIVMEATSIYHLELAEFVCNKGYRVCVVNPATTHAYADSELRRIKTDKSDAKLIADFAREKAEKLQLWAPEPLKYRQLKAMVRRLDDLQEMEQMELNRLDVSDEKVKDSINSVLRHIEKEIAETHKAIKKHIDDDSDMRQMRDLIVTIDGIGQKTLERLLAELGDLRKYDDPRKLVAAAGLNPKLQDSGKLKGRTVISRIGSARVRAGLYMPGLVALKHNEAIIAMKERLKANGKAPKQIICAAMRKLLHFVYGVLKSGQPFDPKLALAR

SEQ ID NO: 296330 - protein, 396 aa, unidentified
MGCHWVGFDVGKACHWVCVLDDAGKVLLHRRVDATQEQIEDVLDEIEQLATTGNRRVAIDLRGDLATMLEACLLARGESVYHLPGVAVNRYRDAYAGAEQKSDARDSWLIADQLRLRWRSLRPVTATEEYLAELKVLASYRRDLVQEQTRKLLRLRALLVELCPGLEAELNFKRNGPFVALSRVASPAAVRRLGHKRLARWLKARGVYRAEKVASTFVSAAKAQSVELPASELKAQIVSELARQILELREQALTMEQRMARIVAETPVGQLVLSLPGMGTILTAEFLAETGDLSRFASADHLAAASGIAPVLRASGSTSFRRRPKRGNKVLKRVFYLSAYCSLYASAESRAYYGRKRAEGKTHRQAVVALARRRVNVLWAMLRDGQPYREKPSKAA

SEQ ID NO: 296331 - protein, 451 aa, unidentified
MKRKRAGKGGVVPSLECIEPNAAGIDVGATEIYAAVPPDRDPNPVRSFQTFTEDLQALAAWLLACRIRTVAMESTGVYWIPVFQILEARGIQVCLVNSQYVKHVPGRKTDVADCQWLQYLHTVGLLRGSFRPDDVICQVRSLLRHRDGLVEMAAEHVQHMHKALSQMNLQLHHVLSDLTGQSGLAILDAILAGERNPTVLAELRDGRVQASPESIVKSLVGDYRREHLFTLRQSLKAYRHYQTLIADCDEEIEKYLKEIDSKIDVDQHPLPPEKHRHKPRKNEFHFDMRTHLYRILGVDLTAVPGLNALTAHTLLSEVGPDLSRFRNASAFVAWLGLCPDNKISGGRVLSRKTRRTQNRVNRALRLAAQTLYRSQSYLGTYFRRMRARLGAPKAVTAAAHKLARIIFHLLTTQKPYDESIFAMEEQRNHLRMENRLRRQVKQLGYQLVPLA

SEQ ID NO: 296332 - protein, 473 aa, unidentified
MSGRESAHELRPPPGVVNPGPGGRLALGAFSTILSVAALTTGPSGAPRPSARKPVREIVETRGRVRPTKEAKQNVNDEAMHYERPCVGLDVHKGTTTATYLAAGGRRMRQRTFPTTRPHLLALAREVGTSVPIVLEASTAGKAVATALKEAGSELHMAAPNKVALIAKAPVKTDERDSATLAHLYQAGFLPECYVPPPEIDRLRTLVRARQDLGFKATVVKNQVHALVTRNLLDEEMEGISDWFGVGGIRKLTHLPLSAEERGHLARALEQLSLLAEQEGTLQAELAKTATERPDVQLLMTIPGVDYYTAVAIIAEIGDIRRFANKKQLCSHAGVVPRADNSGEKVSQHRSVKKGDMVLKRFLCIAVQGMLRANRDTSIKRFYEKKAESIGAAKAQIAAARKLACAVWWMLTHNEPFKDEDEGLTARKEQRMEARAREASEEISEAELTEVGERLIAQAPLLERLAREAGNAG

SEQ ID NO: 296333 - protein, 344 aa, unidentified
MGEVITIGLDIAKSVFQVHGVDGVGAVVIRKRVSRARMLEFFAGLPRCLIGIEACPAAHHWARELQTIGHTVRLMPPSYVKAYLKRSKNDANDAAAICEAVTRPSMRFVAVKTKEQQAALMLHRARQLLVRQRTMLSNAIRGHLSELGIVSAKGRNGADELLEIIADDADSRIPLAARSVLKVLAAQYNAIGAEIASISKSILAWHRSCEPSRRLEEIPGIGPIVATALVAEISDWKAFSSGRGLAAWIGLVPKQHTTGGKDKLGSITKQGNRYLRWLLVSGAMAVIRYAQKHGTKKHPWLGRLMARRPTKVAAVALANKIARIAWAIMVRGERYREPAQLLAA

SEQ ID NO: 296334 - protein, 453 aa, unidentified
MSKQRKTAMQARPIPRKHAAGIDIGATSIYVAVPLDRDPQPVRSFQTFTEDLHRLADWLQRCRIKTVAMESTGVFWVPLFQILEQRGFEVCLVNAHHVKNVPGRKTDVSDCQWLQYLHSVGLLQASFRPAQQVCALRSLLRHRDSLVQTASTYAQRMQKALDQMNLQLHHVISDITGVSGIAILEGILNGERDPRKLAGLRDYRIKASEETVAKSLVGDYRPEHLFTLRQSLEAWRYHRKLIADCDDEVQRHLARFTSKADPKEKPLPRARKVSSSKVYSSQPDYDLRTEHYRILGVDLTEVPGINTLLVQTLLAEVGPDLSKFRSAAAFASWLGLCPDNRVSGGKILSVRTRHVQNRAALALRIAAHTLHHNQSALGHYYRRMRAKLGAPKAITATAHKLARVLYHLLTAAQPYQESVFAERETQHQQRNLFKLHARARALGYQLIPIAASA

SEQ ID NO: 296335 - protein, 346 aa, unidentified
MKHTIVGVDIAKNVMQMHWVDPDTGEVVNKPIKRAAFLEHFANRSPCLIGMEACGGAQHWARRLIEMGHEVKLMPAKFVKAFNSGNKNDAADARAIWMATQMNSKAVAVKTEAQQAVLALHRMRQQLVKFRTMQINSLRGLLTEYGEVMARSRVALDKAVAGVLERLSGRLPAVLIDTLREQWNGLEGLDKQIAEIERRLHAWMKQDEACKAVADIPGVGLLTATAAVATMGDPKSFKSGREFAAWLGLVPGQTGSGGKVQLLGISKRGDTYVRTLLIHGARSVLAHAKQPSKWIEQLQMRRPSNVVAVALANKMARMIWAILAHRTSYQRACQHKASLNIRPCKS

SEQ ID NO: 296336 - protein, 412 aa, unidentified
MDLVYARCAGLDVHKATVVGCVRVPGVGRGERHTETRTLATTLRGLEELTTWLTGHGITHVAMESPGVYWRPVYAGLEGVVQVLLVNARHVQMVPGRKTDVRDCEWLAQLLECGLLRGSYVPPAAVRDLRDLTRLRKALIRERGHHVNRIEKTLELANIKLGIVVTDLMGKTGRAILEALSAGHDAPEQLTALAQGSIRTKKQAALREAVAGRLTPHYAFLLRQHRSLIEALDTHIGTLDARIETAMAPFAEAAALVQTMPGVATRAAQAILAETGVDMGPFPTAGHFASWARLCPGTHESAGKRRPTTTGQGAVWLRATLQEAAWAAARTKRSYYRALYHRLKGRRGAKKAIVAVQHAMLVALWHMLKRRVPHHDLGADYFDRRNTARLRHHHVRRLQQLGYQVVLVQEAA

SEQ ID NO: 296337 - protein, 471 aa, unidentified
MGKGSGNGTTRGDRKRNARRERLRGLLPRDGAVIGIDLAEDKQAIAVVDHDVRVLARKTVRVKAFRLGEALDWAVGQARAKAFARVTVACEPTGPRWLQVQRLCAERRLPLVCIQPLMSHIAREQQDYTTHKTDEADCVLIARLAVELHCYIPEELDETWAHLRHLGRRRTQLITAATASGQRILDFLSVAWPTVTETCADPLKSVTWLASLQVVTAQCGADPGRLAVMGTEAFTAAVRGAVAGWGGKKAWGPITRRVFAALTDTEGVVVSSRRGLLRRIADELGDLQRTRAQLRAVEADMAAVLGELGLSRLADIPALTAVGAAAILAETGDPRRYDSSSSLVKHAGMSPSDNASGTFLGDAHISRRGRPGLRLTVWRAVWPMLRFNPVMAAKYAAMTQAADEAAAAADTGSRQASAAAATARARRAKARVACAASLLRWIYCLVVHGTSWDPDAASGSACRPAVPAEAA

SEQ ID NO: 296338 - protein, 357 aa, unidentified
MNSKTIVRQVAGIDVAQNELVVSLGRRYDDFNLDLYANKVFANNAKGFEAFISWVRKLTQQTTDVIFVMEATGVYHEKFAYFLHGKGFKVSIVLPNKISNYQRTLEVKTITDKTSAAAIARFGLERNLDGWNPPKKIYRRMRQLTREREQIVEERTMVKNQLHAEESEAFPNKATVKRLKEKIKLLDKHEKQVKKELAELIKQDQSVKENIELICSIPGIGMTTAATVLAETNGFELIRNRKQLTSYAGMDVKEKESGTSVRGKAKISKRGNKYLRKALHMPTFCVIKNNERFKAIYQRLVSKHGIKMKAAVAVQRKVLELIYTLYKTGNKYDPEYFKSDQAVKTDQMDTLKKSERS

SEQ ID NO: 296339 - protein, 364 aa, unidentified
MRRPSNKVIAGIDLHGNNVVIGIINEDGKRLEHKKVGTRLEEVERVLKPYKSRLISMAVESTFNWYWLVDGLRAAGYPIELANPAKIEQYNGIKHADDQHDAFFLAELQRLKILPTAHIYDAQLRPVRDMLRRRSMLVHHRSALLISFKSLYTRTTGNQMPLAELRSMSPNDAVQLYEHPANQLIARIQTEQIDHLNESIRCIEKAVLAAARAIPIYSKLQTLPGVGPILGMTITMEVGDIQRFQSNGNFASYCRAVDSRRMSNGKQKGENNQKCGNRYLSWAFVEAANFAKRYDAQCRRWYDRKKARTSNVIATKALACKLAKAAWHVMAHNTDYDPARMFPGDKTFENHRQPAKGLAKSPKT

SEQ ID NO: 296340 - protein, 474 aa, unidentified
MKAKNHQKDAKATGKIIRPAKDMPVINPHAAGMDIGATRHTVCVPEDAVPAGQSPVREFGAFTSDLDKMVEWLRACGVTTVAMESTGKYWIAPYQKLKAAGIDVVLSNARYLKHVPGRKSDMLDCQWHQLLHSYGLLTGSFRPSEDIVGVRTLMRHRADLVVQCGQAVQHMQGAFDEMNIHLHHVISDLDGETGLRIVDAILAGERDPEQLAKLRDQRIRKSTPAELVEALRGDWQEEHLFVLRQARQTYQWVHRQMDECDLELEKALAQVKANPAVVIEEQRPPNPEGRTPKKKKKRCAGNAPKKDFTEELKRICGVDLTNIVGLNVLSVLMLIAEIGVDVSHWRNVKAFCSWLGLCPGSKVSGGKRLSSRTRGVNNRASLLLRSLAPSIGRTDSWLGVYHRRMRARLGPAGANTATARKLATVIYHLLKYKEDYIDVDRILYEEKFRRCRLSRLRKQAQELGFQLTESPKVA

SEQ ID NO: 296341 - protein, 416 aa, unidentified
MSEEAGLLFIGDDWAEAHHDVEIEDDAGRVLVRKRLPEGLAGVTALHQLVAEYLDPAGEPDQVLVGIETERGPWVQALLAAGYVVYAINPMQVARYRERHSPSGAKSDAADAHLLAEIVRLDRAHHRPVAGDSEIAEHVKVAARAHQTMIWSRVRQVNVLRSLLREYYPAALVAFGTELADRDALAVLAAAPSPEQGRRLSQNRIETLLRKAGRQRNLTAAAGRIRAALQSEQLSARPGVVSAYTASTSALVAVLAAMVQQTEVLAGQVEQGFGQHPDAEIYRSQPGLGTILGARVLAEFGDDPDRYADARSRKNYSGMSPITKASGTKRVVLARYARNRRLGDALLLQAYSALRTSAGARAYYDRQRARGATHYQALRALANRLVGILHGCLSHRMLYDENRAWHSTEEKLPTAA

SEQ ID NO: 296342 - protein, 300 aa, unidentified
MSTIAQPEPTRVTIGVDTHGDLHVAAARDQLGRPLGTTLVPTTLAGYQHLLGWALKLGEPVAFGIEGTGSYGAGLARYLHANGQRVVEVNRPDRATRRRKGKSDPVDADAAARAVQAGDATAIPKAGVGVVEMLRMLHLARKTAIKARTQTVNALRALLVTAPAELREQLRGLSKTMLPRAAAALQAGRVTSPAAAAMLALATLGRRHATLTAEIATLDAEIGRLLGRFAQPLLDRVGIGPDSASALLLAAGDNPGRLRCEAAFAALCGTSPVEASSGKTVRHRSTVAATARPTRRCTAS

SEQ ID NO: 296343 - protein, 341 aa, unidentified
MKQTVSTVGLDLAQKIFHLVGTDTTGKIVWRKRLTRNALAPFMAQLPPVTIGMEACGGAHYWARQFHQQGHQVKLMAPQFVKPYVKSNKNDMRDAEAIAEAVTRPTMRFVPLKDVGQQDIQALHRVRERLIGERTALINEVHGLMNEYGIVIPTGVSKFRQAVVEKLESEQDKLTPLSQEMFWRLVQEFATLEEHIAAHQEKLDTLAKTHPESQRLMTIPGIGPITATALIAAVGEVGVFKNGRQFAAWLGLVPKQHSTGGQTHLLGISKRGDSYGRQLLIHGARATLRWVGLQTNSRSQWIRGLLKRRGWNRTAVAVANKNARIVWALLSRGGAYSETVS

SEQ ID NO: 296344 - protein, 416 aa, unidentified
MRVVYPRCGGVDVHKRRVSACRMWQDESGQEHIDEAQFGTHTVELRGLADWLGEQQVGDVAMEATGPYWRPVWNVLEAAGVRLTLANPAHIRAIPGHKTDRRDARWIADLHRHGLVPTSFVPSQAMRQLRDLTRLRMKVVQDHTRVVGRLEAVLEDANIKLGSVVTDLMGVSAQDMIRGLMQGGARPAELAKLARGPMRKKQEALTTALDGHFTAHHRFVVNRLLIQQRALRNQEQALAREIARRMDDRQKAAIALWDTIPGVNETVASVLVAELGVRPEQFPDAHHAASWVAICPGNHSSAGKQKSGKTRKGNRWLRAALVEAAWAASHSHGTYLNALYRRKLRKGEKVALVAVAHSILIAAYMMLKTGQPYKEPGPDYFDQLHPRRSVHSLVKRLAALGYKVELSRIDTAQAAN

SEQ ID NO: 296345 - protein, 372 aa, unidentified
MDNAITYVGLDAHKNTIAVAVLPPGGAAPIQWQEATTPEAVRRLVRRLRREAPGEVYCCYEAGPTGYALQRQLTAAGVPCTIVAPSLTPVKPGARVKTDRRDAIKLAELFRAGLLTEVHPPSESEEALRDLCRCRDDVRVDLLRARHRMNKFLLRRYRIYRETKHHWGSRHMVWLEQQRFDDPTSQATFDSYLLSIQQVQERQLQLDSRLAEFGSQEPYREPVASLRCFRGIDTVTAVSLVAELHDFRRFRSGRELMAYLGLVPSERSSGMSERRGSITKSGNRHARRLLVEAAWHHRHRPALSLPLKRRREGQPGRVIAIADRAQERLYRRWWRMTGRGVPSPKVVVAMARELTGYLWATLHPQADVTRSC

SEQ ID NO: 296346 - protein, 340 aa, unidentified
MAILAGLDVHRAQITFDALDTETGEVLRGRFRADREAVGEWVAQFVGEHVEVALEACTGWLFVYEVLASAGVVVHLAEAAETSALRGKKRHAKTDRADARWLRMLLAEGRLPEAWIPPAHVREWRTQTRLRKTLIDERTCWLQRIQATLFHHGIVNVPDQLLRANGRAFLRTLSLPPAALQRIEIALAIIDEIDRQLVPLERELARLARRQVGCQALMRQYGVGPVTATTVLCELGDVTRLSASRKAVRCSGLDIGVYRSDRRSRTGRITRQGSPALRWALYEAAQAACKPASPDHADYLALKARGLSHTRASLTIARKLARRSFHILRELGPDALAPTS

SEQ ID NO: 296347 - protein, 321 aa, unidentified
MTASLTVPASTFVGVDVSKDQLDAGLRPAGEVFSHPNNPIGVAALVKRLAALKPALVVLKATGGLQTPLACALAARSLPVAVVNPRQVRDFARAAGLLAKTDRLDALILARFAEVMKPEARPLPDADAQAFDALCARREQLVKMQTMEKNHLASASPDARKSIGRMLRQLERELDKIEADMDRRIRNSPVWKQKAELLRSVPGVGPAVARALLADLPELGTLGRKQIAALAGLAPFNCDSGRFKGERRIWGGRACVRSKLYMAALTASQHNPTIRAFHQRLTAGKKAHKVALTACMRKLLTILNAILRDGKPWNPSAATAA

SEQ ID NO: 296348 - protein, 405 aa, unidentified
MSELEKGLVFAGVDTHKDTHTLCLLDHTGRAIGTFRFAADAKGYDALAGKIGGPATCVGVGIEGTGSYGAGLTRRLLELGYCVYEVMVPGRARRKPGRPKSDPADAEVAARQVLARVNLSKPKDQSGWTEELRQLMIARDRLVQATSAMINAAKSLIVTAPEDLRRSLEGLSRKNLRSALSTLDPAAGGIILALGSLGKAWDLQDREADAIEERMKRVLEANAPALLTIYGCGTVSAAALAVAGGGNPERLKSEAEFASLCGVAPLLASSGKTERHRLNRGGDRRANRALYQIAVTRMSYDQRTKDYVGKRKRDGKSKKEAIRCLKRYIAREVFRALRNPLEIKGPSWKDLRPARQALGITLVEAGKALNVGFQRVSYAETGRLMNVRFLEEYDAWLKSQAKRES

SEQ ID NO: 296349 - protein, 372 aa, unidentified
MQYTTKYVGLDVSKDTIAVAIAEAGRERARYWGTIQNEPAAVRKLIRQLGKKEELEVCYEAGPTGYGLYRLLKDMGVSCVVVAPSLIPARPGERVKTDRRDALRLAELHRAGELTGVYVPTAEDEALRDLVRARDDAREDVHRAKQRLIKFLLRHGIRKPEHLKNRWTKRYRAWLGTLKFELAAQETTFRKYLHAIYEAEERVRRIETSLLEVASEGAHAKVVEALQGLKGVAFLTAVCLVAEIGRFHRFRNPRQLMAYLGLVPREYSSGQTVRRGKMTKAGNGHARRLMVEAAWSYRHQPGVKGALAKRLEGMDADIQMISWKAQTRLYGKYRRLVARGKQKNVAIAAVAREFVGFVWAVACLAESGQQSA

SEQ ID NO: 296350 - protein, 351 aa, unidentified
MMIIGVDYHPSDQYIAFADTETGECGERRLNHSDGEAEKFYRDLQQRAVSVRVGMEATGYSRWFERLLAELGIEVWIGDAAKIKTKRVRKQKTDRNDAQLLLTLLIENSFPRVWVPSPENRDLRQLLWHRHRLVQIRTRIMNQLQALAMNEGNRRKKKLWSAQGRAQLEKLPLATWASRRRQDLLELLDRMTPAIAALTAAVEQEARKRPEVLRLMTHPGVGPITALAFVLIIGTPERFPCGKQIGSYIGLIPSEDSSAGRQRLGHISKQGNALLRYLLGEAAQAAVRCDADWRRRYMHLAMRREKNIAKVAMARRIAVRLYWMWRNGWEYGQSVEFGSHAGELVIGHGAH

SEQ ID NO: 296351 - protein, 359 aa, unidentified
MSNLPLFVGVDYHQDQLQVCVVDSRAVVRQNRAFINDAREVAKMLADLGEVKAVAIEACCGAAHFGEALLSHAPPGGFRVELAHPGYVARLKQSPDKTDFGDARLLADLLRVGYLPGVWLAPAPVRELRQLVNHRQRLVDQRRAMKLQVGAILREQRIKLQGSRWSKQWSSGAKDHPALSNEARWIVNELLEELRHVTGRIRQVEKRLREATADNPLVKKLRSTIEGVGEVTAWMLAAWIADFGRFKNGKQLSRYCGLSPRNASSGKVQADAGLINAANKQLRAVLIQAAHRLMRTNQRWKSLADRLLKKGKAKCVVTAAIANRWVRSMHHRMRAADRPAAAAAAAADALQQQQDLPAQ

SEQ ID NO: 296352 - protein, 335 aa, unidentified
MNETKFYIGLDVHENMTTLAVRSWKGDIVKSGECATRYDDIAKAVEPYLFNCKIGLESCTSYYHIYWSFKKKGYDILVANTLRIRQLVTKNDQLDAERLSDMLRLGSFPTSYIPDEKLMKLRSLVTLRHNFVEESTSFQNQIKAILTKYGFFIHERTNFSKKWCEKLQIIIAEHAEVPELYHSYEHYQILEHKITTLTAEIISFAKKHWANELMLLDSIPGIAEVLACYYVAQICPISRFKNEKKLRRYAGVVPCSKESGGKCYGSSLPKTSSRSLLRWALVQSSWAAVKGKNNLAKYYHKKRKTKMKNKAIMTVASSLSDVIFKVLSSGKPYGG

SEQ ID NO: 296353 - protein, 441 aa, unidentified
MRVMYERCCGLDIHKASITVCALITEKGKTQEETRRFGTMTADLRELSGWLQQKGIRDVAMESTGVYWKPVWNILEPAGFELLLANAQEVKVVPGRKTDQKDSQWIADLHKHGLLRNSFVPPRAIRDLRDLTRARAILTQEHTSVCNRIQKVLEDANIKLRSVASDVFGASGRAILRALMKEENDPEALANLSKGKLRNKIPQLRRALEGQVTAHHRALITGHWNRMEFLERQIADLETQIAERMKPTPAEMAPTMQNASEDAPVPLSPREEAIQLWMEIPGLSWTSACSMVAELGVNMDQFPTAAHAASWAALCPGNNESAGKRLSGKTRKGNIWLRRTMCEVAWAASHTNDSYFAAQFRRIASRRGRKRALMAVAHGILVTAYSMLKHKRHYKELGADFFDGINRDKVRDRLVQRLAKLGFNVTLESKGTVESVADVTE

SEQ ID NO: 296354 - protein, 369 aa, unidentified
MKKSVKYVGLDVHKDSITIAIADQGRNGEVRVYGKISNDLNQIDKVMRKLLSQNAQPSCVYEAGPCGYSIYRHLKSKEIDCVVVAPALIPKKSGERVKNDRRDAIKLATLHRAGELTAVYVPDQEDEAIRDLVRTRADIQKALRKVKQQINAFLLRHAISYPGRTKWSKAHLNWLTTIKMTHPAQQIALTEYLDAMENSAARVARISKQLEAFCQTWRLSPVVQALQSMRGICLISAMTVVAELGDLNRFDNPCQLMAYLGLIPSEHSSGNSVQKGGITKTGNTHVRKALVESAQAYRLPARKSTRIRKRQHGVSEEVLSVAWKAQLRLCHRYRCLRARGKNHNVVITAIARELSGFIWAIGRLVPLTA

SEQ ID NO: 296355 - protein, 345 aa, unidentified
MFVAGIDAHATYSVTCVVSKEGQLVSGPTRIKNRDANQLSELLERYRPLEVVVETSPAWPWLFDRLAGNGVHFVLAHAKRLRIIAGSNYKSDDIDAELLARMRLAGLIPEVHPKSVEQRGHAVLLRHRARLVRQRTQMVNRIHAQLHNAGLYLERGRMLTEGGREWVRSEAWPVLGEEQRLFIQMQWALIDHLTPMIRTLDHRVEHVGRLIPAVALLETIPGIGPYRALLIATEVLPIERFRRPAHLVSYAGLAPRYSQSGLRPIRHGSIPAGANRWLRGTFVRAVVSHVTHAPDSWLSHANERIKERLGWQVARVATARRLARAVHAMLRTGEVWQDDLGTREH

SEQ ID NO: 296356 - protein, 350 aa, unidentified
MQYIAFDVHKRYTVAVVEEEQGRNRRHARIDHDDGAFRTFLSRCELGSPVALETTGNWYWIVDQIEAAGMSPRLVNALKAKHMLGSENKTDRLDAQGLNVLQRSGTLPTVWIPPAPLRDLRELFRTRMVVQRISVRLKNRILATYRKYNLSEVEVADRFGKRGQELLRQRLSLVPPYTRLVLEELFEQLNHALATVKRIEKRMQESFATDERMSLLESLPGVGSILGAVILSEIGDISRFPSASHFAAYAGTTPRVYSSGDRTHYGHTQVAVNHYLKWAFAEAANVICMNHHRWPHRHVCRLYLRLRARKGHGVAIGAVARHLAEATFHVLSRKEVYREPFIEAHSSTRG

SEQ ID NO: 296357 - protein, 344 aa, unidentified
MVTFGVDAHKRTHTIVAVNDRGTPVGQTTVGTTSQDHLVLLRWAARFGAERRWAVEDCRHLSRRLERDLLAAGESIMRVPPKLMAHVRDSARTYGKSDPIDALAVARAAQREPNLPLARLDGPDREVRLLVDHRESLISERTRLICRLRWHLHELDPAWEPKARSLDAQRTLDEVRGRLQDHVGVVARLAVELTERCAELTITIKALEKEITELTTQLAPALLELPGCGALTAAKIIGETAGVDRFKSRDAYARFNGTAPLPVWSSNKARHRLSRTGNRQLNAALHRIALTQARWHPPAKGMIERRKSGGNSGREALRVLKRRLSDAVFQALLHDQTAGLTLAA

SEQ ID NO: 296358 - protein, 368 aa, unidentified
MNKRTYVGLDVHARSVKGCAIDRETGEILRQSLAANDAGVAEWVSGLPGPVLVVYEAGPTGFGLARSLVGAGIECLVAAPSKLQRPPGDRVKTDARDAEHLARLALLGQITPVRVPGHADEAARDLVRAREDVRADLMRARHRISKLLLRHGLVYSGGHAWTDAHHTWLHRQRFDDAALQAAYEACLEAAELTLDRRNRLDAKITALAATERYAPVVHALMCLRGISVLTAVGLAVEIGDWTRFTGSTIGAYLGLVPSEHSSGASRSQGGITKTGNTHARRLLVEAAWHHRRPYAHASRDMRARWDAADEVSRVRGHQGNHRLHHKWDQFEARHKRRVIANVAVARELAGWCWSLAVAVQQEQPWTDE

SEQ ID NO: 296359 - protein, 442 aa, unidentified
MTNLSSCVAPTEWAAFVAIDWADQKHFWALTETASDEVERGELAATPEAVEAWAAELNVRFFGRPIAVCLEQKRGALVYMLAKYAHLVIFPVHPKTAAQYRETFCPSGAKSDPADAAWLLDLLLRHRHQLRELRPDTPQTRLLQHLTEYRRRLVDEATRQKNRLTSCLKIYFPQLLRWFDDIGSPVAGALLERWPTLPELQRAHPGTLRRFFHEHNCRSEERIQERITAIAAAVAAVRDEAVVEAESLRARSLVALLTTLRNQIAGFDQRIQEVVAKHPEQSLFASFPSAGPVLVPRLIAAFGTQRDRYGTANDVQSLSGIAPVTERSGKQEWVHFRWACSQFLRQTFQEYAAHSIVRSAWARAYYQSQIEAKKTHHAAVRALAFKWIRIMFRCWKDGKAYDEQAYVAALQKRNSPLAGLLTATGIGWQSTAGFQRLSENPS

SEQ ID NO: 296360 - protein, 453 aa, unidentified
MANRGKTACGTTILGRPEMKVKETDKGSWWTVGVDCGEERHRFVLLDDRGERQSAHWVRNRRDKIEEAVAQLVLVLPEGVRLRLVTEGVRSLGWVVAQVSGTLDLEVWQVNPKALNHYRDLEGQPRKDDDIDAYLAGRMVVFGMEGCRVAVDPRPEERALCRLTRLRRQLIDRRAVVKNRLRSLLVELAPEVVSKDWEGPAHNGKGMRAVLKRWPTFEGLEKARASTIEKVLTSSTRYGARCGAMSVPLKEMASRVAMPPMEREIVKMDISMAIAELEVLDGSIAKLEKEIKYRVMDHPVGKKLLDMPGEGPVTVGTDIGEVLPVARNVSEGKAATYAGLTPLSRRSGKGGKPSKLARGVNKHALRTNYLSAIAAVSASAIDAAYHQKQKERHQGHPKPHVKATLSLARQRFKIKYKLMTTDAVYDKEILISSHLERRRRVSANQNQNQPHAA

SEQ ID NO: 296361 - protein, 311 aa, unidentified
MRMKTHYVGVDLSKLECVADLAAEAAPRAFPNNVAGHAALLAALPAGAHLVCEASGGYERALVAACHAARVPVNLVQPARVRAFARARGLRAKTDPLDARVLSAFGQALALAAPPAPTAAQGELQALVRARQTLLAQLNEEASHAEHCTLPCLQEQARLRRALLEQQAAALEAELRQRVAADAAWRRRAARVQEVTGIGEVSAWIVLTELPELGRLERGQPAALLGVAPDPRDSGPRRGHRHIGGGRSAARRVLYMAALTAARCNPVLAPYYRRLVEQRRKPKLVALTAVMRKLAELLNRLLADPDFKLVS

SEQ ID NO: 296362 - protein, 360 aa, unidentified
MDSPVTSHAGELVVLGVDTHADVHVAVALDELGRRLGSKEAPATEAGYAKLFAWAEGFGTLDRVGLEGSGSFGVGLARFLRARGVEVVEVNRPNRQHRRRFGKHDTADAEAAARAVQAGTATGEPKSADGPAEVVRALHVVRRSAVKARTQAANQLRALFVTAPEELKAGLRGLSTARLVATASRFRPGDHPEDLRGATKLAMRSVARRHLRLSEEIAELEEQIARLVSEAVPALVSLRGIGTDTAASLLVAVGDNPERLKSEASFARLCGVAPLAASSGKTVRHRLNRGGNRDANRALHVLALGRMSWDERTREYVARRTAEGKSRREILRCLKRYIAREVYRVLTAPVVVPTLPPAVP

SEQ ID NO: 296363 - protein, 415 aa, unidentified
MAHMVATIDVHKKMLAVVVGDAARAGEVQFQRRKFGALDGDLRVLSEWFRELGVKEVVMESTAQYWKPVWQVLEETGDFHLELAQAQSNQAPKGRKSDFRDAERLWRRYIAGELRLSFVPDPEQRIWRTQSRTRMRLTQDRAKLHNQLEALLEEMGVKLSSVVSDLLGVSGTRMLRAIAAGETKPEKLAEMADTHLRATQEELCNALRAVSKLDQRYRLVLQQFLDRLELNERQSEELKAQLAKSMNPYSDQVERVAEIPGMGTDSAQQVIAEIGPQAEKFATDGDLSSWVGVAPGENESAEENHSDRSAKGNEAMRRILSEAANAAVKAKGTVFEARYKRMVWRDPKRHNKAIWAVGHHLCRVIWKVLHDGVRYEERGSRRNPKADKRRATRLARELKALGYTVRKAAAPEARG

SEQ ID NO: 296364 - protein, 429 aa, unidentified
MSTLFISVGIDVGADFSFMSIALPNQTLFGKPFKIVHSNPHSLERAVSIIREAEELHSMKTRVIMESTGVYHYPLFCYLRDKGLCVAVINPIISKNSTNMNIRKVHNDKFDSKKLAFIGLKPDLKVSVVPSEAVLDLRNLVREYYNLMDSRISYVNKLSGVLKASFPLYSGVFSKITTKTSLALLENYQSPSDFLLAGEDAIVGVIRNTARFGEKYAATKYHLLVAAANSAASFGHFVSSNAFQIRMCVSFIKTYDDEIAGVLSQIKELVALHSSEAFARQIRLIESIPGAGFLTAVTVIAEIGDFSAFTSPKQLFAFFGLDPAVKQSGKFVGTQVKMSKRGSAVARRAIYTIALVSIGVNRKGVANNHVLRDCYLFKCKSKPKMVALGVVMHKVCNIIFAILRDDKEFRIVTPEEHKAKHLLGKSSVA

SEQ ID NO: 296365 - protein, 420 aa, unidentified
MGFIGGDLRESFIGRIRGADPSRLLAVPIDVGKHSAAALVCDFWGEIVAPPFEFELNERGFQDFALVVARVEAERGAEWVRVGLEQAGHFHRPLQARLQTHGLEVSMFNPAQVKANRDQDLLRSLKSDATDLAAMAELLIRGKGRSSDSGDEAIAMQSALAAHRRRKVKARSVLKNQVHANLDLVFPGLSGCFSRIIHTKAGRLLIDEGLTPERVRRLGPERLARFCFKRGVVLRKAKAHQIVEAAKAAFALDPAISGVHARLLGADVRLLSRLDQEITWTEGELAEVLPRTPARVLTTLPLVSTVRASNYGGAVGDILRFRHAGQVYRLSGLVPKLYESAGKTRSGARISREGKVELREAIVDLGEALRQGHPDFARYAAELRSRGKHKGVVRCALGQRANRLAFAMMRDQQPFDPARW

SEQ ID NO: 296366 - protein, 373 aa, unidentified
MPRYSTAFGMDVHLRSTTVCALDAETGEAVTRRFRGNPWGEVAEWMSGFPGPSLAAYESGYLGFAPQRELSGLGVDCVVAAVSKVPRSAADLSSKNDRNDAARMAKAILSHDVTPVWVPSPEIEGLRDLAAAHDAATARLAAAKQRLLAFLARRGYVYGGTTPAGNPRRYWTYGFLRWLDGIHPADDGGIRALAALRNEVEAADEAREALLAEYRAAVAAGPLSAEVEALQSIKGCGFALAAAFASEVGDFSRFRSGRQVTAYFGLAPKQRSSADSVRLGGISGAGNALVRKLAVEGSWCYAQAGHQPKLMPKGSGVPLEIRMHGRKGSERLLRRREEMLERGMPQAKANAATAAELVRWLWALGAMCREAGE

SEQ ID NO: 296367 - protein, 344 aa, unidentified
MTSMHFIGLDIHKKTISYCVKDVSGTVLSEGTVAATRAQLDDWVKTLPAPWTVAMEATMFTGWIYDHLLPHAAAVKVAHPLMLRAIAAAKKKNDRIDASKICDCLRCDFLPECHMVSAEVRERRRTLRYRKLLVRQNVQLRNKVSQMLMESGVIYNKQKLHKVGYFKELMETNPDISRELKPLLAICRETIVRIGKTESALIRSLRRDPLLHARVERLMTIPAVGPITALTWALEVDDVARFHSVKQAVSYCGLCGAERSSAETIKRMPISKQRNKHLQSVLIEAAKLAPRLSPELALVYDTEKQKGHANRASIAVARKLVAYLLAVDRSGREFVVAGERRAAA

SEQ ID NO: 296368 - protein, 317 aa, unidentified
MTKRDEYVGIDVSKKTLDVATLHRGEHRTVRHDEEGIRSICEQMLALRPKLIVMEATGGYERELAIALVLAGLPVAVVNPRQVRDFAKAMGMLAKTDKVDAGVLALFGERIRPEPRGVPEKEVRELNALITRRAQLKEMLTAEKNRMGVAPRTMRPSILEHVRWMESQVKELEAELNQVIQASPIWRAKEELLTSVPGIGDVTAQSLIAMLPELGHVTAKRAAALVGIAPFARDSGPKKGKRSIWGGRASLRAALYMATLSAIRWNPVLRAHFKQLKARGKLFKVAMVACMRRLLTILDAMVRKNQHWTDVTLVHAP

SEQ ID NO: 296369 - protein, 309 aa, unidentified
MKESFVYVGVDVAKADLQVAAGEQNRRYVNTAAGHREVVGWLRRLGRVSVVLEATGGYERALVAALHAEGIAVSVVNPRQVRDFARAQGRLAKTDKIDARVLADYGVALRPRPTVAQSPAQVRLTELVRGRAQLIAARGAHRNQLEQVRDALLRRCLREVVRAFDVRLARLEKAIAELLAGEAVLGAKLRKLTQVQGVGVTTAALLLAELPELGSLSKTEVAALAGLAPRNRDSGQFRGQRRIGGGRGAVRTGLWLPTVVAVHHNPILKAFYLQLLARGKPAKVALTAAARKLLIHLNSLLKNPQLSPC

SEQ ID NO: 296370 - protein, 354 aa, unidentified
MIIIGCDYHPGFQQIAFVDTETGDCGEQRLEHCEEAQKFYGELASQGKKVRVGMEASGHARWFERLLEELKIERWMGDAEVIRAKRGRKPKTDREDALHILNLLLTGDFPKIWVPSWENRDLRQLLWHRHRMVQARTRAMNQLQAVALNEGLRCKKKLWREQGREQLEAFRLAPWASRRRKDLLELVDRLNPTIAELTQAIEQEAEKCPQAQRLMTHPGVGALTALAFVLIMGKAERFQCGKQVGCYLGLVPLEESSGERRRLGHITKQGNSLLRFLLVEAAQVTSRTIPEWRSKYMHLTMRRGRKIAKVAMARKLATRLFWMMRQGWNYQQVMKFGSHVEQPGNRHGVQSNTE

SEQ ID NO: 296371 - protein, 368 aa, unidentified
MNNNTLEAARTAGAKELKNQKAAKAKRIVIGTDVHKNSYQAARKIDNGAIGAVAKFRSQEELLLYVEKQKEQAEEVVVVYEAGPLGYVLYRALKARGLRCYVCAPDSREQKRKRRKNNTIDTRTLTSNLFNYLHGNERALQLARVPTEEQEQARLQSRQHDQLVEERKRLGAKGNALLLSRGFGSWANWWRPKAFSRLSQLVPGWLLELLETWVDLLRKLDEKIRRAKVALAQRWSGPRPKGAGAPSLVQLQSEVLDWGRYSNPRKIGCLAGMVPSEWSTGDTQRRGSITKVGVGAIRRIITEMVWRIILFQPQYKAVQKWQEVLRGSNRGLKKKAVVAIGRQLMVDLWRLQTGRISAQELNLVMIGG

SEQ ID NO: 296372 - protein, 363 aa, unidentified
MFESTTVSVGLDVHARSVRLAALRADELLEERTLPYDEEAVERVLRRWPAVRCCYEAGPTGFGLYRYLVERGIDCRVVAPGLVPQRPGDRVKTDSRDARKLARLLAGGLLEPIHVPSRELEAARDLVRGREDARLDRMRDRHRLSRFCLRHGRTLPTSSWTIVRRKWLGEQRFEFAAEQCTFDTYVHTVDLVDARFEQLERAIREVAEQGPWAQLVARLRCLRGVDTLTALALAAEIGDFDRFTSAEEFMAFVGLVPTERFSGEQRRQGSITKVGNSHVRRLLVESAWHARRRPKVGYELARRQRGHDAAVIERSWRCQQRLYQRWQRMAGRGKPQQKIVVACARELAGFVWAIATDQPLRTS

SEQ ID NO: 296373 - protein, 378 aa, unidentified
MSATQTVPQGNDTAIQVQLYMSFELGDKSWKLTASDGRRGPSRFSVHAGDTAAVLDCVRRAKERCQLEPQAPVHSCYEAGRDGWWLHRWLSGQGIDNLVVDPASIEVNRRARRAKTDRLDGDKLLVMLRRHHAGERIWSVVHEPTPEQEDARRTHRELARLSQERTAHTNRIRSLLVLHNLRVPVIVGGRDWAAWWERHREQVPPVLRGEIERESARLALVRQQLKVLEAARRQELAEGKHPLVAQLARLRAIGPKGAWVLVKEVFGWRRFANRRELAGSLGLTPTPYDSGGSQIEQGISKAGNKRARTMLVELAWRWLQLQPDSLLTQWFNRRFAGGGKRMRRVGIVALARRLAIALWHYLEHGEIPAGASLKPAAA

SEQ ID NO: 296374 - protein, 333 aa, unidentified
MGQYVAIDLHKRRSLIVRADEQGKRLETVHIDNDPINLAQVVAAAGEDAEVVLEATCGWYWAADVLAEMGANIHLAHPLGLHWDTRRVKNDVRDANALLDMLRLDMVPEAWIAPPPVRELRELVRYRAKLVMLRSGLKSQVQGVLSKEGVITSRYELWGPKGRGVLDGLDLAPSYRIRIDSLCRLIEHYDTEIRGVGVEIAGWLDDDLGYQAIQAIKGVGPVLGAVFVAEIGRIDRFPSPDKLCSWAGLTPKHRESDTKVSRGGITKQGSRLVRWAAIEAISRERDTTVAELYSRVKDRRGTNVARVAAARKLLHLVYYGMRDGEIRCLAQTG

SEQ ID NO: 296375 - protein, 366 aa, unidentified
MVSSTYGVRFVACAKHHRETTMKYYAGIDVSLERSSVCIVDAAGKICREGEALSDPESLAAWFLAFGSELELIGLEAGPLSQWLYAEMTAKGLSCQLIETRHVRTAFKIMPVKTDKKDARGIAQLMRLGWFRPVHCKSQPAQEVRAVLTARKLLQTKLLDIEKSLRGILRGFGLKVGAISTGAFAARIFELCEGHDTLTQIARSMLDARQALLEQFNLLHRKVLAMAKADQRTCRLMTIPGVGPLTSLTFVSAIDQTERFSSSRDIGPHFGLTPRKYQSGETDYTGRISKTGDSSVRTALYEAANTIMIRPSKAIKLKAWATAIAMRSGVKKAKIALARKLGVIMHAMLKSGQDFATTQTERAAMA

SEQ ID NO: 296376 - protein, 347 aa, unidentified
MLYVGLDLSRKRLDWRALEPEGAVVGGGAVPPDRDGLGLLARRLGDAGQPIKAVIESMTGARFVHDQLELAGWDVRIADAVKARGIAPLACKTDRIDCWVLAELARLELVPEIWLPDPRVRAERERARFRLHLVKHRNSLKNRIHAILFQHGIANTSSDLFGAGGRRLLERLALPEPWASTVRASLQLIDSLDEQIDACALELRQLGADHRYIPLLLTCPGIGWVLAFTIASEIGDINRFPSPRKLVGYTGLCPRVDQSGERDRRGPLRKNGPNYLRWALVEAAHTAARSHPPYTTIRERMQTRHGKTRGTKIAAIEIARRLAEANWHMLTKNQPFTPASAPASLAA

SEQ ID NO: 296377 - protein, 359 aa, unidentified
MTATMTWVGLDVHARSTHAAAIDRESGELRRARFGAGVEEVTAWLQALPQPIHGCYEAGPTGYALYRAAQAAGLRVDVVAPSKTPRAAADRVKTDHKDAELLVRLLLAGSLSMVAVPPASFEAARDLARAREQVRADLARLRHRVSKLLLRYGRVYDGGTWTQAHRRWLAAQRFEHVPTELAYLDALAAIDGLLARRAALDERLSLLASEPEHWPTVARLRCFRGIETLSALVLHLEVGDFARFQRPGQLAAWLGLVPSLHQSGESERRGPITKTGSGFARRILVEAAWHYLREPRIGANLSDRHAGQPDHILQIAWRAQHRLHRLQQRLRARGKPGNIAVVAAARELACFLWAAAVAD

SEQ ID NO: 296378 - protein, 424 aa, unidentified
MEKSSTLYVGLDVHKDSIDIATADAGRDGEVRHVGSIGGDLAALDKALRKLLSRGHRLHVVYEAGPCGFVVWRHLTARGIDCEVVAPSSIPRRSGERVKTDRRDAMMLARLSRSGELTAVRVPGAADEAVRDLVRTREDGVRECRNARHRLKALLLRNGIAYAGKSSWTAAHLRWLATLKMEHAAQQVSFQEYLHSITEATARIARLEQAMHQALPDWSLKPVVQALMALRGVQSIAAMSLVAELQDFARFDSPRKLMAFVGLVPGEHSSGPKRRQGSITKAGNSAARRMLVEIAWHYQHSPRVSPIIAARQDRLPKAITDIAWAAQLRLHSKFKRLVARRLMKNKAVVAVARELTGFVWAIGCEVQNSGWQGVPIEPAAAAADEVTPLARTVDSRRSTTHPPALPASGKGAPTTSRRVAQALA

SEQ ID NO: 296379 - protein, 366 aa, unidentified
MKEGLLGWQPMGCLSEVPKEALMLHVGLDLSRRRVDVCVLDDAGGLLMVLQAPPDADGLRQLAARFDGEQVRGVVESMTGARFVHDMLEGWGWTVEIADAQRVKALAPLTAKTDRIDARVLADLSLRDLIPAVWLPPPEVRGMRELARFRLHLVKHRTGLKNRIHSTLMSFGRQVPVADLFGLAGRELLSSLNLPEMWQRTVTATLEVIDHLDSQVHRCDLTLGQEARRHPDVSLLQTAPGIGPVLGYTIVSEVGDIHRFPTPKQLVGYTGLCPQVHQSGESEWHGPLTKHGPCWLRWAYIEAAVHASGHPAYRPAHDSICRRLGPRRGAAVARVDTARRLATATWWMLTKHEPFHPASPLPPLAA

SEQ ID NO: 296380 - protein, 441 aa, unidentified
MSLMKPLKYCGIDVSKSFLVCAAIGDLDPHHNQYLPGQAKDIGIINDEPLVVRTFDNSWTGVITMTHWLSSVGVSVAVMESTGSYWYGAYSALEQKGVQPLLANPTQVKNVSVHKTDYRDSVWLAVLLRAGFIIPSYVPAGLLKELRDLTRMRTRIVKDKTRLKNRCHSILDSMLVKLGLSDVFGKKGRHTLLRALNGDYDGLTEDQRTAFGTMSEAQGMMVIDLMSEVSHLEERVTRYEGAIARVVEKFKEVKGDKTFQLLTTIPGVRVIYAATIMCEIGDIGRFATPEKLSSYAGLAPRVVQSGKKDTTGKTGHMCNRHLRTAMFMVAETSVRFGRPRLRRFHELKRRKKGDYRKATIALARKLMGVMWRMLKDGIPFDMAYDREQEKRKERRVRGSLKRLKKMENEYGPEMVYSALQEYMKFKKGEVQNDPVTSKLPS

SEQ ID NO: 296381 - protein, 352 aa, unidentified
MKNDCTVYVGLDVHKESITVAYAIDAGEVESLGKIGTTQTEIDRLCKRLLSKASHVRVVYEAGPCGYGLYRQLTERGFESMVCAPSLIPRKPGERVKTDRRDAAKLVRSLRTGDLSAVYVPTVEDEAFRDLARAWAVAKEDLRQARQRLKSFLLAHGAGYTGRADWRESHRRWLSGYSLANAWQQLAFEEHRRTIEDRLVQCGRLEAALLDAVVNWRFYPVVLALQAMRGVQFVTAVGMVSELGDLSRFKHPRQLMAWLGMTPSEHSSGGKRRQGSITKTGNSYARKLLVEAAWSYRHVARVARRFSSDTKGFPKRLSIGHGMRSYDCAGDIASLWPAAKMPTSRSSPLLAN

SEQ ID NO: 296382 - protein, 368 aa, unidentified
MKKETITSDGISGESLVNYVNQVLNLGLDVHYRQVTVAMQEDGGRIKAAGKMGHADFLNWVPKKLEEGWEIYSCYEAGASGYWLHRELEKLGVKNLVVVPKAMGQGGKKQKTDQRDAGELCDSLDRYLRGQEKALSVVAVPTEEQEEKRALIRYHRQIMADRGRCEARGKGLLCAQGIQVRGRWWRGDSWLELTSDPRLKDWMKEQLVGWRNKILSTDEEQSALRERIAALAPAILPKGVGAYSAAVLHYELRGFEHFKNRRQVGSITGLCPGVHLSDGRGKEGSINRCGIGIVRWTLVEMVWRLMIWQPQYPPVRRLAAGLVKSKRARKRLVVQAARRLAIDLWRLSTGQTTPEKLGLVMQSNATGN

SEQ ID NO: 296383 - protein, 324 aa, unidentified
MYLGLDVSKNTLDCCLNKDGFFYACKISNNQKGFEKLKAWLDGHGCDETLHCCCEATGNYYEAAAEYLAAHYKMSVENPRKIKAYAVSELKRSKNDKQDAKTIAEFCEEKSRKLKVWKPKNQTEKELQSITRYIARLKQQKASETVKRQTASDNIKDLIDETIDYLGRKIKEAEGRLKTYISQNPELKQKADNLTTIPGIGIQTAVIIMAALSGNNDFKTAKQFTAYLGLDPAEYKSGTSVKGKDRISKVGDCITRAALFSPALVAYRIGTFPRLVANMRQNGKHIMQILTAIMRKLAVVAYTLHKTDTTFEKQRHTRIQQKAA

SEQ ID NO: 296384 - protein, 434 aa, unidentified
MIEQQNLIYVGVDLHKQHHTAVIIDCWSKKLGEIKFDNKPSAFPLLLKELKKYTKKSLSVVYGLEDVGGYGRGLAVYLKDNHCWVKEVNAKHANARRQSHVTVHKSDSWDAECVAKVLKDELELLPDAKPIDLYWAISQLVTQRRWLAKSLTETVKKLHQQISYSYPSYKKFFSEVEGKTALAFWEAYPSPHTLKDMSEEALAAFLRKYSNNGLSHKKANEILTLIDADGDTYRDFQQSRDSVVVSQVISARFFQKEMARVEDEIEQLMKKLGFQLESMTGIDVVTAAQLVAEIGDIHRFSSPDKLARFAGIAPVTVGSGNKSRNYKSKQGNRELHDIIKNLAIRQLGVTRTKREPKNAFFYSYYEQKLAEGKTKQQAVVCLMRKLVNIIYAMMKTKSAYVMPSTPVRQSRMIEWVVIGSVFSVATFFVQSSVL

SEQ ID NO: 296385 - protein, 399 aa, unidentified
MRNAGIHADSLLEVRRMYNAVGIDVSKGKSTIAVLQPGGTVIRKPFDVSHTSQSLIELAHYLGSLEGSTKIVMECTGRYHEPMLKALYEAGLFVSVVNPHLIKNFGNNSLRRVKSDPADARRIARYTLDNWAELRQYSGMDNTRTQLKTLNSQFSFFMKQKVAAKANLIALLDNTYPGVNKLFDSPPREDGSEKWVDYAYSFWHVDCVRRIGLKTFTERYRAFCRKHHYIFQPDKPEKLFHASKELVAVFPKEKTYKLLIQQSIQQSNLASGHVERLRQEMNALASTLPEYSTVMGIYGVGKTYGPQLIAEIGDVSRFTHREALTAFAGVDPGVDESGQHKSKSNRASKVGSARLRKTLFQVMATLLQNAPENDPVYRFLDKKRAQGKPYYVYMTAGAN

SEQ ID NO: 296386 - protein, 338 aa, unidentified
MKLYGAIDLHSNNNVTVVTDEQDHVVYEKRLPNDLALIAQQLAAYRDSLQGIVVESTYNWYWLVDGLMDHGHKIHLANTAAIRQYEGLKYSDDQYDARWLAHLLRLGILPQGYIYPKEHRPVRDLLRKRGQMVRQRTMNLLSIQNLFSRNTGGSMNANRVKRLDSKEVEELVANPDLVLAIKANLAMLQCADEQINILEKSVLDRVKLQPEFGWLTTTPGIGHILALTIMLETGDIGRFATVGDYASYSRCVGSKKITNGKKKGQGNTKNGNKYLAWAYVEAANFAVRYSAKIKSFYQRKKAKTNGIVAIKAVAHKLSRACYYIMKDQVAFDVSKAFA

SEQ ID NO: 296387 - protein, 434 aa, unidentified
MKKHAYRARNINQFSLEKLQGKLSGERSIVAVDVAKHDFAVGIAGDDGLVLEHLKFSHPKQTLQFLDLLEQLRHPGARVEVVMEPTGTYGDAVRYQLSARGIPVFAVSPKRCHDAAEIFDGVPSLHDAKASTILARLHAQGLSKPWPEGESSRRALRAIVERRELYHDPLERDRGRLEGILSRHWPEYGEHLDPQQQKTALALLAEYPGPATVAQNAEAASEFMVRTSRGNLSRDKIAGVIDSAKTTLGTPMVEQEQTLLKELADQMLALRGELDRIDAQIEELIQSEPEAATLASTVGAVTAAVLIAMLGLARSYPSAGAYVKAFGLNLTEHSSGQSKRPGSGLHISKRAPGIVRKYEWLAVLRLIQSEPLARAWYEGRKAFQCDQKPKAVVALMRKHVRALWHVGKGEAFDVEKMFDTARLKVPVAAQAADG

SEQ ID NO: 296388 - protein, 387 aa, unidentified
MTHSCKSAPATGAVDYDSTLIGALELSSKKWVVAVQLPGSKKHSRHVVEPNSPALAALIERLKARSLVAGRPILRMILTHEAGRGGFWLARFLQRRGVEVQVMQASSLPVDRRARRAKTDVIDVEMLLRTLLAWLRGEPRVCSMVPIPSEADEEARRAHREREDLTGSRRSILNKIDGILATLGIGGFRALRRDRREQLANLRQPDGAPVPPAAQERIERLLDRLELVVKQVKAVEAARDAVVKKPSARDESERMIRGLVSLCGIGVEGATLLVREAFCRDFANRRTLGAYAGLTGTPFASGGMQREQGIGKDGNHRLRALIVELAWFWLRYQPDSALAQWFRARVGGAKGRVAKIMIVALARKLLIALWRFARDGVIPEGATMKSA

SEQ ID NO: 296389 - protein, 416 aa, unidentified
MKIVRPICCGMDVHKNIIVATIGITNKKTRITEYIQETFSTLNPDLLNLKQWLINHKCFDACMESTGKYWIPIFNILEDEINIYLTHPKYVKAIKGKKTDKKDSKWICDLFKHDLIKFSFIPPKEIRALREISRYRYKLVGMRSSERNRYQNCMTVSNIGIGSVFSDPFGKSAQAIMKEVLESDIIEDEKILKCIHRSCKNKDKILDSIKHCNIETDQRFKMNESMTHMEELQVHINNCEIEMMKRAAPMFDQFMHITQLPGISTLSAILIISEIGVDMKQFESDKQLTCWAGLAPANNESANKKKSVRISKAGQYLKPLLVQCALGAIKDKEGYFGIKYSRIKKRRGHKKAIIAIARMMLVSIYHMILTGEKFNPSDYESFKNPKPPIKQQDLTEESAIEFLKKSGFDVSKLTKP

SEQ ID NO: 296390 - protein, 414 aa, unidentified
MVEETIAWFAGVDWGSAKHQACLLGAQGAIVGEREFPHSGKGLSELADWILSMTGIASAVAVAVEVPHGPVVDVLLDRGFIVHAINPKQLDRLRDRFSVAGAKDDRRDAYVSADGLRTDRHLFRRLQIADPRLIELRAWSRLAEELQEERVRLSNRLHQQLWRYYPQMLKLTDDLTATWLLELWLKAPTPAKAARLRVSAVERLLKQHRIRRVNAEVILRTLRQPAIKVPDGVAAAAGIHIHSLIVRLRVVSRELNDAKRKLDELCTAIGETGAASEERAEHRDVAILRSLPGIGRINLATLLSEASGPLSRRDYQALRTLSGVAPVTKRSGKSHVVVMRYASHVRLRNTVYHWARVATQHDHESRTRYTALRRRGHSHGRAIRGVADRLLAVACVLLQRQTLFDPHFRQATAS

SEQ ID NO: 296391 - protein, 336 aa, unidentified
MKNYVLFTGIDVSKDKLDICYVDKNGNVLGSKVIDYKPKNIKSIVKDLERLGYNLTQTLICFENTGVYSIKLGEVLSELNAYYSEVSALEINKSKGITRGKDDKNDAKMIALYALRNIDKIVLSKVTDEAIQELKLLFAEREKIQKSITSLKMTQENEGRVNSKAYESVQKINQQTRVALKNSLKAIENEIERVFKEHPELKKNRDLLKSIKGIGTIISAYLVMITHNFTKFKNSRKFACYSGIAPFEHSSGKSVRGKTQVNHFANKKVKALLSMAVQSAKKYNSQIKAYFQKKKEQGKHILLISNNIKFKLVNIAFAVIKRGTPYVDIYKYATVA

SEQ ID NO: 296392 - protein, 370 aa, unidentified
MLLGDPAARSKGHGRKGRSVDGGAGSFSSKTSNGCLGTSPHLQARGRKGGNLRREQVAGESMFIGIDVSKTKLDVAVRPSGERWSVSNEEKGVSQLCQRLQSLSPQMVVLEATGGLELPVASALAVAKLPVAVVNPRQVRHFAKALNRLAKTDAIDADVIAQFAEAVKPELRPIADADMQRFSELLTRRRQLVEMLVSEKNRLAVATTKPVKQRISYHLHFLKEELKSLDQELEKEIRASPLWREKDDLLQSVPGVGPVVSRVLIGELPELGSLTGKEIAALVGVAPFNHDSGKLRGQRHIFGGRAYVRTTLYMAAVCGTRWNPVLKRFYAKLLAAGKPAAVALTACIRKLLVILNAMVRDQRPWAPEVA

SEQ ID NO: 296393 - protein, 355 aa, unidentified
MNNTKYIGMDVHRESISLAVMNSAGKIVLECVVETKASIVLQFIGGLSGSLHVTFEEGTWAAWLYDLLKPHVTRLVVCDPRKNASMKEGNKSDKIDARRLAELLRLNHLNPVYHGEHGLRTLKELVRSYLTITKDLGRVMTRVKAIYRSWAIACTGKQVYAPQHRAEWLAKITEAGVRRRAEFYYQQLDALRSLRREVRRELLEESKKHQAWKRLCQIPSIGPIRAAVLLGILQTPHRFRTKRQLWTFGGLGIETYSSADHRYVEGQLQRSKKPALIRGLNENCNHDLKNLFKGAAIIASTKPGPFQEFYAALLAKGMRAEMARLTLARKIAAITLIVWKKGVSFDAQRLKPQTA

SEQ ID NO: 296394 - protein, 321 aa, unidentified
MVYIGIDISKNNFVVAYPSTNGYSTKTFPNSTAGVRTFIATLSVAEHHCVMEATGNYCFLLLYLLHQSSIAVSLVNPKQIKHFARMMMAVTKTDEKDAYMIAMYGEKMNPPIYKMPSQSIILLKQKKTVIRQLRKQLVASKNLRGSLIVLPYRDKACVRTLDKTIDFLTKQIEQLEAELADIASSEFDKQLKALTSIKGIGITLATALILTTGGFTYFDNAKQLSRFIGICPTYQQSGTSVNIKGHINRNGDEHLRSLLYVASWIALRYNASCRECYLRLKANGKPSKVALIAVANKLVRQAFAIATTDSTYIDGFISTKK

SEQ ID NO: 296395 - protein, 338 aa, unidentified
MTVVNLARLFVGLDYHQDFVQVCVLDEAGKIVSNRRVENDWRRIIAAVPTGAAVQAALEACCGAADLADELLQAGWSVSLAHPGFVARMKQNPDKTDYSDARLLADLMRVGYLPKVWLAPAELRELRRLVRFRQQKVNERRNVKLRIRAILRDHRIKDLDGNPWTRKWLKCLAALAHIGPDTEWILQQHLTHLSRLNGEIRQVDRRLEERVADDAVVQKLRQQKGIGLVTSATMRAEIGRFDRFQTGKQLARFCGLSPRNCSSGNKQADAGLIKAGNPQLRAVIVEAVHRIMHHHPRWMKLAQQLKSRGKHNCLVVAAIANRYMRWLHHRMQPEALAA

SEQ ID NO: 296396 - protein, 371 aa, unidentified
MFQPIRYVGLDVSKETIAVAVAEPDGSVVEYGDIPNDPSSVRRLVEKLSRDAQLRTAYEAGPTGYPLHRQLTSLGVENKVVAPSLIPRRPGDRVKTDQRDAVQLARLLRSGDLTPVWVPDEAHEALRDLVRVRDDARTEGLRAKHHLSKFLLRQGVSAPARVGRAWSAKHQAWLNTLTFRDRAAQVTFDDYLACVRASTERIRRLDAALLECGATSPHVELLRAFQAVRGIGFLTAVTIVAEAGDLHRFRSAPAFMAYVGLVPSEHSSGGSRRRGHLTKTGNRLLRHVLGEAAHHARLQPAVSAALKQRQQGVPKEVVEISWRCQQRLHHKYLHLGGRIGRQRAISAVARELAGFVWAIGQALQPVAAVAA

SEQ ID NO: 296397 - protein, 394 aa, unidentified
MKLIGIDIGKNKHFFSIMDKDTGEVIEAPSSFLNNKEGFDSLIQKLKPYSKDTVLIGMEDTGHYHFALLKYLLNRHFTVALINPKTTDFTRKIQGGITKNDKLDTLTICDVLDTHERKKQYRITKVNHFDLYEQKQLTRHHHNLKEELNIYTNRLQKSIDIVFPEFNSLFKSKYGAVYMNILKTFGSADNIANTDIRTLRKYFEVKGRGKRISLTPEQLKECAKLSIGIPSAAEVIQIRHLISQIELINEQIAEIDKKIEEFSIQNNSPILSIPGISHFSGTSILAELGDVCNYSKPSQVIKFAGVAPYHYESSQYNAQHTAITKKGSKYLRKTLYQIILPVIRYNPIFQEYYQLKISQGKGHRCAQGHCIRKLLRIIYHLLSTNQQFNPELLR

SEQ ID NO: 296398 - protein, 480 aa, unidentified
MRPHIPLKEDTMGNSKNRKRKNKKHRKVDISNLEQLNLNAAGIDIGAEFHYVAVPNGRDPEGQDVRHFSTFTADLHKLADWLSQCKIDTVAMESTGVYWIPVFEILDSQGFDVRLVNPRNIKNAPGRKTDVLDCQWIQQLHTYGLLQSSFRPEDQICELRAYLRQRAMLVSYASHHIQHMQKALEQMNIKLNQVISDITGVTGMKIIRAIISGERNPVKLASMRNARCNNSESIIAKALEGNWRSEHIFALQQAVELYDFYKKQIIACESHIQRHLESFDDRSNGTPLEKSPRNSRGSSNKFNFDARRYLHRITGVDVTRIEGIEAPTALNIIGEIGIDMSSWPTEKHFTSWLGLCPGSKISGGKVLSSKTKPSSNRAAHAFRLAAYSLQRSKSAIGAFLRRKKAQIGAPKAITATAHKIARIFYNMLKYGTEYVDLGQEYYEQRYQDRVVANLKRKAKQFGFELVNIKEHELLTELPAS

SEQ ID NO: 296399 - protein, 339 aa, unidentified
MWYSGIDQHKRDSVITTYGPDGPRVKQVRVANTPLALAQYFADFPSPHKAVVESTGGWYWLADVLAPLGVELVLAHATRLKAISAAKVKTDQVDSDVLALLLRADLIPEAHMIRPGQRGPRDLMRARLRLVEKCVSAQNSIDRLLEKFNVDTVAELEALYQLQAGCHQAQIHLLEEQITTLERALHPHLIPNPDVQRLLWIPGVGKVNAFTLYTEIDGITRFPSVRQFFSYSRLVPGADNSGGRTRHRSGSKAGNRYLKLAFSHAGIRAVQYYPEIRAFFKAKARRKPIRIARTLVALELARIVYQVLVKQEAFNGQFKSRPLSRGKHAQWPRRASPPA

SEQ ID NO: 296400 - protein, 374 aa, unidentified
MKTNSKMTRPRKNAAQTTTTLLTRTVGIDLGDQMSHYCVLDEQGDIVSEGMLRTTEAGFREQFQGMARAKIVMETGTHSPWVSRYLEKLGHEVLVANARQVRIIYDNDRKTDKIDSRTLARLARVDKSLLHPIRHRSAKAQADLAVLRARDQLVSVRTTLINCVRGMVKSVGGRLPSASGAYFATKVREQVPACISGALLPLLDEIEQLTVRIREYDKRIDELAKTKYPKTELMRQIPGVGVVTSLAFALTIDDPNRFRKSRDVGSYIGLRPKQSDSGSSKPQLSISKAGDHLVRRLLVNCAQYILGYWGPDCDLRRWGLSLMAHGGKNAKKRAVVAVARKLAVLMHKLWVSGEVYEPLRKSMDAELNEAVPAA

SEQ ID NO: 296401 - protein, 403 aa, unidentified
MNAVGIDVSKGKSMVSVLRPFGEVVATPFEVRHTASELKKLADYLKSLDGETRIILEHTGRYYEPVAQLLHDSGLFVSAVNPKLIKDYGNNSLRKVKTDKADSRKIARYGLDNWVELRQHTPIDTIRYQLKIMNRQYGLYSKSKVSMKNNLISLLDQTFPCVNTLFSSPAREDGSQKWVDFAASFWHLDCIRGLSLAAFTQRYQKWCKRHGYNFSNGKAAEIHESTKNQIALLPKDAMTKMLVHQAIEQLNAVSKAVELLRTEMNRLAQQLPEYPVVMAMGGVGKSLGPQLMAEIGDVTRFAHKGSLAAYAGVDPGANQSGTHEAKSTASSKSGSPELRKTLFMVMSSLLQTSLANDPVFQFLDKKRAEGKPYYVYMTAGANKFLRVYYGRVKEYLLSMGSAD

SEQ ID NO: 296402 - protein, 349 aa, unidentified
MNHVAIDLGGRESQICVRGADGTILEEKRHATRSLDKLMKQWPPSRIILETSAEAFRVADAAKAAGHEVRVVAATLVKTLGVGARGIKTDRRDAQTLSEVSCRIDLPSVHIPTPASRELKSMCGAREELVEVRTKLVNNIHGWLRCQLWRIRSGVPVSFPERVRTHASSLSAELPPHVARNLEVIELVNQQVRAADAQLRETVKADATCRNMMTIPGVGPVTSARFRAAVDDVTRFQSAHAVQSYLGLTPGEHSSSERQRRTSVTKAGPAAVRRMLIQGAWAAFRTRPNEPMVQWARAIAERRGKYIAIVALARKLAGIMFALWRDGTTYRPALSAKTTAESTGSTVTM

SEQ ID NO: 296403 - protein, 321 aa, unidentified
MNKNATVPKYVGVDVAKATLQVHLQGHQIEFENTASGHIQLCNKLRALTEPHVVCEATGGYEAAMAQAFHDANITVSVVNPAHVRAAAKAQGKRAKTDPLDAASLTDYGQRFQPAPTPEVAALQRQIRHLVLWLKQLIDAMAVAKAQAEHQLDAFVKQQHAQLLTHYHQQIKLTEQKVKTLLAQDHALQQRLDCLMEIEGVGLRTALMVLAYMPELGTINRGQAAALAGLAPWTRDSGTMKGKRCIGGGRAEIRPVLYMSSLSSIRYNSILKAFYKGLRERNKPGKVALTAVMRKLLVYMNYKLKHLQSPLAEQKLQTPKL

SEQ ID NO: 296404 - protein, 329 aa, unidentified
MFYLGIDVAKAKIDCCLILEDSAGKKKTKTFPNTPKGFEQLQAWLNHHAAGPAQTIALMEATSVYHERLAGYLFDAGCQVCVANPARARYFAQSMSRLNKTDKADSEVLARFAMTADLHFWQPLPGYIQLLNALLDRRAVLGEDLQREENRLEKAESTFTIEPVLQSIHKNIKQLSRHIQDLDRQIDDHIDQHPDLKNDKELLSSIPAIADRTSLLMLSFLRSHAFERASQAAAFAGLVPIQRQSGSSIHGRSRLSKAGSSKIRAGLYMAAIVATRHNPHIKGMNDRLLANGKTKMMAVGAAMRKLIHLCYGVLKHQRPYQENYCANSQ

SEQ ID NO: 296405 - protein, 377 aa, unidentified
MDSENIAAYVGLDVHKETLAVAIATPERLGEIRYYGTINNEAQAVRRLFQKLQGLYGNILSCYEAGPCGFGLYHQLTVMNIKCLVIAPSRIPKSPTDRIKNDHRDAISLARLLRAGELTPVWIPDLTHEAMRDLIRARAAAKRDSRVARQRILSMLLRTDKHYAGKHWTGKHRTWLANQSFSQPSQQIAFQHYCQSLEQIEDRILQLDQEISRLLPEWSLCNLVCQLQALKGVGQLIAITLVAELGDFSRFSNPKQLMAFLGLVPGEYSSGNSIRPRGITKVGNSELRRLLYEAAWSYRTPAKVGAWLIYYRPDSVTQYSKDIAWKAQQRLCSRYRSLTAKGKKSQVAITAVARELTGFMWDIALAAQSSFSQQKQN

SEQ ID NO: 296406 - protein, 345 aa, unidentified
MLFVGDDWAEDHHDVELQGPAGRRLARARLPEGVVGIARLHELVAAQLGADDGPEQVVVGIETDRGPWVQALLAAGYQVFPVNPRQVARYRERHGTSGAKSDAGDAHTLADMVRTDRHQLRAAAGDSDLAEAIKLLARAHQTLIWDRHRHLLRLRAALVEFFPAALTAFPDLAAADALELLAAAPEPTSAARLSRTRVAAALTRASRRGVPAKANQIQQALRAEQLPQPETVVAAYAATVRAAVAVIGTLNAQIAALAGQVEAHFGGHPDAEIYRSQPGLGGVLGARVLGEFGDDPGRYRDARARRNYAGSSPVTKQSGKKKVVVARFVRNDRLADPLHQQAFVL

SEQ ID NO: 296407 - protein, 358 aa, unidentified
MVQIKSNKLDFTGQSIFIGLDVHKKSWKVSIYTRHGEYKSFSQPPQTAVLVHYLRHHFPGALYYAVYEAGYCGFWIHDELVQEKVHCIVVNPADVPTKNKERRRKRDRVDCHKLAQGLCHQELEPIYVAPRAKLEDRSLIRTRLSMGRKQSRCKNQIKSMLLFYGVEIPEEREMGHWSRRFLQWIKGIQMERASGDLALKVHLEELDHLRQIIAKLNRAILALSRTEQYRPWVSLLRTVPGISTLTAMIVLVELGEIMRFPSLDQLCTYVGLIPDTQSSGEKEHVGGMTHRGHSYLRWLLVEASWVAIRKDPAMMMAFNEYSKRMKKSKAIIRIARKLLNRLRYVLKNKAEYVPCVIE

SEQ ID NO: 296408 - protein, 345 aa, unidentified
MKKVVKQVAGIDVAQKELVITLGRMFDDFTIELFSYKVFKNNDSGIKLLVDWVNKLTDHDVPVRYVMEATGVYHQKFAYYLVDNGYEISIVLPNKISNYIRTLELKTVTDKSCSQAISQFGLERKLDKWAKPKSIYKELQQLTRERDQIVQERSMIKNQLHAENVEAIPNQRSLERMQSRIVFLNSQEKEIKQDIAALIKMNPDIKSTIERIKSIPGVGELTAVIVLAETNGFELIRSKSQLSSYAGLDVKEKQSGTSVKGKTRISKKGNRNLRKAVHLPALTAVKWDDNFRNIYARLVSKHGIKMKALVAIQRKILELIYILFKNESVYDKEYITKNSVQTQVV

SEQ ID NO: 296409 - protein, 343 aa, unidentified
MQTITTIGLDIAKSVFQVHGVDAAGQVVIRRQLKRRYVLAFFQKLPPCLIGIEACASSHYWSRELQALGHTVRLMPPAYVKPYVKRQKNDATDAEAICEAVARANMRFVPTKTPEQQSCLMLHRTRHLFIRQQTAVINSIRAHLAEFGIVAPVGRKGVTELLHIVADPSDKRVPEVARACLAALGNQLLSIKEQIVEFDRMIMVWHRSNETSKRLHYIPGVGPMLATALVASVADPRTFRSGRNFSAWIGLVPRQHSSGGKDRLGSISKQGDRYLRSLFVAGALAVIRYAKIHGTKHRPWLTALLARRPTKVAAIALANKLARMAWAMMAKGERYKEPVALVA

SEQ ID NO: 296410 - protein, 375 aa, unidentified
MRTDKRLWRNRKAKKELARRLQSENPGLEVVHAHAAGIDVGNGAHYAAVRPDRDLQPVRRFECFTADLYRLADWLQNCGVKTVALQSTGVYWIPLYDILEERGFEVYLVNARHTKNLPGRKSDVQESQWLLKLHTYGLLNNSFQPSSKIRILRTYWRQRLQHVTGAATCVQRMQKALTQMNIQLANVISDLSGVTGQLIVRAIVAGERDPQKLTELSHPRIQASRGEIAKSLEGNWRQELIFVLQQEIEMYDTYQRRVAECDQELQKHLRAFADTVAPVQQELPPKKKKKQNKNNPHFRLADELQRITGVDLTRIDGVDVMVAQTLVSEVGLDMSRWKTEAHFASWLGLCPDNRISGDKVLSRGTRHVLNRSIAC

SEQ ID NO: 296411 - protein, 355 aa, unidentified
MKVYCGIDFHKNTSSICYVNEDGSGKRHLNVRTHNLRTLLRNEKLEKIGIESSGGTNHVVDQLKADGHDVRIINSNMFKAIGMGGKKTDRRDAETIADALRANFIPEVYHKSLRAREIKSLLVSRELCVNNRVATVNHIRGTLREYGVTMPQGFEQFLQLAPASIELLKNEFIAATLRSLFETVQSLLAKEKEIESRLAEFTKEDKRLGKLRSIPGVGNLGSLGVIAVIDDVGRFSSSKQMASYLGLVPKEHSSGGTRMMGSITRSGSEILRRYLIHGARSILMHAKENDPDPNKRWALRLKEKAGMNKATVALAHRLARLVWCILHEDREYTQRPPQAKTKKRLLEIDSKGRAA

SEQ ID NO: 296412 - protein, 364 aa, unidentified
MNKCHSNTELSSHEGTRCQFNGGTGVIKLGIDVHQDFYVVVEQVEGSNPKPPQRFQKQAFLHWAAKLRSQSAEVYAVYEACGFGFTLQRNLSALSIHCYVVCPQKLDEQNKRVKTDGLDAKALCLKLDRFVQGNRAALAIVRVPSEAEEQKRAIHRQREQLVKARKQLEAQGRSLMVNHGIEPVQSWWKPRAFAALPVPQWMKELLANSQPILVALQQKIASLTIQLQSSATPKQPRGLGLMTSVIIDREIGDWRRFSNRRQIGSYTGLCPGEYSSGNTRLQSCVTKHGNPRLRAALVELAWRLVRFQPNYKPIVKWRQILATGALATGAARKKAIVAVARQLAVDLWRIKTGRLRAEELGLIN

SEQ ID NO: 296413 - protein, 339 aa, unidentified
MTAVYGGIDLHSNNSVVVVMDAAGKVLYRRRLDNDLVRIERALAPYRTELSGVVVESTFNWYWLVDGLMAAGYPVKLANTTAIQQYSGLKHTDDESDAEWLAEMQRLGILPTAYIYPPAERGVRDLLRKRTQLVRQRTANVLSIQNLVQRNTGARMKGDVIKGLAPEAAPQLVEHPDVALAIAASIRVRQCLDAEITALEKVVLARVKLRADFLKLKTIPGVGDILALTIMLEAGAIGRFASVGDFASYCRCVGSTKLTNGKRKGAGNVKNGNEYLAWAFVEAANFAIRFSVPIQRWYQRKKARTNGIVAIKAVAHKLARAAYYILRDQVVFDVSKAFA

SEQ ID NO: 296414 - protein, 391 aa, unidentified
MVFVGIDVAKDKHDCYICDSDGLELYSPFIIANNREGFEELMERIRCVSDDLSKVKVGLEATGHYSYNILGYLISHGTPISLINPLHTNLFRKSLSLRQTKTDKVDARTICMMLSSGMDLSPYSESSYHMEELKSLTRYRFGKVGERAQLKQSLSRLVTILFPELEKLVPTLHMKSVYALLSEFPGAIYVANAHLTRLKHLLADSSKGRYGKEFAETIRDTARKSIGSDMPAKSLELKHTIALIHVLTEEIDEIEFSIQKIMDTLDAPILGIPGINYRMGSMILAELGDLRRFSSPDKILAYAGMSPSTYQSGQLISSYAHMEKRGSRYLRYALFNATKYVCMWDPTFKSYLAKKRAEGKHYYVAISHAAKKLVRLIYHLQMTGEAYCPQT

SEQ ID NO: 296415 - protein, 356 aa, unidentified
MNYVGIDYHKKYSVVTAIDEKGQVICTQRLDNRPDPFQAFFSSLDGPSEAVLEATRTWGVLYDLLEETDGVESVTLAHSLKVRAIAEAKIKTDKIDSHTLAQLLRVDLIPAAYIPGKETRSFKDMIRQRVFLVRMRTRLKNRIHVLLDRRHVPPPPVTDLFGKGGTAYLKKLALPGIDGEILRENLELLESLDTLIKEAEHEIQRLIGSDPRVKLLRTIPGLGPILAAVVALEIDNVTRFGAAPKLAAYAGLVPSTYASGGKIFHGHLIHMSNKWLRWALVEAAWTAMRNSPYCRTYFESRKRHKGPHVAIIALARRLSEIVWHVLNEKRAYEERPFRVYKRTPSKETSPAALTIT

SEQ ID NO: 296416 - protein, 337 aa, unidentified
MQLYAGLDLHSRNTYIGIMDKEFKRIFGKRVSNDLPLILKTLGPFQDQLQGLAVESTYNWYWLVDGLMDAGYQCVHLANPAAIKQYEGIKHSDDQHDSFFLAQMLILGILPQGYIYPREDRPVRDLARKRLFLVRHKTSHVLSLQSLITRCSGQRVSANKIKQFDAEDLQQLLQEEYIVLSAQANLDSISFFAQQIRQLEKAIKNKIKLEKEFQYLMTVPGIGTILAMTIMLEVGDINRFAKVGNFASYSRCVSSQRLSDGKSKGSGNRKNGNRYLSWAFIEAAHLSRRYNERFKSYYNRKIAQANTSLATKALSNKLARICYYIMKNQVPFKEKMF

SEQ ID NO: 296417 - protein, 366 aa, unidentified
MEESVVLFQEKFGVLTSDLNRLLGVMTSYDVSEVGMESTSIYWMPIWRVLEPHVPLKLVNPYFIKQLPGKKSDVKDAEWIATCLLKGLVKGSYVPDTIVQQLRQYDRRIHDLNKECVRKEAKLDAALQRCNIRLSNYVSDTGGKAYRKVVAFIADGLTDPDELLKLIHPRTVNKHGKEALRASLDGFITEVDIDVIRQLRQEIDLAQEHIEECQRKMSAMCREYCPTQFGNLQTIPGVKERSATAIIAELGTDMSSFETAGNLVAWAGLKPRNEESAGKIKARKITHGNKYIRQTLIECAWAASRTQGCFYNTFSYTQCTVRHKNRMKVQVAIARKMLVACWHILHDNVMYKDYSANEKKAQVSQE

SEQ ID NO: 296418 - protein, 409 aa, unidentified
MEVAHERCCGLDVHKRIVVACLLTPGTRGQPAREVRSFSTMTGGLLELADWLGAAGCTHVAMESTGSFWKPIYNILEDSFTLLLVNAQHLKAVPGRKTDVKDAEWIADLLRHGLLHPSFIPDRPGRELRELTRYRTSLIRERASEVNRIQKVLEGANIKLASVATNVVGVSGRAMLEAMVAGNEDPQSLADLAQGKLRGKREALEEALAGQLGPHQRFLLGVQLRHLDDLDASITVVNQEIQGRLSPFAEAAQRLTTIPGIGPRTAQVILSEVGSDVTRFPTGAHLASWAGVCPGNRESAGKRQSGRTRKGSPWLRSALVQAAHAASHTRTYLAARYRRLAARRGARRAAMAVAHTILLIAHHLLKYGTVYQDLGANYYDQHDQPRVQQRLVRRLEALGYAVSLTPTPA

SEQ ID NO: 296419 - protein, 317 aa, unidentified
MNYIGVDCHISTLDFSVVNETGTITKRGKVNTSVKEFIGFVSRIPKPRKIFIEEGELASWLLETSIKFGERLIITDPKTNKWIGKGGRKDDTIDADKLAQLARGKYIKEIYHPINNRRRFKELVLAYHDTVKSQTRIKNKIKAKFRREGIRCSGEAIYCEKYRKEWREELPGNKTVHLIVNQLWTQLDQIQEAKQIHKRDVRIQSRQFPEIKRFREIPGIGLCERSSGEKVYSRKLTRNYNRLLKNTVKQATEAAIRAKENQFRRQYLRLTLEQGIASHKAKLTVARSLLATVYGIWKSGDEYDPDIDKKRSKEEQK

SEQ ID NO: 296420 - protein, 396 aa, unidentified
MHQFEHSRLSGFRQFRKEIRGSPDYLIVGIDVAKERHHAFFGTATGKTLLRRLVFDNSREGFEKLLLQTEALQVQHSFPQVVFGLEPTANYHKPLGECLIRQGYQLVLVSGVAVKRNRELLDGRWDKHDTKDSANVADLISQGKCLYYEHPDPRIRDLRLLLSLQKRLKRQEQAMRVRIRNGLLAQYCPELDRTFRSLIAPGKERDLLVAMQQAPSIGCALHPEVAFVAQLMREELQWTRKVLKAVQERIQKLCSQFPECPYLLSIPGFGPQVSSQVLAAIGDPFRFQNEKQVLKMAGLDLSSDRSGKASDRAQPILSKKGKADLRYALYQAAFIASTRNAAFLAYYTQKLRGRAKEPGIQTKMRVKLAAKLLLVAWTLMKRKEPFDSKRLVSSAS

SEQ ID NO: 296421 - protein, 392 aa, unidentified
MRFAGIDIAAETHFVAVVDEGSGTVVKPTRFTEDATGYEKLFGLVGGPGDVLVAMEATGHYWQNLFAALAAAGYAVALLNPLRTRRFAGEDLERTKTDAIDALGIARFAAQKRPAATRLPDSATQELRELVRFRDRLMQDFGDRVRQLHRLVDLGFPEFTRYVRSLDSELAAAILHEYPTAEAFLGLPWKRLAKLCYDGRHKVGEEIAKGLVEAAKTSVGQHHGPAYRVQIRCACEDLDLLRRRLREIDSDIERTLKDHEVGTLLTTLDGIGHTTAARLVAELGDIASFRSAAAIAAYVGAVPGLRQSGKRQATRAGLTPHGNARLRAKLWMPTLTAVQKNPWLRAYYEGLLRRGKLPKVALVAAMRKLLIAVYFVAKHRKPFVPILAEARA

SEQ ID NO: 296422 - protein, 390 aa, unidentified
MFYAGVDVAMDKHDCVVLDSGGNCVVEVFTFENSSNGFKILHKVLKSCSKKPENIKVGLEATGHYSDNLLAFLNSIGYSPVLFNPLHTNLFRKGQSLRKTKTDHVDAHTIATMLRTEDLKSYSQPSYHLSELKSLTRYRSTLVSDCSRRKISLVRLCQILFPELKNLVPSLHMSSVYTLLSELPSADKVAKCNLMHLTSLLSSASKGHYGRDKAIEIREQARSSIGIRSVVKELELQQTIELIRILQQQIEAVEEEINSLMDDIDSPITSIPGIANRMAAVIIAETNNFHDFERAEQVLAFAGLDPSVYQSGQLTSTHSKMVKRGSKYLRFAIFNATKYVCRWDPTFRAYLAKKRAEGKPYNVAVSHAAKKLTRVMFHLVKTNKEFIPQT

SEQ ID NO: 296423 - protein, 350 aa, unidentified
MPATAHSAIAIVGIDIGKNSFHIVGLDDRGAIVLRQKWSRNQVETRFANLPPCLIGMEACVGAHHLSRKLNALGHHARLMPARYVRPYSKGQKNDFRDAEAIAEAVQRPTMKFVATKTADQLDLQALHRVRERLVSQRTGIINQIRAFLLERGIAVRQGQRFLRVELSRILATPPEVLSPRMVPLIEGLASDWRRLDERIESLSGQIADLASRDAGCERLMSVPGIGPLISSAMVAAIGTGDGFSKGRDFAAWLGLVPKQISTGDRTILGKISKRGNRYLRVLFVQAAWVVLVKVKPNRWAHGLKRWIEAAKKRLHHNVLAIALANKLARIAWSVLAHGRAFEASKLQIA

SEQ ID NO: 296424 - protein, 360 aa, unidentified
MDGSKVQPKTTAGVDIGDKYSYLCLIDQHSGEVMEEGRLRTTPEAFRRRFSSEQPPMRIAIEAGTHSPWASRVLEECGHEVLVANARKTRFIYANTRKTDEIDAENLARLARLDPKLLSPLKHRGEDSQAHMALIRSRQALVGCRTQLVNHVRGAVKSFGGRLPKCPARSFHNKAAEHIPEALREALGPILEQIGSLTQRIRDYDRKVEEISKESYPQTELLRQVEGVGPLTALTFVLTVEDPHRFEKSRSVGAYLGLVPARDQSGDRDPQKRISKEGDEMLRKLLVSGAHYILGPFGSDSDLRRHGEKIASRGGKNSKKRAAVAVARKLAVLLHSLWVSGEVYDPLRNTHRRERREEAA

SEQ ID NO: 296425 - protein, 355 aa, unidentified
MTASYDYHIGVDYHKSYSHLVVQDSAGKTLRSGRVKNDRQSLGGFLERYRENSHAVVEATRNWMVIYDWLDDICDDVVLAHPLKVKAIADAKIKTDKIDATVLAHLLRADLVPEAWAPGERARELRVALRERMFYVRLRTMTKNRIVTVFDRYPEQTAQLKKLGDLFGKAGRVQLAQVNVSEIDRIQIDRGLAFIGDIDGRIKQSEATIRTMTKANGNVRLLKTIPGIGEFFAGLIDAEIDDISRFRNAKKLAAYAGLVPSTYSSGGKTFHGKIIKQGNKWLRWAFVEAVTPAIVTDAQLRAQYEHLKFRGVNKARVAVARKLLTIAFQILRDQRAYEPRGASPTEGASTISRLS

SEQ ID NO: 296426 - protein, 493 aa, unidentified
MKSTAKDAKAQVRVFANEKGTSTGFSEEGTAASRTPEQEELIRKANEILENLKAHTWRELETNGKFTKNDKISFISDDMLIVGCDVGSETHFARAIDTRGKELSRRAFEFSNTEEGFESVRDWLGMLAARNNKSQIVLGLEPTGHYWFDLATWMVSQGISVVQVNPYAVKQTKEVEDNSQDKNDRKDPKLIANLVKDGNYGMPYLPEGVYADLRRLSMFRDQLTEDRGRMINRLHREMKIYFPEYKDALGKIDGPFTITLLKEAPFPDDLISIGEDGIRDIWKKNHLRGRGYSKASDIIKIAQASVGLDEGAESSKQAVKHFAEQVEHLSQVLEEVQEQMNARCAEIPHANNVLEIPGIGENILSGIIAEMGDIERFDDVKEIQKLSGLGLVACSSGKHKGETKISHRGRRRLRYWLFQAAKSVVAHDEAFKQLHAYYTTRAENPLKKMQSLIVIACKLLRIIYKLLTTGEKYDQYKMQSDIVYQAERLQMAG

SEQ ID NO: 296427 - protein, 328 aa, unidentified
MTRDGWWLGIDVSKPILDCAHSDHAEPWQVPNTPDGWTELTDRFVDDPPAGVVMEATGALHVGVHLHLSSVGWHSSVINPSWTAAYARSQGQLAKTDRTDAQLLARYGAREQPAATPVNSPAQQHVLALFRRRAQLVKLRVMQTNQAASARFEDVRVSCETVVTMLHQQIEELNTRIHDVLAADPELAARRDHLQTMPGIGPVISTCLLGALPELGTLGAKELAALAGVAPHPHQSGGRIQRRHLRGGRREVTRALFQAARIAIRHEVYFRHYFDRYMARPGKEYKMGAIAVAHKMLTLLAVMVRDGLAWTETNAYKSAHADPVHAPS

SEQ ID NO: 296428 - protein, 351 aa, unidentified
MSEYIAFDSHKRYTWVDREDHSTRKNSGHRLEHAPGAVRDYLSGCEPGTAVAVEATGNWYWIIDEIEQAGLQPRLVHPRKAKLMMGLTNKTDKLDAQGLNRLQRNGTLPTVWIPPGPLRDLRELTRTRLVLVAQRTRLKNRLSATLAKYGAPASEASDPYGKRGRAELEKHLERLPEQTRWVSGQLLAQLDFVSAQVRQLEQRLNELVEVTPEMQWLLTMPGVGVILAATIALEIGEVERFPSALHLASYAGTTPRVHASGGKVRYGPLRADVNRYLKWAFAEAGNSVAVNHVRCPDRHVSQLYRRLRQRKGHPKAIGAVARHLAEAAFHVLRKKQMYQDPSLGRGRTSQV

SEQ ID NO: 296429 - protein, 368 aa, unidentified
MDLSLLKDPVGITAHNGLDGDQAPSKQTVKERSMNKITLIGIDTAKNVFHLVGIDSHGHYVYRKQLSRKRLLPALAQLGPCEVVMEACAVSHHWARCIGGLGHRTRLIAAQHVKPYRRGQKNDYRDAEAIIAAALSPGMYFVGVKSMEQQAEQALHRVRSRILSQRNATANELRGLLGEYGLAFGLGIKTLRSGAIGFIDSGQALTLGLSELVHDVLDELDQLQQRLDAYSQQIEQRVSNDVISRRLRTELSGVGPLSASALRVKVADVRDFTNGRNFAAYLGMPPAHRGTGGKVKMGGMRRGHDLYLRQLLIHGARSVIRHLGDKQDEQSRWLRGVLERRGFNIAAVALAHRNARQAWAILAREWAA

SEQ ID NO: 296430 - protein, 433 aa, unidentified
MLKINYMSTLFVGIDVSSKTNSVYAMDFEENKYLSTSFGNNQPGADELVNRIVACMQKHKHLDTLLIVLESTSVYSVHISNFLASSEVLMPYKPYVFCVNPKATANYRKSYIGMEKTDPTDAYLIADFGRVGRTKKLEPWRGGLFIALKRLTRHRMHLSECITREKTYMVSNLYLKFSELQLLEGDDKPFGNLYGATSSAILTEFLSPQEIINMPEEDLLAFLAQKSRNRISDLSKTSELLRKAARDSYRLDKCMYEPLSISLASSFNCIQAYQKEIRLIEQAIDKCIKGMNTNALLILQSIPGIGPVWASGILSEIGDITAFHSSDALAKYAGLYWPKGDSGDFISEDNQMSKAGNPYLRYYLGEAANSVRKHIPEYADFYARKYAEVCKHQHKRALALTSRKFVRLVFGLLAKNQLYTGEKLDTEYNTWSN

SEQ ID NO: 296431 - protein, 350 aa, unidentified
MEIIAFDSHKRYTLCSVENEKGEIIEEKRIEHERGNIQSHLSRFTKGSPVAVETIGNWYWIIDEIEKAGMEPRLVHARKAKMMMACVNKTDRLDVRGLNKLQRAGTLPTVWIPPMELRDKRDLCRTRVSLVAQRTTLKNRIHWALSRYGIAEPDVADLFGNKGRDLLEHEMCHFPENTRFATRAQLNQLDSLKVEIEWLEERIREVFEDTEEMRLLRTIPGIGFIFAVVIAGEVGDVGRFASSLHLASYSGTTPRVKSSGGKTSYGRLRSDSNQYLKWAFLEAANVVCINRKKWADRHVSLVYERIRPRKGHGKAIGAVARHLAESVYRVLKKKENYRDPATGRSFSTEA

SEQ ID NO: 296432 - protein, 420 aa, unidentified
MSDQFRWFVGVDWAREQHCVCLLDAEGNRVCERDVTHGGAALSELCAWLLETTGAPPAEIAVAIETPRGPVVETLLERGFAVFSINPKQLDRFRDRFTVAGAKDDSRDAQVLGHCLCTDRIAFRRLAADNPLVIELREWSRIHEELIQERTRLANRVRDQLWRYYPQLSELGDDVAADWFLDLWEQVPTPAQAARLSEKAIARFLKSHRIRRLDVPTVLHVLRQPSLTVAPGTVEAASAHVRTLTTRLRLANQQIKEAARRLDELCAAIEASAETAPGQICEQRDVAILRSCPGLGRINIAALLAEAWEPLGRRDYHVLRTLSGAAPVTRRSGKSCTVLRRHACNDRLRNALYQWTRVAVQHDPISKQRYATLRRRGHGHARALRSVGDRLLYVLCTLLERQTLFDPNYKDTHIATAAAA

SEQ ID NO: 296433 - protein, 414 aa, unidentified
MNLIYACVAGLDVHQKTVVACVRRIEPQGGIKEEVRTFGTMTRDLLQLSEWLAKEGVTRVAMESTGVLWKPIWNMLDGRFELLLVNPRHLKRVPGRKTDVADCQWIAELLQYGLLRGSFVPPRWQRELRDLTRQRTQLTREQTRVVNRIHKTLEDTNIKLGAVASDIMGKSGRAMLNALVAGERDPIKLAELAEGRLRGKIPALRQALLGNLNAHHVFLLRTLLQHLEFLEQEIAAFDVRIAECVRPFVDPEQMQRLDMIPGVNRRTIENVVAEIGTDMSRFPDEEHLSSWAGMCPGNQQSAQKRGTGRTPKGDSWLKTALTEAAWAAGRTKHSYLGAQYKRLAARRGKKRALIAVGHTLLVVLYHMLKTGVEYKDLGADFFERLKPEQYTRYLVKRLEGLGYDVELKPRDKAA

SEQ ID NO: 296434 - protein, 291 aa, unidentified
MRQQTRTFGTMTSHLLELGDWLAEQGVTQVAESTGVYWKPIWNLLEGQFQVLLVNARHIKQVPGRKTDVKDAEWIAQLLQHGLLRGSFVPATPQRRLRELTRQRRQLILAKASVANRIQKVLEDANIKLASVATDVLGVSGRDMLRALIAGQDDPQALAELARGKLRPKIPQLQSALHGRVTEHHRFLLQLLWVARLSGRIVAEMPAPFAEAVQRLATIPGIDERAAENILAEIGTDMDQFPSAGHLASWTGMCSGNRESAGKRQSGRTTKGNCWLRATLVQVACPGKAAS

SEQ ID NO: 296435 - protein, 375 aa, unidentified
MNKYSIKYVGMDVHKETIAVAIAKEGRGDPAYYGEIPNTDEAIRKLVKKVVSNREKVSFCYEAGPCGYDVYRQLIDLGQRCDVVAPSLIPKKSGDRVKTDRRDANTLTRLYRAGELTPVWVPDKEQEAIRDLTRAREDMKSMEGHAKQRLVAFLLRHGKRFPGKCKWTQAYFRWLEEIKFEMPAQQIVLQEYVDTVKHMKGRVAALEEEMRQAMQGWSLAPVVTGLMALRGVELITAMTVVAELGDISRFTSARQIMAHLGLVPSEHSSGNRQKRGGITKTGNGHARRMLIESSWCYRSPARKTAQIQRRAEKTSEEVQEIAWKAQKRLCKRYWYLVNKGKRPVEACTAVARELSGFMWAIACEVMGKNCVCVTA

SEQ ID NO: 296436 - protein, 346 aa, unidentified
MMIIGCDYHPSWQQICWMDTATGETGEKKLEHASGEAEKFYRGLPAPALIGMESTGNCQWFVEMAAAVGHDLRIGDAGKIRACEVRAQKHDRRDAALILKLLLEERFPQIWMPSSQDKDLRQLLIHRYKLVRIRAQVKTELQHLAMNQGVTKKRKLWSKAGEKVLRELPLAPWTSRRREDLFKVREMLNAQINLLDQAVVEVAEKNEKARLLMTQPGVGPITSMAFVLTMGDVSRFQRGKQVASYLGLIPREYSSGGHQRFGSISKQGNWFMRMLLVEAAQNAVRYDPGFRNEYLHRCHNKAKGVAKVAAARKLAIRLYWMLRTNTGYPGVVRVESSSRVPLVSAS

SEQ ID NO: 296437 - protein, 400 aa, unidentified
MNPVIGLDVSKGESQVQAFLDKGKPYRKSFKVSHTIEGLDLLVKFLEEVKRETGKQPPIVLEATGHYHASLVQYLEDRGYLLIIINPLISYKAKSSSLRKVKTDAVDAYHLCELFYKEDLEPYKKRGVQLLNLRNLTRQHENITGVLIQTKLQFQAILDQVFPEYRGVFGDLYSVVSLLTLSEFPSSEDILEASVETIADKIAQLCKSRSYRWANEKAIQLKAAADRNPFEKTLYQSHILSLGMYINIILQYKEHLSKLESEIDALAKEVEEYNIIKSIPGIGEKIVATIISEIGEIDRFTDPSVFESGKFTATKNRITKRGSSRLRHALYMAVRCAIRDCRKSKTSDEIIPRNKKLREFYDKKREEGKPFKVAVIACVNKLLHWIFALLKNKTTFQDIA

SEQ ID NO: 296438 - protein, 429 aa, unidentified
MKIIYPRVCGIDVHKKFIVAVICISESVEPIYLKKRFSTFHNDLIRFRDWLIQNDCQNVCMESTGKYYIPVYNILESHISNIVVANPKWVRAVKGEKDDDKDAKWIADLFKLGIVKSSFIPQKDFRILRELTRYKYKLVNMRSSEKNRYQNALTSGNCKLDMVFTDVFGKSASNIIDLILSDNPYTDEDILSKVHKNCKASPDMILNSINGTDLTPVQKSRIELVNDHIKQLSSNIQKLDKLIDLMIEPYEDYISFLCQIPGVSRNSVITILSEIGVDMNQFTSTRRLTSWAGLTPSSNQSAGKKKSVRISRAGVYLKPCLVEVAHAAVKDTNHPYYANKFNKISKRRGKKRAYIAIARKILVAAYHMLLTGEIWNPADLAEVETPVEQRIKYVKNNLKSDIKQLLDIGLTVEELTLMIQQNANNIATQ

SEQ ID NO: 296439 - protein, 406 aa, unidentified
MKRFFAGLDWAAQTHALCVIDAHGAVRQRLEVAHSAAGLHELLGKLRGVARDAAQLAVAIERPSGLLVDTLVEAGYPVVPIHPNVVKATRPRYRSHGAKSDASDAYLLADLLRTDGARFEPLKPQSDAIRALRALVRGRDDLVATRLQLANQLRSLLESFWPGAAALFADIDSPIALAFIERYPTPQAASHLGEKRLAAFLAQRRYSGRRTPAELLERLRAAPAGHSAELELEARGELVRALVRTLEPLVAQITELSARIEHTVTELPDGHIVMSLPRARRLCAAQILAELGDVRERYPTDDQLASEAGVCPVTYASGKHRSVTFRWACNHRLRRAITCLADNSRHACPWAASRYAAARARGCDHPHAVRILARAWVRVLWRLWTDRSTYDPAQHRAALAFNTARG

SEQ ID NO: 296440 - protein, 394 aa, unidentified
MRSVGLDLGVRHIAFCEVKDGAVVDKGAVRSFSQLASRIGPDTAPAQVGFEACREGWHVHDMLQRWGHRPRMLDTTRIRQIGVGQHRRKNDAIDAETIALAIESGRVAEAHVLSPERRALRAQLSVRGALVQARSQYVTTIRGLARAAGILLPTSSTSSFVQKVEEAKMSDALRTLVAPLVRILVALEAELEQADAELAKMAERNPSITLCATVPGVGLIVAATYVSVIDEAGRFRNAHAVAAYLGLVPSEATTGGPSKRRLGGITKQGNTHARTLLIQAGWSILRARASADPLRRWADHVAETRGRKIAVVALARKLAGVLWAMLRDGTVYDGALEAEESARGMRENAMRTEKRARALEHAAKKLRRPASPADAKAENPPAKAGRTTRRTSTA

SEQ ID NO: 296441 - protein, 340 aa, unidentified
MNAMTYGLDIAKSVFQMYWVDSASGEIHNRRFQRRELIEFLANCPVGKVALEACGGAHWWARKIQSLGHRPVLIHPGYVRAFVRTNKTDAADARAIWTAAQQPGMPVVPVKSEEQQALLSLHRIREGLVQTRTRECNQLRGLLGEYGLHFAKGRKALLAELRTRRAEIEQGVPPTLLRAIERQLMALRQLEEQIQLIERDITAWLQSEPAAQTVEAIPGIGPMTATALVATMGSAQAFRSGRAFAASLGLVPTQSGTGGSVHLGHISKRGDSYLRRLLIHGARVVLTRSRRHPAWAEALLARRPTNVVIVALANKMARAAWALLAHGRQYDPSHVSQRPA

SEQ ID NO: 296442 - protein, 340 aa, unidentified
MQLYTGIDLHSSNSYLAIIDETGKRVFKKKLPNDPEQILSALAPYKDTIAGVVIESTYNWYWLVDTLMAEGYKVHLANPVEIKQYKGLKYSDDQHDAFWLAEMLRLRILPEGYIYPKEDRPVRDLLRKRSHLVKLRSSLIISLQNIICRNNGFRLKTNDVKALNADRVAPFLDQNEDLALAGKIGKESIDFLTRQIKAVESVIENRMELREPYKKLLTMQGVGKTLGLTIMLETGPISRFAQVGNYCSYCRKVSTKWISNDKKKGKGNKKSGNKYLAWAFSEAAEIARRYYPEARAFYQRKMQKTNAMVAHQALSHKLARAAYYIMRDGVSFMPEKLFTQ

SEQ ID NO: 296443 - protein, 350 aa, unidentified
MQIVGCDFHPQWQQVSFLDQETGEYREAKLVNGDGEAERFYRSLSPGALVGIESCGNAQWFIDLLGSLGHTVWVGDAAKIRASYVRKQKTDRRDADHILKLLVEDRFPRLWTPSAKQRDLRQLLIHRHKLVEIRTRVKNGLQHLAMNRGVQKQSRLWSVRGRAELEKLPLEGWSARRREDLLELMKGLDQQIKELDEAVVQAAREDAKAELLMSQPGVGPITAMAFVLTIGDVSRFEYSGKVASYLGLIPSEYTSGGKRKLGAISKQGNRFMRQLLVEAAQTACRLDEGFRKQYQARCHHKPKAVAKVAAARRLAVRLYWMLRLNKRYPEIAHIESSSGVPLAIHGRDVE

SEQ ID NO: 296444 - protein, 402 aa, unidentified
MNCVGIDVSKGKSMIAVMRPFGEVVVSPFEVRHTASELSKLAGLLKSLDGETRVVMESTGNYHAPVAWLLHDAGLYVSVVNAMLVHDYGNNSLRRAKTDKKDAVKLANYGLDHWLTLPRYIPEEDTRLMLKICYRQYQQYSKVQTMLKNNLISLLDTTFPDANRLFTSPPRADGSEKWVDFVATFWHCECVCGRSEKAFTTQYQKWCRKHGYNFSEDKALDIYASACRHFGVIPKTDTAKLLVEQAISQLQTTSSALAALKQEMQSLAASLPEYPVVMGMFGVGPTLGPQLLAEIGDVRRFHSKKALVAFAGIDAPPYQSGQIDVRSRSISKRGSASLRRTLFLVMSVILQCAPIDEPVYQFMDKKRSEGKPYRVYMMASANKFLRIYYASVKAYLESLEHD

SEQ ID NO: 296445 - protein, 331 aa, unidentified
MKQYAGLDVSLKGISICVMDGDGKVLARGSVPTCPEAVSQFLAENRLMPERIVHESGQLSIWLQRGLVRLGLPAICIDARQAHRALSARLNKSDTTDAEGLAQLARTGWFAEVHVRSEAADRLRMLIGSRERLVQLRRDLEAHVRGVLKTFGIRLSAINKGHMRQGFRDQLAAVTQTDPMLARVMGGFIDTHETLCTATAALDAELRSIARKTPVSRRLMTIPGVGPIVALSFIGLVDDPGRFTKVANIGAFLGLTPRRHQSGEIDWSGRWCQTDSNQSTQGQDRCPLCRTKLTPLGESSGAVLLEVGSGGEAALRVEMVEDRGVDGCEHL

SEQ ID NO: 296446 - protein, 420 aa, unidentified
MMNNNNTYPIHPKMTRTYVGCDSHKDSHTFVFLNCFHEVLGKITIGSAPSEFDNFIKQAKRYLQTGTTFAFGFEDVSAYGRAFVKYLTDKGYLVKHVDASKVATERGQVLHKTDQYDAECCARILINQFDNLPNANPQDKYWILQTLVTRRNAITKINVMVKNSLHKEIAENYPHYKKFFCRLTTNSALAFYEAFPSPHHLEDVTVEQLALLLKSASKQSSTTKAAFILETIKKDEVKQAEFQEMRDFTTLSLIRQLKNNLAELSAIDNEIEKMLQHFNYPLATIKGVDTLTAAKLIAEIGDINRFKNAKALAKYSGVAPVTYASGMTSLQMANARGNRNLNEIFFRLALTSVMKLGSKGALINPIFYDYYHKKISEGKQKNQALKCVQRRLVNIVFNVMKHQRPYINPEIGYAPQETNA

SEQ ID NO: 296447 - protein, 343 aa, unidentified
MKLSRIGVDLAKNVYQLHGVDRHSKTVWKRRLRRGQWLQALLDKTEPGCEIGMEACTGAHHWARELQSRGYTVRLIAPQFVKPYVKSNKNDANDAEAICEAMSRPNMRFVTVKSVAQQDIQATHRVRSEIKDQRNAKANQIRGLVAEYGLVAPTTLLALRRAIPCWLEDADNGLTDYFRSLLHGLWGDLVALDDRMTELDKQIKTLADSNEVTQRLQQLRGVGPLVATALVATVGTGEQFKKGRQMAAALGLTPRQCSSGDKQRLLGISKRGDVYLRTMLIHGARAVVSQAKHRDDRLSQWVTSIAKRKHPNVAAVALANKTARMAWAMLRDDSNYDPDFAIS

SEQ ID NO: 296448 - protein, 363 aa, unidentified
MSMKGKTLVGLDVHAAQTHAAVLDAFTGELRVRRLVCPPLELVTFLEDLGGGVHAVYEAGPTGFGLARVARERGIALDVVAPGSIPKGPTDHVKTDRRDAVRLARLLAAGELRFAFVPSVADEQFRDLTRSIEDVRGDLMRARHRLSKFLLRRGTRYSGRGRAWTVEHLRWLRALRFDDACSRASFADYLAAVELLLGRRASLLAALEQAVPESSHAPVIARLRCFRGIDTLSAAGLAAEIGDFARFPKPSLLCGFLGIVPSERTSDQKRRQGAITKAGPTHARRLLVETAHHYSRRPSVGAVLARRQQGVDPRVIAVAWRAQQRLHQRWQHLREQRRKPAGVVAVACARELATFLWEAATLD

SEQ ID NO: 296449 - protein, 358 aa, unidentified
MRIIGCDLHARQQTIAMLDTDTGELEEKTLEHEGETVRGFYSALRGPILVGIEATGSMQWFLELMEELGIECRVGHPAKIRKAETRKQKHDRRDARLLLTLLAENRFPTIWMPSTEQRDLRTLLRHRHQWVRMRSRVQHTLQSMALNHGFRRGHALWSQANQHALRALPLAPHASERRAALLTLYPRLQGSIEELDKEVCEEVQQHPQARRLLTHPGVGPITALATEVFLGDPKRFIDGKALASYIGMIPSEHSSGRRQRLGAMSKQGNTLLRYLWCEAAMHAVERDPELKRFYRRKLVQKGLGKARVAAARKLGIRLWIMMRDQIDYEEFCRRGKARQESGRVRAGMPAINSGPAQQ

SEQ ID NO: 296450 - protein, 441 aa, unidentified
MAMRKRDDDLVFPNAAGIDVGGSSHWVAVPRHTCDDPVREFGAMTDDLNAMADWLLACGVDTVALESTGVYWIPVFEVLEQRGLKVFLVDARQMKYVPGRKSDVQDCQWLQRLMSQGYLRAAFRPTDEVCVVRAVARQRDVLLAEQASWVQRMQKALVQMNIQLTEVLSDVMGTTGQAIIRAIVAGERDPKVLARHRHSRVKASEQDIAKALTGNWRDEHLFVLRQALAMYDDIARHLGECDAKLQGLLSKLGASKVDLGKTPRAGSKTRAEFDTRQILANWAGVDLTRINGLGLAAVMKILSEVGPDLSRFANVKHFCSWLGLCPGTKISGGKVLSSKTKRAGNRVRQALKMAAMSLSHSDSALGAFYRRLSGRMDKPRANTATAHKLARMVYFMLTRGEAYVDQGQQHYEEQQRQRSIAALKRRAAALGFAVMPTATPA

SEQ ID NO: 296451 - protein, 349 aa, unidentified
MQIAVLGIDLGKNSCSVAGLDPTGRIVLRRRTNRDGVIKLASRLPPCVMAMEACCGAHHLGRTLQSIGHQVRLMSPEYVQPYVKAQKNDERDAEAIAEAATRPTMRFVELKSETQLDVQSLHRARSRLVGERTLLINQLRAVLIERGLTVAQGRRRLEQYLALALDAEDAPPLLLSPRMHLLIDDMRAQWRELDRRIAAFDAEFVALARKDATARRLTTIPGIGVLNATALVAAVGDAHSFSRARDLAAWLGLVPRQATTGGRPKLLGITKRGNKYLRTLLIHGARAALPSLATTDGALGNWLRGLSARAHRNTVVVALASKLARIAWAVLRAGATYHATIGDRPTAAA

SEQ ID NO: 296452 - protein, 337 aa, unidentified
MTQVHILAIDLAKRSFQVCGTDRGGAVLFNRVLSRARLLQLLNEQLPCVVAMEACATSHFWGRVAKGCGHNVRLIPPIYVKPFVKRQKNDAADAAAIAEAAQRPNMHYVEVKSAEHQARAVAFRTHQCFVRQRTQLINALRGHLGEFGVIIAQGPANLTAVVGILADETNDLPAGVREIGQLYLDQIRLLTEKIDGLMLKLREATKANEDMRRLCTVPGVGPVTAGAILAFAPDFRAFKSGRNFSAWLGLVPRQHSTGGKTRLGGVSKMGQTDIRKLLIVGAMSLIRWIVRKGVLPDNWLGGVLGRKPRMVAAVALANKMARIIWAMMTSEQNYRMA

SEQ ID NO: 296453 - protein, 343 aa, unidentified
MKIYALGIDLGKTVFHLVGLDASGQVVVRKRCSRTQLLTFTANLQVQLIGMEACSGSHFLGRALRAQGHEVRLMPAQYVKPYVKTNKSDYIDAEAIAEAVQRPRMRFVPIKTEEQLDLQALHRVRERWVMRRTAVVNQIRSLLLERGLTLPKGRSHLDEQLPRILEDAELNLSDSFRVLLAQLKLELEQLAARIGEMDRVIQKTARENEACQRLTEIPGVGSVTATALIGAVGNASAFGKGRALSAWMGIVPGEYSTGGKQKLLGISKRGNKYLRRLFVQGARSVLQQRHKQAPGLRDWLAQLLGRTHQNVVVVALANKLVRMAWAVLCKNERYRAPVLAMTN

SEQ ID NO: 296454 - protein, 351 aa, unidentified
MNTQQTAYPKLYIGIDIHKRSWKVHCATDLFAGKSFSMSPDPRQLHTYVSKHFKEYEVSVAYEAGCCGYHAHRCFERYGWRSLVVNPADIHRKGKEKHTKTDKIDAQLIARELKDGRLESIIIPDKKREELRSLFRRRNDLVKDFRRVKSYIKMQLLYFGIKEPEEFDNDHWSHKYRNWLDNMIFEYPTAKATLESRMRFFRFVDQELRDVSTQLRRYCKVNYKKDYLLLRSIPGIGGIVACGILCELGDLRRFNNIKHLAGYVGLAPSMYQSGSSQRTMGMTPRANRLLRSYFVEASWQAIRADPVMQAYYRKHQGKNVKSIIVKVARKLLSRTLAVIKTEVPYTIGVIE

SEQ ID NO: 296455 - protein, 322 aa, unidentified
MSGSILGVDIAKKKFDVALLINGKLKHKVFTNDQEGFETLLAWLHKQNVDRTHVCLEASSTYGDELATSMHDAGHTVSIVNPARIKGFAQSELMRTKNDKVDAGLIARFCLAMHPEPWIPVPPEMRQLQSLVRRIDTLITMKTQEMNRIDVSHESIRDSVRNHIAYLDQEIKSLKEQIAAHIQDDPELKTKRDLLKSIPGIGEATIASILAELHMFERCDRVEKVVAFIGLAPRQFISGSSIKGKPRLSKIGNARLRKALFMPALVSIQCNPIIQTFYHRLKENGKNGKVIVCAIMRKLVHLIFGILKSGKPFDPNYTPYCD

SEQ ID NO: 296456 - protein, 457 aa, unidentified
MNRSGEEAHDPDRGLPVVRPNVAGIDVGSKSHWVCAPTVDGTGREVEEFGATTPELEKLAQWLKQRKVESVAMESTGVYWIPPHEVLEGYGLEVVLVCTRELARVPGRRKTDRIDCQWIQRLHSCGLLRGSFRPPEQVCMLRTLVREKATLDAEQADWVRRMQKSLDQMNVRVHRAVSDLEGATGMAILRAIVKGERDPVQLAKWRDPGCRKSAEEIAEQLSGHWREDHLFSLNQSLQMHDAIAERIQAYQTEILRRLAEMERAEGGGPSAPPLKNQNKAKMIRQRGEEPMRQAWYRMSGVDLTAIDAVGVGVVQTVLTEYGPDLSCFPTEKHFISHVTLAPKKAVSGGKPLKKKKRGSASSRVSAVLRSAALSLRHSQTALGAYFRHAAQRLGADVAAFATARKLATLIYRLLRWGHAYVDEGAEAYEKRYQAARVRRLFNAAADLGYQLVAPTNP

SEQ ID NO: 296457 - protein, 403 aa, unidentified
MNSVGIDISKGRSTIAVMRPFGEVVISPFEVRHTDSELSKLARRLKSLNGETRVVMEATGNYHAPVAKLLHDAGLYVSVVNAKLVHGYGNNELRRVKTDKKDAVKLANYGLDRWLTLPRYVPEEGARLLLKNCYRQYRQYSKVQTVLKNNLISLLDTVFPNANRLFSSPVRGDGSEKWVDFVAEFWHCRCVSGKSERAFTNKYQRWCRKHGYNFSEAKAHTIHAEASGHIGVMPKSETTKLLVEQAVAQLRATSAALTALKREMLTLAAQLPEYSVVMGMFGVGPTLGPQLMAEIGDVRRFYSKKALVAYAGLDAPPNDSGDVTGRHKSMSKIGASSLRRTLFLVMSVYLQNAPLDEPVYQFMDKKRAEGKPYRVYMMASANKFLRIYYATVKAYLESLEHTA

SEQ ID NO: 296458 - protein, 406 aa, unidentified
MKTIIGIDWSEKKHCVHIYNEAGSLMKRFEIEQSVAGFAELKRRITAVNSQTSHCLIGIETSHNLLVDYLAECGFTLYIVAPSVVKSNRGRQGNSGAKDDDRDAQLLADILRTDRGRLIPWQADGPLVRQMRSLLSWVDDLTKSLTAQHNRLRANLLRYYPQPLVAFGDLTGKVALHLLVAYPAPADITHLTLDQLTNFCRQLRYYRWDRLPAMLAHLQTPAPQLDAEVVPAYRQQTIFVAQQLLYLSQQKQAAIKQINGLFDQHPDASIFASLPGAGDLLAPKLLVMFGDHRQHYPHRSILPAIAGTCPITVASGRYRSVRFRHACNRQHRQTAQQFAQSSTRQSVWAATYFSQACERGHTKSHAYRCLANRWLHIIWTLWQTHQSYDEAYHLRQVARHRRPVNL

SEQ ID NO: 296459 - protein, 340 aa, unidentified
MEAITVIGVDLAKSVFQVHGVDARGQVMVRKRLSRAKLLPFFAKLPPCLVGMETCASANYWARELMGIGHEVRLMPPQYVKPYVKRSKNDVSDAEAICEAVTRPTMRFVGVKSTEQQSVLVLHRTRSILTRQRTQIGNAIRAHLAEFGIVAPVGRQGLDRLIAVIGDEGDRRVPIPARRCLAMLVEQHRLVLAHLLDTDRAIRADSRASELGRRLQEIPGVGPLVASALVATVPDPHVFKTGRGLSAWLGLVPRQNSSGGKERLGGITKAGDTYLRKMLFVGAMAVIRHAERYGTRRPWLTKLLGRRSPRVAAIALANRIGRTAWALMTSGERYREPCIA

SEQ ID NO: 296460 - protein, 440 aa, unidentified
MEHVIIGVDPHKLSATIEVVNDQEKLLGSGRFATDRVGYAAMRTYARTWPDRVWAVEGANGVGRALAQRLLEAGEDVVDVPAKLAARVRLFDTGHNRKTDARDAHSIAIVAVRTDGLRVLKVDGELEALRMLTERREALTRRRVQSVNRLQALLAELLPGQAKKDITPLQAKAMLAGVRPRDVAGKTRRRIAAEELTELIAVDAKIKKATTELKAMVLARDSRLMEIHGVGPVVAARILADVGDVARFADRNRFASWTGTAPLDASSGEQNRHRLSRAGNRRVNHMIHIAAVTQIRLNTEGRAYYRRKCVDGKKPMEAMRCLKRRISDVVYRQLVADAQRVALAGSCQKDCASPGGHCGASYESSAVDLPPRVDTSDQPLPGPAHPTLPGTKPHANPCAASAPRPSRRRAGAVKVERPTGRTTLTATSAGAHSTAPKPPS

SEQ ID NO: 296461 - protein, 400 aa, unidentified
MISVGIDVSKEKSTVCILKPYGEIVSKPFEVYHVEQELSELATMLLRLNDEVRIIMEATGIYHLPVLSYFKEKGFFVAVINPFEMKEYRCQGLRRVKTDKQDAITISHYGIDHWYRLKEYKAQENIYTELKLLGRQYCHYMRMRVESVLELTHLLDYTMPGIKTLLQGWNERNGKDKLGDFAEEYWHYDNITKKSEKQFIDSYLKWAKKKGYHQNQDKAIKIYALAKEGIPTVSSNTPSTKMLVQEAVRVLREVDHTLMTILTQMRSLAKSLPEYPIVRAMGGVGDVLAPKLIAEIGDVRRFHSGKALIAYAGIDAPPYQSGRLVGTERKISKRGSSNLRKIGYEVMRSLKTHKAPEDAAVYEFILKKEREGKSKRAAKIAGLNKFLRIYYARVMEVYRK

SEQ ID NO: 296462 - protein, 389 aa, unidentified
MKIFVGIDIAKLNHFAAAISSDGEILLEPFKFTNDADGFQLLVSKLESFDKNSIIIGLESTAHYGDNLVRYLVAEFYQVCVLNPIKTCQMRKNNVRKTKTDKVDTFVIAKTLMMQDDLRFITFFDLDMMDLKALGRFRQKTIKQRTRLKIQLTTYVDQVFPEIQYFFKSGLHQHAVYALLKEAPSPKEIASMHMTHLANLLKVNSHGHFTKEQAKELRVLAQKSVGANDSAISIQITQTIQQIELLDSQLEKTEAEMTDIMKFNDSVIMTIPGIGYINGGMILGEIGDIHRFSNPNKLLAFAGLDPSVYQSGNFQAKTTRMSKRGSRVLRYALVNAAWNVVRNNATFKAYYDAKRAEGRSHYNALGHCAGKLVRVIWKMLTDEVEFNLE

SEQ ID NO: 296463 - protein, 323 aa, unidentified
MSQPNLQCMGIDVAKLSLDIATTDTIEPFTVGNDEDGFAVITDKLKHTKINLILMEATGGFEAAIACKLQSEGYDVVVINPRQARDFARSMGYLAKTDKLDAAMLAQLALVIDRHPDRSRYIRHLPDEARAVLAAMVVRRRQLNHMLVAERNRLYPSHPQSRKSIDNIIDALQNELDRINEQMKQHMTAFFQEQARLIGSVKGVGDITVASLIAELPEQGKLNRREISALTGVAPLNRDSGKMRGKRTTFGGRAGVRATLNMAALVATQFNPAIKLFYQRLLAAGKPKKLALVACMRKLITILNTMLRKGEEWNASFQSQVIS

SEQ ID NO: 296464 - protein, 432 aa, unidentified
MSQFLNDFVVGIDVSSEFSIVAMLAPTGELIRKPFRIDHNPPGFHKLLDILKKEEERLNRKPIYFVESTGIFHLPLFFFLKSNDLKGFVLNPLCVHSTKNFDLRKVKNDNKDAEAIARLAKYQDIKVSMMPEPQILALRMMTREYFAVSDRLSEMKNRLCTDLYLLFPGFLDVFSGPFGKTALAVLQDYPSPRAIRDADTDVLTLLISKAGRKGLKWASNKVALLRDCAQLASSMPSEFSLLDTKIKFHIDGIEHTQASLDGIEAQIHKMIDSKEFPAKARRNVELLDEIPGVGFLTAATLIAEIGDFSLFNSPKALTAFFGLDPSVNQSGKFNGDRNKISKRGTRIGRRILFTVAMASIRTTRNGKEINPVLREFYQSKCVSKKKKVALVAVMHKLLHYIFAVLRDQKSFALKRPEDHQAWRNAKPQPVAA

SEQ ID NO: 296465 - protein, 351 aa, unidentified
MSQNNITNPTTIYAGVDVAKATLDLHLGGVVSQLANNAQDHARILKLLAAAEKAAALGTKVHVIVEATGGYEAALVRALHAAGQPLSVIQPARVRHFARAKNQRAKTDPIDAGVLTAFGEAIRPAPSAAPTPTQIHLAELVSRRAQLIETRTAELNRAAHYSDKLLCRQSRQLLALLERQLAQCEKAIAAQIAADESMKTRAERVQQVPGVGPIVAAVLQAEMPELGTLTECEAAALAGLAPYNCDSGPHKGTRRIWGGRAAVRCALYMSAMSAVRHDPILRAFYVKLCAAGKKPMVALTAVMRKLVVLLNRLLKNPEFKLNGREKEEHASPQTSQQLDGGAAVCAEASGC

SEQ ID NO: 296466 - protein, 304 aa, unidentified
MNLSRIGLDLAKQVFQVHGVDRHEHVVCRRQLKRAQVRDFFRQLPPCLVAMEACGSAHYWARELRELGHTVRLIAPQFVKPYVKGDKHDAHDAEAICEAASRPSMRYVPVKSAEQQAVQSVHRVRSRLVRARTALCNEVRGLLGEFGLIATRRGRAATMALLETVTATEPAPLPAPMGELLRELKDELQTLEARIARLERQIQAHVRGDARIQRLLAVEGIGPISASAVAASAGDARQFRTGRQFAAWLGLVPRQHSTGGQQRLGNISKRGDTYLRTLLIHGARAVVRCCANKTDARSRWYRPG

SEQ ID NO: 296467 - protein, 355 aa, unidentified
MNSEKYIGLDVHQATICVAVMDPKGKVVMESILETKATTILEFLAGLRGTLSVTFEEGTWAAWLYDLLKPHVANLVVCNPRKNALLKHGNKSDKIDARKLADLLRLNDLEPVYHGETGVRMLRELARSYLTIVKDVSRVMSRLKAIYRSWAIPCAGRDVYYTRHRGEWLGKIPEAGSRRRAEQLYQQLDMLQPLRQQARRELLAEGRKHTITAKLRQIPSLGPIRSALAVALIQTPHRFRTKRQLWTYSGLGLETRDSGEYHYVQGQVRRRKKQVFIRGLNKDHNHDLKGLFKAAATRASVQPGPFQDFYQRSLAKGIQPTMARLTLARKIAAITLTLWKKGENFDAEKLKAQAA

SEQ ID NO: 296468 - protein, 357 aa, unidentified
MTNISQLTIGLDLGDKMSDVCVLNTEKKVVRSDRLPTSRESLAALFAGYPGATVVFEVGSQSRWVQQLARESGLGQVITADPRKIKLITQSRNKTDRRDAYLLARVGQGLPELLSPVEHRDEAVHADLQVLRTRELLVTQRTQLVNRVRGVLKAAGLKLPSCSATYFFRQARPHIPEYLLPACAPAFAMLEAIHAQLLGIKRLLRQMLDKYPAAKQLMTTPSVGDKTALTFVLTLEDPWRIRGTRDVAAYLGLVPRKKESGDTNPQLGITKTGDTRLRRLLVLCAHHLLSRGKDCRLKRWGLELCKRGGSNGKKRAVVAVARKLSVHMLAIWRTGETYDLLRGIPDLQENVTLTATA

SEQ ID NO: 296469 - protein, 386 aa, unidentified
MFIDQTSVQTSVQTSDPASVFTDQDIMLTVDYHDQNCVVRRRETVAGKGSVTRLPTDAAALGALMRGAARRAADRGGRAIWIQESTTGWARMQRLATECGVEFILANVLQMPLPPKARRRKTDKIDTARLEREYLNGQLPRAHQPSDDWRQLRRIVALRQNLVRRRTALTNWIDRYLAHETWVERGRFGSKRRERMLRGLRLSKLDRRVLDWKLDELQSLQAQLAQVDELLTELSAASPDARRLDAIRGLGPIGALAVVARIGPIDRFETPEQLIAFAGLAPGVQQSDGTRRDGKIGGGGTDKCLRHYLIEASMWARAIPRYRDAYNRAVRRRGNKIGRLVVARLLLRSVYKMLKHGLAFDPQSPVRQGRGASINAPTQEACPQIA

SEQ ID NO: 296470 - protein, 458 aa, unidentified
MSRSRKGRKSTKANSMPVLRADVAGIDIGSGEHWVCGPCGADETPNVEVFGTTTPELQRLADWLATQGVRSVAMESTHVYWIPLYELLESRGFEVLLANARQLHNVPGRKTDMADCQWLQRLHSCGLLRGSFRPDEAICRLRALQRQVGNLNQERSRAIQWMQKSLDQMNVQVHRAVSDISGKTGMRIVRAIVAGERDPMVLAELRDGRCRKSQKQIADHLIGTWRDEHLFNLASALRLYDAFEAEIECYNRKLREELEAFQPDERKAEPVPAHPNATKESSIKRRGDQPLRTDLWRFAGVDLTRIDGISSQAAMIILTEVGLDLSRFPSEKDFVSWLRLAPRRPISGGKQLHKRPNGTGANRISGVLRIAALALARSKSALGARFRRISRRKEGKVAVFDVARRLAQLVYRMLRYGTDYLDEGQAAYEARFRHNRLAGIEKAAKQMGYTLVAQPSAG

SEQ ID NO: 296471 - protein, 443 aa, unidentified
MSNLAMLDPRAAFVDVGSEKMHVSIAGGPPAVFGTVTSQLHALRDYLAEHQVRSVAMEATGVYWLPLYGVLEASGMEVIMVDGRQARNLPGRKTDMKDCQWGATLHAHGLLRAGFVPPAHVRRLQDYLRLRGDHIVAAAGHVQHMQKALERMNIKLHDVISSLTGASGLAVIRAILAGERDPQALLGLCHRQIRTVKAERVVESLRGDWAEEHLFALAQAVQSWDHYQGLIAACDRQIADILRQMPDANTPPPAASTKKATPRRQPGVNAPDIADLRDMLEQICGGKDLTILPAHTEYSVLQIIGEVGTDLTKWRTEKHFTSWVGLAPGSAQSGKRNGRVKRRRNRAGRIFCVMARSLARSKYIAFGGFYRRMAARRGGLVANKALARKLAALFWRAMVKGLDFVEMGVAQYEAKVLETKHSLLRKLARQLGQQVVPKPIAVA

SEQ ID NO: 296472 - protein, 342 aa, unidentified
MAIAIVGLDLAKHVFQVHAVDETGRAVLRRQLRRAGVEAFFKILPPCIVGIEACASAHYWARRITALGHEVRLIAPAKVKPYVQRGKKNDANDAAAIVEAVMRPHMVFVPIKNEEQQAVLMLHRTRDLLVRQRTMLVNAIRAHLAEFGIVAAQGRRKVKELIAGLDNTEMPELARIALWQIADQIDECDKRIDALERRILAWHKSDESSCNLATIPGIGPITASAMAATVPSPSAFRNGRQLAAWLGLVPRQNSSGGKDRLSGITKTGNTYIRRLLVIGATSVIRFARSKAPGTAEWLKKLLERKSARLASVALANKMARIAWSVLTRGEVYRDIHPVPKPT

SEQ ID NO: 296473 - protein, 399 aa, unidentified
MAQPTLWAGIDAGKAAHHCVAINADGQRVLSRRVVNDEGALRDLIRAVKAVADGGAVRWAIDLNSGGAALLITLLLDDHQELLYIPGRVVHHASGAYRGDGKTDAKDAAIIADQSRMRRDLHPLRHRDKTAADLRILCARRTDLAADRNRAINRLRAQLLEYFPALERAFDYAHRKAALVLLTGYQTPDGLRCMGAARLEKWLRDRHAYHAGDLAARAIAAANAQRITVTGQEVAASVVARLAQTVLDLNAELVDVDAMIEAKFQQHRLAGIITSMPGFGSLLGAELLAATNGDLASFNTADRLAGIAGLAPVPRDSGRISGNLKRPRRYDRRLLRVFYLAANNSIKTCPESRNYYDRKRSEGKRHSQTILCLARRRLNVLWAMQRDNTSYQPGLPRAA

SEQ ID NO: 296474 - protein, 340 aa, unidentified
MNVSMMGLDLAKNVFQVHGSDTAGAVIFRKQLRRDKLLAFFAGQPACIVAMEACSSAHYWAREISKFGHTVRLIAPAYVKPFVKRQKNDAADAEAICEAAQRPTMRFVSVKSEEQQASAAVFRARDLLVRQRTQTINALRGHLAEYGLIVAQGPSHVTRLVLHVEDSTSKLPEATRMALAILVDTLKSLDQRIQKLDVEIARRAREDEDARRLATIPGVGPITATALIALAPGAAGFKRGRDFAAWLGLTPLQRSTGGKQKLGETSKMGERTLRRLLIIGASAVVLQARRRGTPEGSWLGRMLARKPPMLVTVALANKMARIVWALMAKGGVYKAPAVAA

SEQ ID NO: 296475 - protein, 338 aa, unidentified
MKITTIGLDIAKSVFHLYAVNKMGRYVKKKQLKRQQLLQYLARLEPCVIAMEACGGANYWAREMKDLGHEVKLIAPQYVKPYVKGNKNDYNDAEAIAEAAQRPTMRFVPIKSVEQQDIQNLHRQRERIKKARTALVNQVRGLLAEYGIVINKGVAAVRKGLPDILEDAENGLTLRSRELFADLLEELRVLDERFKQSEKQIEVSNRGNEVCQRLDEILGVGPITASAAYAAAGDGKDFVNGRHFSAWIGLVPGQHSTGGKSTLLGISKRGNAYLRTLFIHGARAVLRHSANKTDRFSLWAQALLERRGHNKACVAVANKMARMAWVIMAKGETYRAVT

SEQ ID NO: 296476 - protein, 367 aa, unidentified
MKKISTTGVTETRNFRDQKLTIGLDLGDRSSWYCVLDESGTVLLEQRLSTTAKVMKEVFGGMPRSRIALETGMHSPWVSRLLNELGHEVIVAHARNVRLIGESRRKDDRMDAQTLARLARIDPQLLCPVKHRSAQAQADLTLIRARAGLVRARTALINTARGLAKSYGERLRGCNPRNLNEEKAQELSPELRSALEPLLAGIKSLSTQIREYSQRIEHLAQTRYPQVALLKQVKGVGTLIPLTYLLTLENAPRFRKRRDVGCYLGLQPARRNSGQSQPQLHISKEGDPYLRTLLVQGAQHILGPFGADSDLRRWGLKLAAQGGKNGKKRAIVATARKLAVLLHRLWVSGEVYEPFRNSIPLVATVAA

SEQ ID NO: 296477 - protein, 344 aa, unidentified
MTDIAVIGLDLAKSVFQIHAVNQQGLPVLKRQLRRGELLKFFQKLSPCLIGMEACGSAHYWAREFEALGHTVRLMPPSYVKPYLKRGKTDARDAEAICEAVTRPTMQFVPVKSVEQQSVLMLHSSRDLLVKQKTMLINALRGHLGEIGIIAPKGVVGAKSLGGLVHENQDAWPDEMRTVAHAFLDQLRMIQTQIEKLDDKILQWHRNSESSMRLATVPGIGPVVASAIAASVPDPKLFRSGRHFAAWLGLTPRVHGSGGKDTLGRITKAGNGYIRRLLVVGVTSLLRIDRKKTPTHLWGQMLREKKPGRVVAVALANKTARIAWALMRRGETYNGTAAALSAVC

SEQ ID NO: 296478 - protein, 335 aa, unidentified
MHYLYYVGLDVSKETFDASLVAFEDANEMAHRKFANSRKGICSCLHWVEKRHGILLDDVIFCAEDMGSYISEMAVCASDRTLNFNFSLISPLVIKYSMGIARGKTDRVDARRIAEYAITHYRKIALYLPAEKELCQLRTWLILRAHLAKQRVAKLVLLEKLDYKEKFADVSIQRSMLQEEIAYAETHMKTIEREMKELITADSNICRNYKLLTSIKGVGPITAIVMLCSTLNFTKITDHRKFACYCGLAPFEHNSGTSVRGGCHTSSMANRDIKVQLNRSALIAIRCDPQLKAYYERKVAEGKHKFSVLNAVRAKIAARCFAVVRRGTPYVALQI

SEQ ID NO: 296479 - protein, 391 aa, unidentified
MKVTRIGLDIAKQIFELHGVDQRERVVLRKTLKRERVLEYFAQLEPCQVALEACGGAHYWYREISKLGHTVRLLPTNKVKPYLDGNKNNAHDAAAICEASSRPSMRFVEPKTALQQDLQALHRVRQVNVRHCTLLANQIRGLLLEYGITIARGVSALNRALPELLEYEEQRLSPLLKQLIAAQWRMLKLHRRQIEAHDRRIAGLAKNDASCRALLKIEGIGPVTATALVAVTGKGQQFKNGRHLSAYLGLVPGHSNTGNKTVMLPITKRGNRYLRTLLIHGARSALYAARNKDNSRSLWLQRLQSRRGNNIAAVALANKNARVAWAVLRFGQTYRPDMGHDQELSATPPQRLQCQPQGRLTLKPHGAPSRIQNRHFPSPPPNGEGRAGKML

SEQ ID NO: 296480 - protein, 428 aa, unidentified
MNCNTQNAKIASITEKTLIVGIDVGSETHYARAFDWRNYEYTKKPLEFSNTEAGFQTLKAWMEDIAEKHGKTAVIPGMEPTGHYWFALGKFLQDNGMKPVHVNPHHVRKSKELDDNNPNKNDRKDPKTIAALVNEGRFTYPYMPVGIYAEIRSLSNLRFQTQEELTRIKNRLARWFAIYFPEYKDVYGDLKAVSGRMVLKEAPLPEDIIRLGAEGVNQIWRDAKLRGAGMKRAKTLVSAAEHSVGSKEAPEAARMELKNLLGDMDVYASRMEGLLQRIEEKLGEVPYIDNLLAIKGIGMATVSGFIAEVGDIGRFDNPKQLQKLAGYAIVANDSGKHNGESRISYRGRKRLRYVLYEAAISLIGKNEEFREIHEYYQTRKENPLKKMQSVVAVACKALRIFYTILTKGVEYDPKKLLGDIRRPQVQAS

SEQ ID NO: 296481 - protein, 358 aa, unidentified
MQSVTRVGIDLAKMFIQVHAVDAVGKLVCNKQLSRDKFIAWCNQLPAGCLVAMEACSGSHAWARKLIALGLDAKIIAANHVTPYRLEGKGGKNDANDAAAICEAASRPSMRFVPVKTLSQQGMLCVHRYREGVKEERTANINRIRGLLAEFGIIAPQSPNKLRERLAEIIEDADNDLCGIARMVIQEAFSHWDEIDKQLEWCAQRISAHVKENQQAQTAVQLMGVGPVTASAAVVTVGDFKQFKNGAQFGAWLGLTPRQNSSGGKTKLGRITKRGDVYLRMLLIQAAKAAVMTAHKRDDSISRWLLQLREKSGWQKAAVAMANKNARILWAVMTKGCDFDPRYVSVKPSGGGSIAAAI

SEQ ID NO: 296482 - protein, 348 aa, unidentified
MIMLGIDAHKRTHTVVAVDELGRRLGVKTTTATTSADHLELLRWADQFGPERTWAVEDCRHLSRQLERDMLSAGERLLRVPPKLMAHSRDAARTYGKSDPIDALAVARAALREPDLPTAALDPASRELRLLVDHREDLVAERTRHINRLRWHLHDIDPSWDPKKRALTTMKHLRLVEQRLQELESVVARVALDLVRRIRELTLTVNDLEGELDQRTADTAPNLRAVHGVAGLSAAKLIGEVAGIDRFRSRHAFARHNGTAPTPVWSSNSERHRLSKTGNRQLNAATHRIALTQARSLPEARAYLEKRQAAGATRKEALRCLKRRISDVIFRAMLADAATTAHVNTLAA

SEQ ID NO: 296483 - protein, 444 aa, unidentified
MKRKNAGKMKVPKHLEHINRCAAGIDIGSRSHFVAVPEGTDENPVREFSTFTEDLEHLAGWLIACGVTTVAMESTGVYWIPVFEILESRGLEVKLVNARHVKNVPGRKSDVLDCQWLQQLHTYGLLQGAFRPVDEVCTLRAYVRQRSTLVRSAASYIQRMQKALTQMNLQLHNVVTDITGATGMRIIKAILNGERNPDALASMRDPRCRNSRSAIARSLKGNYRPEHLFSLQQAVELYEFYQIKIADCDRQILEQLKGFDACDPPHDVPRATVEDALLGMSGVDLTSIDGIDTATALKIVAEIGTDMSRWKSSKHFASWLGLSPGARISGGKVLSSATKPVANKAAAALRMAAFTLFNSKSALGAYLRRQRARLGAPKAITATAHKLARLVYAMLAKGTAYVDAGQEYYEQRYRLRVIQNLKRKAQELGFELVAMQGTTTAQQV

SEQ ID NO: 296484 - protein, 309 aa, unidentified
MKPYVGIDVSKATLDVAIGSDGEMVQVENSEAGIAHLVKRLVEAAPALVVLEATGGYESLVAAAVAGEEIAVAVVNPRQVRDFAKSTGVLAKTDRIDARVLARFAEAVKPEPRPLPTQEAKELDELLSRRRQVVEMLTMEKNRLGIAATERMKKAIKKHITWLEEALNRANDDIDKAVRNSPAWREQEDLLRSLPGIGPVNARTMLAELPELGLLNRKKIAALVGIAPFNRDSGQLKGTRTCWGGRASVRQALYMAALSAVRCNPVIRRTYAALRERGKKHKVAMVACMRKLLTILTAMVRDGRRWSPS

SEQ ID NO: 296485 - protein, 345 aa, unidentified
MMEAYDGRQVVGMDLHRRRSVLVRMTAHGRRLETARIENSPAALRAVLARCGQRPLVVLEATYGWYWAADVLEQAGAEVRLAHPLGVRAFSYRRVKNDERDAADLADLARMGRLPQAWIAPPAVRAVREVVRYRHKLAGQRTSCKDQVHAVLAKCGVPVTHSDIFGRGGGLWLDQLVLPAPYAAKAASLRALIGVLDGQVAALGAEAAAMLAQDKGYAAVRELPGIGPVLAAVIISEIGDVTRFRRPGQLCSWAGLTPRHYESDVKVIRGHVSKQGSRLLRWPLCEAIQHQPAGTRPQRAKEAIIARRGPQARNIAKTAAARVLLTQVFYAMRDGHVRCASDPAA

SEQ ID NO: 296486 - protein, 318 aa, unidentified
MNTLPENSRVVHLGVDVAKHELVLDLQGSIRRFANTPKGIAELINAISSRTDFPPHLVCEATGGYERALTAAALQRGVPISVVQPQRVRHFAKAIGLHGKSDPLDAGLLSRYGSQVLPLPLMPKDSARQRLDALLRARTELLDSMHRELNRSENDVSPVVIRIRKDLVKRFEKHLATLDDEIAKLVAGDSALARADAMLREVKGVGPQTSRTMLAFLAELGRIGRRAIAALVGLAPYDRDSGKTKGRRFIQGGRAHVRQVLHMAAVVAARHNPVLKAFYQRLREAGKPFKVAIVAVTRKLLLHLNTRMAIFLGNPLVD

SEQ ID NO: 296487 - protein, 392 aa, unidentified
MRVTQRPSGEVKQEIRTFATTTPELLALRAWLSDQRVTHVAMEATGVYWKPIYYMLEDGFELLLVNPAHFKQVPGRKTDVADCAWLAQLLEHGLLRSSFVPPAPIRELRDLTRYRKRLTEERTRAANRLHKVLQDAGIKLSSVATDMLGVSGRSMLMALVAGTTDPALLADLARGQLRKKLPELRRALTGRFGSHHRFMVSRLLADLDYVEEASADLSRRIEELLAPFAAAVERLITIPGVQRRTAEVMVAEIGADMSRFPSAAHLSSWAGMCPGNHESAGKRRSGKTRRGNRWIRTALVEAGGAAGRTKRTALGARYRRLRGHVGHGRAVLAVGRNILEIAYHLLSEQTIYRELGIDYFDRYRTERLKRSSLAQLQRLGYQVTLTHLPTAA

SEQ ID NO: 296488 - protein, 403 aa, unidentified
MPDGIRWVGLDVHARESTLALFDKATGEVVTRRMVGRPHELLPWLRGVERPARMVYEAGPTGYGLARRARAEAIEVSVCAPGKTERPPADRVKTDKRDAIRLARLLAAGELTLVTIPTVEREQLRDLVRCREDIRLDLMRARNRIGKFLLRREIYWEGRGEAWSRKHRSWLTSVRFADHASQATLADYLHAHDVLIARRDQVEADLAKLALSAPCADTVARLRCLRGIDTLTALGLCAEIGEWERFDHPDQLASYLGIVPSEHTSGAQRRLGSITKAGSTHARRLLVEAAYHYRRGPAVGEALERRQRGQAPEIIHISWRTQRRLHARWRQLKDTRRKPSGIVAVAIARELAAYCWEIATWTPHPDRVPPASVPAGDPLTQPASNPGSSNKTPTTRRRLTNSR

SEQ ID NO: 296489 - protein, 427 aa, unidentified
MSKYRNSIVCGLDVASEFSIACILDPEGNVGLRSYKIIHSLQGFNSFLSIVNDIVKSHNQAPIVFALESTGIYHMTLLTFLKNNNFEVLLINPLITNSNKNNSIRKVKNDKKDAFSIANLVKYQDIKVSFLPSLDILRLRAFIREYFYLGDEYAKFKLKLGNVLAYTWPGYSNVFSDIASLASINILSTYPSATSFLNADKADILKLLSPSRKGSKWCETKYSQLLSCANDTSSLSNVDQPFIVQSFVSMISSLDKNIGILFNSLQDFINSKDFDQSVKYNIDLIKSIPGCGFISAVAIIAEIGDFARFSKPKELIAYFGLDPEVNQSGKFTADKVKISKRGPRIARRALFFIALASIRKGKNKQPINSVLKAYYDKKCVSKVKMSALSCVMHKIVKILFSVLREQKTFSLRTPEDHINQFLNNQAA

SEQ ID NO: 296490 - protein, 342 aa, unidentified
MTKKAFDELISIGIDIGKDTFHIVAFDPDGRLVMRKQIKRLALVSAFEKLPRCVVGMEACLSAHFVSRTLRKMGFEPRIIPAIYVKPFIKGQKNDYNDAEAIAEAAALRPNLPTVPEKSQEQLDLQALHRVRSRLVSRRTATINRIRAFLIEQGITVRKGLRALKNSFETILEERKDEISPRRRTILIGLFGDWLWLDDRIDTVSKEIEQISRIEENCVNVMTIPGIGPMISTAMVAAIGTGEALGRGRDFAAWVGLVPRQHSTGGRTVLGRITKRGSRYLRMLFVQAAKVILMRPNRWPDYSFGEWLTKAAERMNNNKLAVALANKPARTAWSVLRQKNDL

SEQ ID NO: 296491 - protein, 310 aa, unidentified
MEHRRIAGIDVSKDRLDVHVLPSQEAFAVSRDPTGLAELCRRLGDTATLVAVEAIGGYETLVAATLADHGVPVVVVNPAQVRSFAQALGQRAKTDPIDAAVIARFAEATRPQIRPLPDAAARLLADLMARRRQIVEMIASERQRLHRTEPPRVRKSIERLLKALERELGTIDHDVDGAVRGSPLWREKEDLLASVPGIGRIIARTLLAELPELGRLDHKQIAALAGLAPYTRKSGLWKGKARIGGGRAVVRTALFIGAQVAKRWNPPLKAFYERLIAAGKTKMVATIAVARKLLVTLNAILRDSTPWQNA

SEQ ID NO: 296492 - protein, 380 aa, unidentified
MEKDIRYVGLDVDSERVAVAVADSAVTEVRSLGMIPNAAESVRRLVKKLGPVDGLRFCYEAGPHGYGLYWELTRLGAHCDVVAPTLIPVKSGDRVKTNRRDAEKLARLYRSGELTAVWVPDAAHEALRDLVRAREAAKKDQLRAKHRLGKFLLRRGLKAAAGVKSWTLKHLAWIKTLHFEYPAQEATFLDYLHEVEHASARIARLEGALDQAIETAPSTMRALIDGLQALRGVSSLSAATIVAEVGPLSRFARPKQLMGYSGMVSSENSTGNSVRRGAITKTGNAHLRRVIGEAAWAYQRRPSMYRALEKRQEGLSEEVKQIAWKAQHRLSGKYRRLLAKGKLHQKAVIAVGRELLGFVWAIGIQVEKEQRARASYGRVA

SEQ ID NO: 296493 - protein, 422 aa, unidentified
MSSEYRLFVGIDWATEAHQVCVIGPDTEIVEERVIEHTGSAIAQLLDWLARLARGEPEMAAVAIEIPRGALVESLIERGFLVFAINPKQLDRFRDRHTVAGAKDDRRDAFVLADSLRTDEHCFRRLRIDAPDVIQLRELSRMDEDLREEANRLANRLREQLLRYQPQALRLCPAADEPWFWSLLEVAPTPGHAARLSTTRVQRLLREHRIRRLTSEEVLAEMTAPPLRVAPGTVEAAGAHVALLLPRLRLVHAQRADCAKRIESLLKEIGSADDQEEERREHRDVEILRSLPGVGRNVAATMLAEASQPLEERDYHALRALGGVAPITRQSGKRRVVIMRHACNSRLRNAFYHWARCAMIWDEPSRGIYRAQRSRGHSHGRALRTVSDRLLRILVAMLRSGSLYDVSHAARASAGSRSEAVA

SEQ ID NO: 296494 - protein, 339 aa, unidentified
MTIQSEKIIQEPKQLFAGIDVGAEELILVIRKNGTPFKPQKFANTHADRARLVKKLVNLPGVIVCLEATGVYHFDLSIALHDAGVALMVVNPKSSHNFAKALMKNSKTDAVDADTLAQYAERMDFVAWTRPSDEKIALRSFARRIDALTRQKAASKNQLHALSASKENPKAVLRDVNLSISQLEKRIDCLSKEALVLIKKHADLERVFKLLTSVKGIAQTSAIALMGELLLLPQGLSHREWVKFAGLDPRAFDSGKSVHKKTRISKAGNRHIRSALYMPALSAKQHDPHVKAYFQHLVDNGKKPLQALCAVMRKLLHAIHGMLKNDKPFDNTRFYAIPA

SEQ ID NO: 296495 - protein, 363 aa, unidentified
MTAKATCLVGLDVHARQTHAALLDSRTGEINVRRLIGMPEAAVLPYLEHLGGGVLAAYEAGPTGFGLAREANKRGLDVRVVAPGSIPKGAGDRVKTDRRDAVRLVRLLAAGELRFAFVPTVEDEAFRDLIRCIEDLRGDLMRARHRLSKFLLRRGRRYEEKSAWGSTHLRWLKAIGFDDGCSQATFVDYLASVQLLGGRRATLLEVLEAQVPGCSHAPTIARMRCFRGIDTLSAAGLCAEVGSFERFPKPGLLSGFLGIVPSERTSDTKRRQGAITKAGPGHARRLLIEAAHQYRRRPAIGETLARRQQGQDPRIIEIAWRAQRRLYQRWQHLREARRKPAGVVAIAVARELAGFLWEAAVLD

SEQ ID NO: 296496 - protein, 405 aa, unidentified
MEKRGEVDLHIGAIEVFVGIDVGKSAHHAVALDRQGRVLLGRALPQDEAALRALIAELRGHGTVLFVVDQPATIGALPLAVARDEDVRVGYLPGLAMRRIAEIHAGEAKTDARDAAVIAQAARTLPHALRPLRQDDDATAALAMLAGFDEDLAGQVNQLSNRIRGLLTHFHPALERVLGPRRQHPAALDLLQRYPSPQALRAAGRARVAARLRRRAPRLGDKLAEDILAALAEQTVVVTGTDAAARVLPQLAEQLALVLAQRQRVAEQLQELVDDHPLGSRLLTMPGVGFRTAAHVVAETSGRQFATPGHLASFAGLAPVTHRSGTSIRGERAPRRGNRRLKRALYLSAFAALKDPVSRAYYDRKRAERRSHQAALLALARRRSEVIFAMLRDDTTYDPKRASAA

SEQ ID NO: 296497 - protein, 330 aa, unidentified
MNYVGIDHHRQYSHITWLDEKGEVVKSGRVANLRRELEGFLQGARDVKAVIEAGRSSYAMVDVLDDLAIETTVAHPKDVKAIAKAKIKTDERDSYKLAHLLRTGYIPEVHKRSRENRSSQRVLRQRAFYVGKQTSVKNRLRALLAQQREEIRLEVERVENLFTDKGMKILKGLVLPEREAKMVGALLKTYHHLEERINETNALVKQLYKRMPSAQLIQTVPGFGIFLAVLVAVEIEDIGRFEEVSQFHAYAGVIPSTHSSGERSWHGKIIKEGNRWLRWAAVEAVWPALRADFDIRCFYDRLKSRKGANSAKVATARMIKKTNRLPSATS

SEQ ID NO: 296498 - protein, 360 aa, unidentified
MADDNRKPDVTIGCDLGDKKSEVCILGSDGAIERPKPVGTTRQEMTAFFTRPRAHVVIEAGTHSRWVSNVLKGLGHKVTVANPRKLSLISRNDSKNDRTDAELLARLGRADEKLLSPVVHRSDEAQAHLATAKVRDGLVACRTRLVNQARSLVKSFGYRLPKCTTDTFHKACWGSVPKELKQALAPAFGMLRHLEIELKRCNKAIARAAKKYPDVEIIGQPNGVGVLTALVFLLTIEDKTRFKSSRDVGAYVGLRPKMYQSGGTDPQLRITKAGDAYLRRLLVGSANYILGPFGKDSDLRRWGLQLAGRGGKNAQRRAKVAVARKLAVLMHRLWVTGEEYKPLGYGKKAEAPATVPTLTN

SEQ ID NO: 296499 - protein, 343 aa, unidentified
MGEVMTIGLDIAKSVFQIHGVDGDGAVVIRKRVSRGKVLEFFADLSPCLVGIEACPTAHHWSRELQSLGHTVKLMPPSYVKAYLKRAKNDANDAAAICEAVTRPSMRFVATKSKEQQGALMLHRTRQLFVRQRTMLSNAIRGQLAEFGIIAPVGRLGFARLLEMMDGPEELGVPKTAWVCLMGLAEQYQRIQGEIGKLEQFIQAWHRSSELSRRLEEIPGVGPIVATALVGTITDPHAFASGRHMAAWIGLVPQQNSTGGKDRLGGITKQGNRYLRWLLVAGAMAVIRYAQKHGTAKRPWLARLIERKPTKVAAVALANKIARIAWVIMARGERYRGPAPLAA

SEQ ID NO: 296500 - protein, 362 aa, unidentified
MLKSTTIIAFDQHAATTVAAVLMPGHRTPALHTLTSESSAVVRFIERLRRNGPVQCCYEAGPCGFELHRACTAHGISCDIIAPALIPRRPGDRIKTDQRDAGHLAVLYRAGALTAIHIPTEQEEAARDLLRCREDIRADLLRARHRLSKFLLRHGRRFTATKKAWSKRHDAWLRAQTWPIAALDQTHQAYLRAVDEVVARLRDVEQDLRALLELEPLRPRVQRLRCFRGIDDLTALTIAAELGDPRRFATAPSTMAFVGLVPSEHASGTKRAQGSITKTGNAHLRRVLVESAWHYRHHPFVSATLRARQQGAPADAIARAWAAQQRLHRRYARLAARRKPKQHIVTAVARELTGFVWAALTQ

SEQ ID NO: 296501 - protein, 360 aa, unidentified
MEKVTRYVGLDVHGETIAAAIGEGYGKTRSLGQFPNRPEFVRKFIDRVGGPRGLKVCYEAGPTGYALYWQLTKMGVECDVVAPSLIPRKPGEKIKTDRRDAEKLAECYQSGTLTSVWVPDAAHEALRDLVRARAAAKRDESRAKHRLVKYLLRNGLRWVQGLELEFEPQKVTLADAVAAVLHEKERLARLDLAIDRAIEAAPPEKRAVIDALQALRGVAKLTAVTIVTEVGTFQRFRKPTELMGYTGLVPSEHSSGDRKAKGNITRTGNAHLRHVLGEAAWHARHRPWLNLRLKKVLPTLPPGVSEIAWKAQERLHRKFTRLTYHRKPAGKVATAVAREFVGFIWAIGRLAEDHARTDTA

SEQ ID NO: 296502 - protein, 354 aa, unidentified
MKIVKDIGRQSIRYIGMDVHRDSTTIAVLDAQGSLLMEVTLRTEASILVDFLSGLSGTLYLTFEEGTYSAWLYTLLSPHVEKLIVCNPRQNALLKHGNKSDPIDARKLAELLRLGSLTAVYHGSPGLRTLKELAASYSTLVRDGTRVMNRLKSLYRGRGIRCGGTQVYSPRHRHRWLQQLTEEGSRQRAELLYQELDLLLKLRRPARRALLKESHKQAGEKSLRSIPGLGPVRVALLLAWLQTPHRFRHKRKLWGYGGLGLITRGSAQYQLQHGELVNSPKGVRVRGLNPAHNHALKDIFKGASLVACQRPGPLRDAYLRCLKEGTAEHLARLTIARKRGGRFDAKRLRREQAA

SEQ ID NO: 296503 - protein, 341 aa, unidentified
MEEDIIIGVDLAKNVFQLHGARRDGQVVFRKKLSRPQFAKFCAEHPRSLFAMEACATAHYWARELMSLGHEVRLIPPIYVKPFVKRHKNDAADAEAITEAALRPNMSFVVPKSAETQALTMMMRTRDQLLEQRTATVNALRGHLAEFGLIAPVGLKNVERLRELVDVHPDLPELVVTMAKMHFNRIDQLSEEVDTLTGRIKSHCADSPEARRLQTMPGIGPIAAMVIEAFAPDMKCFEKGRDFAAWLGLVPKQHSTGGKTRLGQTSKMGQKDIRRALIIGAMSCIAAAARRGKRCHPWLQDKLDRKPKMVAAVALANRMARQIWAMITREQGYQSSQEVAA

SEQ ID NO: 296504 - protein, 358 aa, unidentified
MSGKVKQLDFTGVNIYAGIDTHLKNWRITIMTEDLHHKTFSSDPSAKSLACYLRKNFPNGNYYSAYEAGFCGYSAHRSLLEEGIKNIVVNPADVPTKDKERKQKEDSRDSRKIARALINGDLEPIYIPTRATEELRGFIRYRKSIVRDISRYKARIKSFLYRHGIDIPDEHYSASRYWSSNFTEWLKTIKLSTDYGHIVLLKTLETVNQLRVTLLQMNRELRTISGQEQYKTQIKHLTSIPGIGIISAMTILAELETMLRFSNLNKLCSYIGLVPTTNSSSDKERAGGLSPRCNRLLREVIVESAWVAARNDPALSLSYSKLCTRMKKTNAIIRIAKKLLGRVRFVLINEVEYKYAIV

SEQ ID NO: 296505 - protein, 409 aa, unidentified
MRIIGLDIHRAFAEAVAWEDGKLRRLGRVDMRRDLLDAFAAKLSPSDIVVIEATGNASSAAAVVAPHVKKVVIANPKQVRIIAYGKIKTDTIDAGVLAQLYASGFLPEVWVPDEPTQALRRQVTRRNQIVRQRSRLKNVIQSILHSHLIPSCPHADLCGAKGRSWLSEQVVPEDERLAIDRHLREFDRLGDDLQVIERDLARSTLEDEGVKRLMTIPGVDMTVALAMKAAIGDVSRFEEPQKLVSYLGLNPSVRQSGPGPAYHGRITKQGRGHARGMLVEAAWAAARAPGPLRAFFLRVRARRGQHVAAVATARKLAVVIWHLLTKGESYAWARPSLHAKKLRDVELKAGSKAVRGQKGAAHAYNIKSHRDEERRWVEQAETAYARFVSGWNPRGPKRARTGAANEKRL

SEQ ID NO: 296506 - protein, 342 aa, unidentified
MNIAILGIDLGKNLCSVVGVDETGAVVLRRRMRHQTIIQYASGLPGCVMAMEACCGAHHLGRILRTQGHEIRLMSPEYVRPYVKAQKNDDRDAEAIAEAASRPTMRFVELKSQDQLDLQSLHRVRSRLVNARKTLINQLRAILLERGHVVAKGPQRLDRALDDKLAGDDLDITGRMRARVIEMRNEWRELDQRIEALNAEFKDHVREHEEARRLIAIPGIGVLNATALTAAIGDGSAFGRGRDLAAWLGLVPRQVSTGGKAKLLGITKRGNKYLRMLFIHGARAALPSLAKSATPLGQWLRGLLSRAHRNVTVVALAAKLARIAWATLRRDATFEPMHGAVA

SEQ ID NO: 296507 - protein, 325 aa, unidentified
MTDAAYLGIDIAKRKFDVALVRPDGKTRAKVCPNTPAGHGELLAWVARQHAGRVHACLEATGTYGDALAEALADAGYTVSVVNPAMIEAYARSRLTRTKTDRADARLIAQFCATQQPARWTPLPREVRTLQAFVRRLDALEGMRTQERNRLAAEPGDAVIRASIQHVIDLLEDEMATLRTRIRDHFDQHPGLRNQRALLTSIPGIGEATAAVLLAEFGPLTRFRQAGACAAFAGVVPRLSESGHSVRRKPVLSKLGAPALRKALFYPAMVALRHNPIIAAFGQRLRARGKHKMVVIAAAMRKLVHLAFGVLKTGTPFNPDYLLHR

SEQ ID NO: 296508 - protein, 416 aa, unidentified
MGRLKIVYPVCCGMDVHRDFVIACIASTNAQGVTEYQSRRYSTYSGGLRDLRDWLVSNNCLDVCMESTGKYWFPVHNILEMSCHVVVSHPKFVKAIKGKKTDKKDAQWIADLFKHDLVRGSFIPPNDIRQLRDLCRYWCKLTAYMTGEKNRAQNCLTVSNFKLDDVFSNVFGKSASAIITQLLEHPGVTFDVAPFVDGRCHTPIAQIQEAVDGSFAPEQAEKLKIIRSHLDFLEELKLNVESEILGIAKNYLPQIELLLTAPGINEPMTAIRILAEIGTDMTVFETAKHLTSWAGLTPQNNESAGKKKTTRIGKAGAYIKPLLVQVALAASRSDKHPEMKAKHLILKKRRGGKKATIAIARKILTAIYHMLLKGEAYNPCLYAREDKPPASRQITAEQALLLVAKMGFVIVNPVPA

SEQ ID NO: 296509 - protein, 356 aa, unidentified
MSYDVKYIGMDVHKEAIVMAVQNESGKLVMESVIETKASSILQFLHGLRGELHVTWEEGTWAAWLYDLLQPHVQHIVVCNPRRNALLKEGSKSDKVDAQKLADLLRTGMLRPVYHGENGLRTLRELGRSYQTISKDLTRVMNRLKALYRGWGIPCAGTQVYAARAREEWLSKIPQAGVRRRAELLYQQLDGLQALRREVRPEFLAESRKHKAAKLLRQIPCIGPIRAARLIALMQTPYRFRSKRQLWTYSGLGIETHDSAQYHFVSGQVQRSKKPQQVRGLNRNHNHEMKEIFKSAATRASCGRGPFHDFYAALLAKGMKPEMARLTLARKIAAITLTLWKKEEGFDVEQLKTQAA

SEQ ID NO: 296510 - protein, 345 aa, unidentified
MKKVMAGIDLHSNNVVIGIMDTEGKRVTSAKLPCEIKEIAKFLAPFKKRLEQVAVESTYNWYWLVDGLQALKYPVVLANPAAMQQYSGIKHADDTNDAFFLAELLRLKILPTGHIYDAQLRPVRDLLRRRMTLVHQRTALMLSFKSLYTRTTGQEMTLSQLKELEIKEAQNLYTHPANQMIAGMQIKHIEQLTESIEKIEKVVMASARELPAYGKLTTLPGIGIILGMTITMEVGKIERFSEAGHFASYCRTVEAQRTSNCKKKGENNSKCGNRYLAWAFVEAANFARRFDEQCRKWYDRKAAKTSKVLATKALACKLAKAAWFLMSEGTEYDAQRMFGQPATKK

SEQ ID NO: 296511 - protein, 374 aa, unidentified
MQEPAVTARTEGISVAIEMSNTQWRLAFTAGDKIRQVSMTAGATVEFLQHLRTAREKLHVPADAPVFSCYEAGRDGFWFHRFLTAHAVTNLVVDAGSMRVQRKYRSAKTDRLDAQQLLRHLLRWRAGETHVWSVVRVPSVAVEEQRRVERERQRLRKEATAHWARLWSLLKLHGIGSCPKTQFLAHVADARTWDGQPLPERLQAELRREYTRLAELTQQLTVLETEQVRQTTAPNTAAEQVAAKLHRVKSLGPVGACLLAHEFFGWRQFRNRREVGALAGLTDTPWSSGDLTRSQGISKAGNRRVRHLMIEVAWEWLRYQPASALSQWYERRFAQGGARLRRIGIVALARKILIALWRWVAFDEVAAGLRLRPA

SEQ ID NO: 296512 - protein, 456 aa, unidentified
MSKKHVSLEVVNPNAAGIDIGSRSHWVAVGQDAQDVREFGVYTEDYQELSKWLKEHEVTTIAMESTGTYWQNIFSFLVAEGFDVILVNGRQTKNIKGKKTDIKDCQWIQKLHTLGMLSSSFLPDRTTDIIRTYHRHRQNILKQVGATVQKMQKYLRLMNLRLDVVVNDIVGLTGQKIISAFVAGEKSGKELAKHRHYNIRKSEEEIAKALQYNGREDYFFALKQEWKTFLHLQKQIDETDKEIKKLLKKIIRNDENKKKHTAKQKAYKRKNKNAIRNTDMNQIGVQYFEGIDLMAIEGVNDATVMAFISEIGLEGIKKFKTAKEFTAWLRLAPNNKISGGKVLSHHLPKGSNRLKIALRQSANVIGNLKEGHLNDFFRRINYKKGRATAISATARKLAVIIWNMLAKGEPYKPPTEYLFLDQKRKLRLVSRIKKNIAKFDIKPQDIGFDNLLNIST

SEQ ID NO: 296513 - protein, 355 aa, unidentified
MNAIKYIGMDVHVATISIAVLDANGKLIMEVTIATQAGALLDFIRGLSGTLNVTFEEGTSAHWLYTLLEPQVAKVVVCDPRQNPRRLGEKKSDRLDARKLAEWLRLGTLKPVYHGNSLGPALKELARSYRTLVSDTARVMNRLKALYRARGIRCAGTRVYSPRFRDQWLEQLREPGARGRAERLYRQLDLLLPLRQEARAAMVAESRKHPAHKILCSIPALGPVRVALLLALLQTPYRFRGKRQLWTYAGLALVTRTSADYQVVGGQVTRARKPALVLGLNANHNHTLKGLFKDAAASTLAHPGPFKDFYTTRVAQGMKPELARLTLARKIAAIVLTLWKKGECFNVEHVKAQAA

SEQ ID NO: 296514 - protein, 262 aa, unidentified
MDYYAGIDVSLELASVCIVDANGKIVKETKVESCPDALVAFFNDLRLPMAQIGLEAGPLSQWLHAGLTQAGFETVLLETRHVKAALSAMTVKTDRKDARGIAQLLRMGWFRPVHPKSVRSQEVRALLVARKLLQNKLKDVELSIRGILRGFGLKVGEVTRKKFESRIRQLVTGHAMLERIADAMLSARAGLLIQFNKLDKSVRQIARYDKVCLQLMTVPSVGPLTAITYKSAIDDPQRIKKSKSAGPLFGLTPRKYQSGRLT

SEQ ID NO: 296515 - protein, 344 aa, unidentified
MTKTPIAVLGIDLGKNSCSLAGMDASGAVIMRKRMTRDAIVTFAATLPACVIAMEACCGAHFLGRTLAGHGHTIRLMSPEYVQPYVKAQKTDDRDAEAIAEAATRPTMRFVSLKSEDQLDLQILHRVRERLVNARTALINQLRAVLLERGIILPKGRVNLMRRLGELMAADPAITTRAATLLEDLRDEWSALDRRIKAYDDELAALTREDAQARRLATIPGIGVINATALLAAVGDGSAFAKGRDLAAWLGLTPRQHSTGGKTKLLGISKRGNGYLRKQLIHGARAAMPHLAAKPNPLGAWLQNMLARAHPNIVVVALAAKLARIAWAVLRKEEDFDRQALVAA

SEQ ID NO: 296516 - protein, 309 aa, unidentified
MDVKFYGVDVSKAKLDVACCGRVVEIENEKKAIRAFVKSVPLGSYVVMEATNTYHLEMADICHTRGMRAFVVNPRVTRHYREANGLRGNNDRMDARTLCRYIEREHDGLREYVPKSADQRRLKTLVRRRWKLVGMRTQVQESLGSIKELSRDLRALVARIDALIAKLELLIDKQLAGNPDRARIATIKGIGPAVSAVLIADLSSCEFASADAFVAFYGLDPMPKDSGKRKGRRKLSKQGDRLGRAMLYNAALSASRTKVWKPMYDSCLERGLTKVQALIVVARRIARTAWSVYTHKTTFEPSRLFRALT

SEQ ID NO: 296517 - protein, 343 aa, unidentified
MQTITTIGFDIAKSVFQVHGVDSAGEVVIRRQLKRRYVLAFFQKLSPCLVGIEACASSHYWSRELQALGHSVRLMPPAYVKPYVKRQKNDMADAEAICEAVTRANMRFVPTKTPEQQSCLMLHRTRHLFIRQQTAVINSIRAHLAEFGIVAPVGRKGVTELLHVVADPSDRRVPEVARACLAALGTQLLRLKQQILEFDRLIMAWHRSNQTSKRLHYIPGVGPMLATALVASVADPRTFRSGRNFSAWVGLVPKQHSSGGKDRLGSISKQGDRYLRSLFVAGALAVIRYAKIHGTKHRPWLTALLGRRPTKVAAIALANKIARMAWAMMAKGERYKQPVALAA

SEQ ID NO: 296518 - protein, 348 aa, unidentified
MVMVGGLDLHRGQITFDVASTETGELWRGRLGQPSRLRFRQWLETDLMPRAHGAPVALAVEGCTGWRYVVEEITAAGFEAHVAEPADTQAARGRKRRAKTDRTDARLLRELLADGDLPESWIPPTCVLEWRERVRLYKSLVDQRTQWIQRIHAELFQHGVPVPDGELTFPAVKAALCDPGLPVSAAAGQRIATGYRMIEATNAEALPLRAELARFGARQPACRALVRNHFGVGGLTAVAIWSELGDCRRFSRSMQVVRHAGIDITVDMSDTHRSSGYLSHQGPTILRWALYEAAKSSSRPTAPDYAYYSSVKKRHDGKLAALAVARKLARRCYHTLRGIDPQEVYATI

SEQ ID NO: 296519 - protein, 317 aa, unidentified
MMNEKEIFIGIDVSKDNLEVFVKPLGQRPAFAQTEDGLLLMVDFVQSFSPRLVVLEATGGLERAAVGALGAKGLPVVVINPRQIRDFAKAKGILAKTDKLDAEVIAEFAEAIRPEIRPLKPQETQELEALVTRRRQVVQMITAEKERLPTAVRATKKDIEAHIQWLEKRRDKLNKDLERKIQNTPLWRAKDEILQSPKGVGPVLSHMLLAKMPELGTLNRKQAGKLVGVAPLNRDSGKFRGKRKVWGGRAEIRAVLYMATMSAIRSNPVIRVFYQRLIEAGKPHKVAVTACMRKLLTILNAMVKNNTSWRAPQAEKA

SEQ ID NO: 296520 - protein, 346 aa, unidentified
MLYAGLDLSRQRLDVHVLDEEGRTVDVLAVHPDADALRTLANRVLRHGQEVSAVIESMTGSRFVHDQLELAGWDVAIADAVKAKGIAPLAAKTDKIDAHVLAELARRNLVPEIWLPDPAVRAERERARFRLHLVRHRSALKCRIHATLMTFGHNIPVSDLFGTSGRRLLAGLALTEPWATTLATSLAMVDELDERIDECGRELARLGADHPYIPLLLTVPGVGPLLAYTIASEIGDIGRFASPKKLAGYTRLCPLVRQSGNRDFRGPLAKNGPKYLRWALVEAATHAARDPRYRERYERNKKRLGRGRGAKVARIDIARQLAEAIWHVLTKNEPFAPASPAILLVA

SEQ ID NO: 296521 - protein, 370 aa, unidentified
MEQPTTVFVGLDVHKESISVSYAASGRPDPPQYVGPIGTRRCDIDKAIRRLQSKAAELVFAYEAGPCGYGLYRYLTSKGFDCRVVAPSLIPKRPGDKIKNDRRDSMEIARLLRSGDLTSVYVPTVEDEAIRDLCRARDATQVTLRAAKLRLKSFLLRLGLHYTGRANWGAAHRRYLAKVACPTPSQQIVFQESVLAVDEQVDRLHRIEQELIDLASSWRLYPVVEALQALRGVRWIVALTVVAELGDLTRFDNPRQLAAFVGLIPSEHSSGPKRRLGGITKTGNSRARRVLVEGAWSYRFPAKVSAEIQARIETLPKVIQSIGWKAQVRLCKRFRRLKSRGKHGNVAVTAIAREMLAFMWAIAREVPITL

SEQ ID NO: 296522 - protein, 402 aa, unidentified
MNAVGIDVSKGKSMVAIMRPFGEIVSTPFEIKHTSSDINSLVKLIKSIEGESRIVMEHTGRYYEVLAHQLSEANLFVSAINPKLIKDFDNDSLRKVKTDKADSVKIARYALDKWQNLKQYSVMDELRNQLKTMNRQFGFYMKHKTAMKNNLIGILDQTYPGVNTYFDSPARSDGSQKWVDFASTYWHVDCVHKMSINAFIDHYENWCKRKKYNFSKSKAEEIYGKAKELVPVLPKDDITKLIIKQAVDQLNSASITVESLRTLMNETASKLPEYPVVMAMKGVGTSLGPQLMAEIGDVSRFTHKGAITAFAGVDPGVNESGSYEQKSVPTSKRGSSDLRKTLFQVMDVLIKTHPQDDPVYQFLDKKRAQKKPYYVYMTAGANKFLRIYYGRVKEYLSSLPES

SEQ ID NO: 296523 - protein, 445 aa, unidentified
MLSLLAPAGSRWNLLLLAEEALVEEIVEEPVELVARVAALDIGKASLTACVRVPHETSPGRRRQEVRTYATTTRSLLELQDWLVAQGVSRCVMEATSTYWKPPFFLLEDAIAECWVVNARDVKNVPGRPKTDRLDAAWLCKLAERGMLRPSFIPPPWQRELRDLCRYRRTLTQERTREKQRAEKLLEDTQIKLSSVISDIFGASGRDMLEALIAGQRDPHVLAQLARGVMRKKIGVLQEALTGHFREHHGYLLRMMLDRIDALTAQTEALTERIEAEISPFARQVAQLDEITGVGRTGAQELIAEIGVDMTRFPTAAHLVSWAKYAPKAKQSAGRHKPATTGKGNPWLAATLGEAAISAARTKTFLASRYHRIARRRGKQRALVAVGNSILVIAWHLLADPEARFTDLGPDWHDRLAPLRRKRQLIAELERLSGKKVLLQQEAAA

SEQ ID NO: 296524 - protein, 347 aa, unidentified
MTIMVDTQRALTGGVDTHADVHVAAVIDPEGGLLGVKSFATNLVGYKRLSGWMCGFGVIGLVGVEGTGSYGAGLSRHLRREGLLVVEVDRPNRQERARQGKSDSLDAIEAARAALSGRSFGVAKTRDGNVEAIRALMVARRSAGESRTKAINQIRQLVDTAPDELRERFVGVPSWRIAEGVAILRVHADADPVRMATKSALGTLGRRAVALGEEGKRLDVLIARLVDKVAPELVELVGLGPHTAALLLIAAGDNPSRLRSEATWAKLCGVAPLEASSGKVTRHRLNRGGDRQANHALWRIAMTRMACHEETKVYVARRTAEGKSKREIMRVLKRYVAREVYHYLPRD

SEQ ID NO: 296525 - protein, 451 aa, unidentified
MKSYQSYQTKRSNVADKTIIGIDPGKSRHQAVIIDATGIPIGRTFSFSVNHKGYHEKLWNEIKKQIPDYSSSNLLFAVEASCNLWQTISDYLRLEGYEVVLISPMCTKQSRVMLNNDFSKTDPKDALLIALNTQRGYYIEMRNYSKISNNMHILSIAYNKLRKDHSRYRGRLRAAIELIFPEFLEVITLGTQTSFYLLGKYIFPEEYLNMNIELESLQIGTISRSKYGIRHLNKLQELAKHTIGISSHNELYDRTIVLTWLEGMKEIGSRMKVILDQLIKLASSMKELSILTNLMGISNETASLFLAEIRDISAFDNYKEIEKFAGYNLRLTQSGKHIGSRRISHLGNTRLRWVLYRMTEETMKYIPEVRIKYLKRQLKKQIYRKNLVSCVPQLLKLIFSLVKENRYYEYYEDRVTEMEKLNIQYQVVKAERAAKHRKHRSTIKEELRKTA

SEQ ID NO: 296526 - protein, 340 aa, unidentified
METSIKFYLGIDVSKSWFDVSVLKVVDHEKQPMLTEQFANTKEGIGSFQKWLDKQGVPFDENTLIVIENTGVYHRPVWDFCSKHNLPLHIGNAAHIKWSLGITRGKNDQIDSKRLCNYCYKQSDELKATPVLNPVFMNLKDLMTSRTRLVAQLQATKSYIKELLCTNDKALLKTLEKAHKAAISGIEKSIAQIEKAINDLIVADEKINRNYELIKSIPGIGSITAIYIICCTNNFANKPSGKQLASYAGVVPFEHSSGSSVKGRNKVHKMANKELKRLIHMCAVSSIRYSSEMKAYYERKKAEGKPGLSVVNAIKNKLLLRVVAVVNKQEKYVENYQKVA

SEQ ID NO: 296527 - protein, 309 aa, unidentified
MGTYVGIDVSKDRLDVHVLPQDETFCVERNGKGLAALVERLKSFAPSLVAVEATGGFESTTAAAVAGAGLPLAVVNPAQVRHYAQALGKRAKTDPIDALVIARFAADVRPEPRALPDEMTQFLADLVARRRQIVEMLAAERQRAKRATMLRLKKSIARLVTALEKELAELDRDIDDAVRSSPVWREKEDLLASVPGVGSATAHALIAELPELGTLDRKQIASLAGLAPYTRQSGKWKGKSMIGGGRKNVRTPLFMAAMVAGRFNPVLKAFRDRLIDAGKPKMVALIAVARKLLTILNAILRDKTPWQPA

SEQ ID NO: 296528 - protein, 345 aa, unidentified
MEQQREYVGIDLHRRRSVIVRRSAAGETLEVTKVDNDDLLAFERAVMAAGEHPEVVLEACYGWYWATDLLEELGCNVHLAHPLGNSWGNRRVKNDTRDAEDLADLLRLGRLAEAWIAPPKVRELRELVRYRAKLVCLRTNCKLQVYAVLAKEGVNVPMTDLFGVLGSELLETCHLATAYRTRVESLRDLIEVFDREIAKLEGDVRHELRGHAGYQAIQQIPGVGPLFASVFVAEIGDVTRFRSPAQLASWAGLTPKHRESDLTVHRGPITKQGSRLVRWAAVEAAQRQASGTKLRADFARITAHHGDSAGARKIARVAVARKIVTLVYYGLRDGTIRSKAISEAA

SEQ ID NO: 296529 - protein, 403 aa, unidentified
MDAKPGKPAYAGVDTHKDTNALALVDALGRVVGTWEFPTGAAGYEMLEETIGDASVPVGVEGTRSYGAGLAAHLAARGYEVLEVIRPRREQRRRGKSDPQDAIAAAQNVAAGRGLAPKELSGAAAEIGWLMRVREGDVRWMTATSNRIDSALVTAPEEVRSLYAGLSGEGRIRAIAASRPGDACRRALRMMARDWLAAKKRADGLEREIGLLVRESFPALAGAVGVGPIVAARLIAAAGSNPDRVGGEAAFSMLCGTSPLRASSGKTGERHRLNRGGDRQANRAIHEIARVRMACDPRTRRYIARKMAEGKTKKEAVRCLCRFIAREVYRLLTGPQDPLPEPGALAGRRKSAGLTQADVAAELGVSPHKVSRLELGRAIDAQLLRAYLSLLDALEGKPTKPSH

SEQ ID NO: 296530 - protein, 336 aa, unidentified
MPMYQLGIDVSKNTLDLCLLREGIKGRIKTRKLKNTADAAKVVAEWLKKQSCELGEVHIIMEATGVYHEPLAYGLHFAGARISLANPHRTREFARGMNILTKNDKVDAWMLACYGSLKEPEAWTPPPESVRYLRALLRRRDALVADSTREKNRLEKSVFTDSPDAVRASIENMLQELSNEIEHLDVLIQEHIKTHPELNQDFRLLTSIKSVGYLLGLNMLAILKSHSFESAEQAAAFLGVVPVERRSGTSVKGKPKLSKIGPPEIRTKLYLAALCGLRFNPVMKQMYTKLCQRGKSKMCAIGALMRKLVHWCYGVLKTQLPFDAEYNQQSCYKTIF

SEQ ID NO: 296531 - protein, 423 aa, unidentified
MSPLSDQQFAAYVGVDWADTKHDICLQAAGDSRREFSCVPHQVTCIDEWAKALHQRFDGPIAVALELAEGPIVSALQKYDFFVLFPINPSTLAKYREAFKPSRAKDDPTDAELALDLLLRHPERFTPLRPQSTGMRCLMSLIEQRREMVGDKTRFTNRLRNTLKQYYPQALEWFEHIDTIIFCDFISRWPTLSAIKHAHRKTLEAFFHSHNCRRARLIETRLESIRSAIPLTEDPGIVSPCRLHALALVAQLRTALSGIDVFDREIAAVARTLPDFALFECLPGAGAHLTPRLLAAFGEQRERFSHASDLQKYSGIAPVTERSGKKCWVHWRWQCPTFLRQTFVEWAAQTINKSFWAGAYYRQQRAKGNSYQAAVRALAFKWIRILYRCWQARTLYDESVYLNALRKRGSPLLGSLALPLQNP

SEQ ID NO: 296532 - protein, 366 aa, unidentified
MWMEAPVKVQRTSIGLDVHARSVVACGLDGDTGEVFRRRLCPDHGEILDWVQGLPGPVAVTYEAGPTGFGLARVLIAAGIDCRVAAPSKLQRPPGDRVKTDARDAAHLARLLHLGQIVEVTVPSPAQEAARDLVRAREDCRGDLMTVRHRISKLLLRQGIVYYGGQAWTGKHELWLRGQRFDALGLQLAYDTAMDAMIAGVHRRDRLDKAIVAMAADSEFTPVVQRLGCLRGVSTLTAFGLAVEIGDWHRLTGRSIGAYLGLVPCEYSSGDTRVQGGVTKTGNGHARRLLVEAAWHHRAPYRPSRDLRARWTAAPAAAQARGHAANHRLHDRWTGFDARKKRSVVANAAIARELAGWCWSLAVLDD

SEQ ID NO: 296533 - protein, 427 aa, unidentified
MEEVTDEPLYRDRVCGIDIGKAGMAATIRVPSDANPPRRAQETRSFGTTKREVLALADWLRSWQVPAVVMEATGDYWKPVFYRLEAEGFECVLADAKQVKHLPGRPKRDPSDSRWLAACFERGAITSCFVATPEFRIIREHTRYRRDLTAERTREKQRAEKLLESAAIKLSSVVTDLHGVTGRDIMDHLIAGERNPKVLAQLARARARRKISELEAALEGAEFFTPQLAALLARMLARIDQLNASIGELTAVVETLLEPYEEQLQQAESMPGWGRRSAQDAVAETGVDMTRFRTGGHLASWAGRTPLDNQSGSRSGRAKSKKGNRYLAAITGETAVAAGKTQTREGARYRRIARRRGKPKAGVALGNTQLKVYHKLLSTPGMRYEDLGVDYYDNRASTRRQVRALQKRASELGYTLVPDLTGCPEIA

SEQ ID NO: 296534 - protein, 361 aa, unidentified
MTGTMTWVGLDVHARSTHAAAVDVLTGELRRARFGPGVEEVVSWLAGLSGPVRAVYEAGPTGFGLYRAARVAGIGIAVVAPSKTPRASGDRVKTDRKDAERLARLAMAGELSSVAVPDEFIEAARHLTRTREHARQDVLRARHRVSKLLLMHGRVYPGVTTWNREHRRWLAGQAFELAPTELAYVDLLAAVDGLVVRKDALDERLSRLAADERLWPTVARLRAFRGLDTLSALAIHLELGGDWQRFGSPRRLFAWLGLTPSLEQSGQSSVQGAITKTGSVYARRLLVEAAWHYARPPRIGVALDNRQTGQPDHTLQIAWRAQHRLYRQHQRLRERGKPHSVTTIAVARELAGFLWAAATSP

SEQ ID NO: 296535 - protein, 342 aa, unidentified
MQITTIGLDIAKNVFQVHGVDAAEKVIVRKRLRRSQVLTFFKALPPCLIGMEACATAHYWARELTKLGHKVRLMPAKDVKAYVKRNKNDAADAEAICEAVRRPTMRFVQVKSAEQQGQLMQHRTRDLLMRQRTQVINALRAHLAELGIVAAKGDKGVKELLTILADEKDTRLPIDARASVIVLAAQLQALQTLIGSIEKRIKAQHRSNQASKRLETIPGIGVIGATAIAATVADPTVFRSGRDFAAWIGLVPRQNSTGGKQKLGPISKQGDRYVRRILVVGAHSVLRRAKENPEKYPWLTQLLARRPFKVVAVALANKMARMAWALLAHGGTYRAPELAAAA

SEQ ID NO: 296536 - protein, 346 aa, unidentified
MTIVETRAVTGGVDTHADVHVAAALDPVGGLFGVREFPATAAGYASLLGWLGGFGPVALVGVEGTGSYGAGLARHLAAAGVRVVEVDRADRQDRHRQGKSDPLDAVSAARAAQSGRARGAPKGRDGAVEAIRALMVAKRSARHERTQAINQARALIVTGPDELRARFARHTAGQLVAGLAALRPRPGDVPGYATRIALRELGRRAEFLDAQIARLDELIVPLVTARAPGLLTLYGVRADTAALLLIAAGDHPERLRSEAAWAHLCGVAPIPASSGKVTRWRLNPGGNREANHALWRIVITRMSSHPATRDYVARRAKEGLSKKEIIRCLKRYVAREVYHHLRAPAG

SEQ ID NO: 296537 - protein, 387 aa, unidentified
MEVRMVNTPSADSNNEPVACYVAIELSKSGWLVGFLTPLSDKTSRYQVKAGDAQALLDLIERVRARVARQLNRPVEVMSCYEAGYDGFWLHRVLEAHGIHNHVLDPASLQVNRRARRAKTDRIDVDRMLRALIRYLRGEPEACSVVQVPRVEEEDAKRLHRERKRLVAERVQHVNRIKGLCAAQGIYNYAPLRPDRWSQLDKLCTGDGRSLPARLKSEIVRELKRLELVLEMIETVEVERDAIIKDPRSRHLNADKIKMLARLRAIGPEFATSLTGEVFYRKFANRRKLGRYVGLDGSPFRSGSVERDQGISKAGNPVARSMMVELAWTWLRYQPDSALSIWFRERVGNLKGRPRRIAIVAMARKLLVALWRYLETGVIPTGAVLKA

SEQ ID NO: 296538 - protein, 363 aa, unidentified
MNTKIKMLNYIAKDKDIFVGLEDSKVSWKLAVRCEKMLIHQTSMPAKYADLTGYFRNNYPGCRIHVMYEAGFRGFGLHDSLVKDNIACVVVPPHTLTEEKANRVKTDRIDARRIAQNLENGDYKICHVPDAQRREDRQISRTLEGVQKTIVQTRNRIWKMLDSHGIAVPFSKQHPGKADIRQLRHLEMSPPLAISLAVDLDILEMLWEQDQKLRDNLKQMAKSERYKKTFELLHSTPGVGWFTAIRLVLEWGEDLTRFANRRKIASYVGLTCSEYSTGETVRRGHLTGLGHRRSRQWLIESTWVAIRKDSALREKYNRVYHNSGSKKKAIVATARKLVGRILYCVTHSEPYTPGLVAIEYGKA

SEQ ID NO: 296539 - protein, 370 aa, unidentified
MSHYRVGCDAHRRYSQFAVLDQDGQLRQQTRVDHEPGSIRAFLESLPEGTPVALESVGNWYWIADEIEAAGCLPLLTHAAKAKVMMGNVNKTDKLDAKGLAKLLHLGSLPTVWLPSGEIRDERELHRTRMALSKLRTALKNRIHATLAKYGITSTEHSDIFVGKGRVWLQAIRCKLPPETGRCVAQELEALDGLQDQIAQLEERIRERVAFTPSIPLLKSLPGIGDILAIVVEREIGSIDRFNTPGQLASYAGLVPTVHASGGKTRFGHMRKPSNQYLKWAFIEAANVVVRHRHHPAWKTKYVCQIYDQVSRRKGHAIAVGAVAHNLAEAAFWILTRQQLYRPPAIRQASPKQVQGRAQLVSTEIRELIA

SEQ ID NO: 296540 - protein, 377 aa, unidentified
MKRIKFVGLDVHAETISVAVAEQCGEIRSLGVIPNREESIRKLVKKLGPVEELRFCYEAGPTGYALYWQLTRMGAKCEVVAPTLVPVKAGDRVKTDRRDALKLARNYRAGELTAVWVPDAAHEALRDLVRAREAAKKDELRARHRLNKFLLRHGRRPPMGVKAWTLGYLEWVKRRVHFEQMAQEATLLDYLHEVEHGAARIARLDGAIEEAVKLAPPQMRAVIEALQALRGIAQVSAVTVVAELGKFSRFARAKQLMGYGGIVPSEDSSGERTRRGNITKAGNAHLRRVIVEAAWAYRHRPAVGTTLRKRQEKVSEEIKEIAWKAQQRLHERYRKLLAKGKNKGVVITAVGRELLGFIWAIGIQVETAQKESLQRAA

SEQ ID NO: 296541 - protein, 413 aa, unidentified
MERIIERCAGLDVHKSSVTACVRISEASEGLHQEIREFATTTGGLLLLRDWLASFEVRLVGMEATGVYWKPIYYMLEDDFELWLLNARHLKNVPGRKTDVKDAEWICQLVEHGLVRPSFVPPKEIRELRNLTRYRKAQIEERTREVQRLEKVLQDAGIKLSSVATRVLGASGRAMLDALVGGTTDPEVLAELARGRLRSKLPALRDALEGSFSSHHALMVGKILAHIDYLDESIDDLSVEIERVIAPFSEEVELLDTIPGINRRTAETLIAEIGVDMSRFPTHRHLASWAGMCPGNEESAGKRRSGKTRKGSKWLRSALTESARAAARSKGTYLAAHYARLRGRRGSKKAAVAVGHSILVICYHVLERQVPYEELGEDYFDRRRSSEAYAKRLVRKLERLGHKVALEPLPQSA

SEQ ID NO: 296542 - protein, 344 aa, unidentified
MKEITVIGIDLAKNVFQIHGNDKHGKKVFKKRVRRPELLSTIAQIKPCLIGMEACCGAHHWARSFKQLGHDARLMNPLYVKPYIKTNKTDANDAAGIAEAVSRPSMRFVPIKSEQQLDIQMLHRVRSRLVKLRTQLSNQTRGLLGERGLVIPQGYAALRKKLHQFLDDEQKTLSPITREVIEDLYDEFIQLDQREKKYKQQMQNLAKQIVQYQYLMSIPGVGPITATILGAELEGNHGFTKGRQVSSWLGLVPKQNSSGDKIRHQGISKRGDRYIRSLLIHGARSVVNNAANKSDPYSLWVTQLAERIGVNKASVAVANKNARIAWRLINDKKIFNSEEAVLVH

SEQ ID NO: 296543 - protein, 379 aa, unidentified
MTLDCFFRQCVGIDISKDKFTACLYMYDRASDAGCCTQSIDFANTKSGFNQLVRWSRKEAVKSHPLTYLMEPTGVYYERLVYHLHKIGQTVYVVLPNKARKFCEAEGIKTKTDAMDARCLALMGCVSRKLKPWSPPAPIYRELRQMTRFHADLCRIRTSVSNRMEALDHMESAEKSVRRNCEKLLDEIDRLMKNNGKTIMQKVAEDKELEQKVKRIATAKGLGETTVVCIIAETQGFHLIENRKQLVGYSGLDVKAEQSGKEDPRHHISKKGNAHIRAALYMPALVAVRHNRQIKQAYGRICQKHPNEKMIGVTAAMRRLLLLIYTLWKNGEEYDENRDKTHMARKEKTEQEYGSEDSIRNEQEPVSWNETDEDGKPPF

SEQ ID NO: 296544 - protein, 440 aa, unidentified
MSKRAYRATRVNDVNWDQLAQGKDGLDITLGVDVGKFSLWAVCRWADGRFERPWRVQNPVEIPTLLALLKRVSAGRKLVVAMESSGTYGDALRQALADNQIELQRVGGKAAHDYAEVFDGVPSQHDGKDAAVVAELAALGKAMPWEYQPADPWEQELAYWVEWMVAHRQMLTIWQGRLEGLLARHWPEATQVLKLSSGTLLRVLKRYGTPQALAADGEAAKLLARWGGAFLAPEKIEKLLAGARASVGVRLGEWQQRQIQNYAQQALAARQEANRAGRRLRSLAEGHAVLQAQGKVVGVPTACVLWASTGDPRKYHAAGAYRKAMGLNLVERSSGTYQGKLRISKRGSPRTRQWLYFAVLRLVQKCGVRSWYEAKKGHDEADARRALVAVMRKLAVALYYVGVHNEEFQPRRLFGRIRRHRGSPGEQKSRTKRRSRAEQI

SEQ ID NO: 296545 - protein, 358 aa, unidentified
MRIIGCDLHARQQTIAMLDSDTGELEEKTLEHEGDTVREFYSALPGPILVGIEATGSMQWFLELMEELGIECRVGHPQKIRKAETRKQKHDRRDARLLLTLLTENRFPTIWMPSTEQRDLRTLLRHRHQWVRLRSRVQHTLQSIALNHGLRRGRSLWSQAGQHALRALPLAPHASERRKALMTLYPRLQESIEELDRQVSEQTQQRPDARRLMTHPGVGPITALATEVFLGDPLRFIDGKAVASYIGMIPSEHSSGDRQRLGAMSKQGNALLRYLWCEAAMHAVERDPELKRFYRRKLVQKGLGKARVAAARKLGIRLWIMMRDQIDYQEFCRRGQARQESGSVHAGMPDRDSGPAAQ

SEQ ID NO: 296546 - protein, 357 aa, unidentified
MLQRILALDLGKYKTAAHLHCSDGRRDFRTKVDTTHQELHDLIVSTDPTLIIMEACSTTWWVYDLAVALEKEVIVTANNGPGWRWKNVRNKSDRADAAKLIKMYLSDQLEPVWAPPPEIRQMRGLLRYRKKVMEERNRQGNRIKSLFTVNGIELPKRGAWTQRWLEAVRAHAKPFSQCAPDELWRGRLSHLLVLWESLQEQLKETEKVLRRIDRRHEAVELLQRENGVGPCLSEAVVAAIGDPLRFRSAKQVGCYAGLTPRQWSSGTIERSGKISKQGNSLLRTVLVEVSWIGIRTQPWMREVFERVQRGVKQRKKLAIVAVARRLLIHLWAKWRDMERRRLAATPPASELAATGMT

SEQ ID NO: 296547 - protein, 348 aa, unidentified
MGMDLGDKTSRYCVLDGKGEVVEEGSVATTKKELAQVLGAMGRCRIAMEVGTHSPWVSRLLKSLGHEVIVANARQVKLISASSRKDDRLDAQTLARLARVDPELLRPIRHRSEKAQQHLMKIRVRARLVDARTSLVNAARGMTKAVGERLPACDAGSMGTAQMVDLPTGLQETLKPLLEQVESLTQKIKECEKEIEQIAGTEYAETYVRRQVSGVGNLIALTFVLTVEDRERFQKSRDVGCYVGLRPRRSDSGQSQPQLRITKEGDNYLRKMLVQGAHYILGWRGRDTDLRRWGLKLAERGGKNAKKRAIVAVARKLAVLLHALWVSGEVYEPLRNSHARQRLKQRTA

SEQ ID NO: 296548 - protein, 350 aa, unidentified
MIIIGVDFHPEFQQIASVDTDTGEFQEKRLTHREEAEKIYRALACAGQKVRVGMEASGHARWFERLLAELQIELLIGDAAEIRTKRVRKQKTDRQDAQLILSLLLEDRFPRIWVPSWENRDLRQLLWPRHRMVQARTRIMNQLQAVALNEGLRCKKKLWRERGREQLESFRLAPWASRRRRDLLELLDRLNPTIAELSQAIQQEVEKCPEARRLMTHPGVGPLTALAFVLIIGEADRFQCGKQVASYLGLVPLEDSSGNRRRLGHITKQGSSMLRFLLVEAAQVTARSLPQWRSKYLHLMMRRGRKTAKVAMARRLAVHLYWMMRQGWDYQQWIKFGSHAGQLGNRHGVQ

SEQ ID NO: 296549 - protein, 320 aa, unidentified
MRNAVGLDISKLTFDATAIVGNAEYSAKFDNDSKGLDQFSDRLKSLGCQNLHICMEATGNYYEEVADYFAQYYSVYVVNPLKISKYAESRFKRTKTDKQDAKLIAQYCRSAKESELVKRQKPTDEQYRLLRMTAAYAQIKSECAAMKNRHHAAKDEEAAKAYAQIIKAMNEQLEVLKEKIKEQTEKPNCKEGVKRLETIPAIGRMTAAVLFHHLTSSKFETSNKFAAFAGLSPQQKESGTSVRGKGKLTKFGNRKLRAVLFMPAMVAYRIRAFPGFIKRLEEKKKPKKVIIAALMRKLAVIAYHVHKKGGDYDPSRYKSA

SEQ ID NO: 296550 - protein, 321 aa, unidentified
MADSVLGIDIGKQKFEVHLLVNGKAKSKSVSNSKEGFLILSQWLKKHNAGLVHACMEATGNYGDELALYLHDAGHTVSIVNPARIKGFAQSELIRTKNDMVDAGIIARFCLAMNPEPWSPPAPAVRRMQAIARRLDALVAMRTQELNRLGVAHSLVEPSIKQHLLYLDFEIEKLKKQMRSEIDDDPDLRNKRDLLITIPGISDSTISVILAELDFKKFESVREVVAFMGLAPKDKISGTSVKGKPRLCKTGNARLRKCFYMPAMVAMRFNPVVAQFQHHLKENGKNGKVIVCAAMRKLVHIIYGVLKTGKPFNPQIALERA

SEQ ID NO: 296551 - protein, 355 aa, unidentified
MNDAKYIGMDVHQATISVAVRDSRGNLVMEAILETKAETILQFIRGLRGSLYVSFEEGTWAAWLHDLLQPHVTRVLVCDPRKNALLKVGNKNDRIDARKLSELLYLNKLSPVYHGEPGIRTLKELARSYIAMTRDLTRVMSRLKAIYRSWAIPCAGKQVYAPRYRAEWLARISEAGVRRRAELYYQQFDALAALRQQARRELLAEARKHPAMRLLRQIPSIGPIRAALLIALMQTPNRFRTKRQLWAYCGLALRTYTSGEYRFVGGQLKRSKKVLAVRGLNINHNHDLKNIFKGAATRAASTVGPFQDFYQACVARGVKPHLARLTLARKIAATTLLVWKKGVRFDAEHLKQQAA

SEQ ID NO: 296552 - protein, 356 aa, unidentified
MSKTNFVKIIIGVDTHKDVHAAVAINGIGVRLATLTIPVSPKGYRNLETWARAFGAIHAFGIEGTGSYGAGLSRFLQAKGYTVVEVNRPNRQLRHQNGKSDPLDAESAARAVLGGQANARPKSADSSVEMIRHLKVARDTAVKSRTQAMVTLKTIIINAPAALRQVLDCIIGKMALIRHLAALRPGPLLSATASAKAALRAIARRWLTLDTEIRAHDADLEALTVSCAPAMLKAHGISTGTAAEMLILVGDNPERIRSEAAFAKLCGVCPIPASSGKTNRHRLNRGGNRQANAALYRVVIVRMRNHQPTLDYVKKRKADGKGKMEIIRCLKRFVAREIFGYLCGARRSFTSIPKTT

SEQ ID NO: 296553 - protein, 338 aa, unidentified
MQTYAGIDLHSSNNYIGVIDANDKRLYSKRHDNNLKQVIKALRPFQKNLQGIAIESTFNWYWLVDGLQEHGFNVHLANPAAIQAYSGLKHTDDKWDSFWLAHMLRLGILPEGYIYPKQYRAVRDLLRRRLMFVQQRTSQILSLQSMITRNRGLNYTGTEIKRFRDEFIDILFADQHLNFTAKRNIEAIRFLDRIVSEIETQVNSQIKLKKQFRMLLTTPGIGNILAMTIMLEVGDISRFAKAGHYSSYCRCVESKKISNGRKKGENNKKNGNRYLGWAYVEAANHAIRACDKAQRFFQRKMSKSNRVLATKALANKLTKATYYIMRDQVAFDAAKLFG

SEQ ID NO: 296554 - protein, 417 aa, unidentified
MLGIGIDWAEEFHLVALGRPAEGVIEVVRVEHHPKAVSALVARIAGLEPDPAGVRVVIETRHGLLVEALVAAGYTVLPVNPELVSRRRGPARKKDDAEDARICCLLALDRHAGLKQLIPHGELGGELRSIARDDERACRDERRLLNRLRADLLATFPAAHTIAGEDLGAPRMLRLLEHWPTAAALAAASRQEIIDFARAQHSGYLERFADLVAAALAEDHFTAPAHLAAAKADTIRLLARQLLLIDAQRKAWEKRMGQLLLGTPGGAPEDQPGQAFPGGEIYLSFPGLGRRLAARIAGEIGEHIEQFTTPNSLQCYAGRAPVTRRSGKRDLVVAHRLACNRYLADAVHKWAFASLRRSAWAKDFYDAQRARGKNHNAALRALGNRWLEILWHCLTHQVPYDEATHQANRNRALARAA

SEQ ID NO: 296555 - protein, 338 aa, unidentified
MRKFIGIDLHSNNSVVVITDEEDRVVYQKRLPNDPEVIEAALAPHREEAVGVVVESTYNWYWLIDGLMDRGYQVHLAHTTAIKKYEGLKYSGDFADAAYLAQLLRLGLLPEGYIYPREQRAARDLARKRMQLVRQCTAQVLAIEGILMRQTGARKSSNAIKRLSAEQVEELALVPDAALAVQANRAVSEVLQQQIEVLEQRLKERVSLSPEHRLLRTVPGIGEVLATVIMLEAGPVARFAEVGNFASYCRCVDTQRESNGKKKGEGNGKNGNKYLAWAFVEAANFALRYCPQAKSFYERKKRKTNDVVAIKALAHKLARACYHMLREQKPFEVNRCFT

SEQ ID NO: 296556 - protein, 365 aa, unidentified
MQKAELSCEADSENYLGGSSETMYYIGLDVHKRTISYCVKDAAGKIYQEGKIGSTRRELDAWIKTLPQPRTIAMEATIFTGWIYDHLLPHAEKVKVAHPLMLRAIATAKRKNDKIDASKIADCLRCDFLPECHMASTEIRDRRRTLRYRGLLVKQMVQMKNRISGLLLEKGVTHTKRRLHKVGYFAELMGGNEEIDQSIRPLLKLSREHIVRAQKLDYALVSSLERDPLLRERLKRLRTVPGVGPITALTWALEIGDVARFRSIKQAISYCGLCGAEKSSADKMLRTPISKQRNKHIQHVLVEAAKLAPRQCHELALIYEKEMQRGNRNRATLAVARKIVAYLLAVERREKDFVPTEEFGGTAAA

SEQ ID NO: 296557 - protein, 361 aa, unidentified
MLNSTTWIGMDVHKERIHVVAVNEAGHTEARWETPNTPKGKGRLATRLAGLGKARCVYEAGPCGYDLRRFLDEKGIPCDVIAPSMIPTRAGDRVKTDRRDAEKLARMHRMGELTAIHVPTPAQEALRDLVRAREDANEDLVRSRHRLQKFLLRRGRRYEGKSWTRDHWRWIRALSFEDNNAETVLAEYLLAVDQQLERVARLDARIEEEAQNPGMAPAVARLKALRGVRTLTAMTILSELIDMNRFASPRELMSFIGLVPSEYSSGGKQRRGSLTRAGNAHVRRVLVEAAWHYRHPPHRTGETIRKRREGQSPEVIETARKAEVRLHRKFTRMVMRGKRTTVAAVAVARELAGFVWAIGRI

SEQ ID NO: 296558 - protein, 409 aa, unidentified
MEVLHPHCAGLDVHQKTVVACVRKAQGGHVETETRTFPTSTRGLLLLATWLHEHGVTHAVMESTGVYWKPVWHVLDDGDLVLTLANARDVRNLPGRKTDVNDAHWLADLLAHGLVRPSFVAPQPIQELRDLTRTRKQLVRERAQHVQRVQKTLENANLKLTGTLSDVMGKSGRAILDAIIAGESDPAKLAALAVGKARKKYPDLVEVLQGRVREHHRGMLRLHLKMIDALSATIGEVDAELGKALAPSKALMKILMTIPGVSEVTAQVILAEIGSDMSRFPTAGHLLSWAGLCPRNDESAGKKRNTRIRKGSPWLRATLVQAAWAGSHAKGTYLRALFLRLQRKGAKKATIAVAASMLTAVWHMLREGVEYKDLGADHFARRDEKKTLGRLTRRIEALGYEVEVKRKAA

SEQ ID NO: 296559 - protein, 426 aa, unidentified
MSERDYSKQVARRQRIGKTTLVVGVDIGCASNAVGFMNKEGRVLGNYPNMPNSREGFEQFVKMAEGLKVKHGLSDVLIGLEPTGHYWRKFAYFAKEKGCEVRFVRTTALKHHRELDESSSAKSDKQDALTLTNITREGKYIDTVIEDGRMRQLRTLVKVREKIQKRNVSAKNSLHAALDDYFPELKEIFWSMHARGLWALLERCPFPEDVVTLKVSALKELIGRASRRRAEASQKATALYQAAKESIGLRQIGSADRYRLKMCLEEVKRTELMIKGIEREIKGMLKEIPQAKYLLSIPGIGPISAAVFLGELGNPSYFPGARQIVKYAGYDPQESDSGYRVSRKFISKKGRWLLRKHLFLMSMRVVVLSRYFQEYYQRKLQTKNRFGQLPRKKEILCAVAIKLIKVIFALLRDKRNFEDTVACSVE

SEQ ID NO: 296560 - protein, 418 aa, unidentified
MKLSKTKKVTKINDKTLIATLDIGKNVHYGYFRAPNGNDVKPFAFYNSKNSYHEFWNKLCQFKDTEGLEEIVIGFESTGPYAEPLCHFLRKKPVKLVQVNPVHTKRVKELTGNSPNKTDKKDPRVIADVICLGHALTLIVPGGPSAELRRLSQARERALTDRTAMINQLQHLIFVIFPEFLKVLNISTKTARYFIKHYPTPEKIYALGLDTVGQIVKQVSRGKLGQDRAKQLHEAAGNSVGITEGKASIVFEIEHLVARVEAEDQFIDRLEQQMRTYLQQVPYSQYILTIRGLGEVTVAGLIGEVADFNKFDTISEVMKLAGLDLYEISSGKHKGQRRISKRGRPLLRKLLFFAAINAVKSKGIMHKKYHQMLDRGMLKMKALVAISRKLLAIIFAIVRDQTKYVENYSNRNHYKLAA

SEQ ID NO: 296561 - protein, 331 aa, unidentified
MAIHVGLDVGSRTTAMGWRDKGRSAGAWVIAQTPKGRKAAVKKLLALKPLSVVMEATGIYYLDLAIELSAAGLPVSVINPKSSRNFARLKLQHSKTDAIDAQLLAEYGERMTPSLWTPPTSAQLELRAIGRHINRLVDHRTQAKNELHALKATDTSSALLIEDEEEAIAAFDKRIERFRKAGLDLVASCPVLQGQFDNMLAAPGMGEVSTLAALAEMATLPTTLKSGQVSRHAGLDVRLTQSGTSIDKPGRLSKCGNAYLRCSMYMPALTAIRCDPYVKGFYEALVGRGKRKMQAICAVMRKYLTGLWACMRSGEDFNTAKLFSEKHLQKA

SEQ ID NO: 296562 - protein, 409 aa, unidentified
MLFAGIDWSEKFLDFHLRTAGGKVLAEGQVKPSVEGMADLFARLESHALASEIGIAIETAHGAWVQALLDRGYQVYPLNPKTVERFREALSANGVKTDKIDRKVLAMFLVTFHQENKPLRPDDPEIIQLRILCQDRLRLVEERSAKVNELGAILKCYYPAFPGLFGDLDSGIALDFLQQYPTQKQMRKLSERRLRNWLSRHRYSFPSRIDGMVSLLRQPVLPVAEHLQQAKKTLICYLARSIKTLNTEIAQRDKQINDHLDDLPESDWVRSLPGAGKVLAPALLACLGRDPQRFSSVGEARALMGTAPVTKASGKFRMVMFRRGCWKFARRTLQLFAEQSRHQCYWAQAFYEKQRNSGHKHHAALRALAHRWLKILLAMRQSGSLYNEDIFVNSQRRYLLKTPMSKTTK

SEQ ID NO: 296563 - protein, 480 aa, unidentified
MNVNVKKNKRQVKVQDSSINVLSMEEMKSRIAAVEKDMKSYTWRELETNGKFTKNDKLSFISDDMLIVGCDIGSEIHYIRAIDTRGRELSKEIYSFGNNEGGFQNARDWMVNLAAVSDKKQIVLGLEPTGHYWFALAAWMISKGISVVQVNPYAVKQSKEIEDNSQLKDDRKDPKLIANLVKDGNYGMPYLPEKVYADLRRLSMFRDQLTEDRIRYINRLHRELKIYFPEYMDAFGKIDGAFALEVLKTAPMPDDILTLGEAGLREIWHEAKLRGRGYSRAKEIVEYAGKSVGLKDGTYAGREAVKWFANQILVLDERLTEVESALHQRCMEIPHAENIIEIRGIGENILSGILAEMGDVTRFDDVKEIQKLSGLSLVACSSGKHKGQTKISHRGRKRLRYWLFQAAKSAVSHGYEYKQLHEYYTTRTDNPLKKMQSLIVIACKLLRVIYTILKTGIKYDPEKLLKDIRRSEKAMVKAAA

SEQ ID NO: 296564 - protein, 360 aa, unidentified
MNALKVNLGIDAAKDNCECNLSKLTSQLDVKVIASKIFLNTDHGLKELLKWLIKNAPAECSQLHVVIEASGVYHERFALGLQDAGYCISVVLPNKAKKYMEALGLKSKNDRIDAKGLDRMGCEQKLEEWSPLSPFYQKLRTYTRLHEDIQQKKTETTNQLHALKHSAVQMKDAIKVLERLVKVFDEELFKTKKLIEDQIAGNAEVKERMDKVCDIKGVGTLTVATVVAEANGFNLIKNIPQLVSYAGYDVVEDQSGKRTGKTKISKKGNAHIRRILHMPALNMMTYKVGAMPALFERTLDKHGIKMKSYVALQRKLLVLIYTLWKNNKAFDENYHKDTSARVQEAEASSRLSLEEAGKAA

SEQ ID NO: 296565 - protein, 341 aa, unidentified
MKKYIRIGVDLGKGYFQVHALENEAGAAVNRKISRGKFLAFFSGISPCRVGMEACGSSNYWAREIAALGHEVVLIAPAYIKPYVKRGKNDAVDAEAICEAMSRPGMRFVPVKSAEQQAALMLHKDRELLVKQRTMSVNALRGHLAEFGIVVAKGIQHVDHLLELAREDADLPEMAKQAVERMASRLNDLDQAIAATEKAIAAASAKHANSRLLDQVPGIGPLIASVIAASMPDPSAFRSGRDFSAWLGLTPSQNSSGGKEKLGPITKKGNRYIRKLLVVGSTSLLRVAHKRKGALADWINALAAKKLQKVAAVALANKLARICWAILSTGECFREETYAKA

SEQ ID NO: 296566 - protein, 429 aa, unidentified
MNYNQNHKLNQLDEQILIIGVDVSKKFHVARAQDYRGVEFKKGIKFDNTLGGFIQFSSWKELLMKEEKKTKVIVGMEPTGPYWLPFARWLQKEGLWIVTVNPAHVKKSKELDDNNQAKTDYRDARVIAQLVKDARFSEPNLLAGIYEELRNAKNIRKVMVNDLKRIKNRMANWLDRYFPEYKDGYVNWEAESFCYLMRKYKLPEVLAKQDPEELYKEVKEKFPRGVGCRKISSLIKASRESIGVKNGTRMAARELDYLLKRYKEIVSEINEIEVEINGLCEELPEVRKITQIKGMGMTTASGIVAELGEIKKYQTPKQMIKMAGLALTENSSGQKKGKMSISKRGRKDLRKILYQAVVGMIRTNGAFQELYEYYRYRAKNQLSGKQAIIVLVTKLLRIIHTIVVKEENYDEKKMMSSIRHPEEFVLVAS

SEQ ID NO: 296567 - protein, 324 aa, unidentified
MLLPTLGIDIAKLKFNICLLTLNGKLKHKVFPNTEVGFLQLDAWLSKQGAPRVHVCMEATGTYGEALALHLHTAGHTVSVVNPAAIKAFAGSRLSRTKTDRVDAELIARFCRAQQPPAWTPPAIEVRHLQALVRRLQSLVEMRTMESNRLEAIIANDMVKSSVEDHITYLNQQIKQAEALIRTHINNHPRLKQQSDLLDSIPGIGEATAATLLAEITDISQYESARQVAAYAGLVPRERQSGSSVRGRTRLSKIGNARLRKALYFPAITALRCSPFFKTWAEGLRQRGKCQMSVIGAAMRKLIHLAYGVLKTGRPFDPEWGKTA

SEQ ID NO: 296568 - protein, 345 aa, unidentified
MFHVGLDLSRNRVDVEALDDAGTVVIRGPWGRDPEALGALVEELGGCERVRAVIESMTGARFVHDVLEAYGWDVLIADAVKVKGLAPLACKTDRIDAHVLAELSRRDLVPAIWLPDPETRGARERARFRLHLVKHRTSLKNRVHSTLHNHGIVSPVSDLFGVTGRDFLAGLELPEPWTSTVAASVALIDDLETQIDACEAELRRLGATHPYISLLQTVPGIGWTLGYTIAAEIGDITRFETPTKFIGYTGLCARVHQSGDTDWRGPITKHGPKYLRWALIEAATHACRHRLYQDRYARIKARHGRQRGPKVAQTDLARRLAFAIWHMCTRNQEFAPAGATCVLAA

SEQ ID NO: 296569 - protein, 317 aa, unidentified
MSEPVYVGIDVAKETFHVATCPNILKTCLPNTPQGHQQLCQNLQNHTIALIVLEATGGYERPLAAELLNAGMPVVVVNPRQVRDFANGLGQWAKTDPIDAQVLAKFAYIVKPAPKTHATPQTSELAELVRRRRQLNDLRTQESNRLLMIHHPKVKKSIKKMIKTLDFQIKEIDQLVQDYIKADDDFRNKDRILQSTPGVGPQTSAMLIANLPELGKLNRQEIAALAGLAPWDRSSGKYDGKAHIWGGRKDVRSVLYMAAFTACRFNPIIRALANRLKQKGKAYKVILTACMRKLLIILNTMIRNQTLWTPEISIKNP

SEQ ID NO: 296570 - protein, 356 aa, unidentified
MNKISKLDFEGQQIYVGMDVHKKSWSISVLTDEFEHKTFTQPPEVSTLVDYLKRNFPGASYKSVYEAGYCGFWIHDCLQERGVQCLVVNPADVPTKDKERRKKTDRVDCRKLAKSLRSGEIEGIYVPCRPKVEDRTLIRTRHSMVKKQTRCKNQIKSILQFYGIQIPEELVDSHWSKRFITWIEAIRMERASGNFALKAYLEELNNMRKIIAELTRGIRSLANAEEYRQNVCLLKSVPGISILTAMTILTELYEISRFRNLDKLCSYVGLIPDTNSSGETDRDMGITKRRNAQLRGILIESAWVAVRKDPALLMTFNTLCKKMPKNNAIVRIARKLLSRIRYVLKNQQKYVSAIVQ

SEQ ID NO: 296571 - protein, 341 aa, unidentified
MQAIIGVDPHKATHTAVVVNDREDELGRKKVRACRTQVTQLLSWAEPFPQRTWAIEGADGLGYLLAQQLVAAGETVVDVPATLAARTRVLAAGRSNKNDPNDALSVAITALRHDGLRRVSPVGHAGVLRLLAKRNTDLGRQRSRQVSRLHALLVELTPGGIAKEINASDVDRFLAAVCPAGPTEQVRFDLAVELLDDIRRLDSQLKASHKTIRTAVAASGTTVTDLYGVGPIIAAMLIGYTGDITRFANRDRYAAYNGTAPVEFSSAGRTIHRVSKRGNRQLNHALHMAAVTQISRENPGRAYYLAKIEDGKSTKEARRALKRKISDAVFRQLRNDARPQT

SEQ ID NO: 296572 - protein, 339 aa, unidentified
MNHTTVGVDIAKNVMQLHYIDAETGEIVNKPVKRAAFLEHFANRAPCLIGMEACGGSQHWARKLTAMGHQVKLMPGKFVKAFVMGNKNDSADARAIWMAAQQSGKSVAVKTETQQAVLGLHRMREQLVKFRTMQINSLRGLLTEYGEVMAKGRAALDKAIPDVLERLVDRLPTILIDTLREQWNGLAELDKQIAQIERRLQAWMKEDKACKAIAVIPGIGLLTATAAVATMGDAKAFRSGREFAAWIGLVPRQTGSGGKVRLHGISKRGDTYLRKLLIHGARSVLFHSKKPGSWLEQIRERRPMNVTVVAQANKMARTIWAIMAHDRPYESGYVSAKPV

SEQ ID NO: 296573 - protein, 405 aa, unidentified
MIFAAIDWAEQRHYLVMLDRQGQILEREWVSHQQPQLTHLDWLLTHGRQLDDVHVAIELHDSLLLDRLLRLGVKVYGINPKSAERARDRFTPAGLKDDERDAWSLAEFLRTSYRHLRPIRPDSQATLALREWVALREDLIQERTVQLQRLRNHLVRWNPHILQAVGQLNSTWALDLLGQYPTATAFARLTYRRATQWAQGRRLRLTTLDRLGCAASAKSPTTQPARDPAHAAEVHHRVQTIRMLNTRLTEVDQALQELVADHPDAVIFHSLPNCGPVTTAAMLAGFGEDRQRWNGHQEVAARWGVAPVTIQSGKHRTVRRRRACDATLHQAWLWFAFNTVRKEGCWAREDYQAKRQAGCDHFTALRGIADRWVKIAYRCWYERAPYDEQLHQGRRAARLQPRMTK

SEQ ID NO: 296574 - protein, 315 aa, unidentified
MENTIGIDVSKAVLDVHVRKDLKDVQFENSAQGIQECLEMCLEVKPELIVLEATGGYEYPAAARLSSEGLPVAVVNPRKTRSFAKALGITAKTDKIDAKAIAEYAARCEPLAQAAIDENRRKLKALTARRQQLLGMRTAENNRKEHAVDREVQASVDTIIKTIDKQIEKVDGQIRDRIDSMPELKEKTKILSSAGGVGDATAAMLVSELPELGTLNRRQIAALVGVAPINRDSGTLRGKRMTGGGRQDVRNRLFMPTLVAIRYNPVIREYYNRLVDAQGKSKMVAVIASMRKLLCILNAMLKNNQKWQPRLLQNA

SEQ ID NO: 296575 - protein, 273 aa, unidentified
MEQYIGIDVAKEELSVFDGTNERIFQNRQGLSTFRAYLRKAFPDLCKVVLIFEATGPYSQYLIELCASHGIKAWVVNPKKSSHFAKALGNRSKTDPIDAKTLYTFSKVVDPKDILVPQIDHVREELSLYLSSYDFVIKTQTAIANRIEALSHHPHTPKELLVLLRHDLARAEKTEARLLARMEELIKADGDLSRDYENLLTIPGIGKICAITLLAFFRTYGETKRSEITALVGLDPTRKESGTSVNGRRKISKGGNKRGPKSPLLPYPERHPA

SEQ ID NO: 296576 - protein, 354 aa, unidentified
MHATTVAIDLAKDVFELAFADAEHRIVERKRLTRRAVAHVLDNRGPLRVVMEACGSAHYWARRFARQGHTVCLLPARDVRPYVRRNKTDRTDVAGILEADRCAQIDPVPIKSPDQQGIQALHRIRERLKVQRTSTINLLRGVLREFGLVIPLGASKVRPTVLAILEDGDNDLPMALRHTLGELLDRLARLQMDMAAIEQRLEAFAQSDPISQRYRSVPGIGVLTATALCASVGSLDRFRSGRHFAAWLGLTPREHSSGAQRHLGAISKRGDGYLRVLLIHGARAVLRAAHVRQRKALPLDRLQTWALALQVRQGHNKAAVALANKMARRVWAMEHHHAPFDANHCSMQPRHATR

SEQ ID NO: 296577 - protein, 360 aa, unidentified
MSETITSFVGLDVHKDSTAIGEAEAGRENPDLGQLLKALKSLGKPETMLVVYEAGPCGYGLARQLRSRGYSCEVVAAGKIARRPGERITTDRRDALTLARLARSGDLVKVIVPDEGDEAMRDLSRAREEGVRARLKARQQLKALLLRHGHRYGGKSSWTLAHERYLAAVSFAHPAQDIAFAEYRQAVREGHERVERLTEALRTQAEHWRLKPLVAGLATLRGIDFVAAVTLTAEIGDFGRFAHPTELMGFLGLVPSEYSTGDTRRQGDITKTGNSYARRVLVEAAWNYRFPARLSRVLQIRQEGQPKAVREIAWRAQLRLAHRYRRLSSRKLHPNKICVAIARELAGFLWDIARQVKLAT

SEQ ID NO: 296578 - protein, 342 aa, unidentified
MSTVKTIGLDIAKSVFQVHGIDAEGTVIIRRQVRRGQVLKFFASLPPCLIGIEACASAHHWSRELQSLGHEVKLMPPAYVKPYVKRQKNDMADAEAICEAVTRPTMRFVETKTCEQQSILMLHRVRLMQVRQRTMLTNAIRAHLAEFGLVAKIGREGVDELLLMVRDGDERVPELARACILALVEQLVLVKRQILEMDRRITACHRASEVSRRLAEIPGVGPLLASALVAHVPNPQAFSSGRNLAAWIGLVPKQNSSGGKERLGGVTKQGNRYLRSMLTVGALAVIRYAQQHGTRRPWIVQLLARRATKVAAVALANKMARMVWVIMAKGERYREPVIGQAA

SEQ ID NO: 296579 - protein, 413 aa, unidentified
MTWSLLMAAVMIGVDPHKGSHTAVAIGVAEEPLGELRVRSSASQADQLVAWAAAWPERTWAVEGAGGLGHLLAQQLVTAGERVLDVQPKLGARVRLLSTGATNKNDPNDARSVAVAALRSATRRAVTADDHATVLKVWSKRHRDLGRARNQVACRLHAVLCELVPGGISKEITAAKATAVLEQAEPSGAVEAARCELAAEFLEDLRRFDVQMRDTKKKLAVVVRAAGTTVTEIFGVGPVVAATVIGVVVDVSRFPGRDHFAAYNGTAPIEVSSGNRKIYRLSRRGNWRLNHAIHMAAVTQIRHRHSDGRACYDRKLAEGKTHKEALRSLKRRVSDAIFARLQADARRAAAAAAVEGPGGQPGNDSVASAAGLHPEHRLFGQATPGPESTLRPATVRRRPVAPKRISKNTPSTP

SEQ ID NO: 296580 - protein, 353 aa, unidentified
MKQYIGCDAHARYSVFVSVDETGRVGPPVRVDHFGRDLRDYLAGLEKETPVAVEASGGWYWFMDELEAAGLDARLVNPLEAKRRIGGRNKTDKLDARGLAILLRNGTLPEVWIPPAELRDLRGLMRGRLALRSHTTVLKNRIHAALKRYGTLDGEAASDLFAKKQRVRLSLAIGRLPEETRRASRHEWELLDEVERHIGELEVRIRARIGCIGWVRLLKSMPGVGEILGATIHLEIGDVNRFPTAAHLASYAGLVPTVHASGGKSHAGPTSKQANHYLRWAFVEAADCILMHRHRFTGHHALQLYDRVKAKKCHGKAAVAVARHLAESSWWILRKREKYRQPHAAVVSSSKNG

SEQ ID NO: 296581 - protein, 642 aa, unidentified
MALLAANAAEIAALKAEKDTLAQRVFKLEEELALAQLHRFAPRSEKHVDRIFNEAEQSVLEGDEGCDLADEADTIDLPDTGLPQTDKPERKKPGRKPLPENLPRQRVEYDLADDQKVCPCCSHQMHRMGELVTEQLHIEVKAKVLQNVRAKYACRNCDRTGINTPVVIAPMPKQPLPGSIATASTLAFALVHKYVDGTPLYRLAQAFERAGVPVSRGALGHWVISSSEKHLVRIYDALKLRLQSQTIIHGDETTVQVLKEEGKDPTSISYMCWGGRPPNGIETCQSESLNLKRREPPMDQIIRIGMDTSKHVFQLHGVNIDEQPVLRKKMRRREMIDFFTACSPTVIGIEACGGSHYWARLLTSLGHEVRLIAPQLVKPYVKRSKNDAADAEALCEAMSRPTMRFVPVKSVDEQAALMLVGVRDRLIRNRTQLTNAIRGYATEFGISAAKGLAHIPLLIERIQADETVPELARELFASHAEEYAQLEKKIADVNDKLKAWQRDDERSKRLNTIPGIGPVGTALLIMKAPAPELFQSGRQFAAWIGLTPKDHSTGGKLRLGCITRAGDEALRSALVVGATSVIQHARRTGKASAWLAELLKRKPPKLAAIALANKMARIAWKIMVSGETYKAKSVSAVMADAA

SEQ ID NO: 296582 - protein, 331 aa, unidentified
MENFNLFIGIDVSKNSIDVCCLKNDIVLYSGKFENTKPGIRKFVGQLKKLKDYSCQDTLFCMENTGLYSLKTALFLLDFNIKHIWIETPIQIIYSQGMLRGKTDKIDAQRIATYAQRFYGKATTFQADPLLLKFKSLMNLRSIMLSCKHKLQVSKKEYDQVAFFVDIKLRNKLISQIFRQVEITIKKIEIAIQQTLNEDPVILKRYLQITSITGVGKMTAIEVILATANFTRINDPRKFACYSGVAPFVYDSGTIKTRARVSDQANKNVKKTLHMAAMSAIQVKGDLQTYYQRKVEEGKNKMSVLNAVRNKIIHRIFACVNQNKFYKVDLN

SEQ ID NO: 296583 - protein, 388 aa, unidentified
MQIITDRPQAPTAIRTDLGAIFVSLELSRSTWLITSLSPGGGEKMSKHTVSSGDVAGLWARFSQLKDKVHVRTGQVVPIIVIQEAGLDGFWVHRLLQDERVESHVVDPASIATSRRRRRAKTDKIDGEALVRALLAYKRGEPRVCAMVRAPTPQEEDRRRICRERKTLTAERVEHVNRIKGLLFAQGISDYEPLLRKRRERLEELRTGDGRPLPEHLKAQIGRELDRLELTLQQIKSVETERDAMLSPSSGNTPAPVAMLKSLKGIGPEFAGVLWSEGLFRSFSNRRQVASYAGLAPTPWQSGSVAHEQGVSKAGNPRLRTTMIQLAWLWVRHQPRSILTLWFHQRVQLNGGRVRKVLIVALARKLLIAFWKYVTAGVVLEGAEATAA

SEQ ID NO: 296584 - protein, 341 aa, unidentified
MNNVAIVAIDLGKHTFHLHAQDDRGHELYHKKFNRAGLTRHLANLEPCTVAMEACGGAHYMAREAAKWGHVPKLIAPHLVRPYVKSNKNDFADAMAICEAASRPTMRFVSPKSEAQQALAMLNSVRDAYITERTATVNRIHAGLLEVGISLSPGFHAIKELPALLEECSFSAQIKQILLGLRDHFNYLDGQVKALDKQVEHQAAEDDLASRLMTIPCVGPITSSVLAAELGNGQQFKCGRDYSASIGLVPKQHSTGDKTVLLGISKRGDRNQRRLLIQCARVYLMGLERQTGALADWVRQLLARHHCNRVVCALANKLARIAWSIAAHHDEFKAGPSAMNA

SEQ ID NO: 296585 - protein, 354 aa, unidentified
MSNKSIATIATMGIDIGKNSFHVVGLDRRGAIVLRQKWSRGQIEARLAAMSPCLIGMEACVGAHHLSRKLQAHGHNARLMPAKYVRAYNKGQKNDFRDAEAIAEAVQRPTMKFVATKTADQLDLQALHRVRERLVRQRTSIINQIRAFLLERGVAVRQGRHFLRTELPGILAKRSDVLSPRMMRIIEDLAGDWRRLDERIEGLSTDITRVVEQDPACERLMTVPGIGPIISSATVAAIGTGDVFSKGRDFAAWLGLVPRQISTGDRTILGKISKRGNRYLRVLFVQAAWVVLIRPQSWERYGLKPWIEAAKKRLHHNVLAIALANKLARIAWAVLNKERNFEVTRTTAPSSQPA

SEQ ID NO: 296586 - protein, 405 aa, unidentified
MESGRATAGRATAGVDWASQTHVGCVVDAGGTVLDRFDIAHDDRALTAMARRLRTSGVQDVAIERGDGPVVKVLLEAGFSVFVVPSRQIKSLRSRYGSAGNKDDRLDAYVLADTLRTDGHRWRPLREDHEDTRALRALCRARKDMVETRVQITNQLRSNLELALPGAIGLFSRLDSKITLAFLRRFPTTEKVAWLSVKRFESWLASVGYSGGICGSTLFERLTAAAPGLTGAEGLARGRITLALVATIESLNAQIAAIEEQMTLLLDAHPDQRIFTSLPRSGMVRAASLLAEIGDCRERFPSDDALAALAGASPSTRQSGKREVTVFRWSCNKKLRAAVMDFANGSRAADPWAAEVYHRAIARGCRHPHAIRILARAWIRVIWRCWQDRKPFDANRHTARQLAAA

SEQ ID NO: 296587 - protein, 360 aa, unidentified
MEDERKRFVGIDLGKREYTMAIIGIKGKMTIHQGKTSIQGRQALYKKLERTDKIALEAGNLAFIVAREIQEHIGSEVRVLNSAKLPFIWDAPTKTDREDAMKLAHLVEERRDEKLPIVPLPSEKEIARRKLLANYSREVKGRTKHINLLHALFVHQGHTTVVKKNLATAERRQDAVELLQGQEREEAEWLLKHLELYEQRIKELKGKIQQEAKSDENMKRLQTITGVGPVVAYAYVAHVGDGSRFSSGSQVSNYLGFVPRLDYSGTIQRQGHITKRGNGYLRGLLVQAAWTAVQSRHGGALRERYYYKTAIKGLGKKKTIVSIGRRLAELMYSVLRNKSTYEPRHWDGVRDISSIKMMCA

SEQ ID NO: 296588 - protein, 374 aa, unidentified
MASGTEERPTPFRGTSRAKAWSSRTVVTALAGDGTVMLSRRIASAPEPFHRVFGELEPSSLSVVFEATYGWSWFADLLADAGIEAHMAHPLATKAIAAGRVKNDSVDARTLAHLLRTHLLPEAWIAPTQVRERRRLARTRTSLVRIRSRLRCQVHAILADRCVQPPLGSIFGPAGRRFLKSVELPAVERGRIDAALRLSDAVTLEVIGVDKELRAAFAGDERIRRLMAIPGVGFLTAAVVLAEVGDATRFACADRLASWAGLTPTERSSDEHTRRGHISKQGSRWLRWVMVEAASRPVQHPTLRGFEEAIARRRGKKIARVALARRLLTLCFYALRDREGCRAFPLRVHARASRQIRPGALAKSHDLPYGTVAP

SEQ ID NO: 296589 - protein, 345 aa, unidentified
MTNNIQFSSVCGIDIAKSVMQVYKVSSDGVVSNKAVKRADFLNEFRNIPPALIGMEACGGSQHWARELQSLGHTVRLMPPKLVKPYVTGLKNDKNDARGIYTALEMSVREVPVKSAAIRDLALLQTMRAKRQREKVAKINHIRGILTEYGLVMGKSLNAFLAKAGSLIVELKDRADVSPYVVSELIALFEEVKEAIAKIKELETNIESIAKTLKQYDLFRSAPGVGPITAATMLVLLCNPAVFKNGREFAAYIGLAPKSSGSGGKNFVTHIPKKCECNNEVRTLLVQCAHAICRSKHKSDRVSSILARKPKKVVIIAVANKLARQLWIMAKKGEKFEKRFILAAV

SEQ ID NO: 296590 - protein, 338 aa, unidentified
MYYTGIDLHKKTSFITTIDKDGKIVTRANLQNVEEDILAYFATLDKETRIVIESMASWYWLYDLLTEEGFEVVISNPVKTKAIASAKIKNDKLDSHMLAQLLRADLIATVHVSSLETRKLKELLRHRSRLVRDATRMKNRIHMLLMKNNFRSPFSDLFGVKGLRYLEKIDLPDYHRQNVETYLLLYEKLQEQIEPLTKRVRALAKENHTAQLLMTIPGIGPITAMFIMAEVDDISRFRSYRNLASYAGLVPSLDASAGKEKRGRITKQGSRYLRTALVEAAQAAARMKNCRLNIFFRRRIVKAGYQKAIVATAHKILQYAFYVWKNQTPYKETYPVCA

SEQ ID NO: 296591 - protein, 465 aa, unidentified
MKRKSSQKSRARRPNASLLERINYDVAGIDCGASEHYVAVPADRDPESVQWFPTFTADLHRLADWLHRCGVRSVAMEATGVYWIPLYEVLEQRGFEVLLVNARHVKNVVGRKSDVLDCEWLRELHSVGLLRGSFRPADAIVVLRGYLRHRDSLVKSMSDIIQRMQKALIQMNVRLGEVLTDVTGKTGMAIMHDIVEGRVDPEQLALRRDERCKATKEEFVAALTGNYRPEHVFALKQNLDLYATYAASLSECDQAIEAYLKTLAAHSPEPRERLLTPRKKSRPRPQEPSFDVREYLYQLHGVDLSQIDGIGPYQALRLTSEIGIDMSRWRTEHHFTAWLTLAPQNKVSGGRLLSSKTHASANRAKAMLRMIAMSLARTETALGAFYRRLAGRIGKAKAITATARKVAILVYRILKGELTYHDPGPAAYAERQRAKALRNLKKRAHLFGFDLVQADSGELLTVGVS

SEQ ID NO: 296592 - protein, 339 aa, unidentified
MQSNTISIDLAKNVFQVCVVSSDRKVLLNKSFSRHKLPEFIANQPISVVAMEACYSSHYWARLFSQMGHDVHIIPAQHVKPFVRGNKNDRNDALAIAEASWRPNLKCVPLKSIEQQDIQALHRIRDKLISRRTSIVNQVRGLLSKYGVIIPIGLANFQKHIVALIDPSEPRLTSRMKQQLADAKEEYDHLSRRCLSIEKELKLYVQSNPLCQRLMTLPGVGLLNATALFASIGNGSQFNNPRELSVWLGMTPKQYASGERSMHVGITKRGNPYLRKQLIHGARSLLHRTKGKTDKLSIWIQQIVERRGKNKAVVAIANRLARLAWILLHRNEDYRVITA

SEQ ID NO: 296593 - protein, 406 aa, unidentified
MHLYIGIDWSLKKHDAVFMNDAGATVLYLPFPHSADGLAYFDAARQKLGVQPDACVVGIETAHSLLIDFLWDRSYSSIYIIPPSVTKANRSRFSSSGAHDDQRDATVLADTLRTDRSRLHPWAPDTKRTRQLRAQVGLHMFLTRDVVRLSNRLQSLLLRYYPAALVVFSDLTAQITLAFLQAYPTPAAAQALSYTDFVAFAHQHRYPRPKTLPECYRRLQTPQPQATPDTVAVYEKQMQHVAQLLLTVVLAKKTAGDELDTIFADHPDRDLYLSLPGAGAFLAPALAAKLGEERARFPTAASVQTLAGTCPVTEKSGKVVWIHFRWACDHEFRDIAQKWAYSSLRDSAWATTYYSQQMAHGASKSRACRCLANRWLAILWHLWQTKQMYDEAYHLHDVTERMRPRR

SEQ ID NO: 296594 - protein, 338 aa, unidentified
MLYTGIDLHKRTVVIATIDETGKVHSEVSLPASRAAVARYFHWLPEPTTATVEATSSWYWLRDLLEQQEVPLTLAHAKFVKAIAYAKVKTDAVDALTLAQLHRADLIPRAHMVSPELRPLRALLRTRLHLVEKRTSAKNSVQRLLEQFNVPEPLRLPDEATLQASLYAEQIELLGDQIHRIEQRLQPELIPDPDIQRLLWIPGVGKIVAFTLHLEIDGIERFPTVRQFFSYCRVVPGADNSAGKRRHGRRKDGNRYLKLALSHASVRAVQYFPEIKRFYQRKARQKNPAIARTLVQKEIARSVYIVLKEQVDFNHTFKGQPLSKRKASKWPRQANPDA

SEQ ID NO: 296595 - protein, 347 aa, unidentified
MMILKQVAGIDVAQKELVVSLGRMDQELTVELFDYKVFANSQKGFKALTTWAENQVKNNIKIRYVMEATGVYHESLAYYLTDNGLEVSIVLPNKISNFFRTLDVNTITDKTASQAIARFGLERKLEVWQKPKKIFRELKQLTRERDQLIADRTVLKNQLHAENTEAFPNQSSIKRITKRIKLIDKQDLEIKAEITAIVKKDAELVKKINLITTIPGVGNLTAVIVLAETNGFELIRNKKQLVSYSGLDVKLKDSGTSVKGKPRISKKGNRHLRKAMHMPALSAMRFNEQHKALFVRLVSRHGIKMKAAVAVQRKILELIYVIFKTDKPFDKDYIQQGVIDIEVLQNS

SEQ ID NO: 296596 - protein, 345 aa, unidentified
MPIVGGLDIHRKQITFDYLDTETGEVKRGQIAPADRAHLRSWLARFAGRDDVAFALEGCTGWRYVAEELAGAGVAAHVAEPADTAFARGRKRHAKTDRTDSRHLRDLLAEGRLPECWVPPSHILECRALLETYHDLRAEHTGWVQRIHAVFFHQGAPALGEAALRTGDDLEALRAAAAAHLSPTGQLQVATALDMLAGLEARLDVLRHRLLAAARSLTGARVLAERLYGVGPVTGLAMTCWLGGAGRFSSSRKAVRFAGLDVTVWSSDRKGPPGRLSRQGPPVLRWAVYEAGKTHARASAPDHDYYAAVKDRQGGKRAAISEARKILRQACHILAELGDDALTAA

SEQ ID NO: 296597 - protein, 385 aa, unidentified
MASATIEPSANTAENLCFMAIELSKGKWLIGMLTPLANKISLRSIPCGAVQELLEFVERTTEKVLRATGRPVRIVSCYEAGYDGFWLHRVLDARGIINHIIEAASVHVSRKARRAKTDRLDAENLVRVLIAYWRGEPKVCSVVRPPSIEEEDAKRQHREREFLMKERVQHIGRIKGLLATQGVYAFQPSRRDWRSRLSKIVTGDGRPLPPRLAREIDRHCQRLVMVNAMLKEIDEARDAASETSTAPSIPSAQNVQRLLQLKGIGPQVADVLATEVFYREFKNRRCLGSYLGLTPSPFQSGGMDRDQGITKAGNPRARTMSIELAWLWLRYQPGSALARWFHDRTNGAKGRMRRILIVAVARKLIVALWRYLETGLVPDGAELKA

SEQ ID NO: 296598 - protein, 417 aa, unidentified
MKSPIDMEFTAFVGLDWADKKHDICLQAAGCEAREFDCFAHRVKAIEQWALSLHQRFGGRIAVALELSKGPIVYALQKYDFLVLFPINPSMLAKYREAFTPSRAKDDPTDAELALDLLVRHRERFKPLQPQSEQMRTLAYLVEQRRRLADDKVRYTNRLGNALKQYYPQALDWFADRDTVLFCDFIVRWPTLMQVKRARKASLVTFFRAHNMRFPKLIEKRICAIKAAAPLTQDGAVITAYKLQAQVLVEQLRVTLQALRRFDQAIAAISPELPDYGLFRALPGAGATLAPRLLVAFGEQRDRFAGADECQKYFAVAPVTERSGDKTWVHWRWQGPTFLRQTLVEWAGQTINKSFWAGAYYRQQRDKGSSHQAAVRALAFKWVRILYRCWQTRTPYDESKYLEALRRRGSPLAQTDR

SEQ ID NO: 296599 - protein, 346 aa, unidentified
MIIVGCDLHPGWQQVAVFDSATGEIQEQKLENGNGQAERFYRRLRSPARVGFEACGNRQWFEDLLDSLGHEVWIGDAAEIRASYVRKQKTDRRDAAHILKLLIEDRFPRLWRPSQAERNLRQLLIHRHRLVGIRTRVKNGLQHLMLNRGVQLKQKLWNEAGQKVLRELPLEGWAAQRRQDLLQLLSELNPQIAKLDQAVGRAAQQHPRACLLMTQPGVGPITALAFVITMGEVTRFQRGKQVASYLGLIPSEHSSSKRRRLGSISKQGNPFLRMLLVESVQTVCRLDEGFRKQYKQRCHRMKKAVAKVAAARKLAVRLFWMLRTNTAYPEIARIESSPGYGVVGGS

SEQ ID NO: 296600 - protein, 413 aa, unidentified
MEKVSFNQVVKVGCGIDVHKDIIVATVRKSENEYETREFSSYTSSLTDLREWCKSQKVTHIAMESTGIYWKPVFNILEEGDFEILLVNARHVRNVPGHKTDKKDSQWLSKLLLSGLLKGSFIPPVEIRDLRDLVRYKRKVVGQCASEKNRIIKILEDANIKLSSVLSNVDGAVGTRIIDDLIAGKTEVGELLKHYHGKIKASREEMGKALQGRLTKHHQFMLRIIKESISDKEKLIEKLDKQIDEAAAQYRVELELLQTIPGVAYDSAVNIISEVGADMSQFPNEQHLSSWAGMSPGNNESGGKKKVAATVHGNRYLQCTLVESAWGATRKKDSYFKRKYESLVARRGRKKALVAVGHKIIIAAYHVIKNKEAYKEPVLHNNPKRKTKRINHLLDKLKELGVEVRKADLTPTP

SEQ ID NO: 296601 - protein, 421 aa, unidentified
MKIVYPICCGIDVHKSFLVATIVSVTKAKTLSYKKERFSTFNKDLKRLKEWLIENKCYDVCMESTGKYWVPVLNVLEPELRVVIVNPKWVKAIKGNKDDVKDSKWIGELFCFGLVRSSFVPGKDIRILREYTRYRYKLVNMRSSERNRFQNGFTVCNIALDSVVSDMFGKSASEITDYLLTDENPNAEHCATMLHRSLKKKAVAVVESIEGFQLTEEQKFRMLQVRHHMEYLDLAIDLLDTKLEALMEPYSAAIKLLCTIPGMKRESAMTVISEIGTDMSQFDSSKRLCSWAGLTPGNNQSAGKKKSVKITRAGVYLKPILVQVAHAAVKCTSQPYYKIKYENISRRRGKKRAIIAIARMILTAIYHMFCTGEVFNPSDLKQVDMPEELRQKHLQKSIINAITLLKRQGILNEEFSTPSCA

SEQ ID NO: 296602 - protein, 349 aa, unidentified
MKFYTKQHQFYCGIDLHANAMYVCVLDSTGEVVLHKNIPTKPKSLLRLIKPYRENLVIGCECMFSWYWLADLCADEDIDFVLGHALYMRAIHGGKAKNDRIDSYKIAVLLRGGSFPLAYVYPKSLRATRDLLRRRNHLVRKKAELFAHIQNTATQYNLPDPLGRIARPSDRGDLLQKFPDPVVRRMVEVDLLTIEHYEHLLSSLEWELERLTERQAPVELALLKSINGVGRILGMVMLYEIEDIGRFPRVQDFVSYCRLVKPEKQSNGKSYGHSGKKIGNAHLRWAFGEAVVLMLKRNKPLQDQLQKLASRYGKGKALAILSHRLGRAVYFMLKNQVPFDQERFMRKST

SEQ ID NO: 296603 - protein, 359 aa, unidentified
MHGAQLYQKFLPQEYDVFCGIDVDKKKMLVTLTDHQDQTKSVQMPSDPGILIRYVDKHFPAKRIAFAYEAGPTGYKLHDQLTAQGYPCLVLAPSMIPQAPGQQVKTNRLDSKKIAESLRGGQVRSIHVPSSAYRHLRHLTQLRDTFVKEVVAFKCRIKALLLFEGIPFPKASVNGQWSQRVLEELKRLPVNESVRFKLDQLLSSLSFACEQALKTQKEIRRFCTSDPELSRCVRYLTTIPGIGWIVATHLLARIGDWRLLTHVRQIAGFLGLAPRESSTGERRRQGSITGIGDGRLQAKLIQSAWVSIHKDTELESFYRNIYQKHPRDRAARKAIVAVARKLTTRIYCVLKEQRPYVVR

SEQ ID NO: 296604 - protein, 342 aa, unidentified
MDGVSIVGLDLAKRVFQAHGACSNGHVIFRKKLSRSQLVAFLARQPRCIVAMEACASAHFWGRAIRDLGHEVRLIPPIYVKPFVKRQKNDAADAEAIAEAAVRPNMRFVEVKSQRQQAGAMVFRTRDLLVRQRTQLINALRGHLAEHGVVAPQGVTNVRILEAAIEEAETSLDLLIIETARLYLTQIASLSEQIVTLEKVLQQEAGKAATTARLLTVPGIGHVTAMAIEAFAPPMETFRRGRDFAAWLGLVPIQRSTGGKQVLGRTSKMGQRDIRRLLITGAMTIVRWASRKAPPEGSWLSRMLERKPRMLVAIALANKMARSVWAMLTKDEDYRNPVAVAA

SEQ ID NO: 296605 - protein, 343 aa, unidentified
MEHYAGIDVSLERSSVCVVDATGRIVREAKVASEPEALVGFLRRLGLPLARVGLEAGPLSQWLHAGLAGAGFEAVLLETRQVKAALSAMIVKTDRKDARGIARLLRMGWYRPVHRKSPPAQEVRALLVGRKLLQGKLLDVELSIRGLLRGFGLKLGEVSKGRFAVRVRELVAGQPTLERVIGPMLRAREALRSEYLALHRAVLAIVREDAVCRRLMSVPGVGALVALTFASAVDDPARFRRSRDVGAHFGLTPKRYQSGETDVTGGISKVGDAMVRAALYEAANVMLTRAGRFSTLKRWALEVAKRRGARRAKVALARKLATVLHRLWADGSEFRFGKEAAAA

SEQ ID NO: 296606 - protein, 412 aa, unidentified
MQVIHARCAGLDVHKKSVSACVLCWEAEGRKVRELRVFGTMTRDLLELADWLKAHEVTHVAMEATGVYWRPIWSILEGQFSLLLANPQHIKAVPGRKTDTKDSEWIADLLQHGLLQGSFVPPTPIQDLRDLTRYRAELTQAQNRVANRIQKLLEQANIKLASVASNALGVSGRQILEALVQGEQDPERLAELAQRRLRSKIPELRLALEGKVRDHHRFLLREFLDEWEVIGRRIVRLEEEIERQLGPFEWAVTLCQTMPGVDWVTAANLVAEIGVNMGQFPTASHLASWAGLCPGNHESAGKRISGKTRDGNRWLRRTLCQAAWAVTRKKDCYLSAQFRRLASRRGIKRAVMAVAHTMLIITYHMLKTTRSYAELGGTYLEQINKDQLQRYFLKRLQRLGLKVTVEPAIQPA

SEQ ID NO: 296607 - protein, 327 aa, unidentified
MKESLIAGVDVSKSTLDIFIKPIGLSLKIANSPNGFKEWIQELKQFVDAGFDLLVIMEHTGQYSCRFESFLRSRSIGYCKIPALQIKRSQGMVRGKNDKIDAERIADYGWMRRDILVADQPLLENITELRSLLSLRVKLVRDRSGYICRLKEMKSSGTCTASDYLGRTQQQIIDVFTRKILQVEDKIKLLIRSNASIQKTAELLRSIKGVGWIVAAYMIGCTANFKRFGNARKFNCYAGLAPFKHESGSSIKGRARLSHLANKEAKTLLNLAASCSIRCDREMKTYYQKRVAEGKRKMSCLNIIRSKLVARMFAVVKRQTPYQPIAA

SEQ ID NO: 296608 - protein, 355 aa, unidentified
MSQEKYIGMDVHQATVSAAVRDRNGNLLMECILETKADTLLEFVEGLHGTLSLAFEERTLAAWLHDLLKPHVNRVVVCDSRKAALLRDGNKNDRIDARNLSELLRTNQLKPVYHGEHGLRTLKELGRSYLTVSKEMTRTMNRIKSLYRSWAIPCAGTTVYAPRHRRQWLAKIAEPGARVRAEHLYEQLDHLQPIRVRARRELLQESNKHDAVKRLRQIPSIGQIRAALLVALLQTPHRFRSKRQIWAYSGFAIETHDSGEYRYVRGKLQRNRERITVRGLNRNHNPDLKNIFKGAAISASSRPGPLQDFYETRVAMGMRPTMARLTLARKIAAITLTLWKKGANFDPQQLSRQAA

SEQ ID NO: 296609 - protein, 450 aa, unidentified
MTSKKKSKGTPTALAPINRRAAGVDIGSRFHVAAVPAELDAEPVRSFQSFTGDLNRLADWLVGLGITTVAMESTGIYWVPAFEILEARGLEVVLVNARDAKNVPGRKTDVNDAQWIQQLHTYGLLRASFRPGASIVALRAYLRHRERMLEYAASHVQHMQKALMQMNLQLHHVVSDITGVTGMRILRAIVGGERDPETLAAFRDVRCKSSIETIREALTGNYQPEHLFALRQAIELYDTYQAKLQDCDAEIERSLRALPTEATTTPLPPPRSRTMQKNAPEFDVRPVLHALLGVDLTQINGIGPYSALRIIAECGTDMSRWRTAKHFTSWLTLAPGSKISGGKVLSSRTRRSTNRAAVLLRLAATTVGKTNTALGAFFRRLAVRTGKAKAVTATARKIAVLLYNTLRHGMAYVDPGADYYEERYRKRTIDNLRRRANALGFALVEAPTPG

SEQ ID NO: 296610 - protein, 291 aa, unidentified
MSSEKYIGMDVHQATISVAVLDAQGKTIMESILETKASTLLEFLGGLRGTLNVTFEEGTWAAWLYDLLKPHVAKVLVCNPRKNALLKHGSKSDKIDAQKLANLLRLNDLKPVYHGETGVRMLRELARSYLAIVKDLTRVMSRVKAVYRSWGIPCGGRDVYYTRHRKQWLDKIQEPGVRRRAERLYQQLDMLQHLRQQARRELLAESRKHTITAKLRQIPSLGPIRSALAVALIQTPNRFRTKRQLWTYSGLGLETRDSGEYHYVKGQVRRRKKQNGGAVQKATSSVIQRYR

SEQ ID NO: 296611 - protein, 350 aa, unidentified
MIIGVDYHPSFQAIAFCMEETGECGEQELNHSDGQAEKFYRDLKQRGISVRVAMEATGYSRWFERLLAELGFELWIGDPAEIKAKRVKKQKFDREDARLLRRLMLENNFPQIWIPSPENRDLRQLLWHRHRLVQMRTRIMNQLQALAMNEGYRWKKKLFSAQGRALLEKLALAPWASRRRQELLELLDRMNPAIEELTAAVEQEARKRPEVMRLMTHPGVGPLTALAYVLIIGTPTRFQRGQQIGIYVGMIPSEDSSAGKQRLGHISKQGDSLLRFLLVEAAQAAARINPEWRRRYMHLAMRRHKSIAKVAMGRKLGVRLYWMWRNGCEYSQSLEFGSYVGQLGTGHGVK

SEQ ID NO: 296612 - protein, 392 aa, unidentified
MFFVGIDIAKRSHQVAVTNDSADIIVKPFNIKNSTIGFSNLIGKLVEYSITQDNCIIGMESTGHYWYPLYFFLVDNGFHVKVFNPIQTAAFRDVAIRKVKNDNLDSVMISDFIRFGRFSETVIPNENMLALKNLSRYRFSVTDICTSLKKRTITLLDQVFPEYETLFSDIFGITSRKLLEKFSTPEEFMDVSTAKLTTFITKVSHGRNGREKAELIKSAAHSSIGISYALDSFSFQIKQLVEQIGFIEKQIEDIDKEMEKLLAQSEYSMITTISGIGPVLGCIIVSEIGDISRFESASKLVAYAGLDASVRQSGEFNSTQNKISKRGSSYLRRALWMAAFMSLQCDPALYGYYRRLKERGKSHRLCVTAVARKLCIIIWAIMNSKQPYVPNI

SEQ ID NO: 296613 - protein, 387 aa, unidentified
MALFVGIDVSKEKFDACGIGDDGKKVFSVTCPMNREGFEKLILQLPETALIGMESTASYHIALFSYLTAKGYRVAIINPLLIANFAKLSLRKTKTDKKAALTIAEFLLLKRETLATEPPPLGELKDLSRRRERLIDQVTALKNDIKRILSVTFPELETITGVFTKSTLRLLVKFPSAHAIREAGYDAVADVVISRSRGRKSAASVKTLIDSATASVGVSSPAKDLILKQEAALLLHVQEQAEEIMKVMVHLSDEKMKRDTEILTSMKGIGDKTAFNFLIELGGDINVFENDKKLIAAVGIDPTVHESGKYKGQSKISKRGNRHLRRVIWLMTTKVIISNEVFRAYYFKRRKDGLIYKMAVLATAHKLIRVMFSMLVNQRHFEPERRK

SEQ ID NO: 296614 - protein, 341 aa, unidentified
MGKFIRIGVDLAKNYFQVHALASEDSPAVKRKLTRSKMHRFFSQIEPSSIGMEACGSAHYWARELEAMGHDVLLMPPSYIKPYVKRGKNDAVDAEAICEAMSRPGMRFVPIKNGEQQATLMLHKTRELLVKQRTMSVNALRSHLSEFGIIIAKGIGRIDELLKLAEVDMTLPDAAKAAVAALAAILEGIEKAIDDLEAQIADAHARSDMNRLLARVPGVGKLIASVITASTPDPSVFRSGRDFAAWLGLTPRQNSSGGKQTLGGITKQGNRYIRKLLVLSATSLLRSVSKRKGALADWISALLAKKPARLVTVALANKLARIIWAIMRTGEIFRAEIFAKA

SEQ ID NO: 296615 - protein, 369 aa, unidentified
MAKSITYVGLDVHKDTIAVALAEAGLRGEVREYGKIPNTPAALQALTVKLVPARRELRFCYEAGPCGYGIHRQLTEAGHECVVVAPSLIPRKPGERIKTDRRDAINLAKLHRAGELTAVWVPDQAHEAIRDVVRARQAAVRTLRQARQQLSGFLLRHGHHYHRPAWTQLHRRWLASLKFEQAVHYIVLEDCIAAIEAATARRDRLEGHIEAALPAWSLAPVVHALQALRGVGLVAAATLVAELGDITRFTNPRQLMAYLGLVPSEHSSGRTRRQGGITKAGNGAARRMLIEAAWSYRFPARISREQLLRQERLTRPIRDIAWKAQERLCRRYRTLARAGKLPTVITAAIARELAGFIWAIARQAQPATS

SEQ ID NO: 296616 - protein, 354 aa, unidentified
MIIIGVDFHPEFQQIASVDTDTGEFQEKRLVHREEAENFYRALAATGHNVRVGMEASGQARWFERLLSELQFELWIGDAAVICTKRVRKQKTDRQDAQLILQLMIEDRFPQIWVPSWENRDLRQLLWHRHRTVQTRTRIMNQLQALALNEGLRCKKRLWRERGRQQLESFRLGPWANRRRRDLLELLDRLNPTIAELTQAIEQEAEKCPAAQRLRTHPGVGALTALAFVLIIGEADRFHCGKQVASYLGLVPLEDSSGNRRRLGHITKQGSSILRFLLVEAAQVTVRSLPEWRSKYFHLAMRRGRKIAKVAMARRLAVCLYWMWRKGWNYEQLTKFGSHAGKPGTGHGVQLNTE

SEQ ID NO: 296617 - protein, 360 aa, unidentified
MDVIYPRCAGLDVHAETIVACALWEEDGHIQKDIQTFSTFSKGLGDLLEWLEDHGVTHVAMESTGVYWKPVFAFLEGYVDLTLANPQRIKNVPGRKTDVSDAEWIAKLLRHGLVEKSFVPPADIRELRDFTRLRKKWVGQLTSEKNRIQKVLESSNVKLGSVLSDLFGVSGKDILARLLEKGYVDKDELDQCLRGRLKTKKQAVYDSLLGTLTEHELRLLRLLWKHVEELERLIEEVDQHIDRLLEPYREEVDLLMTMPGIKKQTAAVIIAEMGTDMSVFETPERAASWTGLSPGNHESAGKRKSTRTTKGNPHLRSALCVKADYFFPKIAGLKFPRRTSLILLFFLLEPFFPQSIAFPL

SEQ ID NO: 296618 - protein, 429 aa, unidentified
MKIIYPRVCGIDVHKKFIVAVICISESVEPIYLKKRFSTFHNDLIRFREWLIQNDCQNVCMESTGKYYIPVYNVLESHISNIVVANPKWVRAVKGEKDDDKDAKWIADLFKFGIVRSSFIPQKDFRILRELTRYRYKLVNMRSSEKNRFQNALTSGNCKLDMVFTDVFGKSASNIIDLILSDNPYTDEDILSKVHKKCKASPDMILDSVNGTDLTPAQKARIELVNDHIKQLSSNIQKLDKLIDLMIEPYEDYISFLCQIPGVSRNSAIIILSEIGIDMNQFTTSRRITSWAGLTPSSNQSAGKKKSVRISRAGVYLKPCLVEAAHAAVKDKSHPYYANKFNKISKRRGKKRAYIAIARKILVAAYHMLLTGEIWNPADLSEVETPVEQRLKYVKNNLKSDIKQLLDIGLTVEELTLMIQQNANIIATQ

SEQ ID NO: 296619 - protein, 420 aa, unidentified
MAEATEEAAELVQRVAALDIGKAMLEACVRVPQETTPGRRVQEVRTYPTTTGALLELADWLRAQQVTLVIMEATSDYWKPPFYLLEAEFTCWLVNARQVKHVPGRPKTDRQDAIWLAKLAERGMCRPSFVPPKPIRRLRDLTRYRRTLVRERTREAQRLEKLLEDAQIKLSSVVSNLLGASGRAMLEALIDGERNPGVLAELARGRMRGKRTQLTEALTGHFDDHHAFLCRMMLDRIDALTAQIATLSATIETVIAPFQTRVDQLDAVTGIGQRSAQELIAELGVDMTCFPSADHLVSWARYCPQTRQSAGTTRAATTGKGNPWLAATLGETAIAAARTDTFLGARYRRVAKRRGKRRALVAVGNSLLTIVWHLLADPDAAYHDLGADYYESRVNKQRQTRRLVRQLEALGHQVTLQPAA

SEQ ID NO: 296620 - protein, 328 aa, unidentified
MVKRSVVDAVQVALAGECWVGIDVAKAHLDVATWPAGERMRVARDEAGLAQLVAWLQARPPNLIVLEATGGLETLVVGALVEAHLPAAVINPRQARDFAKALGRLAKTDALDAEVLARFGQATRPDPRPWKDEDAQELTALIQRRRQVVDMLTAEKNRLASAHRHVRPDIQATIDWLEQRLKDLDGDLQRRLRESPVWREQDDCLQSVPGVGPVTSATLLAALPELGTLNRRQISALVGVCPFNRDSGQSRGRRMIFGGRAGVRAVLYMATVAASRCNPVIKAFYQRLRDAGKPAKVALTACMRKLLTILNAMLKAKTPWQPQAECRS

SEQ ID NO: 296621 - protein, 452 aa, unidentified
MAKKSKRRCDTLPVLHPDAAGIDVGASELYVAVSADRDPHPVRNFPTFTRDLHALADWLEQCGIHSVAMESTSVYWIPIYQILEARGLEVYLVNAQHVKNVPGRKTDVSDCQWLQYLHSVGLLRASFRPPGFICAIRSLWRHRSSLIQMAAEHVLHMQKALDQMNLQIHRVLNDITGVSGLKILDAILAGERDPLTLARLCHGGVKNSEDTIAKSLEGDYRPEHLFALRQSLAAYHYYQKLVLEVDQEIKLQLGDLQTAATAEKTTPARTKASAYQRRRYEPKTFDLRGELYRIFGVDLTNVPGISAITAQTILCEIGTDVSRFRNASAFASWLGLCPEKKVSGGKVLFTKSRRVRSRVATALRMGAQSLHHAKDYLGEFFRRITRKLGRPQAITATAHKLARIVYHLLGTKEAYNESVFHKSEADTIRRAEYRLRRQAAQLGFQVIPAENG

SEQ ID NO: 296622 - protein, 360 aa, unidentified
MKFVGIDLHKKSISLCVRDASGRIVTRKRFSTGDTEKIVAFFKSLAVFRFCVEATSAYEWLVQLLEPMAQGWVLVHPGRMRLIAESTDKSDKVDAEVLSEFLWLGKLPRAYRPTPREREHRTLARYRAKCRQRVTKLRCRIRHVLANYNADRVDLFGPEGREHLASVAVTKADRFVLNELLAEHDEALARLAKAKMELRTFAESGDAAEQQAREIATSVPGIGETIAEVVLAELADVERFGSIASAGKYAGLAPGRRGSADKVIELGITKQGSRLLRWAMVQAAWQAVRHSARWHEVYERIKKRRGSKRAIVAVARKMLVVLTSLLKSGQMYRRNEAEEKEAARKARLRRAKAVRRKAAA

SEQ ID NO: 296623 - protein, 337 aa, unidentified
MKLYCGIDLHSSNNVVAVSDEQDRLLYEKRLNNDLDAILTVLKPFKGELVGCVVESTYNWYWLVDGLMEAGFPVRLAHTGAMAQYAGLKYTNDFSDARYLAHLLRLGILPTGYIYPKEERGLRDLLRRRLLLVRQKSLHHLSLQSLIARHSGQRLTTNEIKQLETRQLAAYLESPILLGGQITHQARCWLDEAITRIEQALQRQIQPRKDYQLLQSIPGVGPVLGTTIALETGTIQRFPSPGNYASYARCVKSEKISNGKRKGQGNRKNGNKYLAWAFMEAAHYGAIWSPPIKRYYQRKQAKSHILVAKKAVANKLARACYHMLKRGEVFDVTRAFG

SEQ ID NO: 296624 - protein, 379 aa, unidentified
MRTVSGLDVHKDSIFMCILDEQGKKTEEKFGVTTREIKRLGRVMQSRYVSDVCMESTSIYWMPIWRLLESDFRLHLVNPLFLKQLPGRKSDVKDAEWIATALIKDLVKDSFVPDGNIQRLRQYGRRINEINRDLVRCEQRIDTVLQRCNIRLSNHVSRTKNKSYRKVVDALIAGETSCDVLIKLIHGRTVNRCGKSAVHDCLEGCIAQSDRDMLGQYTQMFDMYETQKQQCIEAMIQMCVELYREAFLFLLSIPGIKEISAAIIISEIGENMELFATAATLVSWAGLRPRNDESAGKIKSRKITHGNKYLRKALMECAWGAARTKGSVFYSRFFHLKGMKKHHNAIIVAIARQMLTIIWTLLTKKEHFDKEYHLKKKSV

SEQ ID NO: 296625 - protein, 430 aa, unidentified
MSYRIAGIDVHKRMLAVVLSDVEVDGEYQFERRMFGSNPEQLRSLAAWLVEREAEEVVMESTAQYWKPVWETLERYWKPLREKRESARRRSGTLHLAQAQSNRGRRGRKRDFADAERLLKRLVARELTLSFVPDAEQRLWRTVTRKKYQLRRERVRLHNQLESLLEEAHIKLSSLVSDLLGASALRMLKALADGETNPAALAALADQKLRATPEQLCDALGACTDLKPVYRRLLKMALEQLQFLEQQIGQLDQELATLLHPHQDAVQRLAEMPGLGVDSAQQIIAEVGPTAAVFPSAKQLSSWVGACPGDEESAGVNYSHRSPKGNRHMRRLLNQAANAAAKTKGSIFEIVYRRSIPRLGHNQTIGAIAHRQCRLIWLILHQGVRYEERGPAVNKQSKQRRTWKMIRQLRNLGYRIEPPNPQQPSPAQPE

SEQ ID NO: 296626 - protein, 354 aa, unidentified
MSNKSTSIVATMGIDIGKNSFHVVGLDERGAIVLRQKWSRSQIEARVANMPPCLIGMEACVGAHHLSRKLQSQGHDARLMPAKYVRPYSKGQKNDFRDAEAIAEAVQRPTMKFVATKTAEQLDLQALHRVRERLVGQRTGIINQIRAFLLERGIAVRQGLRFLRTELPIILAQRTDVLSPRMMRIIEDLAGDWRRLDERIEGLSAEIAALAEQDAACARLMTVPGIGPIISSAMVAAIGNGAAFSKGRDFGAWLGLVPRQISTGDRTILGRISKQGNRYLRVLFVQAAWVVLIRIKDWDRYGLKAWIEAAKKRMHHNVLAIALANKLARIAWAVLNKERNFECVRTAATSSRPA

SEQ ID NO: 296627 - protein, 347 aa, unidentified
MACLCTHCTCVTKAFQSTTFSNGSEKFLESNFPGGTYLCAYEAGFCGFSVHYDLESAGIRNIVFNPADINDTQKERSRKTDAVDCIKICRNLMNNELKAIYVPSREELGLRGYLGARDAAVKKQRVAKQRIKSLLNRNGVKISEELFPTNKGHWSRRFNGWLEHVAADLGSGEGYRLNDLLKDLHHAHSQVLAAGRRLNEVISAHHMDTNELLLSIPGIGRLTAARICLEVPHVSNFINSDHLASYIGFVPDVHGSDDNVYVRGITYRGRALLRSAFVESAWRAIGRDPAMGLAYRPSSALQGSWSTGCSLYCVRERDMKSQEFDNHTACLTGSMTTSATAVSFLQP

SEQ ID NO: 296628 - protein, 412 aa, unidentified
MEVLHERAAGMDISKKDAKVCVRVPSKRAGYYANTITTYGAFTKDILRLRRDLEQAEVTVVVMEATGDYWKPFFFVLSETLNVELVNAKQAKNIPGRKTDVSDARWLAELAAHGLLRASFVPPEEIRQLRDLTRTRTNLTREQTREYARMEKNLEDANIKLSLVASSLTTKSAHAILTAMVNGERDPHVLAGLAHVSMIKKAPELVEALTGRFSDHHAFMVKLHLDRINELDAAIQSINDRIDTVIEPFLPAREALSMIPGLSKTSAENILAEIGIDMSVFPTSGHLASWAGVCPGQNESAGRIKSTKTRPGNKYLKGHLGAAALSVSRSNSTYLAVKFRRIQARAGTLKAVVAIEHTLLVIIWNMLSTGELYSELGVDYRQTRDPNKIRDRAIRRLEALGYDVEVTPTAAA

SEQ ID NO: 296629 - protein, 389 aa, unidentified
MFYLGIDIGKNTHVASLVDDKKKVIFKAFSFSNSIDGAESLILKLEAFKNELEVAMEATGHYWLSLYSYLVEKNFTVRVINPIQTDGWRQGIEIRKRKTDVIDSLLIADLLRYGDFVETSLSNEDYLSLRNLSRFRSYLISSIGDLKRKTIALLDQVFPEYASSFSNIFGKTSKEILSNFSTPSDFEDINSDDLNTFLESVSKKNYASKKIDELSKKASSSFGINFCLDSFSLQIKILIEQISFIQKQVSDVENEIELLLEKLNSPITTIPGIGSVNAATILGEIGDIKRFSNPSKLVAYAGLDASVSQSGEYESTYNHMSKRGSPYLRRALFQSALRAEFCDPVFSDYYQKKISEGKHHLVATNAVARKLCHTIFAVLTKDEPYQVQN

SEQ ID NO: 296630 - protein, 457 aa, unidentified
MAQTKRSRKSRDFSTVHPAAAAIDIGATIHVAAVGPDRDMEPVRTFRTFTNDLHRLADWFAGCGVKTVVMESTGVYWIPVFEILEQRGFEVMVVNARDAKHVPGRKTDVSDAQWLQRLHEYGLLRASFRPQAEIAGLRAYLRQRERLLDHAAAHIQHMQKALTQMNLQLHHVISDITGVTGMAIIRAIVAGERDPTVLASHHERGCHASIGTMCQALVGNYREEHVFALTQALELYDVYQTKVAACDKQIQAILTRLKQNATPPANKLLPARRRTRQPNAPAFDARAALHAILGVDLTQIDGLGPYLALKLVGECGTNLTAWPSAKHFTSWLALAPHNKISGGKVLSSKTRRTSNRAASLLRLAAGTVGRTDTALGAFYRRLSARVGKAKAITATARKIAVLFYSMLRHGMTYADPGAAYYEDRYKQRVLHNLRRRAKSLGFALHEMEPDPARVGVS

SEQ ID NO: 296631 - protein, 407 aa, unidentified
MNAVGIDVSKGKSMVAALRPMGEVAFLPREFLHTEVGLEQMAYAILALGEDTRVIMEATGRYHEPVAAALHEYGIYVCVLNPLFIKQSGGGSIRKVKTDKADAIKIAKYGLDNWVDLREYTPMDTVRQQLKLCSRQYDLYMKTVISLQNNLISLTDKTFPGVNELFSSPERADGHQKWVDFVMTFWHCDCICRVSEKAFTERYQKWCKRKGYHFSVEKALEVYAGSCGHFTTLPKNDNTKLLIISAAQQLLAGKMTLAALRAEMTRLARQLPEYDTVRAMYGVGDKTAPALMAEIGDVRRFPRRSSIVGFAGIDPGVDESGKHSAKSVPTTKRGSAHLRKTLYQIVCTYLKKSPADEPVYQFLDRKRSEGKPYFVYMTAAQNKFLRIYYARVKECLEAFDAQTTEQK

SEQ ID NO: 296632 - protein, 418 aa, unidentified
MNEDGNTRGSRRYVALDIHKKYCVIGGVDREGRVVLHAVRVEHADLEGWLKKNLRATDHVVLESTTNAWHVYDLLEPLVERVMVANPAKVKQIANARVKTDVRDTFILARLLAANLVPEVWVPAAHIREMRQLLSQRRQLVETHTQIVNRMHSVAHRHHLQHERGKRFNEQNTAWQKDKRLSKVEQFQLELEMENRASMEKQIQRIGREVTKMCHQKPWAESMTYIMQLPGFGVITGMTALAAIGEVQRFGSAKHLASYSGLTGGLDQSGTHLVQKGITKAGRKELRWAMVEAAQRAVKSDPHWKRKFQEMEKRMHRNQAIVAVARQLLELVWYVLTRRQPYRHFSQERIAYKYLTWAWQMDDEARDGLTRQQFTRYYLMRLGIGHDLTRIALDPKHPRKIASEAELLTLRPELNHIE

SEQ ID NO: 296633 - protein, 418 aa, unidentified
MAFKILRKNCCGLDVHKTWIFACIGITDSNGRTEYKQARFSSFSQGLRDLADWLAKYSCSDVCMESTGKYWIPVFNILEKTCWVTLAHPKYTKPQKGNKTDRKDAKWICDLYMCGMVKPSFIPPPDIRQLRDLMRYRMKLTNMLTGEKNRAQNCLTVSNLKLDDVFSDVFGKSSRSIIQHILEHPGEPFDVAPFIHQRCKHSVDEIQAAVDGAVSREQAAKLKECLLHIDQLNKHRERIETEILRLAEPYPHQLELIRTVPGFASAPLTAVALISEIGVDMSVFPSAKHLVSWAGCCPRNDQSNKKVKSTRISRAGCYLKPLLVQIANAVIKSDKYPECMERYRRIKARRGHNKAIIAVCRMLLTAIWNVLSKLEPYSAKGYLADKLTEHSVVISKAQGLELLRKQGYIFSDEVNISS

SEQ ID NO: 296634 - protein, 342 aa, unidentified
MEYFAGLDVSLEEVSICVVDGAGKVVREARVTSEPETIARWFSVLGLAMVRIGLEAGPLSPWLQVELAKRGLPAVCIETRRMRSATMLMAVKTDRVDARVIAQAMRVGWFTPVHVKSSGSQELRLLLRNRKTVLEQRVALDNEIRGSLKAFGIKLGRVSEARLGEAVVRAIEAKQPELLKMVEPLLKLRLELRQAYAALHRQVLTAARAHPICRRLMTVPGVASVVSLTYVTGVDDPTRFQRSAAVAPHFGLTPRKYASGMIDRNGPISKAGDQMVRQALYQAAHTLLTRVQRWSSLKAWGMQVAKRRGLRRATVAVARKLAIILHRMWTRGEAFRWITAET

SEQ ID NO: 296635 - protein, 326 aa, unidentified
MPAESGVNVGLDVSQQDLVVGVASEPGVWTLTNDAAGHSTLIEQLRARVPVRIVVEATGGYERAVVAALGGAQLPVVVVNARQIRDFARATGQLAKTDAIDAQVIAHFAAAIQPAVRPLPNEAQEQLDALVLRRRQLVEMLVAERLRHHQATGRARAAARKSLEKHIRFLERELHLTDTDLGALIEASPLWRVKDELLQSVPGVGPTTARTLLAELPELGTLSRQAIAKLVGVAPLNADSGRWRGQRRIWGGRAVVRSAMYMAALVAVRHNSRLRPFYQQLLARGKAKKVALIACARKLLTILNQLLRTGEPWRAAPAVRPVRYLT

SEQ ID NO: 296636 - protein, 341 aa, unidentified
MGQASTIGLDIAKWVFQAHGADATGRVVFRKRLVRAKVLEFFAGQPPCLVALEACGGAHYWARELGKLGHTVRLIPPAYVKPFVKRQKNDVADAEAICEAAQRPGMRFVPVKDEAQQANTVVFRARDLLVRQRTQCINALRGHLAEYGHVVPQGPAHVDSLVALVEDPKSSVPESARGILQVLIRTLNALEEQLKELDGEIARRAKADPVARRLMTIPGIGRIAATAITALVPAPEGFRAGRDFAAWLGLTPLQRSTGGKHKLGAISKMGERTIRRLLILGASAVVRWASRRGAAAGSWLARMLARKPRMLVTTALANKMARIVWALLVKGGTYRAPAVAA

SEQ ID NO: 296637 - protein, 343 aa, unidentified
MNEISMIGFDVAKNVFQVHGVDGSGKEVLRKQLRRGAVEKFFAKLPPCTVGMEACGSAHHWARVIGRHGHEVKLMPPAYVKPYVKRNKNDGRDAEAICEAVSRPTMRFVAVKSVEQQAMLSVHTTRALLVKQRTMVANALRAQLSELGIVAAQGREGLHELMARLEAPSKEIPEIMRSALLMLVEQWHALDAKERVLEKQIVKAVRRDQEARRLIAVPSVGPIIASVTLAKVSDVRVFRSGRDFAAWVGITGRDHGTGGKHRPGRISKQGDRMLRTLLINGASAYLRQQKRRGISDPWLRELLARRPYKVAMVAFAAKTARIIWAMLAKKEAYRDRTSASAAA

SEQ ID NO: 296638 - protein, 408 aa, unidentified
MNTLYVGIDVSSKSNVIYLMLPNGDKHSNFSVANSHEGSTQLVKRILSALTSHSLDTVLIGLEATSVYGDNLVYFLREDATLAPFNRKIHVLNPKQVKKFHDTYNDLPKNDYVDSFVIADCLRFGRINKEVYMGDYRYKALQNLTRARFFAVQNLVKEKQRFMNVLFKKYSTMTQEKVFSDAFSTTALAVYDEFESAEALANMDLHELTDFIIEKGKNRFPDPDAVAKAIQKAARSSYRLPKTVNDSVNQVLSISITSMKALESQIKEFDKAIKALMELLPNVLISIPGIGPVYSAGIMAEIGDINRFDNQASLAKYAGLAWKQHQSGGFEAEVTRLIPSGNRFLKYYLCEAAFSLVRCDKEYSDFYHLKYKEVNRCQHKRALALTARKFVRLVFRLLKDNRLYCPAK

SEQ ID NO: 296639 - protein, 353 aa, unidentified
MRYIGVDLHTNSFTACYLEQEKPEYIKTFRLQDLGNFIKNLQETDEVALEATGNSCFFYDEVSPYVKRVVVVAPLQFEVIRRSVNKTDKHDARAIAFFLSKDMLPEAKCKSKQCQQLASLLKTRDQLVKSRGSLINKIHGLFNYHGIKIKKEVLTIKAGFECSLGKHDWSHLEKVEIEVISSNLEVIRESLKKLEKEIIAFAQQLPGFNNLISIKGIGAISAAVFVATIGDINDFSNPEKLTAYFGVVPRVSQSNQQCTIGRITKRGSKIGRTSLVQCTWIAIRYSPYLKSFYERVKKSVVLLRLLLLLLGSFSQLFSILLKTTGFSKILQNMKFLIDNNHRRNIYELYNRTK

SEQ ID NO: 296640 - protein, 416 aa, unidentified
MKTRQRKHELVKGGVLVVGVDIGKFKHFAAFRASGLVVKTLGFENDLGGFERLAREVDHWCKRLEFQRAVLGLEPTGHYWQPLAYWWEDHQGKVVLVNPMHTNRAKELEDNSPLKSDPKDAEVISGLVAQGKYLECHLPRGIFATLRNLVMQRSRCRMRETRLLNQLHQSVERIFPEIERAFSSFAVKSCRELLLRYADPAALAQVSAEDLGAMLRKWSSGQLGKDRAAKIILLAQQTVGIHEGKPAINAEIQRLIKHLWASEQERRELEVEIEKCLSTTPGAALLLTVPDFGPLTVAAILAHTGDLSNYEHPDQVIKLAGLNLYEISSGQHKGRVRITKRGRPHFRKILYMAALRASRRCGSLHAYYSRLVARGLAPTAALVAVMRKLLRISWAMVSKSQNFDAEKLIPNLAKAA

SEQ ID NO: 296641 - protein, 314 aa, unidentified
MGKPGVWVGVDVSKDQLEVALRPSGAQFSLPNDERALRMLVKRLLPLNCARIVVEATGGYETPLVAALQAAALPIVLVNPRWVRSFAKGFGQLAKTDQIDARVLALYAEPAELKVRQLPDEQTLELRALCARREDLLDMIVAEENRLEHAPKRLAREIRSHVNYLRKRIKQLNREIDGAVRGSQVWRAKADLLDTVPGVGPVLRAALLAWLPELGTLNRGEAAALLGVAPFNHDSGAMRGRRAIGGGRGPLRRALYCTTSAAIIWNPPLRSYYEHLIVNGKVHKVAMVATMRRLLLMLNAMIKTNTPWRSPCPA

SEQ ID NO: 296642 - protein, 426 aa, unidentified
MKEKIDYLSTLFVGIDIASRIHVISALDFNQDFFIKMKPVQNTQEGAVLLESMIVDVLKENHQFKYVVIAMESTGFYGVHLANYLSASDLLAPFSVRVYCLNPKEVKNYKKSFNDIGKNDGIDSFVIADFARVGRISIKPWRGSQYLALQRLTRHRMHITECIAREKTYMLNNIFLKFSEYALLRDGEHPFSNKYSATAEAILTEFTTNEDIVNSSVEDLVAFINTKSRGRIAEPEETAKIVQAAARNSYRLDKCLYEPLTISIASSFNCISSFEKELKAIDKAILQTVQGLNPEEYTVLNSIPGIGKVYSAGILAEIGSVRAFQNANALAKYCGIVWNDNDSGDFEAEDKRMSKSGNSYLRYYIIEATGSVIRHCPEYERFYQKKYAETRNHQHKRALALTSRKFIRLLFGLLDKGQLYSPEKSR

SEQ ID NO: 296643 - protein, 402 aa, unidentified
MRHQQSVPCGWAGVDVGKGHHWVCLIDEAGTTLWSSRVANDEGAILEAIGVVWARAQHVVWAVDVTGTVSALLLALLAAHGQRVTYVPGRTVNRMTVAYQGEAKTDARDAYVIAETVRHRGDLHEVDVPSALVGELRLLVAHRADLVADRVRAVNRLRDVLTGYFPALERAFDFAHSRGALVLLTGYQTPAAIRARGQSRLQAWLAKRKVRSAAQIAADALAAAKAQHTSVPAEAVAASIVADLAAQLLALDARISDLTERITTTFRAHPQAQIIESMPGMGPILGAELIAAAGDLNGYHDAGRLASAAGLVPVPRDSGRRTGNLHRPMRYSRKLRRVFYLSAAASMMREGPNRDFYLKKRAQGLKHVQAVIALARRRVDVLWALLRDNRVFQSAAPAARTT

SEQ ID NO: 296644 - protein, 398 aa, unidentified
MICVGIDIAKGKSTVCFLKPGGEVLKTPYDMEHTAEEITKLIRDIRSYDEEVRVVLEATGHYHLPVVAQLLEANVFVCVVNALRMKKFCSQDIRKAKTDKIDAAKIAAFGLTYWQDLQAAKPTDEVYRELRLLSRQYFQLTSMLVKAKISLNNLLDNVMPGITDLLYDREQNHKLTDFVLRYLHFDKISAMGERKFTTDYCNRAKKQGYRMYERQAEEIFALVQNSIPALPMTASTTIVVKEAIKVVRELENSRASILAQMQTFAKSLPEYSLIREMACVGDTLTPLVIAEIGDVRNFHSKHALIAYAGIDAPPYQSGGFCGTERHISKRGNGYLRHVGFEIMQCKLRLKPEGDAVYDFIQRKRSEGKCGKEAMVAGINKFLRIYYGKVTELYRELEA

SEQ ID NO: 296645 - protein, 352 aa, unidentified
MAATAQSAIAVIGIDIGKNSFHVVGLDGRGAIVLRQKWSRGQVEARFANMSPCLIGMEACVGAHHLSRKLKALGHDARLMPARYVRPYSKGQKNDFRDAEAIAEAVQRPTMKFVVTKTADQLDLQALHRVRERLVSQRTGIINQIRAFLLERGIAVRQGQRFLRVELPRILATPPDVLSPRMVRVIEGLASDWHRLDERIEVLSSEIEELAKPDAGCERLMSIPGIGPIISSAMVAAIGTGDSFSKGRDFAAWLGLVPRQISTGDRTILGKISKRGNRYLRVLFVQAAWVVLVKVKPTRWQGHGLRPWIEAAKKRLHHNVLAIALANKLARIAWSVLAHGRAFETNKLLAAA

SEQ ID NO: 296646 - protein, 327 aa, unidentified
MVTRPRPASTDLSAVAGPLCIGVDVSKDWLDIADNAGRALRIANTVAAITEALGGSWAQGCRAMVCEATGGYERPLMLVAAQLGLPLRRVHPNRARAFATAAARLAKTDAIDARMLARFAAFIADEPARPSPAPQTQTLAALVSRLDQLSDLRQSESCRAHQAHEASVKASIGAVIEVLDSQIGAIQHAIDALIASDPILTEKASLLRSCKGVGPKNAQMILARLPEIGALDRRKIAALVGVAPITCKSGSSINRASIAGGRKPLRDTLFMAALSASSHNPTFIAFRDRLKANGKPHKLIIVAVIRKLIVTLNAMIKAKTPFKPALT

SEQ ID NO: 296647 - protein, 417 aa, unidentified
MQYAPPTLTAEPANGLTGGIDWARDDHAIAIIDNRGVPVHRSTVEHSSAGLHELVAVLARTGVSEVAIERPDGPVVDALLTAGITVVVISPNQLKNLRSRYGSAGNKDDRFDAFVLADTLRTDRARLRPLVPNSPATVALRALCRARKDLVIHRVAVANQLREHLKLVFPGALGLFEELDSAISLKFLTRFDSQDRADWLTPIRLGTWLKSVRYTGRTDPATLHARLTVAPRGATSAAGAAQVCITRALVATLTSLVEQIKILSEQIAEQLADHADAHIFTSLPRSGTVRAARLLAEIGDCRARFPTPEALICLAGVAPSTRQSGKIRTVGFRWSCDKQLRDAVCDFANDSRQANPWAADLYNRARARKHDHPHATRILARAWLYVIWHCWQTNTAYDPAHHRALQALLKQHQQPAA

SEQ ID NO: 296648 - protein, 330 aa, unidentified
MMAQNDWVVVGVDVAKDKVDACIRSLSQPQTFPSTTQGRRELIAWLRRHKVGKAVMEASGGYERDWRKALHEAGIEVRIVDPKRVRSFALSAGRLAKNDAIDAEMIAWFAETFSEAPNQTHDAALEELVALVKARIALIELKTRLQIQSGHAAPGPVVKARSRILKGLAAEIENLEATIVIKVKATPDFAARAEIIESVPGFAGTTAANLVAGMPELGQVSNEVAAALIGVAPYDDDSGQRRGERHIKGGRRWVRNAIYMPCLGAATLNNPVIKAFYERLIAKGKEPKVALVACMRKLIVILNVLIARRQKWDPAVTHSVERAYSVAFGL

SEQ ID NO: 296649 - protein, 347 aa, unidentified
MRFYTQQHKYYCGVDLHARSIYVCILNQEGVVLVHKNLRAKPDAFLAVIAPFREDLVVAVECMFTWYWIADLCAREGLTFVLGHALYMKAIHGGKAKNDRIDSHKIAHLLRGGNVPFSYVYPEAMRATRDLLRRRNFLMRKRAELLAHIQNTNSQYNLPDIDGALRYPANREDLSERFTDDSVKKSIETDLGLIDVYDKHLKEVELYLTRHARVDNPNSYHILKTVPGVGQILGLVLLYEIHDVARFPRVQDFVSYCRLIRCSKESAGKKLGTGGRKIGNAHLKWAFSEATCLFLRGNGAAQKYLARLESKHGKGKALGILSRKLGTAVYYMLKRQEAFDMNKFFET

SEQ ID NO: 296650 - protein, 335 aa, unidentified
MNKLQTMKKSQSIGVDVSKRTLDITGYADNKTKHIVINNERQAIRKFLLRLKGYQGPIICESTGWYHYLFSHLCYEADLDIRVINPLLSSKHSKSAIRKVKSDPADSRCLAIMGVTEPNLPARPRLSLNRIKFRRKQGLLHSLEKQSQSMKQRMTEYEACATTLGVELSEVEQLLCVEIKTMDKLKRALSRELEQLAMNIAEEEGSSNYEVFTSVPGFSNVVSSLLDVSLDPNVNSAKSWIGYVGIDISVRQSGTWIGRSRLTKRGNRYLRKRLYQAAWGACLNYPEIRAYYDHLKTGGRKHVEAVIMIARKLLRIAFTLIQKQEVYNPDVAFPG

SEQ ID NO: 296651 - protein, 375 aa, unidentified
MSEITRRLVTRVGVDIAKKVIYLHAVDGSGQRVYARSVKRDQFLAWCQQQLPPGCVVAMEACSGAHHWARQLMAMGFVARLIAPHLVTPYRMEGKGGKNDATDAAAICEAASRPTMRFVPVKTAQQQGVMALHCIREGLKAERTAWVNRIRGVLAEFGLVLGKSPQVLRLALPDVLEDAGNEIDGTARLALQQAYEHWQGLDERMKWCDQQISAHVRSSDAARRAWRITGIGELGASAMTASVVDFSQFKTGKQFGSWLGLVPRQDSTGGKAKLGRITKRGDDYLRTLLIQGAKSAVMSVDKRDDPSSRWLKALIQRVGWQKACVAMANKNARILWAVMTREQGFDAQHVSAKPLAKQKQAKPGAMQAPAQTAAA

SEQ ID NO: 296652 - protein, 426 aa, unidentified
MNTQNTDSIPTPEFAAYVGLDWGDQKHAWAWTVDAAKTAPQAGTLVNSPEVLHAWLQELAQRFEGRPVALAVETRRGPLIHLFGAYPWLTVYPIHPATSARYRTAFKPSGAKDDLPDALLLLELVRDLRHKLRPLQRPEAATRQLAALVELRRDLVDRRTQVLLQLLALLKSYFPQAAELVGQDLTTGLALAFLHRWPDPLALKAARPGTLKRFYYQHSVRSEALVTQRLALVQQLRPLTTDEAVLLPARLHLAALLEQLRTLAKHIALVEHQSHTLFREHSEAYLFRELPGAGPALQPRLLVAFGEDRALYPDPQSLQKYGGLAPVLARSGRQTWVHWRWHAPRFLRQTFVEWAGQTVVYSAWAKQYYQHMKAKGKSHHVILRALAFKWVRILWKCWQTRTPYDEARYLKQLLARNSPHAVKLNA

SEQ ID NO: 296653 - protein, 360 aa, unidentified
MAPTNLTHPAQTDQPDVVIGVDTHKDFHVAVALATNGGRLGECSIPANRLGYAVLQDWALEMGRRPVFAVEGTGSFGAGLCRELMAVGYSVVEINRPDRSTRRRLGKDDAIDAEAAARSLLAGTATITPKGGTHLVEMIRLLKGNKDSASKSRTRAINQMKAILITAPAVLREQLEPLVHDALMATCAAFRVAMVDSPGTAAKKALRFLAQRVLGLEREIAALLDDLNQLTQQACPGLRQTYGIGTDGAATLLITVGDKPERLRSDAAFASLCGVSPLPASSGKTNRHRLNRGGNRQANATLHRIVVVRLRWHEQTKAYASRRLKEGRSKAEIMRCLKRFIAREVFHTLLGRPPVRTAAA

SEQ ID NO: 296654 - protein, 352 aa, unidentified
MNQTQTTAQPKLFICMDVHKKSWTVHFKTDLFDNKTITMPADPCSLFNYVDKNFQDHIVCCCYEAGCCGYWIARALQQHGWEVKVVNPADVPRNNKQDWQKTDKIDSRNLCKHLSDDNLTGIYIPGEEQEQLRSLFRRRTHLSRQLRTIKNHIKSQLLYYGIKLPDQYDNPNWSREMKDWISKLQWQYNSAASCMRSRLKQLDFIWYEELHISNDLRAYCRKYLKKDYYLLKSIPGIGGITAAGILAELGDIRRFNRLDELAAIIGFVPGMYQSSDNKTCLGLTKRSNRYLRSLLVEATWTAVRTDMALQAYYRKHAHKEPNKAIIKVAHKLLNRIRAVIISGIPYQTGLVK

SEQ ID NO: 296655 - protein, 435 aa, unidentified
MRRKAYGGTRVNHVDVAKLLHGKESVGVTVGIDVGKHKLFAVCRWDDGTFERPWRIQNPSALPDLVKLLQHVGGARKVVVAMESSGTYGDALRQALADAGLELQRVGTKAAHDYAEVFDGVPSQHDGKDAAVVAELAALGKGTLWTYQPADAWEQELAYGVDWMIAQRQMVALWQGRLEGLLGRHWPEATRVLKLTSATLLKVLWHYGSPQALAADAEAGTRLRRWGGKLLDARKIERLLADARASRGVRAGDWEKRQIQDFAQQALPARQQGLRGEGRLRVLARGHGVLEAQGQVIGMPTACVLWVSTGDPRPYHAAAAYRKAMGLNLVERSSGEYQGALRISKRGSARSRQWLYFAVLRLVQQEGVRSWYEAKKARDPHAAKSVLVALMRKLALALYQVAVHHQEFDARRLFARIPTGVPTVKESSGKLVVQA

SEQ ID NO: 296656 - protein, 363 aa, unidentified
MGTITIGVDLAKQVFSVCGLDATGRVQQRRELSRAAFQAWLAQVPAGNVIAMEACSGAHHWARRCRELGLEPRLIAAQLVTPFRKSALHKNDRNDAEAIATAARQGNMRFVPVKTVDQQARLSWHRVREGYKTEALAIGNRLRGLLAEFGIVVARGDAALRRALGDSAQMASLPTMLRDVLDDLQLHWHDVHARLNGCDARIAAHARADRACVRLQQMIGVGPLTADALVATVGNGREFVHGRELAAWLGLVPRQQSSGGKQRLGAISCRGDAYLRTLLVQGARSSLQRAMAVSDERSTPEQVWIRDLSRRLPFGKLLVAIANKHARQLWAMLARDEDYDAQAWLRHPMVQRAARKAASTAAG

SEQ ID NO: 296657 - protein, 309 aa, unidentified
MKDFVGIDVAKAHVDVHVSGRGVRWSNDRAGIRRCVKRLEALPPELIVLESTGGYERDLVVALEEASLPVVVVNPRQVRNFGRATGRLAKTDRIDAQLLAQYAATIRPEQRPLPDRRSREMQALVARRGQLVKMRTAEFNRREHAHDQVIARSLTAVINTLDRELSKVEQELAALIKQQPELQRKLQALLSVPGIGPTTAAMLITEVPELGHLNRRQIAALIGVAPINRDSGSFRGKRMTGGGRQAVRTRLYMPTVVAYHHNPALKPFYERLVNKGKTKMTALVATMRKLLSIINAMLAKGETWNPKLA

SEQ ID NO: 296658 - protein, 367 aa, unidentified
MEKIGVVGGRGQEGLPAKRPPDGTPVWMAMDISRSKAVYCLRWAGSEQRRLSTPLGIAHVRALLEHYRGCQVHVAYEACGFGYELAWWLQEHGIARMVIAPSRVERVPGLQVKTDRVDVGKLARKLEKGDLKAIYIPSRPVHEQRQIGRTYAQCLKERKRAQVRIRSLMQEQGRLGPLPAVGWKVYSAWLGAQNLPQSVRLCVQAHEQLRALADQQAQRMKAELYKLARGAEYRPLVKALSAQAGVGWQSAIRLVLELGDIDRFRTTAALPHYLGLTPSQYSSGELDHRGHILKCGPGFLRALLLQCAWSAIRQGHDTELQERFANLAPRIGHKRAIIAVARKLAIKLRGRWRTHLMASKPASAVAA

SEQ ID NO: 296659 - protein, 396 aa, unidentified
MPEIWAGVDIGKEHHHCVVIDADGQRLLSRRVLNDETELLQLIGDVLEISTDVLWAVDLNHGGAALLIGLLLSHGQPMAYLTGLAVHRASATYKGEGKTDARDAFVIADQARVRRDLGLLRPGDEIAVDLRTLTTRRLDVVFDRTRQINRLRAQLLEIFPALERSLDLVNKGPVMLLTGYQTPAAIRRAGAKRIESWLKNRKVRGAATLARTAVEAAQAQQTALPGEKLAAAMVARLAKGVMALDEEIAELDALIEAKFREHPHAEVIRSMPGMGTKLGAEFIAATGGDMDAFGSADRLAGFAGLAPRPRDSGRVSGNLRRPRRYHRGLLRSMYLSAMVSITTCPASKAYYQRKRSEGKGHKQALLALARRRLNVLWAMIRDGQCYQGSPPITAAA

SEQ ID NO: 296660 - protein, 345 aa, unidentified
MNIIRVGVDIAKSVFHVHGVDRHSQTRWQGKYARSKWLDTLSKKVPVGAEIGMEACASSHYWARELQKRGYCVRLIAAQFVKPYVKSNKNDQVDAEAICEAMSRPNMRYVAPKTVAQQDVQAAHRIREELVGQRTAKANQIRGLVGEYGVVAPVGIQQLRRALPEWLEDAENGLSESFRVLLHGLADDLRYLDDRITALDERITESVKQDPVARRLMTLRGVGPLTASALSGALGDGKAFRKGRDFAASLGLTPRQHSTGGRDRLLGISKRGDSYVRKLLVHGARAVLRHVNGKDDGLSHWLKGLVSRKHVNVATVALANKTARIAWALVHNETAYDDKLAAVGT

SEQ ID NO: 296661 - protein, 410 aa, unidentified
MNPLYVGIDVSSKNNVVYFMKPDGSKHSNFSVPNNINGATQLSKRIVSAITSESLSDLIIGLEATSVYGDNLVCFLREDGTLAPFNKKIHVLNPKQVKKFKDSYPDLPKNDYVDSYIIADALRFGRINNEVYMDDYRFKALQTLTRARFFAVQNQTKEKQRFLNYLFMKYSSLAQEKVFSDTFGTTALAVYEEFESPDALAYMDLHELSDFLRKKGKNRFPDLDSVAKAIQKAARSSYRLPKTVNDSVNQVLSLSIRSMRALDEQIKAFDKAIADQMLTIPNTLTSIPGIGPVYSAGIIAEIGDVNRFPDQAALGKYAGLAWTQSQSGDFEAQHTRLIKSGNRYLKYYLCEAAMSIARCDAEYKSFYDRKYKEVNKYQHKRALALTARKLVRLVFRLLKDNRLYIPSDRF

SEQ ID NO: 296662 - protein, 430 aa, unidentified
MKSNTQNAKIEAITEKTLVLGIDVGSKTHYARAFDYRGIEYSKKPFKFSNTEAGFVTFKEWILDLKEKHEKDKVVPGMEPTGHYWFNLGKFLQDNEMKPVLVNPHHVKKSKELDDNNPTKNDRKDPKVIAGLVREGRYMIPYLPDGVYADLRTASNIRFQLQAELTRIQNRISRWFNIYFPEYKTVYGKPDAKSGMLILKHAPLPEDILTLGIDGVNQIWRDAKMRAVGKARAKTLIEAAEHSVGSKEGAISARMEIRMLLEDYESRNIRLQEIMTLIEELVNQIPMAEKLLEIKGVGIKTVSGFLAEVGDISRFNNPKELQKLAGLALVENSSGKHKGRTTISRRGRKRLRYLLFEVAMSLVAKNPEFRELHTYYTTRRLNPLKKMQSLMAVAAKLIRVFYVMLTKGVDYDPKKMVGDIKRPAVYLQAA

SEQ ID NO: 296663 - protein, 418 aa, unidentified
MEVIHERVAGLDVHKKSVVACVRLQSNSKVRRESRTFETTTAGLEALLAWLSEMGCTHVAMEATGVYWKPVWNILSAGDFELILANASHIKNVPGRKTDMKDAEWIADLLACGLIRASFVPDQVIQDLRSLMRTRKQFVREQTRHVQRIQKTLEEGNIKLDAVISDILGANGRRMIEAMIAGESNPQQLAALADRRLKASPTELRDALHGRLTETHRFLLRTHLKQWDELDATIAEIDRQVDVVINGMAQPAVFRALILLLCTIPGVGKLAAITILAEIGPDMSRFRTAGHLVAWSGLCPGQNQSAGKRKSSRLRKGAPWLKTMLVQCAWAAKRQKNSYYRAQFYRLSGRRGPQKAICAVAASILTAVYHMLKDGTQHVDLGADYFDRRPTEAKARRLVAQLNKLGYEVQIQPIAAAA

SEQ ID NO: 296664 - protein, 465 aa, unidentified
MPGSGTNDRSRHGRRRAPLPPELRRVNVNAAGIDIGAGHHYVAVPEGRDPQGRAVRQFGCFTGELCALGDWLWQCGVETVAMESTGVYWIPLFELLAERGFDVKLVDPRRLKNVPGRKSDVLDCQWIQQLHTFGLLSGAFRPDDQICVLRSYLRQRAMLVRYASDHIRHMQKALEQMNVKLTQVVTDITGVTGMGIIRAILGGERDPKRLAALRDERCKNTEETIARALEGNWRSEHLFELRQAVELVAFYEKQLAACDKAIEAHLRRFEDKSGGQALPVWRKPKSRRGDPGFDARLHLLRLTGVDLTAIDGIEAHTALKVVSEIGVDMSRWSNEKCFASWLGLSPGSKITGGKLLSGRTKPCANRAATALRLAAWSLHRNRSALGAYYRRMKARLGPAKAITATAHKLARLIYRMMKFGTTYVDRGQEYYELRYRERILRNVSRRARELGYKLVKSDELSLAPA

SEQ ID NO: 296665 - protein, 346 aa, unidentified
MEIIRVGVDLAKNVFQLHGVDQHEKPAWKRSLRRGQWLPELQRRVAPGAEIGMEACAGAHHWGRELRARGYRVKLMAPQFVKPYVKSNKSDRNDAEAICEAMSRPSMRYVELKSAEQQDIQAVHRVRAELIKQRTGKANQIRGLVGEYGLVAPVRIGHLRKALPQWLEDATNGLSDRFRRLLAGLAEDLRGLDERIEALDEEMAGIVRETPAAQRLLALRGVGPTTATALIAALGTGESFARGREFAVAVGLTPKHHGTGGKERILGISKRGDAYLRQLLVHGARAAVRTAKGKPDPLSRWINALLAHKHSNVVTVALANKTARMAWALIRHDVDYDPRLAAYGSA

SEQ ID NO: 296666 - protein, 320 aa, unidentified
MKNSLSTPVYVGIDVSAEQLAVYILPDEKSFMINTDPESLNTLAKKLVKIAPQIVILEATGGVERSSVSALLQHRLPVVVINPRQVRDFARAKGLLAKNDSIDARVLADFAEAVKPDIRKLPDADQQNLNELLTRRQQLMNMRTSEINRSRRVATTTVKCSCKEHIAWLEKQLSDLDEQLDKLIQSSPAWRVKDNLLRNIPGVGDNLSRTLLAALPELGKLNRRQIASLVGVAPFCHDSGKMIGKRSIWGGRASVRKALYMATVAAIRCNPPIRTFYQRLREAGKPPKVALVASMRKLLTIMNIMIKNNETWKYSHATTY

SEQ ID NO: 296667 - protein, 391 aa, unidentified
MINIGIDVGKFKHCASAIDDKTGEILIKPFFFNNDQKGFNLFYSKTKQYIHRKHSVGMEDTGHYMINLTDFLLDKKFTVRFINPRSTCLRRKELGMSAKNDRKDSILIAEMLSEKKFWRSVTRITQETDKLREITRLYHQLQEQQNEDMNRLQRALDIVFPEVNKLSWTRYSKTYMQFLAKYPTAASIASEDIRNLRNALKTDGCGRQCKLTAEDIKEAAKCSVGEDNIAVALEVQSIIAIINTRKQQIENLENKIEEFSLKLNSPIISIPGISHITGMTIIAEIGDIHDFSDAAHLISYAGMEPLVHQSGKYDAAHMPISKHGSRYLRKALYQAVFTVCKYCPTFNAYYTKKRNQGKTYRCAQGHCVRKLLRVIYKLLESNIAFDENLVK

SEQ ID NO: 296668 - protein, 315 aa, unidentified
MEEKETIFAGIDVGKYNVDMAFGGQGEVKRFKNDDDGIGQILGLLQGRQVGRIVLEASGGYQRQLLAALLGAGWPAVAVNPRQARDFAKALGRLEKTDKVDARVLALFAEKIRPPVRALPDETLQAVVDWLTRRRQLVEMLVAEKNRAHQAQGAVRRDIEQHIDWLKKRIHDGERDLPRLLADCPAWNARVQLLDDQKGIGRVSALTLVACLPELGTLSRKGIAKLVGIAPLSRDSGTLRGKRCCWGGRSAARACLYMVTLVAVRHHPVIRDFYQRLVARGKLKMVAIVAAMRKYLTILNALTRDHLKAIAVQAK

SEQ ID NO: 296669 - protein, 340 aa, unidentified
MQIVVLGIDLGKNSCSVVGMDTTGQIVLRRRMRRESVVKLAAGLPACIVAMEACCGAHHLGRLLQRQGHEVRLISPEYVRPYVKAQKNDDRDAEAIAEAATRPTMRFVELKSEAQLDMQSLHRARDRLVGERTALINQLRAFLLERGIIAPQGRRKLQLHLDIEALPLSSRILALVEDMRSQWADLDRRITTFDEEFVAHARSNESARLLSTIPGIGALNATALTAAIGNAQTFGRGRDLAAWLGLVPRQMTTGGKPRLLGINKRGNGYLRKMLIHGARAALPTLSRTTTPLGEWLRHLLARAHMNTAVVALAAKLARIVWAVLRSGQKFNLGAAAGKAS

SEQ ID NO: 296670 - protein, 325 aa, unidentified
MDHIAIDLGSRESQVCVRRADGEIVEERKVGTRSLGKYLAKRPRSRVVLEACAEAFSVADVATGAGHETVVVPASLAPSLGVGERGVKTDCRDARNLSEASCRMSKLPSIHVPAQASRNRKSICNFRESLVETRTKLINSVRGWMRSEGLGVVRSGAPTSFPGRVRAHAAERSVTLPAYVEPVLVVIDKLTVEISVMDDAVKEAAESDPTCRLLMTAPGVGPTVSMRYTAAIDQVSRFPNAHRLQSYLGLTPGERSSSQRKRRTGLTKAGPSKLRRVLIQAAWAARRYYKDDPVVMWSFEVEKRRGKQVAATGLARRLAGILYAM

SEQ ID NO: 296671 - protein, 338 aa, unidentified
MPLYGGIDLHANNSVVVLLNEQDQRIYHKRLPNDLATIVEQLAPYHADIEGLVVESTYNWYWLVDGLMDAGYRLHLANPAAIQQYSGLKYTDDHSDARWLAHLLRLGVLPEGYIYPKAQRPVRDLLRKRAHLVAQQTANVLSVQNIILRNTGARLSANRIKSVSQAEVDTLLPNADQALAVSSALAVLHCLAEQIKTVETRVRTRIQSTPLYELLQTVDGIGPILAQTILLETGDIGRFPSVGDYASYCRCVDSTKVSNGKRKGQGNVKNGNPYLAWAYAEAAHFARRFNLQVQRYYQRKQAQTNVTVAHKTVAHKLARACYHMMRHQAPFDAAKAFG

SEQ ID NO: 296672 - protein, 400 aa, unidentified
MGETQQFRWFLGIDVSKETFDACCLNRKGKRFFSLSTLMNREGFEELIKQFSSLSIPQEALLVGMESTACYHINLYSFLVSSGYPVIVLNPLLISNFVKLQLRKTKTDKKDASVIAQFLLLNRDSLSQTVISSDISDFRDLSRQRESLVDQMSSTKSEIKRLLTITFPELEQIAGVFSKSMLRLLGQYPSAASIRQLKRSKMAQILIPGSHGKQTRASVDRILKAAQGSVGTSSPTKEIILKQKACLLMQLEQHLQELTDMLIELCQAKIQKDMDILTSMKGIGEKTAMNFLIEMGGDIKQFESHRKLIAMAGLDPALYQSGKIDRKGKISKRGNRHLRRVIWLMTTKVIQFNVRFQQYYSKRIKDGLPYKMAVLATAHKLIRVMFAMLTNRSLFDPRMN

SEQ ID NO: 296673 - protein, 391 aa, unidentified
MVCVGIDVAKDKHDCCILDSEGTTLVDCFTIPNNMDGFKSLLQTIQDCSQKSDKIKVGLEATGHYSYNILGFLLDNDLPVYVMNPLHTNLYRKSLSLRKTKTDRVDAKTIATMLLSDVDLKSYTDTAYHNEELKSLTRYRFDKVQERAKLKQSVSRLVTILFPELEQLVSSIHGTSIYALLSEYPGAKQISEAHLTRLANILVKTSRGHYRKDKATHIRDAARTSIGSVMPAKSLELKHTIKLIQELTSEINEIEDAIRKIMDELKPPILSIPGMGFHSAAMILAEVGDFSNFNSPDKVLAYAGCSPSTYQSGKLTNCYAHMEKRGSRYLRYTLYTATKYVCYWNPVFTEYLTKKQAEGKHYNVALSHATKKLVRLIYALQKSGKAYLAVT

SEQ ID NO: 296674 - protein, 364 aa, unidentified
MKKSSKKQQGATVAESKPTQVVGLDLGDRHSHYCVLSSTGEAMEEGRIQTTRASMEKHFASEPRMRIALEAGTHSPWVSRLLKSYGHEVIVANPRKIPTLTKSESKNDRNDAEQLARMAAFDPKLLHAIEHRSPERQQDLNLIHTRSVLVRARTMLINSARGLVKSAGQRLPACSSEVFPEKAPAAVPPALKAACTPLLEQITLMNQSIAAMDKQIDQLDKKYPEITLLRTVPGVGPVVAACYVLTLDSPQAMETNRQAGAYLGLRPRQQKSGDSDPQCKITRMGNTYLRSLLVQSAQHILGRSRPDSELRRWGLKLAASGGKRGKKRAVVAVARKLAVLLLSMWRNHKKFEPFPQSVAQLTTA

SEQ ID NO: 296675 - protein, 407 aa, unidentified
MVEPQRTVYGGVDTHKEFHVAAVVDDVGRVLGTEKFPATAAGYRRLKRWLEGHGSLVKVGVEGTGCYGLGLTRSLAAGGVEVVEVNRPNRQLRRRRGKSDTVDAEAAARAVLNGEATSIPKAADGIVESIRALRVAFCSTRNARSRISNQIRDLLVTAPNSLRASLEPLDTDERVARAARFRCVNSSDPAETIKVALRTLARQHQMLTADLDALRARLDELTAQANPALRHAVGIGPDVASILLVAAGDNPERLATDAAFAALCGASPVEASSGKHVSHRLNKGGNRNANHALWRIVMVRMTCHQPTKDYVARRRADGKSQRFIIRCLKRYIAREVHYLLLHPQHAATGRDLRDTRRRLGRTQDDAAAALGCHAPRISNIENNKPGNHELTIRYRQWLNDQLATCAA

SEQ ID NO: 296676 - protein, 351 aa, unidentified
MSIIGGLDVHRAQITFDWVDRDSGEAQRGRITPATRAGLRAWLGELPGAEGAFAVEGCTGWRFVAEELQTAGLVAHLAEPAETSSLRGPKRLAKTDRSDARLLRELLEQGRLPCSWIPPAWILDLRTTVRLRKTLVDQRTAWQQRIHAALFHHGLPRPDQELLSRATRGWLEQVPLPPASRQALAVALGQIDHLDAELDPIDQWLRTLARSQPGCRALMTHHYGIGAITAPTILAELGDARRFAGGDQVVRATGLDVTVYASDGKRSPGHLSRQGPEVLRWALFEAAKAAARPRSPDYGYYTQVKARQGGNRATLAVARKLARRVRHTLVALGDAALVPVEGLQLPLPEAA

SEQ ID NO: 296677 - protein, 353 aa, unidentified
MPRKTDTAVVSTIGIDTGKNALHMVGLDERGAIVLREKVSRLRVAARLVNVQPCLIGIEAGMATHYLARELVALGHEVKQVPPTYAKPFRQGHKNDFRDAHAVAEAVQRPSTRCVPIKTDDQLDLQALHRVRSRPIGDRTAVINQLRGFLLEHGIAVRQGHRFLRRQLPQILATRTDVLSPRMVRIARELVADWDYLDERIDRVTDEIEDLAQTDLSCAQLMTVPGVGPIIASATVAAIGNGAAFANGRDFAAWLGLVPKQMSTGDRTILGRITKRGNRYLRMLFIQGARAVLLHPTSWAKHSFGSWLTAAARRLHCNVLTVALANKLARIALTVLFEGRNYETRVAPAPVPA

SEQ ID NO: 296678 - protein, 434 aa, unidentified
MDIVYPRCAGLDVHKKTVVACVRRLGANGKVHKEVRTFGTMTSDLLSLADWLAQEGVTHAAMESTGVYWKPVWNILDEQFQLLLVNARHIKQVPGRKTDVKDSEWIAELLQHGLLRGSFVPPAPQRELRELTRQRMQLMHQKASVANRIQKILEDANVKLASVATDVLGMSGRDMLRAIIAGQENPAVLAELARRKLRAKIPELRSALQGRVTEHHRFMLKLLLDQVTQLEELIERLNQRITATLPASMKEALPQLLEVPGIAERAAENILAEIGTNMEQFPTDGHLSSWVGMSPGNNESAGKRKSGRTTKGNQWLRATLVQVAWAASHAKDTYLAAQYRRLAGRRGKKRALVAVAHSILIIIYHLLKKPGTTYRDLGPEYLDKLQSTQLTSDLVRRLERLGYKVSLEQAEAEGVPQEPADGPTLINVAGVPSP

SEQ ID NO: 296679 - protein, 402 aa, unidentified
MNAVGIDVSKGKSMVAIMRPFGEIVSAPFEIKHTASDINSLVELINSVEGESRIVMEHTGRYYEVLAHQLSEANLFVSAINPKLIKDFDNDSLRKVKSDKADAVKIARYALDKWQNLKQYSVMDELRNQLKTMNRQFSFYMKHKTAMKNNLIGILDQTYPGVNTYFDSPARSDGSQKWVDFASTYWHVDCVRKMSLNAFIDHYQNWCKRKKYNFSQSKAEEIYGKAKELVPVLPKDDITKLIIKQAVNQLNIASATVESLRTLMNETASQLPEYPVVMAMKGVGTSLGPQLMAEIGDVSRFTHKGAITAFAGVDPGVNESGSYEQKNVPTSKRGSSNLRKTLFQVMDALIKTHPQDDPVYQFIDKKRAQGKPYYVYMTAGANKFLRIYYGRVKEYLSSLPES

SEQ ID NO: 296680 - protein, 371 aa, unidentified
MPRPAKKRRLRILKLENPMNSTHYIGFDVHKKHINFCVKAAGGEIVEEGRLASERSALRLWAAALHYRWDGAMEATLFSGWIFDTLKPYATKLDMAHPAMLKAIAAAKKKNDQIDARTIADLVRCNLLPRCHVASPEIRELRRLLRYRNLVVRESVRMQNKMAGLLMESGAPFNKEKLHGKKYFSRLLNQLEEVPDSVKDLLLLSRGAFEMFQSVQKRLIQQLLAYPELRQRVERLTTIRGVGEITALTWALEIGDPARFSSCAKVMSYCGLTTALRSSADKLQRGPLSKQRNGWLQTALIEAAKLAPRWNPQLASLHARELERGHRNRATLAVARKLAAYLLAVDKTQKPFQLRTLAAAPTSIDMMQNSG

SEQ ID NO: 296681 - protein, 343 aa, unidentified
MNSTTIAVDVAKAVFEVAVSEHAGQVRERHRFSRERFRRYLGEQPPATILMEACGSAHYWGREAQTRGHRVVLLPPHAVRPYVVRNKTDRTDAKALLEATRNDEVRPVPVKSETQQALAALHRLRSTWLATRTARINTVRGLLREFGVVIPNGARHVVPALGLLEDADGGVPSLLRPALAEAAREIRELEGRIRTVEHQLDAVAEQTPVVSRLCSIPGVGLLTATALVAAVGDVQRFPSGRHFASYLGLTPRERSTGQRRQLGAISKRGDAYLRMLLIHGARAVLCHAKTKTAPAPDRLRAWALHLERFRGHNKAAVALANKLARIAWAVWKYDTDFTAAPTA

SEQ ID NO: 296682 - protein, 372 aa, unidentified
MNYNTVYVGMDVHKESFTFCAYTIDAEKGSHFQRTEADYKNVLKYLEFLRTVYGNDANFICGYEAGCLGYTLYHQLTEHDVNCVILAPTTMLEQCSRRRIKTDRRDAEIIAKCLAQHNYSPVHIPTATDEETKEFLRMRDDHKLALKKVKQQILAFCLRHNYRYDGNSHWTAAHIKWLKSLKPEALYKEILDEYLLTYTTLSDKLERLDKRIEELASKDEYRESVKKLCCFIGIKTHTALSVLIEVGDFQRFASAQKFASYLGLVPGEDSSGDEQTRLGITKAGNRHVRMLLTEASQCYARGQIGFKSKELKSRQAGNSPQVIAYADKANERLRRRYYKMVLGKSKKHNVAKTAIARELACFMWGMMTDHIT

SEQ ID NO: 296683 - protein, 499 aa, unidentified
MEWDWRASEVGARRKTKQKPAMVEPVEIPDAEHELVVDRGAAIDVAKAAGKVCVRLPGKSGRRFSRVWDVPARTGAITELAEQLVELGIQKVTVESTSDYWRIWYYLLEDAGVDVQLVNSRDVRNVPGRPKTDKLDAVWLAKLTEKGLLRPSFVPPAPIRVLRDYTRLREDLIRERTRYWQRLEKLLEDAAIKVSAVASKLDTLSTRDMVEALIGGERDSRRLADLARGRMKTKRSELITALDGRFDDHHAELARLLLGQIDALTAQIGALSARIERLIDAMDESDHPTGDRGRSGGGGPQVTGAPSTGGQATAPARRTTTAIGVDSDTATVVEPQRLTAVERLDEITGVGQCAAQTIIAEIGLDMARFPTPEHLVSWAKLCPRTIQSGPVIRGGKTGKGNPYLKGALGEAAAAAARTDTFLGERYRRLVKRRGRLKALVAVARSILVIVWQLLSDPTARFHDLGPDYHTSRVVTERKIRNHIAHLTAMGFHVTLQPAA

SEQ ID NO: 296684 - protein, 319 aa, unidentified
MIMTYFGIDISKSWFDCFNSTTGKHHQYDNNVQGWDEFVAILPDDAWVVMEASGPYYLGLASLLADQKIPVSVLNPLVIRRYSQMRLSRTKTDAKDARLIAEYASEQPLSRWSPPSAVNQTMRQIISVSQGLIRQRAMLLGQKEAFTNTPAADPFVMEVLDEQINRITSALCILEARLKKLILAHYRSCFEAITSIPGIGPKTATLLISMTDGFSKFDDARKLASYVGICPRIFNSGSSIKGRGSICKLGSSQLRKMLYMCTWTAKKCNPGCKQMYDRMKQAGKPERVIKIALAHKLLRQAYAVGTSGEHFEKEKALAV

SEQ ID NO: 296685 - protein, 406 aa, unidentified
MDVVYSHCCGLDVHKKNVVACVITPEGKEIRTFTTMTDDLINLVDWIKAKECTVAAMESTGAFWKPIYNLLELEDVKPMVVNAQHIKNVPGRKTDIKDAEWIADLLRHGLIKGSYIPSRDQRELRELIRYRRSLIDERARETNRIQKVLEGANIKLSSVASNVLGKSGRAMIEAMIAGEEDPEALSALAKGRLKNKKEELMRALNGLMGPHQKLLLETQLRHIDFLDQEIKRLDEEVKARMLPFEEVLELLETIPGVGRRTSEQILAEIGIDVEEQFGSAARMCSWAGLCPGNNESAGKRKSGRTRKGNKKLRSALVEAARAAARTKNTYLSSQYHRIAARRGANRAAVAVAHSILTIVYYIIVRRQPYIELGPNYYEERKKETVIKQSIKKLESLGYKVNVESTA

SEQ ID NO: 296686 - protein, 400 aa, unidentified
MVNVVNVGIDLHKTQFTICVREKSGNKFGKYPTTPEGITEFLGIVAAWRRNRKQVRAGVESTGNTRYFRDRLEEAGVKVTVINTLKLKVITESVKKTDKHDAATIAEFLEKDMLPVAQLCSRESEMLRRLIKARTTLVRAQVVLKNQIHGILTAEGMEDVRGTLQSKKGRQQTLNALNECKNGLEAQTLVETIEHLDKSVKDIEKDLVRNTEGDRVVELLKSIPGCGEICASTIRAYADDIKRFASAKKFASYCGLAPWVQNSNETVHHGKITKRGPEELRTAMVQVVMGIRRMKVKTQNWRIMQRYEAMKKSKGSGRAIIATARKIAVIIWHMLTEDVEFDKGMMVDEKLARKSELMKNTVSLALEAVYEKKDQPVSEKITGKRSKKTGVARKEKKKVG

SEQ ID NO: 296687 - protein, 400 aa, unidentified
MSKGQAQVWGGIDAGKGHHWAAVVDEGGTTLWSKKIDNDETAILAALGEILDLADEVHWAVDISGTCSALLLALLAAHGQQVVYVPGRTVNRMAGAYRGEAKTDARDAYVIAESARHRRDFAAIDVPAQLAADLALLTAHRSDLVADRVRMINRLRDVLTGVFPALERAFDYSAHKGALVLLTGYQRPASIRRRGQARLTAWLAKRSVRGADAVAATALEAAQAQQTALQGEDVAAQIVADLATHILALDDRLKRIDKQIGEAFGRHPQAEVIESLPGMGPILGSEFIVAAGGLAAYADAGHLASAAGLVPVPRDSGRRTGNLHRPKRYSRRLRRVFYMSAQTSMTREGTNRDFYLKKRGEGLKHVQAVIALARRRTSVMWALLRDQRVFTPDPPIAGTA

SEQ ID NO: 296688 - protein, 351 aa, unidentified
MDATTVAVDLAKSVFQLAIADGNWRIVHKARLSRAQFQHWFDNRQVGLVIMEACGSAHHWARTLQAEGIEVRLLPPRYVRAYVKRNKTDAADAAALLEAARCADIVPVRIKSIEQQCLQSLHRVRSGWMATRTSRINALRGLCREFGLPVGVGASAGLKQIRTLVSDEQLPQSLRHTLQLLLQEVRELEQRIADLEHQLADIARHSAPCRNLLSVPGIGLLTATALVAATGGSSSHFRDARRFASWFGLTPKEHSSGGSRHLGRISKRGDRYLRMLLTHGARAVLNAAAVAKRAGKQLDPLRAWALNVAQRSHHNKATCALANKLARICFAVLRSQEPYTAGRLAPQFANT

SEQ ID NO: 296689 - protein, 408 aa, unidentified
MQVLYTRCAGLDVHKDTIVACVRCVSPPLHQEVRSFGTTTAELLRLADWLAEHGCTHVAMEATGVYWKPVWHVLEDEFELVLANAAHIRNVPGRKTDVNDAMWIADLLAHGLIRSSFVPPQAIQQLRDLTRTRKQLVREVSQHSLRIQKVLEDANLKLGSVLSDVLGKSGRAMLDAIVAGEADPARLAALAQGTARNKTAELREALRGRITEHHRTMLRLHLQVVDALQRTLAELDAAVGKALAPIRQRARLLTTMPGVSDLTASVVVAEIGVDMSRFPTAGHLVSWAGLCPRSDESAGKRRSTRVRKSGTWIKTTLVTAAWAAVRVKTSYLRAQFLRIKARRGAKKAILAVAASMLTAAFHMLRDGTEYNDLGSEHFDRPDRSKTIRRLIKRLQDLGCDVPVGAHAA

SEQ ID NO: 296690 - protein, 349 aa, unidentified
MDYRVYCGVDFHARQQTICSLTTEDGVMSTHELKHHNQAELRAFYAQFSGPVLVGLEASGYSPWFEQMLEELGHEVWLGDATEIRRRARRRQKNDRRDAELILDLLIHDEFPRIHRPTPNSREILRMLRYRHKLVQMRTIIKNSLQALAIQSGLSLRAKLFTQAGLAQLQSVTMSPMMQYQRDQWLAALEPLNQRIVATAAWLEQQAAADERIERLRTHPGIGLLTALGVVHTLAPVERFSNQRKVAAYVGFDPKERSSGEKKRYLGISKAGPRVLRFLLVEAAQTASRSDPELKRFYLRLLHRHGKPKAKVAVARKLLIRSYILLRDGIDYAEFQRRAVAARLAREGA

SEQ ID NO: 296691 - protein, 354 aa, unidentified
MKVPENSVSFFDNKDLYVGIDVHKKRWVVTIRTYDLELKTFSMQPYAEELERFLIENYKGAHFHIVYECCFSGFWIYDHFHEKGYDIIVTPTNRIYRDGSIVKTDKIDSRKLAFQHSRGLLREVKVPTMKIREYRSLFRIYDKEKMREGQILRQVRCILECKNHELKWEKWNKAMIEKLKEVRFQEGIFNQKFVSLLKEYEYVKEQIKDTEKRIKEISEDEELGVKVKRIEKINGIGIVSAVRFAVYLFDQKMRFESGEKLVHYVGLTPGEQSSGENIIRSRTGLIGNRQLRSIIIQLAWVAVRKDGSLLNKFERVYKNSGSKQKAIVAVARKLMMKVYAITEKEEEYEINKAA

SEQ ID NO: 296692 - protein, 338 aa, unidentified
MIVIGVDVHKHSLTAVAVDELGRTLAERSGPVDDEVVAWARSLGEETLLWAVEDCRHVSRGLEHALLAAGERLVRVPPRLTAPQRRGSRVRGKSDAIDALAIARAALQEPELDRPRAGEETLRELKLLVDHRDDLVAERRRCQQRLRWHLHELDPGLRVPLGALDRPLWLERLGRWLARREQTTQVRIARDLLGSCRALSRSIGELERELQARTQAIAPRLLELAGCGPLSAAKLLCEIGPIERFRSDAQLARHGGVAPLEASSGKHQRHRLDRGGNRQLNCALHRIAITQGRVHAPAQAYLERKQNEGKSRREAIRCLKRQLARTVYTTLRTESALT

SEQ ID NO: 296693 - protein, 451 aa, unidentified
MKKNVSMEVINPHAAGIDVGSRSHFVAIGQAVDEVREFGVYNEDLKAVAEWLLENQITTVAMESTGTYWQSLFAVLQNAGLQVILCNGKFTKNIKGKKTDVQDCQWIQKLHTIGLLSGSFLPDEATEQLRTYCRHRGNLIDNAADTTRKMQKYLRLLNLRLDVVVKDVTGLTGLAIIEAICKGEMNAEVLASLRHGNCKKSEEEIAKALQTNGRKDYLFALKHEYKMYQDLQSAIKDCDNQIEKVLSEQINNDDDKRQHFIDKKVHKRINKNTPKNIDINLMSYQYFEGVDLLAIEGVSHSTVLSVMSEVGLEGLKKFATAKQFASWIRLAPNNKISGGKVLSHKVPKGSSRLKIALRNAANAIGNLKDTPLSNFFNRINYRKGRVSAISATARKLAVIIWNMVVKKQQYNNEQGYEFLDQKRKRKVQEMRKLIHKFDIKTNELGLQLNCL

SEQ ID NO: 296694 - protein, 355 aa, unidentified
MTSEKYIGLDVHQATICVAVMDPKGKVVMESILETKATTILEFLAGLRGTLSVTFEEGTWAAWLYDLLKPRVANLVVCNPRKNALLKHGNKSDKIDARKLADLLRLNDLEPVYHGETGVRMLRELARSYLTIVKDVSRVMSRLKAIYRSWAIPCAGRDVYYTRHRGEWLGKIPEAGSRRRAEQLYQQLDMLQPLRQQARRELLAESRKHTITAKLRQIPSLGPIRSALAVALIRTPHRFRTKRQLWTYSGLGLETRDSGEYHYVQGQVRRRKKQVFIRGLNKDHNHDLKGLFKAAATRASVRPGPFQDFYQRSLAKGIQPTMARLTLARKIAAITLTLWKKGENFDAEKLKAQAA

SEQ ID NO: 296695 - protein, 444 aa, unidentified
MKVIYKQVAGLDVHKKTVVAARMRVTEEDRVEWETKTFGTTTPDLLEMHDWLSEWELTHVAMESTGDYWKPVFNILEDSFEVWLVNAEHVKHVSGRKTDVKDSEWLAELMLHGLLKPSFIPPKPQRALRELTRYRTRLVEERARVVNRVQKLLEGANIKLSSVASNIMGVSARAMLEEIMAGQTDVELIADLARGQMRSKIPELEKALTGIVQPHHRFVLAQQLDHIDFLDEKVETLSLRIEQQLETMNWPDEPSPPDAGEGAEEGTAVADESELPVTWNAAVALLDTIPGVNRRVAEVMLAEMGLDMSQFPTADHLASWAGLAPGNHQSGGKRYPGRTTNGNKPLASIMVQAAWSAVRIKDTFLKSRFHSLAARRGKKRAIVAVAHSMLVSAWHMLADRQPYQELGGDYFDQRKKETKVSYLVRRLEKLTGGSVSIELQSAAA

SEQ ID NO: 296696 - protein, 349 aa, unidentified
MRLFIGLDVSLAKTAIGVISEHGKIIKEAEAASEPEVLVRWLGNLDGSIAAIGLEAGPLSQWLNRGLTEVGLDAVLMETRQVKGALKAMPIKTDRRDAEGIARLLHLGWFRPVHCKSVSAQEVRAVLGPRKSIQQSMIALEMSLRGLLRNFGLKVGAISRGRFDSRIRELADGNAMLEAATTPMLRARVSLRQELAVLEKKVRHLAREDPVCNRLMTMPGIGAVVALTFRSAVDDPARFASSKKVGPWVGLTPSRNQSGERDVSGGITKAGDVNLRRALCQAATVMMNRGRSTWLRTWGPSSHNAVAASAPWSPWPVVSPSYSIGSGSMASSPAGCCAENGLTGCYPTR

SEQ ID NO: 296697 - protein, 341 aa, unidentified
MSEVSTIGLDLAKHVFQAHGADASGEVVFRKRLRREKVLEFFAGQPACLVAMEACSSAHHWARELARLGHVVRLIPPTYVKPFVKRQKNDTADAEAICEAAQRPTMRFVAVKSETAQANAVVFRARDLLVRQRTQAINALRGHLGEYGLVVAKGPGHVSKLVEHVENPCSGVPDAARLVLRTLVEALRFLSERIDLLDREIARRARDDDEVRRLTSIPGVGPFTATALAALAPPADAFRKGRDFAAWVGLAPLQHSTGGKQKLGTTSKMGERTLRRLLIIGASSVVRRALRQGIAAVSWLGRMLARKPRMLVIVALANKMARIAWALQAKEEVYRAPTVVA

SEQ ID NO: 296698 - protein, 338 aa, unidentified
MKVYAGIDLHSSNNYLGIIDDNDKRVYGRRMSNDLNRVLIALEPFRDRLEGVVVESTYNWYWLVDGLQAHGYNVHLANPSAIKQYEGLKHTDDKWDSFWLAHMYRLNILPEGYIYPKAHRPIRDLLRRRLLFVRQRTSQILSLQSMVTRNLGFKISNNNIKKLKVKDAQGLFDSSNLAFMAGNSIATIEFLKKIIKGIESRVKSQVKLRKEFMLLQTIPGIGNILALTIMLEIGDINRCKKVGNYASYCRCVKSQRLSDGKKKGENNKKNGNKYLAWAYVEAANFAVRHNAKAQRFYQRKKAKTNGIVAIKALSNKISRASYYIMRDQVPFDEKMLFG

SEQ ID NO: 296699 - protein, 400 aa, unidentified
MISIGIDISKEKSTVCMLRPYGEVVEPPYDVAHNESELNALIEHIQSFDEDVKVVLEATGGYHHIVVSKMLSAGIFTVVVNPYIMKKYCAATLRKAKTDKIDSVKIAHYGIDHWFSMTAYCPPDEVYAELKLLGRQYEQYVRLKVSCKIHLADLLDGVMPGIKKILTGNVPAFSTKDKLCDFVEKYWHYDNIKKLSEKQFLASYEKWSKKKGYRYNESQAIAIYQLSKNNIPTLKSSTQSTKMLVLQAVKSVRDAELTLSLIISQMQEIASALPEYSVVNEMKGVGTVLSVRLIAEIGDVRRFHNGSALVAFAGIDAPPYESGAFVGTNRHISKRGSPTLRKIGYEIMHALKVTKPTEDSAVYDFMIKKENEGKPKRVAKIAGFNKFLRIYYARAMEVYC

SEQ ID NO: 296700 - protein, 341 aa, unidentified
MGNISIIGLDLAKNTFQVHGAHADGSVGFRKKLSRNKVLMFFAARPRCMVAMEACASCHFWAREIGRLGHDVRMIPPIYVKPFVKRQKHDAADAEAISEAASRPTMRFVAVKSEEKQALGMAFRTRDLFVRQKTQTINAVRGHLAEYGVIAPKGTAHLERLNRVVADPDGGLPVEVVSLARLLLDQIAALKEKIDVLEMEIRARVRHDDVASRLTTIPGIGPICAAAMEAFAPPPETFAKGRDFAAWLGITPRQHSSGGKERLGKTSKMGQRDLRRLLIVGAMAVVRWAVRKGAAEGSWLARMLQRKPRMLVAVALANKMARICWALMAKGGIYRDPAAAA

SEQ ID NO: 296701 - protein, 351 aa, unidentified
MPRRSTVHAVTVIGVDLGKNTLHLVGLNSFGAIVLREKVSRGRITSRLANLPPCLIGIEAGMATHYVARELAALGHDVKQVPAMYAKPFRQGHKNDFRDAHAVAEAVQRPTTRFVPAKSDEQLDLQALHRVRSRLVSDRTAVINQIRGFLLERGVIVRQGLRFLRHSLPDILAKRTDVLSLRMVRIVADLADDWRRLDERIETVTDEIETIAKNDDNCRRVMTVPGVGPIISSAMIAAIGNGVAFARGRDFSAWLGLVPKQMSTGDRTILGRLSKRGNGYLRMLFMQAARVILLRPRNWPKHSFGGWLARAAQRLHPNVLAAALANKLARIAWTVLAQQRSYEARVSKAAA

SEQ ID NO: 296702 - protein, 343 aa, unidentified
MEEISIIGIDLAKNVFQLHGASADGAVLFRKKLSRPQFARFMAEHPPCIVAMEACAGAHHWAREMTRHGHQVRLIAPHYVKPFVKRQKNDVADAEAIVEAALRPTMRFVEPKTADQQARAVVFRTREQLLKQRTETINALRAHLYEFGHVAPEGIVHLPRLAEVVDDPKSDLPELARDICRLALEQIGHVTARINALKATIMTMSKEATMPRRLQTMPGVGPIGALAIETFAPPMDQFRRSRDFAAWLGLVPRQHSSGGKQRLGKTSKMGQRDIRRLLITGAMAVIRWAVRRGAPTGSWLARMLERKPPMVVAVALANKMARGIWAMLTRGEDYRDPMIAGAA

SEQ ID NO: 296703 - protein, 349 aa, unidentified
MGIIGGLDVHRSQITYDWVDPDSGQRQHGRLAPAHREHLRVWLAQFAGRQAAFAVEGCTGWRYVVEELKRVGIQAHLAEPADTSAARGPKRRAKTDQLDARHLRELLACGRLPESWVPPAQVLEVRTQVRCYKALADEHTAWLQRAHATLFHHGVPAQRRLLAPDRRARLERGTGLSPAAHQLVTVALRTLDHLDAELDLLRRELVGFARRQVGCQALDALYGIGPVTAVAIWAELGDVRRFTSSRFALRHTGLDVTVYSSDGKRSPGHLARQGPPVLRWALFEAAKCAARSSAPDHAYYLQVKDRLGGNRATLAVARKLTRRCYHTLAALGGQAYAPPSPGHDLQQVA

SEQ ID NO: 296704 - protein, 438 aa, unidentified
MSNKVIFNLDKLFISVGIDVSADFSWMSIALPNQQFVGKPYKILHNSMNSLTTAVSKIKEAEELYSLESRIFLESTGIYHYPLFCYLRDKGFNCSVINPIITKNSTNINIRKVHNDRFDSKKAALVGLKPDLKVSLMPSDLVLNCRNLSREYYDLMDNRSAYVNKLQGELRMAFPQYLGIFSKVTTHTSLTLLETYTSPSAFIAADKQEIIDTIKSTARFGLAYAQNKYNAIIKAANEAKEFGYIIDSNIKRIRLYISFIRKYDEEINSILQAMHELVNANEDTDFVKQIHLIETFKGAGFLSAVSLMGEIGDFSAFSKPKQLFAYFGLDPAVKQSGKFEGTKIQMSKRGSAIARRVIHTLTLQSISTSCTGEAKNPVLRDYYLKKCESKPKLVAMGAVSHKVCNIIFAILRDNKPFEIMTPQEHIKQYNAAKCDIAA

SEQ ID NO: 296705 - protein, 429 aa, unidentified
MTRISVGVDVSKNRSTVCIMDQDGKVIMRPFLVWHSTEELDFLADTLKRLNGEVRVIIESTSIYQYPIALHLKEKGIFISIVNAYKVKKFANTDFRGGKTDKKDSRTIASYGISYWDKLVEWQIPKDTYFNLDLLNRTYMNAKKHRQIILQELQHYIDCAMPGMDKELHSLNLSTKKDFMLDFVEKFWHRDEIVNMTEAEFTEVFTAWAKKKGYRPVEGKAAKIYAIAKSCIPYYPANPTVKTILQCIVDKLSGVNRTLVTIVTQMIEEAKKLPEYQIVREMPGVGDPLAARFFSSAGDIRRFKNSKALVAYAGIDSPPDESGDFSSTHRHITKKGSKVFRDTGYEIMMALRAQKRTWEKVRKNPDVYDYMLRKEAEGKPPKVAKIAALNKFLRIIYARIKELYDNMALAERAKTKTRSKTRAKTKVTA

SEQ ID NO: 296706 - protein, 309 aa, unidentified
MFVGIDVSKARLDVAFRPEGTSFEASNDEAGIGDCVRRLQALRPELIVVEATGGFETALVAGAAVVGLPIVVVNPKQVRHFAKAIGRLAKTDSIDAEVIAHFAEAVRPEVRPIQNEAGELLTALLSRRRQVLDMVVAENNRLTTTRERQVRQRITHHLHFLKQELRELDKDLDKEVRSSPAWREKEDLLKSVPGVGPVLARTLLAELPELGRLDRKRIAVLVGVAPMNNDSGSLRGQRRIQGGRAKVRNVLYMAALVASRFNPRLKRFYEGLRASGKTGKVALVACMRKLIVILNALVRSGERWNAEAT

SEQ ID NO: 296707 - protein, 421 aa, unidentified
MTPTSHDTFAAFVGIDWADAKHDICLQAAGTAKRECFQLDHTPEAIEAWVTTLRTRFSGQPVAVCLELTKGPLVSALRKYDFLVLFPINPLTLARYREAFTPSRAKDDPTDAELQLELLLTHRDKLQPLQPQSPAMRALEQLVEHRRRVVGDKVRITNRLTSTLKNYFPQVLQWFQDKDTHLFCDFLSRWPTLKAAQLARQSTLETFFRDHHVRVGDVLATRIHAIKTATPLTTDEGVIAPNALLVQALVSQLRVTLDAIEAFDHAIAQRAQRHPDFPLFQALPGAGPVFASRLLVAFGEQRERYTSATALQKYAGVAPVTERSGKKAWVHWRLQCPKFLRQTFVEWAAESIRHSFWAQVYSQQQRDKGNTHQAAVRALAFKWIRILYRCWQDRTPYDESVYLQALHRRGSSLIHNLAEVS

SEQ ID NO: 296708 - protein, 291 aa, unidentified
MSQNPITAIATVGIDIGKNSFHVVGLDQRGAIVLRQKWSRGQVEARFANMPPCLVGMEACVGAHHLSRKLKAVGHDARLMPAKYVRPYSKGQKNDFRDAEAIAEAVQRPTMKFVATKTADQLDLQALHRVRERLVSQRTGIINQIRAFLLERGIAVRQGQRFLRAELPRILATPADVLSPRMVRLIEDLGSDWRRLDERVEGLSGEIAAVARQDADCERLMSVPGIGPIISSAMVAAIGRGDVFSKGRDFGAWLGLVPSRHRLETAPSSARYRSAEIAICASCSCRLPGSC

SEQ ID NO: 296709 - protein, 400 aa, unidentified
MDRNRTVAGLDVHKDSIYLCIMGHDEVIIFEKKYGVLTPDLRQMCNDMVERGVTEAAMESTAVYWVPVWNELCESMELKLVNPYFIKQLPGRKSDVKDAQWIAECLLKNLIKGSFVPEPIVQDMRKLNRRIMDLNEDMNYNCNKLDAAMQRSGFRLSNYVTTIKSKSYQKVLHAIIDGTTDPDELVKMVHGRTVNKHGRDTIRAAVTGLFSRIDITIFRQTKEVIDTIERQIEVCQKELTTLCEQYFPEQYRRLQTIPGVKERAATAIIAETGVDMKMFATAACLVGWCGLKPRNDVSNGRYKSRKVTHGNKYLRQILIEIAWVASRTRNCFFFNFSYIQTTVKKKSKMKIQVAIARKILVAVWHMLSKEQDFIDIYLKRLEEQKKMEEQMKRLGSTVIR

SEQ ID NO: 296710 - protein, 337 aa, unidentified
MEPTTIAIDLAKRVFQIHFVDPNGTIHRKVLTRVQMLPFFANRPAARIVMEACGSAHHWARQLIALGHEVRLIAAQFVRPFVKSNKNDAADAAAIWEASLRPGMRFVAVKSADQQAMLALHRMRQQLVRIRVMQVNQLRGLLYEFGVVLPQGRRPSIQAAQAAIATLTDQLPGMLIDSLCDQLSRLHLLDDQIQRIEQRIIEWRRGDEACRRISEIPGVGPLTATAAVSVIGQARTFRSGREFAAYLGLVPRQNGSGGKVKLGGISKRGDVYLRTLLIHGARAVISSSKHLPAHMRDLLARRPTNVVAVALANKMARTIWALLAYGRTYQPAAALPS

SEQ ID NO: 296711 - protein, 347 aa, unidentified
MAIVDSARLVVGGVDTHRDSNVAAVVDMYRGLLGVESFPTTADGHRALASWMTAFGAIERVGIEGTGAYGAGIARHFIAAEVAVIEVDRPNRQKRRQHGKSDQLDAIEAARGTLSGRCAGRAKSGNSHAEALRALLVAKRSARSTRIRTLVQLRHLMFTAPDELRARLGGLSATQLVNDSAKLRPHAGGDIVVQATKTTALILARRIHALDAELATIDEQLGPIVKAAAPDLLNIFGVGIDTAAVLLVTAGDNPERITSEAAWAMLCGVAPVPATSGKIDNRFRLNSGGDRHANNAIWRIVITRLGQHDPRTVAYMTRRLAEGKSKRSIIRSLKRYVARETFQALAR

SEQ ID NO: 296712 - protein, 364 aa, unidentified
MEQITRGECGRVVVRVGVDLAKRVIQVHAVDAAGQLVTGRALARDRFIGWCAQLPAGCVVAMEASSSAHHWARKLCSLGLDARIIAAHLVKPYRKQGSSGKNDANDAAAICEAASRPSMHFVPIKSVEQQSILCVHRLREGVKEERTACINRIRGLLAEFGLVFAQSPKVLRLVLADVIEDASNEMGTLARLTLQRAHAQWRELDEHLAWCDERIAEHARTNGQVKTATTLLGVGPLTASAVVATVGDFRQFRNGAQFGAWIGLTPKQHSSGGKTRLGRITKRGDTYLRTLLIQAAKSAVLTAHRRSDRISRWLCTLRERSGWQIAAVALANKNARILWALMTKGEAFDTNHLSVKPGMSPQPT

SEQ ID NO: 296713 - protein, 399 aa, unidentified
MIENYDSVDVFVGVDVGKGEHHAVALNKMGKVVFDKALPNDEGKMRAVLQTLKQHGTVLVVVDQPATIGALPIAVAQAEEVLVGYLPGLAMRRIADLHAGEAKTDARDAAIIAQAARTLPHALRSIQLADESVAELSMLCGFDDDILGQMTATSNRIRGLLTQIHPALERVVGPHLDHPAILDLLQHYPSPAAMKAAGTTRMATRLLKLAPRMGRRLAEEITQALSKQTVVVVGTNAAATVLPRLAEQLAALRRQRTEIAVVVEKLVEDHPLSPVLTSMPGVGVRTAARLLTEVAGKHFQSSGHLAAYAGLAPVTRRSGSSIRGEHPSRRGNKILKRALFLSAFAALRDPVSRTYYDRKIAQGKRHNQALIALARRRCDVLFAMLRDGTLYETEHRLTA

SEQ ID NO: 296714 - protein, 379 aa, unidentified
MKTNSDTTTKLYVGFDVHKEKTSLAIADPGATGEIRSYGEVATSQPAFERTLRKLAKARGVAMGEIHVCYEAGGCGMWIARMLVRLKVRCTVVAPSLIPSKAGDRVKTDKRDAIKLVRLLRAGELTAVHIPDETDEAIRDLCRARVDAMDDLRRAKNRLLAMLRRLGFRYTGKTHWTEAHKRYLRDLRLPFACHRIIMEELIGQIDQLVGRLERLEGHMELMCAEWVKKPVVEAIMTLRGFRIIAAMTVVSEIGDFVRFTHPKQLMGYLGLTPGEHTTGGKRKQGSITKCGNSHLRWMLVECATHYQAEPRASSALSRRQEGQPRWLKEISWKAQNRLHLRFTKLRQRLMHHNKIKVTVARELAGVLWEIGVKMQTQTA

SEQ ID NO: 296715 - protein, 369 aa, unidentified
MGEYSEAFVAFDVAKIKHAVAVAEGGRTGEVRFLGEIENREGPIERTVKKLAGRHGRLHFCFEAGLTGYGLYRQLRALGHDCMVVAPALIPKRPGERVKTNRRDAVTLARLHRAGELTGVWVPDAVHEAVRDLVRARQAAADDLRRKRQQLLSFLLRHGRIYSGSGHWTLAHRRWLANQAFEHAAQQIVFQDGIDAIEDAIARLRRLEEQLVTIVPSWSMAPVVEAYQAMRGASFLVAVTFAAEIGDVRRFDNPRQLMSFLGLVPAESSTGDTVRRKGLTLAGNRRARRALVEAAWTYRYPARVSETLRARLEGLPKAVRDIAWKAQVRLCARYRRLSATGKKLPVVVAAIAREMAAFLWAIGREVAPG

SEQ ID NO: 296716 - protein, 353 aa, unidentified
MKSEKYMGMDIHQAMTVVAVLDADGKVILETMVATEGPAILRLVESLSAPLRVTFEETTQAKWLYEVLRTHVTEVIVCDPRRNKLLGEGSKTDKVDARKLADLLRTGMLRSVYHGHEETRKLKELVRAYETLSIDTQRTMTRIKAIFRGHGIRTPGSGVYQLKQREQWLKMLTEPGIHQRAAWLYEQLDQLRALRRKIRQTMLAESREHRAVGLLKTIPQLGPIRAAFIVATVDTPHRFRTKRQLWSYSGLGVVTHMSAEYEMREGQITRRRKPIATRGLNPNCNRRLKDTFISAAIGGIRTEPYRSYLGRLQDGGMRAEMARLTLARKIAAIALTIWKKGETFDPKKLNWMT

SEQ ID NO: 296717 - protein, 344 aa, unidentified
MKSYVGLDVSQKSTSICVIDAYGECVWEGVCASEPAEIARTVCERAPDAETIGFETGPLAVWHWHALRDYGLPVVCLHARHAHAAIKMQVNKTDRNDAYALAQIVRTGWYRAVEVKSMDTHRIRLMLTARARVVSMRTTLYSQIRGLLKTFGIVLRPAKGGSFEQLVRQAISSDAQLQGVIGSLLTIWCSLTDELRIYDREVERAARNHEVCRLLMTTPGVGSLTALAFVTAIDNPCRFRRSIDVGAYLGLTPRRYQSGEVDRVGRISKCGDRMARSLLFEAAHILLTRIKTRSALQTWGQALSRRVGPKKAKVAVARRLAVTLHRMWVDGAEFAPALGATAHS

SEQ ID NO: 296718 - protein, 344 aa, unidentified
MTRKLMAGIDLHSNNLFCAIVDLDGKRVFEKKLPCDLETVARALKPFKGRLEKIAVESTYNWYWLVDGLQDHGYPVVLANPAAMQQYDGLKHADDKSDGFFLAEMLRLNILPTGNICDRKVRPVRDLLRRRMGLVHKRTSLILSLKSLHTRMTGRDLSTGRIKALEPQEAKKLFEHPADQLITRVDLQLVEQLGQSIRAIEALILAQVKSLPDYQVLQTMPGVGKILGMTITLETVDPKRFASPGDYASYCRCVDSRRFSNGKKKGENNGKCGNKYLAWAFVEAANLAQRHDTACRRFYDRKKAQVNGIVATKALACKLAKAAWHMMRHNSQYDAGRMFPGVKK

SEQ ID NO: 296719 - protein, 389 aa, unidentified
MLIQPIAPVAKNEFAPVFVALELSRSKWLVGVGTAQKWTVRRHQVQGGDLDGLLELLGRISAGEEKRSGLPVQVHVCFEAGRDGHWLYRALKAAGYDVYEIEPASVSVDRRARRAKSDGVDVDKLVRTLARLLRGEFDACRVVEVPSEAEEDAKRPHREYERLVKEQTSHRNRVKALLFAQGIREFDPMASGRLERLAALPIMPRLKAELSRECRRLARIIDDIAEIEAEMKAEIVPSKKARPASAASSTPDPAQTKVAQLYRLKSIGVHFSTVLVREVHYRTFQNRRGVGQYIGLAPSPFQSGDMARDQGIAKAGNKRARKAMIELSWLWLHHQPDSALSKWFRRRGGDQKGRVRRIAIVAMARKLAVALWRYLETGLIPEGAVLKRA

SEQ ID NO: 296720 - protein, 337 aa, unidentified
MEVYAGLDLHSTNTYVAMIDRENKVLYKQRHRNELPSILSALDPFKRDIRGVVVESTYNWYWLVDGLMGQGYPVRLANPSAIKQYEGLKQVDDKRSSLWLANLLRLGILPTGYIYPKEERPTRDLLRKRLHLVRHRTSHILSVKNILARNLGVGMRSKDVKELTDAQVKALFPDKEMRLAVMASVDLIRRLQENIDDIEKVVKKKVKLKEEFAKLLTMPGIGEILTLTIMLEVGHIDRFPTVGDYSSYCRLVKSTRSSNGKVTGHGNRKSGNKYLCWAYIEAAQFARRFHDTVRSYYERKMAQTNRIVAVKAVSNKLARASYFVMRDRVDYDQARLF

SEQ ID NO: 296721 - protein, 420 aa, unidentified
MKQKKVLKKVVRGLPKNLQHINVHAAGIDIGSRSHFVAVPEGIDEMPVREFSSFTGDLEQMAAWLISCGVTTVAMESTGIYWIPAFEILERHGIEVKLVNARHVKNVPGRKSDVLDCQWLQQLHTYGLLRGAFRPDAQVCTLRAYVRQRAMMVRSAASYIQRMQKALSQMNLQLHNVVTDITGLTGMRIIKAILSGERKPEVLAAMRDRRCKNSVATIARSLQGSYRPEHLFSLQQAVEFYEFHQEKISACDLQILEHLKSFDSQNDKPPKNVEEALQLMSGVDLTSIDGIDTNTALKILAEIGTDMSRWKSAKHFASWLGLSPGTKVSGGKVLSSATKPVANKAAAALRIAAFTLLNSKSALGAYLRRQKARLGAPKAITATAHKLARLVYMMLKQGTAYVDAGQEYYEKRYRSRVIQI

SEQ ID NO: 296722 - protein, 334 aa, unidentified
MMIIGVDYHPSFQQIAFLVEETGEYDERKLHHSEGEAERFYRDLHARGIHVRVGMEATGFSRWFERLLAELDFELWIGDPAEIKAKRVKKQKYDREDARLLLRLMRENNFPKIWVPSAENRDLRQLLWHRHRLVQMRTRIMNQLQALAMNEGKRWKKKLWSAQGRTELEKLPLALWASRRRRELLELLDRLDPSIEELSKAVEREARKRPEVLRLMTHPGVGALTALAFVLIIGTTERFQRGKQIGTYVGMIPSEDSSAGKQRLGHISKQGNSLLRFLLVEAAQAAAPSTRIGDVGTCTWRCAVTRALLRLRWGAGWEFACTGCGGMDVSIRHR

SEQ ID NO: 296723 - protein, 329 aa, unidentified
MNRSERQPQTETPQNFVGIDISKDSLDIATRPIGASWTVDHDARGVATLLDHLQALCPTLIVLEATGGLEVFLTAELAAAGLPVVVVNPRQVRDFAKATGKLAKTDQIDAKVLAHFAEAVRPPPRPLPDASTQALSALITRRRQIVQMLVAEKNRLGSAPKPVRTDIQKHILWLERQLARLDEDLTNTIRQSPIWREKEDLLQSAPGIGPVISRTLLADLPELGTLNGKQIAALVGVAPLNHDSGKGRGKRITWGGRASVRCALYMSTLTAVRYNPVIKAFYERLQEVGKPKKVALTACMRKLLIILNAMLKHRTPWQTHLTIILAPTP

SEQ ID NO: 296724 - protein, 407 aa, unidentified
MRVYLGIDWSQLKHDYCLLDEQGRAIQQGTIPHRPAGLESLDQARGRVVGSAAECWVGLETAHTLVIDWLWARGYSQVFVIPPGAVNRARGRYRQTNAHNDQSDAYVIADMVRTDQARLAPWHPDSALTRQLRAKVGLLGYLTREIVRTGSRLEAVLARYYPAALHVFKNPRVPLNLQFIQAFPTPVAAEALNRDEFKAFLRARQYRQPEPVLLAAYARLREPYPEADPATILAYRDEAVLLADSLLAQLEHKQTVLHSLAEPFAQHPDHLIFASLPGTGEYLGPALLAKFGDDRARFPTAASVQALAGTCPVTEASGKRRQVKFRHACDHEFRQIVVQWAKASLGQSVWAAAYSEQLWPRCHSTSHVYRCLANRWLAIAWKCWQTRQPYDESYHLRQRAQRSQPRS

SEQ ID NO: 296725 - protein, 353 aa, unidentified
MTSLTDLVDVVIGVDTHVHTHSAAAVDAHTGAVLGEITVEATADGYQRLAEFADEHLTLRAWAIEGTSGHGAGLARHLAHREELVVELDRPERATRRNGAKSDPLDAIRAAREALARTRLGAPRSSGQRQALSVLLTARRSAVDAATEAQQQLFSLVIAAPETLRARFRNQKLPAMVTTAAALRTHRSWDIETTTTVTVLRELARRTQALRAEAAEHKQAILAIVRDWRPDLLAQPGVGPIVAATVLCAWSHPGRIYSEAAFAMLAGVAPIPANSGQTTTRYRLNRHGDRQLNRALHTITLSRQRYHQPTRDYTARRTAEGKTSREIKRCLKRYIARDLYRLLENNTEPLDRP

SEQ ID NO: 296726 - protein, 405 aa, unidentified
MDVVHERCCGLDVHKKTVVACVLTPAGRQTRTFGTLTDELLELGDWLVQQGVTHVAMESTGVYWKPVYNVLEGQELTLLVVNAQHIKAVPGRKTDVKDAEWIADLLRHGLVRGSYIPDRPHRELRELVRYRRSLIQQRSQVVNRIQKVLEGANIKLSSVASNVVGVSGRAMLEAMVAGSDDPQALAELAKGQLRDKRPALERALHGLVGPHQRLLLSSQLRHLDFLDTEVASVSEEVATRTRPFEEVIVRLDAIPGMGRRSAEDVLAEVGTDMGRFPSAAHFASWAKLCPGNNESAGKRKSGRTGHGNRWLRSTMVEVARAAAHTRNSYYAAMYRRLASRRGSPRAAIAVAHSILVTIYFLLRDDRTYADLGSNYFDERTREYIVRQAVNRIERLGLKVTVQQAA

SEQ ID NO: 296727 - protein, 358 aa, unidentified
MNKLTKIDKFFNNVDFTADDQLFVGVDVHKRSYNVALYLNDAPALDFVMPAAKEKLSQKLKKTNSALKRVAYETGPTGYGLARHLRQYDLPVTVAATSRIPRSSGDDKTDKLDSRKLAEYAAKGLLKPVAVPTLKQEADRQFYRMRHRQARNRSKVKTQIKSFLLMHGIDEPAGLSSWSCNSVDQLRTLPLRKTLRLSLDELLGDLDYYSLRVKTLDRSLKEHLDKGLLARQISILKTHPGIGVVVSCQFAVELFHYRDFGSTRELSRYLGLSPRIHQSGERSVSGGINKVSNSRLRSNLVQAAWQWIRVDIEAKKTYLRLLNNCGGIKQKAIIAMARKLSGHLWTMLVNDEPYDPNK

SEQ ID NO: 296728 - protein, 421 aa, unidentified
MSKRRYATVNCKQVDWTAMAGEIAGQRAVLAVDVAKVKFVAALQVEAGRTLVRVHWEHPLETGELLAGLEVLAQTGALEVVMESSGVYGDALRWQLHKRGIGVYRVGAKRVHDSAEVYDGVPSLHDAKATELIAKLHWEGCSERWEILPEVRRDLLAQVRRLSQAKAQAQAERNRLEALLARHWPELGQLLGLGSASLLRLVATYGGPAPLVLLARQARQLLRKVGGRLLAEEKIDAVLASARSTLGMPCTPGECAQLRRQAEQVINAQREKRQAERQLTRALAPDVTLAPMRKLLGEVTSAVLLATQGDPKGYPSAASYCKSIGLNLKEHSSGKHQGQLSITKRGPALTRFYLYFAALRLIRRDPVIKRWFEIKTARPGAVKQKQVIELMRKLAKAFWHQAHGHDFDVNRLVNLKAVAGA

SEQ ID NO: 296729 - protein, 384 aa, unidentified
MTTEWYGRLPSSAAALVHMSASCCAAARVSVRAPFSQDGGSEMNAVHTVVGVDVAKNVFQAYWVVAETGEIRNMQIKRAKFLEHFAGRPRCLIGMEACGGAHHWARELSKHGHDVVLLPAKAVGAFVAGNKSDAIDARAIWTAAQQGGIKRVAVKSEAQQAVLALHRMRQQLVKVRTAQSNALRGLLMEYGEVFRQGRASLARGIAAALERIEQRLPRVVVESLMELWQRVGQIDGQVKQIERRLKSLLTEDRNAQRILQIPGVGMLTATAVSATMGQASAFASGREFAAWLGLVPAHTGTGGKTRMLGISKRGDSYVRTLLIHGARSVFSSTKHPGPWLQKISQRRPLNVAVVALANKMARTIWALLAHGRTYQPDYVSRAST

SEQ ID NO: 296730 - protein, 455 aa, unidentified
MAKTGKTHQTSQGLSLIHDRAAGIDIGSTFHVVAIPPELDAEPVRTFGTFTQELHRLAEWLVRHGITTVAMESTGVYWVAVFEILEDHGIDAQLVNARETKAVPGRKTDVNDAQWLQKLHACGLLRASFRPGRHIAALRTYLRQHERLLDYAAAHIQPMQKALTSMNLQLHQVVTDITGATGMKILRAIIAGERDAEVLAALRDVRCKASVETIREALSGNYQPEHLFSLTQAVALYDFYQQQVAACDVEIERTLAQLCATVSVPEAPLPKARHRTRQPNALAFNVRQALYDLLGMDLTQIHGCGPYLSLKLISECGTDLSRWPSAKHFTSWLGLSPGCKISGGQVLSSHSRKNANRLSVQLRLSATTIGRTNTALGAFYRRLGVRIGKAKAVTATARKLAVLLYNALRFGLHYRDPGADYYEQRYQDRMLKNLRRRAAELGYELTETVPVAGVS

SEQ ID NO: 296731 - protein, 387 aa, unidentified
MAQPNDLSRSLTPFLQGNTLVVVIELSLTSWLVGGLVPGLERQPLKKLEPDETGLLRLLGRWKEEAVKSGCTIERVVVAYEAGRDGFWLARWLRTHEIEAYVVNSSSVAVSREHRRAKTDRLDTAMLLRVFMGWLRGERGHCGMVAVPTLDEEDAKRPHRERENLVGERTRIINRMKAALIRLGIRGFKPELRKASVKLEFLRTPEELPIPPNTLDEIRRDIARLTIVRDQIKAIEQDRLGRLEHAPATGPSAMVRLLASVIGVGIETADMLVQEVLSRNLRDRRAVARYAGLTGAPDESGAKRREKGLAKSGNARVRRGLIQLAWRFLLFQKDSALTLWFRSRTEGPSGARKTKMIVALARKLLIALWRMVTSGEVPNGVVLRPAD

SEQ ID NO: 296732 - protein, 332 aa, unidentified
MDTDTGEFQERRLQHREEAEKFYRDLAAQGMRVRVGMEASGQARWFERLLSELHFELWIGDAAEIRTKRVRKQKTDRQDAQLILQLMLEDRFPKIWVPSWENRDLRQLLWHRHRMVQARTRILNQLQAVALNEGLRCKKRLWRDAGREQLESFALAPWASRRRRDLLELLDRLTPTIAELTQAIEQEVEKCPAARRLQTHPGVGALTALSFVLSIGRADRFRCGKQIASYLGLVPLEDSSGQRRRLGHITKQGNSLLRFLLVEAAQVTVRSATRNGAASISTWPCGEEGKLRRSPWPGSWRFACIGCGARDGITSSGKSSVRTRDNPEIAMV

SEQ ID NO: 296733 - protein, 413 aa, unidentified
MQKNYIEFEQVIERGCGMDVHKAVIVVTVRGKGIKTVTKSFSSFTSSLIKLKEWLKKQGVTHIAMESTGVYWKPVFNVLGDDFKILLVNARHVKNVPGHKTDKKDSKWLAKLLLSGLLRGSYIPCREIRELRDLVRYKTKLTNQVSAEKNRFQKVLEDANIKLSVVLSDVFGVTGKKMIAEIMKGDYKPEQLLYHVHGRVKASREDIKEALTGYVSDHHRFMLKTIMGNIAKIESTILELDTQINMKTEAHQGILELLETIPGVGYDGAVAIIAEIGVDMDAFSTHKHLASWAGMSPGSNESAGKNKSGRITYGNKFLRVFLVQMGWAASRTKNTYLSSKYKSLVGRRGKKRAVIAIGHKILIAAYFIIKEKVEYNELGEDYLNNFRKDKLVEYYKKQLGKLEPNFNFGDEVA

SEQ ID NO: 296734 - protein, 452 aa, unidentified
MEEQISLEVVNKNAAGIDIGSRSHWVAVGQSDDLIREFGVYNEDLYELADWLAQHNIATVSMESTGNYWQNLHAVLISKGFDVTLCNGKFTKNIKGKKTDVKDCQWIQKLHSLGLLSGSFLPDGDTEILRTFTRHRHNLIKQAASATKKMQKYLRLMNIRLDVVVKDVVGLTGLKIIRPIALGEIDPQKLASLRHYNCKKSEEEIAKALHSNGRKDFLYALKDELDTYEFIQKKIRECDDQIAEKLDDIIGKDPEKQKHHIDKKTYKRINKNTPKDIDINLKSYQMLKGTDLLAIEGMSYNTVLAIMSEVGYDGIKKFKTAKHFTSWLRLAPNNKVSGGKVLSSKIGKGSSRLKIALRNAANAIGNLKDSTPLRDFFHRINFRKGRVSAITATARKLAVIIWNMVTKGTVYQNPEGYLYLDQKRKLGIVKRIRKQIDKFGLTDDDLQITVNQ

SEQ ID NO: 296735 - protein, 449 aa, unidentified
MPYSNLALDADRENGPAARSFAADAHDRIMVRIKRSYRIQILCSGATNSGKSTSPTTEPTERSMNHLSTFSVPDRTGICGDCATLFVSLELSRSTWVATSLALGSRKMSKHTLVGGDARKLLDLLGRLKSRAEQRMAAPVKVVAIQEVGLDGFWIHRLLEANGVESHVVDPASIAVPRRHRRAKTDAIDGETLLRTLMAWQRGEPRVCAMTVPPSPSEEDCRRVSRERATLLRERIRHTNRIRGLLFGQGITNYNPLHKNRRTGLEELRTGDGRALPAHLKAEILREIDRLELVLRQISEVEAERDEMLRPAQASSPATLLMRLKGIGAEFAGVLYLEGLFRHFENRRQLAAYAGLAPSPWKSGSVDHEQGISKAGNPRLRTTMVELAWMWVRYQPASALSCWFRQRVGSERGRIRRISIVALARKLLIALSRYVTHGEIPAGAVMKPV

SEQ ID NO: 296736 - protein, 407 aa, unidentified
MEVIIERACGMDVHKDSITACIMTPKGKEIQTFSTKTVFLLQLIDWIKEHGCTHVAMESTGVFWKPIVNLLEAENVEFLVVNAQHMKAVPGRKTDVKDAEWIAKLLRHGLLKASFIPDRNQRELRELVRYRRSIIEERARQHNRIQKVLEGANIKLGSVVSDIMGVSSRDMLRAIADGEDDPEKLASFARRTMKKKKDELELALRGYINPHQRLMLKTILTHIGFLSEQIELLNLEVATRLSSHQEDIERLDSIPGIATRMAEQILAEVGTDVEKQFPSAAHLCSWAGLVPGHNESAGKRKSTNMKKGNKYLKSALIEAAHSVRGSKTYLGAMYRRTASRKGKKRAGISVAHAILRIAYYLLTRKEMYVDLGEDYFDKQKEQSIVRYSVRRLENLGYNVTIAEPDAS

SEQ ID NO: 296737 - protein, 364 aa, unidentified
MDETIWLGLDVHAGSITICKLVGQSDKEQSWTIPNEAKDVRRTFTRLKQEGQIRACYEAGPCGYHLFRQLQGLKVDCRVIAPALIPRKAADRVKTDRRDAIKLARLYRAGELTTITVPTTSQETARDVVRARESIRRDLTAARQRLSKFLLRHGRRFSGTAWRGVHRAWLRAQDFTDADRVVFDHYHAQVLHLDDRLAALDREILSLARSEPFKPIVDRLCCLKGIAELGAMVVVTELYDLRRFSSPRQLMSFLGLVSSEHSSGEKTHRGRLTRTGNGHVRRILIESAWAYRYRAGRSARLRRALEGQPAAVVAISEKAEHRLTKRYARLIERGKARPHACACVARELCGFVWAMALADTRAVA

SEQ ID NO: 296738 - protein, 316 aa, unidentified
MSAHEIFVGIDVAKAQRDIALRPTGERWTVTNDDAGIPALVAQLQAVQPTLIVLEATGGDQRAVVAALAAAALPVVVANPRQTRDFAKATGQLAKTDALDARALAHVGEAVRPQPRPLPDAQTAELRALLARRRQLVAMRTAELNRLDTAPPSVRADLQAHITWLEQHVAALDDTLDTTLRASPVWREREALYRSVPGIGPACARTLLLDLPELGTLSRQRIAAVAGVAPFNRDSGTLRGHRTIWGGRAPLRATLYMATLVAVRHNPVLKAFYARLLAAGKAKKVALTACMRKLLTILNAMVKHQTPWQPREVASV

SEQ ID NO: 296739 - protein, 359 aa, unidentified
MIVIGIDPHMKTHTAVAIDAVTGRSLGEKTVTCDDRGHDQLLAWARTLPGDHYFAIEDCRHVSGRLERHLLPRGERVVRVPPKMMAGARHSARAYGKSDSIDAACVARAALREPDLPEATLTGPEHDVRLLVDHRDDLVDERRRIQKRLRWHCHDLEIGLDLPPRVLDRYVWLSRLEAVLAAMPQSTRRRIALAQLKHCRELTVEIRGLEREIRGRMRELAPDLLAIPGCSAVNAAHLVGQTAGASRFRREAAFAIHVGCAPLPVSSGQSIRHRLNRCGNRKLNSTIHMIAITQARMHPPAIAYMERKQAGGMSYREALRCLKRHLARVVFKTMLRAERACAGEVLRPDFGAGLVAAAV

SEQ ID NO: 296740 - protein, 342 aa, unidentified
MQTTTQFFIGIDVAADHVVAAIGTLPWHITVPATAFPNTADGFEQFREWLAEHGCSVSDTVLCLEATGVYGEALTYFLAHHQYRVAVEPPLQVKRAFKPHGAKTDALDSQQLAEYAYRFLDQLHFWQPRPDLLEQLTVLTHTRELLVKQRTAHKNSLHALQRKVVRTSVAETTHQRLIAELDAQIKVLEKEIRRLFKADPPFQHLLQRLQSIPGVGLLLATQFLIVTQGNPARANPKTLAAHLGIAPLAHQSGKSVRGHTASRHFGPPIMRKLLHLGARSVCTHTARFRTYYQRKLGQGKPKRLVFNNVSNKLLTLLCVVLVSNQPYDANYANSSVQLLQTA

SEQ ID NO: 296741 - protein, 440 aa, unidentified
MAKLINFEQIHAHGAGIDVGAKNIFVSIDGEQVVNFETFTADYHRCCRYLKENGITSVAMESTGVYWMSLYSILEDAGIKVCLVHPRETQQVKGRKTDVKDSQWIQKLFSAGLLRESIVAEGALKELRMLVRERLDLIEMGSTYVNKMQKYLELMNIKLKNVISQIHGFSGLQIIRAILNGERNVEKLLSLCDIRIRREKAEEVKKSLTGNYTPQYLLLLKENLRLWEEHQKSIASIEKEIEKLLDRMCADKLDIKVESLPQPSRHHNPDIKNLHEKVVRLYGGVNLTTIAGINDVTMLRLLGETGSDMSRFPSVKHFVSWLGLSPKNKQSGRMKRRVKSQSNNAGEIFRQSAQSLSVSKHNAIGAFIRRLKGRKGSPVAIKAGARKIAEAYYNALTKGMEYVEQGAIKYTEQLKQREIFALKKLALKHNYLIFENQSVA

SEQ ID NO: 296742 - protein, 289 aa, unidentified
MKYTPVGVDIAKHVIQIHFINEHTGEVVDKQLRRQDFLTFFGNREPCLIGMEACGGSQHWARELTKLGHKVRLLQARFVKAFVMGNKNDVMDARAIWMAVQQPGKEIAVKTEEQQSVLVLHRTRMQLVKFRTAQINALHGTLLEFGETIHKGRAAMEREFPEALERMKERLPPYLIMVLENQYNRLNELDSLIEDIEKQLTSVARQNETCKRLLDIPGVGPLIATAAVATMGEASAFKSGREFAAYVGLVPKQTGSGGKVRLLGISKRGDTYLRTLFIHGARAVALVAK

SEQ ID NO: 296743 - protein, 449 aa, unidentified
MRKPQEIEDEEYEQVVERVAAVDVAKAAGMVCTRVPHPSRPGRRRTRVWEVDATTNAILELGEHLAGEGIEKVTLESTSDYWRIWFYLLEAAGLDVQLVNAGDIKNAPGRPKTDKLDSVWQAKLTERGMLRPSFVPPAEIRRLRDYTRLRTDLTRERTRHWQRLEKLLEDALLKVSAVASTLDTLSVRDMLEALIAGERDPKVLAGLARGRMKAKRAALTEALTGRFDDHHAELARMLLDQIDHLTAQIGTLTSRVGELIAAIPAAQGVDADGATGPGAGTGPGAPVLPAIARLDEIPGISPLGAQIILAEIGLDMTRFPTAGHLVSWARLCPRTIQSGARNRSGKAGKGNPYLKGVLGEIAAAAARTDTFLGERYRRIVKRRGKLKALVAVARTILVIIWHLLADPAARYHDLGAGYYASRTDTGRKTRNHVRQLEALGFIVTLAPAA

SEQ ID NO: 296744 - protein, 429 aa, unidentified
MRQVALDVHQGFCEVAVREDGVTRSAGRIATDRGTLELFAGSLCLTDEVVMEATGPAMEIARILGPHVARVVVANAQDVRAISHARVKSDRFDARTLADLLAAGMLTPVWVPDAETSALRRRVARRASLVRQRTRAKNEIHATLARCLLGRSPVSDLFGKKGLAWLSEQQLGGEESETVAGCLRQIEFLDGEVAQIDQKLAEWAAGSQDAKRLMSIPGVGAGVAVTLMAAIGDISRFDSPRALVAYLGLDPKVRQSGDEQARHGRISKRGNAQARSVLVEAAWIAMRQPGPLHAFGERIRARKGGQVAAVAVARKLACLAWQLLTKSEDYAFARPSRVRAKLRRVELDAGAPPLRTRHAGRRVSASAAERDTERELTERAETAYRRLIADWKATGPAKKKGAGATHGRAPSKPTERQATRQAPAQTPAL

SEQ ID NO: 296745 - protein, 347 aa, unidentified
MKDVTTIGLDLAKQVFQVHGADTEGTPLFNRKLRRAEVLRFFEKLPPCLVGMEACASAHYWAREIAALGHAVRLLPPQYVKPFVKRGKTDAADAEAISEAVTRKTMRFVPVKTAEQQAAVMVLKTRALLVRQRTQAINALRAHMGELGIIAPIGIANVKPLAIIIRDEADNRLPAAARFALIEMVDQIEILAARIERLEREIVIQARRDADMRRLATIPGVGAIIAMTVKALVPDPGGFKSARHFAAWIGLTPKAHSSGGKERLGRISKMGNPELRSLLVTGAASVLRHVRTDDKARPWLKDLLGRRPFKVVAVALANKTARMIWALLTRGGVYRNPIETTAKEIPA

SEQ ID NO: 296746 - protein, 407 aa, unidentified
MEQCAAFVAIDWSDAKHALCLLDVATGQQEAGRLQHTPEALEAWATAWRTRLAGQPIAVCLEQSRGPLSYALLKYDFLVLSPLTPATLATYREAFSPSRAKDDPQDADYRLALLLHHRDRLKAWRPDNAKTRTLPYRGEHRRRLVNDRTRISNRMTALLKAYFPQVLQWFDDIRTRRVGDLLLRWPTVDALKQVGPSTLEKVFHEHHSVRKETIAHRMAAIQEAIPLVPDQAGMHASVLMITALAAQMKTTVEAIRKFDQEIETLCSTPEDYPLFASLPGAGPVYAARLTAAMGTVRDRWTTVEALLGYSGVAPVMERSGKSMWIRWRYVGPTFLRQSFHAYAGESINHSCWARAYYMSQRARGKSHQAAVSALAFQWIRIIYSCWQTRTPYREVRYVESLRKQRSP

SEQ ID NO: 296747 - protein, 429 aa, unidentified
MNCTPNKKIEQVKETTMIVGIDVGSEKHYFRAFNWRGIELTRKPVAFSNSMEGFNSFYNTIVELMQKSELEEALVGIEPTGHYWFDLGQFMGEKDIKFVMVNPHHVHKTKELDDNSPSKNDRKDPRVIAGLVRDGRYFYSYMPTGAYAELRNASNRRFVLVEEQTRAKNRLQKWIAVYFPEYKGIYTHIDAKGGMLVLKKAPTPEEIVRLGVEGIIKIWKDAKLRGNGHKKAMLILAAAMRSIGLKAGLTEARMEIQDLIEDYELQTKRLERVNDLIKGLCQQVRYADKLLEIKGIGITTVAGFIAEVGDITRFDSTKELQKLAGLELVADSSGKHNGKTKISKRGRKRLRYLLFEAAISVVGKNEEFKEIHRYYTTREKNPLKKMQSLIVVACKLIRVFHAILTKGIRYDASKMLKDIRHPGEQLKAA

SEQ ID NO: 296748 - protein, 415 aa, unidentified
MIYVGIDWADESHRIFITDDSAQCLDSFSIEHSHSGIEKLFERVRHLAKDQKQVLFALETSKGLLVSSILDAGYTVYAINPKSVDRYRDRYKVSGHKTDDFDAMVLANILRTDRHNHRKILPDSPITAELKILTREYSQLVRIETIFINQLTSCLKDYYPVALDLFCKLDQPVTLDFLQTFPTVEHLKKASVQKLCKFLSKHHYPGVVEKANEIYQKLKEPQFQVDSFIADAKSQFMITLVKQLQLLLPQIQSFKKKIEQLLDQHPDKEIFNSLPGAGVILSAKMISEFGDNRQRYKNVSSVQAEAGTAPVTESSGNCKFVHFRKSCRKSFRDTMHQFAFCSIKESSWAYERYHHYISSGKKHSHAIRCLANAWLEIIFSMWKNHTPYSEQRHLLKYLKEQKYGDYRQNFNYLAP

SEQ ID NO: 296749 - protein, 338 aa, unidentified
MEWTVAIGVDTHKDVHVAVALDRFGAQLGSREVETTETGYRSLRSWALELGVPAFAVEGCGSYGAGLVRFLELAGAAVWECERPRRQERRRGKSDLIDAALAARRLLTGDGLYLPRGGGRREELRLLLLERRSAIQARTAAFNQLSALVVTAPDQLRRRLGTLSGERLARAAARLRPGADVRNAVLQRLGRRVERLSREVREVDRRLLDILTEIAPALLAECGVGPVCAAQLLVSSGDPKRMASEASFAALAGTSPLDASSGQQRRHRLNRGGDRQLNWALHVIALARIHHHAETAAYYQRLLATGKTAREARRCVKRALARHFYRRLREIPTPALTT

SEQ ID NO: 296750 - protein, 375 aa, unidentified
MQKKVRFLGLDVHAETIAVAVAEQDGEVRSLGVIANRAESVRKLVKKLGPAEQLRACYEAGPTGYVLYWQLTELGVECAVVAPTLVPVKAGDRVKTDRRDAAKLARCHRAGDLTGVWVPDAACEALRDLVRTREAAKQDQLRARHRLAKFLLRTGRRPVTGGKAWTAPYMAWVRQLRYAEPAQEWTRLDLLHEVEHMAERVKRLEESIREAVKLAPAGMQEVIRSLQALRGMAEISAVTVVAELGQISRFASARQLMGYSGAVPREESSGERQRRGVITKTGNAHLRRIAIEAAWSYRLKPAVGPALRKRQEGVPEEIKEMAWKAQLRLHKRYARLAAAGKDQRKIVTAVGRELLGFIWAIGVKAETAARLAMAA

SEQ ID NO: 296751 - protein, 339 aa, unidentified
MKLYSGIDLHSTNSYLAIIDGKGKHIFQEKFPNDAATIVETLTLYSGTLVGVVVESTYNWYWLVDGLMAEGFTVHLANPSAIQKYSGLKHADDKHDAFWLAEMLRLGILPEGYIYPKEERPIRDLLRKRSHLVKLRSSLIISLQNIITRNCGTKMKTNDIKSLRENRVQPFLVSNEDLALAGQVSKDTIDFLTHQIRDIETYIEKKLDLKDSYKYLVTLPGIGKILGLTIMLETGPVERFKKVGNYASYCRAVSSQWTSNDKPKGKGNKKNGNKYLCWAFSEAAEFARRYDDTVRAYYNRKLKKTNFMVAHSALAHKLARAAYYVMKDQVPFIKEKLFS

SEQ ID NO: 296752 - protein, 496 aa, unidentified
MFRLLATLGPWSSSFVVSLSAWAGVVRIGDPEEDRVVRRLVGVDLGIASSHTVRVLDEAGREVCRRRCEPTVQSLGRVEAAALAGTPAGTVLEVVMEPTGPAWLPIAVFFDQRGHRVFRVSSARAADLRRFLSRHAKSNGIDADTLARLPLVDPAGLRPLELPGPEAAALDRRVRATDRLTMLAAQHKTRIKDLTRQLMPCSPLTGALGLADMVVLERWADPRALLAAGPARLTRVISIASHGQQGADRAAQWRAAAAAAVLLYGGHPAVAFTDLADEVRTEVRLLRATQTELAGHAAERETAYRYTDLGELARSLPGLATVGGPVLVAVMGRPGRFPTAAAFKSFTGLAPKASETGNTDRKGQPMSKAGSSLLRTMLIRAADTARKQDPQLARIYHTQMVERGAEHLKALCVVAGALAERGWAVLNRQMPYVICDTDGEPVTPQQAKRIITEQFTVPEEVRRRRRSTKARPVTKARRTTTQQGGKAPQQAAHSAA

SEQ ID NO: 296753 - protein, 329 aa, unidentified
MHTTVHHTPKTICLGLDIAKAKLDACLLHSGKRHRAQFDNTPAGLRALLAWLRPLHDGPLPVIMESTGSYSLLAATVLYEAGHAVSVLNPRWIKDHARSDGRRNKTDTLDAEIIAHYGLTHDPDLWQPASPAQAALRALLRRLAALGELAQMEARRAETSDAVVGKSIARLQKHIARETAAIEAAIAEHLAANATLHADCERLCAIPGIGLKTARWLVAELPRHLPNSRTAAAWCGLTPRLSQSGSSVRGASSIGREGNRFLRKILYMPALVARRANPRLKAFADSLEARGKSKMSALLAVEHKLLRHAFALLKHQSAYDPNHHPLKHS

SEQ ID NO: 296754 - protein, 333 aa, unidentified
MVYAGLDVHKRCTQICLEDENGALVERRILTERHRLLEEFGGKPPMRILLESATESEWVARCLESAGHEVIVGDPNFAPMYAQRSRRVKTDRRDARALMEACKLGAYKPAHRCSDAHHRVRARISARDLLVQTRTKCISLVRALLRHEGIKPERKSSATFAQRVREIGAPDALASELAPVLDLIDALNEKIRRADERVSEIARDETHQRLMSVPGVGPVTAVAFIATLDDPKRFRGPKQVRAYLGLVPREHSSGEKALRGRITKQGSSRMRRLFVQAAWAVLRSKPTPEAEPLRRWTTNVAGRRGRYVAIVALARRLAGIPPTGRPVPWAVGR

SEQ ID NO: 296755 - protein, 352 aa, unidentified
MDKGIKLDFSGQHIYVGMDVHKKSWSVSIHTEQFEYKTFTQPPEVDKLTCYLARTFPGATYHTVYEAGFSGFWLHDQFKEKGIDCMVVNPADVPTKNKERAGKTDRVDCRKLARSLRNGEMKGIYVPPRVKVEDRTLVRTRQSMVRKQTRCKNQITSILFFYGITIPEESRWSRRFIHWLESIHMERASGDFALKAHLEELMHLRQIIANLNRSILSLSRTEEYRSDVLLLKSVPGISTLTAMILLTELVDISRFSSLDKLASYAGLVPDIKSSGETEYSTGITFRRNAAMRSLLIESSWVAVRKDPALMMAFNKLSMRMKKTQAIVHIARKLLNRIRFVLKNRQEYVSAVI

SEQ ID NO: 296756 - protein, 391 aa, unidentified
MIYVGIDVAKDKHDCFITNSDGEVLFNVFTIANNLDGFNDLCQKIASVMEDVTKVKVGLEATGHYSYNLLGYLIDKGLPTYVINPLHTNLYRKSLSLRQTKTDKVDARTIASMLMSDVNLKSYSDTSYHNEELKSLTRYRFDKVKQRAKLKSSVSRLVCTLFPELEKLVPTLHMASVYAMLSEFPGAKQVANAHLTRFTNLLSKVSKGRYGKETAIAFRNAARTSIGSNMPAKSLELKHTIKLIQELTSEIDEIENEIKLIMDEINSPILSIPGINYRMGAMIIAEIGDFNRFDSPDKILAYAGFSPSTYQSGQLDGAYSHMEKRGSRYLRYALYNAAKYVCNWDPTFAEYLAKKRAEGKHYNVAISHAVKKLIRVIYHLEKTNQQYIKAV

SEQ ID NO: 296757 - protein, 364 aa, unidentified
MWSVGIDAHHGLYVVCILDESGRVVKEFRVKGHPKEVVAALAELGRPLRVAFEASTGYGLLRDLLREVAGEVAVAHPGKLRLIFQGKRKNDRIDARKIAKLLLLDEIPRVHVPELPVRELRALVEHRMRLVNKRTRAKNGLRAMLRAHGLSAPRGKGLWTKAGRQWIRTLEFESPLTALKRDQLLEEVEYFDRTIAAVTRQLDRLATGDPRIALLRTIPGIGPRTSEAFLAYVDQPQRFGRGAQAGAYFGLTPCLDESAGKTRYGHITREGPATVRRLLVEAAWRGKALSPSLGTLYERVRGGRKDRKAQAIVAVARHLSEAMLVMLKTQTPWEERLAEKKPAEKRPSEKRPAEKRPAEEVVAA

SEQ ID NO: 296758 - protein, 424 aa, unidentified
MSKKKSSVAGLGAIYGRVCGMDVHKNSVVGCVRILNTKDGTVQSTLRRFGTMTADLVQLRQWLAEQQVTHAAMESTGVYWQPVFNLLEGHLEVWVVNAQHIKKVPGRKTDMKDAEWIAQLLQCGLLRPSFIPDRQQRELRDLTRQQTKLVQQRSAVDNRVQKVLETANIKLGSVASEVLGVSGRKMVEALIGGEKDTRVLAELAQRRLRAKIAQLQRALEGEITEHHCFMLRQLLDQYDFLEQEIARVGERLGAVAPASFHAEVKKLDEIPGVGERGAQALLAETGTDMSRFPSHKHFASWAGRCPGNHESAGKRKSGKTPAANRHLDAVLTEMAQAAVRKNDSYFKSQYHRLAGRRGKKRAIGAVKHSLLVTIYFMLRDNKSYKDLGADYFDKLNPQHQIHYHVRKLNDLGQKVELFPMADAA

SEQ ID NO: 296759 - protein, 438 aa, unidentified
MSNKVIFNLDELFISVGIDVGADFSWMSIAFPNQQFVGKPYKILHNSIDSLTTAVSKIKEAEELYSLESRIFLESTGIYHYPLFCYLRDKGFNCSVINPIITKNSTNINIRKVHNDRFDSKKAALVGLKPDLKVSLMPSDLALNCRNLCREYYDLMDNRSAYVNKLQGELRMAFPQYLGIFSKVTINTSLTLLETYTSPSAFLEADKQEIIDIIKSTARFGLTYAQNKYNAIIQAATDANQFGYIIESNIKRIRLYISFIRKYDEEINDILESLHKLVDSNEDTKFVKQVHLIETFKGAGFLSAATIMGEIGDFSAFSKPKQLFAYFGLDPAVKQSGKFEGTKVQMSKRGSSIARRVIHTLSLQSISISRNGKAKNPVLREYYLQKCDSKPKLVAMGAVSHKVCNMIFAILRDNKPFEIITPQEHIKQYNAAKCDIAA

SEQ ID NO: 296760 - protein, 309 aa, unidentified
MTAAGIDVCKASLDLAVDGQPGVAGFANNRAGITKLVKRLQALKTTRIVVEATGGYEEPLLEACCDAGLWIARVNPPQARAFANATGELAKTDDIDSRILALMARLFADRLRPYVAPPLWQRELRDWLRRRGQVVVLLQAQKQQAAMAPASVRKLAARTIAALVRELAAIEKTMKDLLNEHATPALRSSKGLGPVFQATMLALLPELGHLDRRQIAKLTGVAPMNRDSGQGQGKRRIRGGRAPVRVALYMATLSAVRWDPTMKAHYQQLRARGKLGKVALVACMRKLLTIMNAMIKTGQPWQAHLTQKN

SEQ ID NO: 296761 - protein, 319 aa, unidentified
MSKIVVRAGLDVSKDQLEAYVHPGGVRLSVTNDRAGHRQLLAWLAEQGVAIVGAEASGGYERDILERVAESGLVALCLNPLRVRRFAEARGRLAKNDRADAQIIALFMGSCPDERAVIPPDPARERLREHLLVRVQTLDAITALENQLEHLRDRSLRAALRARAAGLRRAVAKLDQRIAELIAATPNLEAMAACLRSVPGVGPVLSSTLLALLPELGRLTRRQIVALAGVAPFDDDSGKRNGPRHITGGRAALRKVLYMAALVAKRRNPAIRDFALRLAGKKPKVIIAACMRKLLTILNAVARDQVMWHNTKIIPSGHP

SEQ ID NO: 296762 - protein, 417 aa, unidentified
MSEYAALVAVDWADQQHAVCLLDPSTGEREQSIVKHTPAALQEWALSLHQRFAGQPIAVCLEQSRGPLIYALLQYDFFVLYPINPATLAKYRQAFSTARGKDDPTDADYLLDLLEHHRNRLRPWHPDDEKTRTLRLLVEQRRRLTGDRTRVSNRLTALLKGYFPQVLDWFEDIRTQLVCDFLERWPQLSLLQQARPATIDKFLRSHHSTSKPTNLRRLTEIKTALPLTTDAAVMTSSVINVKALVAQMKTVIAAISEYDRHLEALCQTHDDYHLFAALPGAGPIHAARLTAALGSDRSRWQSADELVTFAGIAPIIERSGKQFRIRWRYFCPKFLRQTFHEFAAQSIQDSFWARAYYSMQRAKGKDHHAAVRALAFKWIRVIWKCWHTRTPYNEVIYLESLRKKGSSLLKFAVDYQQ

SEQ ID NO: 296763 - protein, 367 aa, unidentified
MKKVSTAAMTQGRNISQQQLTIGLDLGDRNSWYCVLDETGRIQLEQRVRTTAKALQEVFGAMPRSRIALEIGTHSPWISRLLSELGHEVIVANARKVRLIGESRKKDDRLDAQTLARLARIDPELLYPVKHRSVQAQADLMTIRARAGLVRARTALVNTARGLAKSYGERLRGCNVRDMDPEKAEGLSPELQRALEPLLATIEELSERIVEYNDRIEALAQTSYPQVELLKQIKGVGTLIALTFLLTLEDPHRFRKSRDVGGYLGLQPGRRNSGHSEPQLHISKEGDPYLRTLLVQGAQHILGPFGIDCDLRRWGLKLAERGGRNGKKRAIVATARKLAVLLHHLWVSGEVYEPLHNSRRVTVAAAA

SEQ ID NO: 296764 - protein, 440 aa, unidentified
METYQRIKVGIDVGRSKVDFVILHPDGHRLEKNSSFNNSPEGIEQAKQLLIRIMEKHDFSGVDIAAEATSFYWLPLFIQLQQDTELAHYAPRLTLLNAAWVKWYKKGFPPDHKSDQVDPFYIADRLRTMVNHTWWYYDAHWLNLRFYTRLRFHLSQSLMREKNHYHLFLFLGHSAYSQKRTKPFTDTFSRINEVLLHSPGLLDHLQDLEVDDLAVQLYELAGHRLNDPMQSAKKFHHALQESFTPPKEIEPAIQTALDSLITVIRHLEGQIKIVENHIAEVVENDYPEVSWLRSIPGIGAIFASSIAAEIGDLHRFSDRLRWDNKRNCYRRRSAREVEDAVAKFAGLWWPKNDSGDFSAEETPLSKRGNAYLRYFILQAADRMRLYIPSYSAYYSKKYIQATKHNHKRALVLTGRKAVGLIVGLLHHHEFYRPEEVSPRT

SEQ ID NO: 296765 - protein, 387 aa, unidentified
MYFIGIDISKFKHDCAVIDDSGEIVTPSWSFTNDAKGFSQLKLLLNSLDTETRIGLESTGHYGMNLKLFLESNNFSFMEFNPLLINRFVKSKSLRKTKSDSIDCMMIAHYLMTVEYKPYPSSFYHTEKLKSLTRFRDSLIRLRRRQLVELTNILDKVFPEFKPFFGSRFSVTALYILSNYSSPEKIANMNSKSYEALRKLSRGRFSTVDFAKLKQLAKNTIGTTEDYLLLQMQIVLDIYRQLDSKVDETEVSIKECVSDMNPPMLSVPGIGIESAAVILAEFGDFSKFKNASQMLSFAGLEPGYFQSGTSETTGKMVKHGSSYLRYALMNCAQTVVNYEPTFAMFYSKKRAEGKPHRVALSHVVKKLLRVIYTLQTKNIAYDADFVR

SEQ ID NO: 296766 - protein, 347 aa, unidentified
MRYFAGLDVSLEETSICIVDETGKIVKEHRAASEPEALVAALRDTGLMVERVGLEACSLTSWLHDGLTQAGLPAICIETRQAHAAMKTMPNKTDRNDARALAQIMRTGWFRQVHVKSRQCRLWRSLLVTRRTILNQMRSIENVVRAILREGGVKLGTPSRADFVERVHELTGEAPDVTPLVEPLLAILATMLRELARLTKLVFDTARQEEVCRRLMSVPGVGPITALAFRATIDRPDRFRRSRDVGAHLGLTPVRYQSGETDIQGRISRCGDELARTALYEAAHTLMTRSRKWSSLRAWGMKIAKHRGMARARVAVARKLAVILHRMWADGAEFRFGQQPGAGALAA

SEQ ID NO: 296767 - protein, 375 aa, unidentified
MMAMEKCKVSKRIREVMNSTVAGIDLGDSESLATVLSPMGDVVKRFSFKMNDEGLALLAENVPRDARIAFEATMMAYPFSRSLRSLGYSDITVAHPTELAWIVKSKRKHDKIDSLKIARLHLVGMLPESHLLSKEEQMKRDLLVQRVKIGQEMGRMKASVISYLKREGVYDALPKSADNFSLARRRAILSLRFNDDRDLVMRTLMDRLDFLQKQRAPLEERVKALVKESDEVKLLMTIPGVDYYLASLLCSYIGDIERFPDSDHLASFFGIIPESKDSSRVRRRGKMSKDGPPMGRWALSIMVDTVMRTNPCIREYYQHHKKRMGSGSLAHVKAMRKLLRMVDHMLRTGEHWRWEDAELTGKKVSKLEAEGGEDA

SEQ ID NO: 296768 - protein, 393 aa, unidentified
MVCVGIDVAKDKHDCCILDSEGTTLVDCFTIPNNMDGFKSLLQTIQDCSQKSDKIKVGLEATGHYSYNILGFLLDKGLDTYVINPLHTNLYRKSLSLRKTKTDRVDARTIAAMLMSDVDLKPYTDTAYHNEELKSLTRYRFDKVRERAKLKQSVSRLVTILFPELEKLVSSLHLASVYALLIEFPGAKQVAGAHLTHLKAILSDASKGRYGRDMAVTLRDAARCSVGSVMPAKSLELQHTIRLIRELDAEIEDIETAIQSMMDEMQSPITTIPGIGVRMGAMILAEIGDFSRFDSPDKILAYAGMSPSTYQSGQLSLSGPYSHMEKRGSRYLRYALYNATKYVCLWDPAFAAYLAKKRGEGKHYNVALSHAAKKLVRLICALEKSQQSYRNAA

SEQ ID NO: 296769 - protein, 365 aa, unidentified
MTKVRTWVGLDVHATATVACVVDAPSGEMSVQRLSGRTSEVAVFCARLPAPVRVAYEAGPTGFELSRALGGAGVGCVVAAPGKIERPAQDRVKTDRRDAERLVRLLMIGGLHPVRVPTSEEEALRDLVRAREDVRGDLMRSRHRMSKLLLRHEVRYEDTASAWTAAHRAWLSRVDLGERAAQATLLDYLGAIDALVLRRDSLEGMIGELVPLSPWAEPVARLRCLRGIDTLSAVGLCAEIGDFARFESPAKLMHYLGLVPSENSSGQQRRQGAITKTGSRHARRLLVEAAWHYRRPPRKGTTLQRRQQDQPAQTIAISWKAQQRLHHIWQRLDTQRGKRKTLVAVAVARHLAGFCWAITNNDPTA

SEQ ID NO: 296770 - protein, 440 aa, unidentified
MLQALPMLDPLAAFVDVGSEHMHVSVGGNRPAVFGTVTSQLHALRDWLLAQGVHSVAMEATGVYWLPLYGVLESAGLEVRMVNGRQTRNLPGRKTDMADSQWGATLHMHGLLHAGFVPPADIRRLQDYLRLRADHVAAAATCVQLMQKAFERMNIKLHHVISSLAGVSGLAVARAIVAGERSPEALVALCDVQIRRKKAQAVIEALRGSWADEHIFALAQALQSWDHYQKLIAECDARIATVLPPHDDTQPPLPRTTRQSSVNAPDIARLREILAQMCGGRDLTKLPALSSYGVLQLIGEVGTDLSAWPTEKHFTAWTGLAPGSHASGKRRKGVRRGRNRTGRLFCMMAQSLIRSRDIALGGFYRRLAARRGGLVATKALARKLAAWFWRVMVKGDDYVEQGLARYEEQVRQSKERALKRLARELGRELVPLSAVDHATA

SEQ ID NO: 296771 - protein, 379 aa, unidentified
MTQFSSVTSIEPTLHAALELSKNSWLLAIQFPDRDKPSLYRLKGGDGDGLMAKLDAARNRLAKVLGQAPKLVLCYEAGYDGFWLARLLERHGVDCRVMDPASLQVDRRARSVKTDRVDVEKLLQALIAWCRGERHICSMVVIPSVEEEDLRRSHRERDRLVREQTAHINRIKGLLFGQGIRGINVKSRHKTLVPADLVTADGRPLPERLAREIAREIERLEQVQEQLRQVERERDLAPACNQATEQKRQQLLRLKGIGTAIAAILSREVYYRQFTNRGQVASFIGLAPSPYDSGESRRSQGISKAGNGLVRGVMVQAAWLWLQHQPNSALSQWFRQRTQGHSKRVRCIMIIALARKLAIALWRYLEQGLIPEGATFSEK

SEQ ID NO: 296772 - protein, 243 aa, unidentified
MLDPTTGEVLERRLEHENGEAKMFYTTLPSPARVGMEATCDAPWFERVLREHHHELWIGDAAEIRAAMVRKQKTDSRDALHILDLLLTNRFPRIWVPSPAERDLRQMLRHRHKLVRFRTSVMNQLHALAMGQGLCRRKKLWAKVGRKELEGLVLDPWASLRRKELLQLLDQLDPWINKLDEAVIQAAEGHPQARCLMQQAGVGPVTALAFVLTIGPVSRFANSKKLVSYLGLNSSEASSAGRQ

SEQ ID NO: 296773 - protein, 407 aa, unidentified
MELVALHKRVIGLDVHQAQITACAIIEEADGTTRIEQRRFGAFKRDRRALADWAASLLPDEVVMESTGIYWKSPYAALEAVGIRGQVVNARHVKNVPGRKTDVGDAQWLATLARAGLLRGSFVPPMLLRELRLISRQRQKLVGQLASEKNRLHKVLTDGGIRLGVVVSDLHGQSARAMVKAIILGQPPNEVLQFASRRLKASREEIFDALQGELTDSHRFVLDELMRHVEEIEARIARFDARLLDGLKDEQNTLALLQTLPGVDLIGAAMLLVEIGTDMDAFGTADRLASWVGICPGNNESAGKRKSGRVRKGNLYVRRLLCEFAHAASRTTSVFQSKFKSLLVRRGHKRSIVALAHKILRTLFFMIKRREHYRDSATDYEALSVQRNAPRWIKSLTKFGFINPANA

SEQ ID NO: 296774 - protein, 261 aa, unidentified
MTAAGIDVCKASLDLAVDGQPGVVGFVNNRAGIARLIKRLQALGATRIVVEATGGYEEPLLEACCDAGLWIARVNPRQARDFARATGELAKTDDIDARILALMARLFADRLRPYVAPPPWQRELRDWLRRRSQVVNLLQAQKQQAAMASAAVRKLAARTIAALARELAAIEKTMKALIHEHATPALRSSKGLGPVFQATVLALLPELGHRERRQIAKLTGVAPMNRDSGQGQGKRRIRGGRAPVRVALYMATLSAVRWDPM

SEQ ID NO: 296775 - protein, 350 aa, unidentified
MVVVGADVHKHTHTFVAVDDVGRKVGEKVVAATTTGHVQALRWARMQFGTELVWGIEDCRHLSARLERDLLTSGQQVVRVPPKLMAHVRASARTRGKSDPIDALAVARAVLREPDLPVASHDEVSRELKLLVDRREDLVGQRTSTINRLLWRVHELDPEHAPKAASLDLTKHRELLRAWLDTVPGLVAELARDELADITRLTETINTLAKRIGERVRAIAPVLLALPGCGELTAAKLVGETAGVTRFKSEAAFARHSGVAPIPVWSGNTAGRVRMTRSGNRQLNAALHRIAITQIRLEGLGQAYYRKRLTAGDSSTEALRCLKRRLARVVFHHLHTDHENRQRHCQPAAA

SEQ ID NO: 296776 - protein, 346 aa, unidentified
MYSIGIDAHKRYSQITIMQEDGKIINRCKVNNDRKSIKRALSPYAQDGSKAVLESGWNWGLLYDMLSDGDLEVKVAHPLKVKAIAEAKIKTDKISADILAHLLRADLIPECYVRGKSSRRIQQVLRQRMFLVRLQTMVGNKIHNLIDRQEEAREPAQSFTDLFGVKGMQFLRSTPLPLLERKLLDGQLELLEELRTRISWVESILTQLKENDEIAERLKTIPGIGEFFALLIRHEIDKIERFPTSNKLCAYAGLVPSTYSSGGKTYHGRIIKQGNKYLRWALIEAVIPAIRKDAQISSYYYLMKAKKGSNSAKVATARRLLKIVYQVWKENRFYRIKTSRTALIHT

SEQ ID NO: 296777 - protein, 367 aa, unidentified
MKKHNSNKQITTTKGEQKETFAFYIGIDLGDKMSDVCILDPAGEVSEQFRLRMKGTDFHAYFTTIARSRVAVEAGAQSRWVAELVERCGHEVYVSNTRKVPYIHESDDKDDPGDAYKLAELVHLKPRLLHPIQHRSQEAQADLSWIRAREALVESRTLMINTIRGMSKAFGERLCKCSVESFTAKRSEQIPAAIRGAVVPLLEMIDHLNDQISYYDQMIQHLARTRYPKYWLLDQVVGVGVQTALAFMLTIGDPERFAKSRTVGCFLGMRPRKKDSGERKPQLGITKAGDVYLRKTLVNCAHYILGPHGPDSDLKRFGLRICERGAKNAKKRAIVAVARKLAVLLHRLWVTGEVYEPLRNSRTATAA

SEQ ID NO: 296778 - protein, 409 aa, unidentified
MNPIFVGIDVGLEKNIVQILDLHGSSLTRFRVSNDLPGKEELVARVLAAASQVGATSVRIGMEATNLYWWHLFQALYEDANLASLQPQVAVLNPKVVDGFKRLYPDLAKTDALDAWVIADCLRFGRVRYSPPPDPRTAALQRLTRFRFHQAESLTREKNRALNLVFLRFSNYSSTCPFSNLFGKASQVVLTEMTPEEIAHTPLEKLAELILKHSNNRLADLPAIVQALQRAARNAYRLHPKMQDAVQVALAMSLDTIRFFEQQLKKLDRLIAREAQAFPNTLQSIPGIGPVYSAGILAEVGDIQRFRDHNALAKFAGLTWRQHQSGAFNAENIPLSRSGNFYLRYYLVEAANSVRVREPEYAAFYRRKFEEARHHHHKRALILTARKLVRLVFALLNEGQIYQPGRLKR

SEQ ID NO: 296779 - protein, 332 aa, unidentified
MKKKLFIIGIDVSKATLDVYIRDFKKYFQVENGPQGFVIILETACKVVNCKKEELFFCFENTGKYSKMLSVFLQSQSITFSMEPALKIKKSLGMARGKNDKADSIRIAQYAYEKWDSLEPTILPGPEIYQVKSLLSARQKLIKHRTAYKNGLTDLHDCYKEGENDMIKEIQKRLIKQLDEEIEKIEAQILTIIKQDESISKNFTLILSVKGVGKILAFYLIAYTANFTQFVNARSFACYCGIAPFENSSGTVKGKSRIHPFGNKQLKSLLNLAASSVIQRKGEYSLYYNHRVNDLKKSPMSTLNIIRNKIVFRVFAVIKRESPYVDLYKFAA

SEQ ID NO: 296780 - protein, 338 aa, unidentified
MHITTLGIDVAKNVFQLHGVDARGRAVLSRRVKRDQLVHTVASLPPCVIGMEACGSAQHWGRAFEQLGHTVKLMHPKYVKPYVKTNKNDRRDAEAICEAVSRPTMRCVSIKTVEQADLQAVHRTRSLFVKHRTAVINQIRGLLAEYGLVIGQSPGKVRPALVRFLDDTASGLTAFARDTFSELYEQLTELDARIERVTQRVEHVYRAHPVCQKLAAVPGIGPLTATALVATVGRPQAFHNGRHLAAWLGLVPRQYSSGGKERLGGISKRGSRYVRTLLIHGARAVVQRAERRTDTQGRWLCALKHRKGTNVAAVALANKNARVIWALLAHDEAYRQPA

SEQ ID NO: 296781 - protein, 354 aa, unidentified
METKTKQAVPDLMAIGMDIGKEVFHLVGFGRDGKVAFRKKIKRLGLADVFRKLPPCIVGMEACLSAHFVSRTLRALSHEPRIIPAIYVKPFLKGQKNDYNDAEAIAEAALRPNLHFVREKTQNELDLQACHRVRDRLVSRRTATVNQIRAFLIEQGIAVRAGAKALRTSLFEILKNRAEEVSSRMSNLIVGLHEDWLRLDERIETITGEIEEISRQEANCQRLMSIPGVGPLISTGVVAAIGAGDAFERGRDFGAWLGLVPRQYSTGGKTILGRISKRGSRHLRTLFIQAAKVILMRPQNWDRHSFGPWLKAAAERLHHNKLATALANKLARIAWSVLRHGKQFDSQDREAFAV

SEQ ID NO: 296782 - protein, 415 aa, unidentified
MTSSFPWFVGIDWGSTTHHVCLLDATGSVRGNRAFPHSGAGQAELVRWLLDETGAAPGQIAVAIETPHGPVVEGLLLAGFAVFAIGPAQIRASRRRYVSSGAKDDPRDAWMLGRALRADPDLFRRLHLEESLVLQLRERTRTVNELTGQRTRLCHQIRQQLWRYYPQLLAIPDLLNQLTHPWFVELWNKAKTPARALTLRVATLAKLLKKHGIRRLNAESLWEILHAPALSVAPGTAEAAGRALQGLFAQAHTTNQLLAQAREDIRELLKAFSHNHADDQRPDDLTILLSLPGVGVYVLSTLLAEAFDLLQRRDYPALRARSGVAPVSIQSGNTRWEIRRLAVQHELRNGLYHWARVAAQHDPLSKARYRALRARGFSHGRALRTVGDRLLAVACAMLKNGTLYDPKLSRDKLAA

SEQ ID NO: 296783 - protein, 356 aa, unidentified
MKKLTAIAIDLAKDVFQIAGENARGEVIVSERLKSRQAMHKLIQTLEPPLTVAIETGPGAQAWAREIQARGVEVRILPAQHTAAHRCGNKNDANDALSILRALHDVSVHPVPIKTQDQLALQALHRARRGWRRRMTAITHQVRGVLLEQGVVIARGDPALVRKVDRTLEDATLPIPDRLRALVADLMGEWRGLGQRMAALDGELAVLSRTDPVAKHLCQTRGIGPIISTAMACKALNPDRFANGRQFAAYFGITPRQHSSGATLRLGRMSRRGDTYLRSAMIEGAHAVIRQIRRDATDPYSRRIQRWVQRCGRKGAAVRLANHNLRVVWLLLKHPDMAFCSDPAHRGTQAREAAMH

SEQ ID NO: 296784 - protein, 429 aa, unidentified
MRSYNQVIGSPVVFVAIDISKARHEVLIEAPDGKRRRLAIANTKADFDDLTALLHSYRVPCHIGFEATGDYHRPLASILGLQGFHLHLVSSIATNRTREALYNSWDKNDPKDAQVILHLLKTGGTQIYHDPLASGFNDLQEMANTYQQLSLRKVRLYHSIVTHFLPLYFPEAEAYMGTSRAEWFIHLLLLTPCPAAVLAHSKASFIRAASRIRGRKVDKARWLADFYETAKESVGLPVPTNSEAMRMFRLVLEEYAALCERRYQLEEHIEDKLGAHPDFRRLKTIPGVGPVLAMLILAEAGDLRRFSHYRKFLKYCGLDLCTDQSGKFRGTTRLSKRGNARLRYAFWMAGTGAVRMRQNSFREKFDNYLRSDPKNADVKRKAYTAVAAKVARVAFGLLKTGTDYRRFPEVAIPSGRIPSLGAVEASSTS

SEQ ID NO: 296785 - protein, 409 aa, unidentified
MSVHAAPVTSSTVSLAVDVGKSSFAWSLTNSARVRLLGPVECSMTGPSVRELVSRVERVLPLDAQVKVGVEAAGHYHRPLLVPAAWPAGWEVLELNPAHVTEQRRVMGRRRVKTDAIDLEAITELLLAGRGVPASARAAVLDELAAWSAHRTRRVAIRTATKNQLLGQLDRAFPGLTMALPDVLGTKIGRLVAAEFADPARLAALGPSRLIRFAATRNLRLRRPLAERLVTAARDALPTAGAAVARQVLAADLVLMSDLDAQIGAAEAELGRLLPASPFATLTSAAGWGTVRVGNYGAALGDPTRWPGPRQVYRAAGLSPVQYESAGRRRDGGISREGSVALRRALIDLGLGLWLLDPSARGYAAELKARGKRGGIIACALAHRANKIAYALVRDRADYDPSRWSSLDR

SEQ ID NO: 296786 - protein, 416 aa, unidentified
MTEDVHWLVGIDWASQKHQVCLLDLDGRVVGEREFDHEGTGLSQLCNWLIEQTTALPGQIAVAIETSHGPIVEMLLERGFQVYSINPKQLDRFRDRFTVAGAKDDSRDAHVLADALRTDRRAFRRLSVENPLLIELREWSRMLEDLKQERNRLSNRMRAQLWRYYPQALEIADDLAANWFLDLWQQVPTPAKAARVKQATIETVLKANRIRRFDAAEVLRVLRQKPLWVAPGTTEAACAHIRTMAARIRLVNQQIAEANRQLDELCDKLEAEADNAPGQKCEQRDVTILRSCPGLGRINIATLLAEAPEPLRRRDYHALRALCGAAPVTRRSGKQHIVVRRFACNKRLQNAVYHWARVATQHDPISQRRYAALRGRGHSHGALRGVADRLLSVMCTLLQQQMQFDPHYASSQMATA

SEQ ID NO: 296787 - protein, 347 aa, unidentified
MSHKTATPVAHTIGIDTGKNTLHLIGLDDKGAIVLREKIARGRIAARLANVPRCLIGIEAGMATHYVARELSALGHDVRQVPPAYAKPFRQGHKNDFRDAHAIAEAVQRPSTRCVPVKTDDQLDLQALHRVRSRLVGQRTAVINQIRGFLLEHGIAVRQGLRFLRQQLPDILAKRGDVLSPRMIRIIEDLSGDWRRLDERIQHVTEEIEVLAHGSESCRQLMTAPGIGPLIASAMVAAIGNGTAFAKGRDFAAWLGLVPKQMSTGDRTILGRISKRGNRYLRTLLMQGARVILLRPANWAKHSFGLWLTAAAQRLHHNVLATALANKLARIAWTVLAQGRSYEARVN

SEQ ID NO: 296788 - protein, 352 aa, unidentified
MRTSQKTAGIITTIGIDLGKNTFHLVGFDQRGVIILQQKVSRAQLERRLANIPRCLIGMEACSGSHHIGRQLAALGHDVRLIPAQYVKPFLKGHKNDYRDAEAIAEAVQRPTMHFVAIKTPEQMDLLALHRVRSRLVSQRTGVTNQIRGFLIERGITVRQGVAPLRKALPDILSSQTGALSPRMVSLIVDLVQDWRRLDERIAAVSAEIEALAQQDDSCQRLMTVPGIGPIISSAVVAAIGNGAGFQQGRDFGAWLGLVPRQESTGDRTILGKISKRGNKYLRTLFVQAAHVVLERRPSAARQGLWPWIERSSKRLHRNMLAIALANKLARIAWAVLARGRAYQPRIAANAA

SEQ ID NO: 296789 - protein, 389 aa, unidentified
MTQVDDLSRSLAAFDQNSTLTIAVEMSAASWLVAGVIPGIDRLPVKKLQPDPDGLLRLVERWRAEAVKAGRTIARIVLAYEAGRDGFWLARWLRTRGVEAHVIHSTSVAVSREHRRAKTDRLDTGMLIRVFLGWLRGERGHCGMVAIPTLADEDAKRPSRERENLVAERTRISNRLKSALARLGIRGFKPTLRKAPQRLAGLRTLEGMPIPPNTVAEMQRDMARLAVVREQIDEIERARLQALQQAAKSGPHAMVRLLARIVGVGIETADMLVHEVLTRNLRDRRAVARYVGLTGTPDESGSKRREKGLAKSGNSRVRRGLIQLAWRFLRFQKNSALARWYRARTEGPKGARKTTMIVGLARKLLIALWRMARTGVVPVGVELRQLASA

SEQ ID NO: 296790 - protein, 392 aa, unidentified
MNAVGIDVSKGKSMVCIMRPFGEVVQSPFEVMHTGSELNSLAKRLKSLRGETKIIMEYTGRYYEPVAFALHKAGLFVSAVHAQLIHDYGNDTIRKVKTDKADTVKIANYGLSAWLKLQAWRPEEDLRRQLKVFSRQYNKYSKQRTVLINNFIALTDQTFPGVNELFTPQPRKSDGHLKWVDFTARFWHCECINNSSLAVFEKRYLSWCKKSGYRFSKKKSAEIYAAARECCCALPKDDVTNLLIQQAVKQLNAASETLFAFAGGMLSIAQQLPEWPVASAFYGVGALLGPQLMAEIGDVRRFPKKGSLVCFAGLEAPPYSSGKFESKECKISKQGSPHLRKTLFQIMDIVLKNAPPDDPIYKFLDRKRTEKSIITPIWPLAAPSFCASIMDA

SEQ ID NO: 296791 - protein, 310 aa, unidentified
MCYLGIDVSAETLDVAVFGGETWQSRNDDAGIAALVLRVVALQPTLVVLEPTGRFHRWLTAALTHAGVPVAVVNPRQVRAFARSTGELAKTDRLDAQVLARFAAQVQPPVRPLADDATLELAALVDRRRELTAMLVAEKQRLSLARASVRPSLAAHIQYLQRALKETDHDLDRWIRESPLWREQDAVLQSTPGIGKTVARGLLALLPELGVVSHKAIAKLVGVAPLAQESGKWKGPRRCWGGRAEVRTLLYMATLTSIRCRSPLATRYERLRAAGKPPKVAITACMRSLLVTLNTMMRTGQHWAAPAVTA

SEQ ID NO: 296792 - protein, 344 aa, unidentified
MQPSILTIGLDIAKSVFQVHVVEGAGQVVLRRQLKRRQVLAFFQKLPPCLVGIEACASSHHWSRELQALGHTVRLMPPAYVKPYVKRQKNDSTDAEAICEAVTRPNMRFVPTKTVEQQSCLMLHRARHLFIRQQTAVINSIRAYLAEFGIVAAVGRRGVEQLLEVVADPAERRLPEVARMCLAALGSQLRALKAQILEFDRRILAWHRSNATSKRLDAIPGVGPALATALVASIADPKAFRSGRDFSAWVGLVPKQNSSGGKDKLGSISKQGDRYLRSLFTAGALAVIRYAKIHGTKHRPWLTGLLARRPTKVAAIALANKLARMAWVMMARNERYKEPAALAA

SEQ ID NO: 296793 - protein, 344 aa, unidentified
MDHYAGIDVSLEYSSVCVVDTTGKLVRETKVASEPEALIGWFGSLGFGLARIGLEAGPLSQWLYAAMKKAGLAVELLETRHVSDAFKAMPVKSDRNDARNIAQLMRLGWFRPVHCKSITAQEIRAMLTARKLVQSKLQDLENSLRGILRGFGLKVGKTTRTNFAGRIEELVKGHPDLQTIGEALLRVRTVLLAEFNGFEKHVRATSRLCEKARLLMSTPAVGPIVSLTFACAIDDPSRFTSSKQVGPHFGLTPKKYQSGQTDYTGRISKHGDASVREALYEAAHIMLTKPIKGCSELKSWAMRIARRAGINKAKVALARKLAVVMLRMLKDNVPFNPAAKAATA

SEQ ID NO: 296794 - protein, 397 aa, unidentified
MIAVGIDISKAKSTVAVIDSDGTVLASPFTMAHTQPEMEAFVTYLKGLGEPTTILMEYTGHYHYPVLKKLQDEGFPVCIVNPYQMKKYGDVEIHKAKTDKKDALRIAAYALEKSYKLVPYSSMEQKYEDLKFLSRQYNQRISYVAKLKVQLIALLDQTMPGITRILPLNSRNPEKCALLLFIKRFKSFDEIHRIGKARFLASYDVLAKKASERSASSKGLSIYELAVDSITTRGEDPYIWLSQNQCVDLLSATQNAADEIISQMRNIAETIPEYKVLRAMHGVGDRLGPIILAEIGDVHRFHSGKALNSYAGNDAPPYQSGQFESRNRHISKRGSSALRKACYEVMQALKLTKPQDDPVYLFMLKKEQEGKPFNVAKMAGVNKFLRIYYARAMELYK

SEQ ID NO: 296795 - protein, 446 aa, unidentified
MSRKNRTHLRGKRGQKFTNQIRDIPRSRILCVSIDIHKYFHIVMLHNALGEIVTPTFQVDIFRTGFEQLCRAIDKAIAQLNAQHVLIGMEPTGHYFENLARHLQELPRPVTLINSYAVKENRNQHMMQYEKNDDIDTASIGDLICRGEGSSFRPAREIYLQLQHLARAWFSKSKFHRSLKNQIIGHLDRVFPGLVLMDDKARKLYEPLFATNFWDCQTLQHLIRVCPDPRRLVAMSTQELIDAFHAQEYAMGPIHANKILAYTRKILLPDAELIAIRCELLSNDLLLLETIAAHMTKIEERLCALLQQTPYNIWVTVKGLSEHQVAMLAAAIGNPTHYFYAAQVFRRSGLVSGRNDSGTRQRKGSGNHIVKVGDVYLRRALMNAVYTLIPNQPLFRLYFHKLCSSKPNPVARVAVARRAIGILWAMQRDQYSRSLVLNKGVSDVIC

SEQ ID NO: 296796 - protein, 406 aa, unidentified
MTSVFCGIDWATDHHDIALLDEAGALLDKLRIDDTPTGLSQLLDLLAQHGDSPENPIPVAIETSHGLLVACLRATGRPIYVINPLTAARYRDRYALSRKKSDHLDAKVLANILRTDLAEHRPLPADSHLAQAITVLARAHQDAVWDRVQTGNRLRSHLREYFPGFLTVFRHFREGLASSVTRTLLATAPTPTQAAQLTRPQLRAILKKAGRQREITGEVERLHTLLREPQMHQPPVIEQAMGTKTLALLRQFNAACASADDLEAATTTAFATHQDSEIITSFPGLGALTGARVLAELGDDHTRFTSPRALKAYAGSAPITRSSGRKTTVLARHIKNQRLASAGYIWAFAALTASPGARAHYDRRRQAEDRHVAAQRNLFNRLLGCLHHCLTHRIPYDEQTAFPSTA

SEQ ID NO: 296797 - protein, 356 aa, unidentified
MSTITLGVDLAKNVFSVCAMDGAGHVLERREFKREVFAVWLAQRPAGTVVAMEACSGAHHWARRCEEYGLRPRLMAAQLVKPYRKSQRSKNDRNDAEAIATAARQGNMRFVPIKTIDQQARLSWHRVREGYKAESLAIGNRLRGLLAEFGIVMGKSDKALRRVLADLDAHTALPAEFKALIRSVEAHWTQVRTAFDACDARIEAHARDDERCVRLRAIVGIGALTADALIASLGKAQEFRNGRQLAAWLGMVPTQHSSGGHTRLGAISCRGDGYLRTLLIQGARSSLQRAKVVATEKATPEQLWIRSLAVRLPFGKVLVAIANKHARQLWVMLAHEVDYDPCASQRHPLHCPAQLA

SEQ ID NO: 296798 - protein, 339 aa, unidentified
MEPLLHFGFARGDAKRRATTNEQAEVAEFFQALPPARVVMEVGTHSAWMQEIIAGEGHEVLVANPRLMEGSKRRKRKNDRIDAKKLARLGRVDPQSLHPIRHRSREVRQDLVVLRAREALVAARTELINATRGLVKSMGTRLPKCSSPSFEQKVKDAIPERVREALLPLVQLAGALSDCIRSYDQKIEELGSEKYGHTKLLRQVKGVGPITALAYVLTLENPEHFAKSRDVGPYLGLVPKQEDSGESQPQLGISKAGDTMVRKLLVGSAHYILGPFGPDSDLRSYGLRLCERGGKNAKKRAAVAVARKLAVLLHRLWVSGEVYEPLGYVASRAIVQQAA

SEQ ID NO: 296799 - protein, 349 aa, unidentified
MIYCGVDWAESHHDVALINDAGELLAKRRIMDDVEGYKILTDLLADYGDGPDDPIPVCIETTRGLLVALLNQCGRKVYAINPMAASRYRDRHGVSRKKSDPGDALVLANILPTDMHVHRPIPADTPQARAVAVLARAQQDAQWNRQQMSNQVRSLLREYYPAALDAFATWTNPLTRLEAREILRLAPTPAKGATLTIAQLRAALARAGRSRGIEATAERIKGVLRGDYAHQPRVVEDAMGAQLLGLLRQLDAACIAADELASQAETVFREHPDSKIMLSFPGIGPQLGARILAEIGDDRTRFSDARTLKAYAGSAPITRASGKKHHVGRRMVKNDRLNHVGYTCMPLGE

SEQ ID NO: 296800 - protein, 428 aa, unidentified
MYEENFSRLKEFRQLKNEIRGSQEYLIVGIDVAKNKHNAFFGTARGRVLYRKLIFDNDSEGFERLMLQAEAIKVQQGLEKVVYGVEPTANYHKPLGEHLIKNSCTVVLVGTEAVKKNRTLLDGRWDKHDTKDSANVADLISQGKCLYYEYPSVELRDLRNLLSLQRKLKKVEHGLRMRIRNHLVAQYFPELDKCCNWGAHEGLAIVRSCLNPTLISELEYDVFLRKIQTRGRSLAQQKRLSNVWRNAYTSIGCEVIPSVEFEARMIVNLLDQVRMSITDTQEQISTVCRELPEYEYLLSIPGFGPDISAKVLRAIGNPSRFDNGSQVLKMVGMDLSASRSGKKSDGVTPSISKKGNTELRYALYQAALIASSKNKHFIAYFTNKLRGREKEKGIKTKMRVKLATKMLIIAWTLMKKKEYFDPKYLSID

SEQ ID NO: 296801 - protein, 356 aa, unidentified
MKIVGCDLHARQQAIAMVDTETGEFTEKTLDHEGNAVRAFYAALEGPVLVGIEATGAMQWFLELLEEMGIECRVGHPAKIRAQETRKQKHDRRDARLLLNLLSEGRFPEIWMPSSEQRDLRTLLRDRDQWVRMRTRLQHTLQAIALNHAMRQGRALWSARGRCTLEALPLPPYTSQRRSELLGLYAQLQKRIQELDQEVEAQTRQRPQARRLLTHPGVGPVTALATEVFLGDPSRFATANQVASYIGMIPCEHTSGKRQRLGKMTKQGNSLLRYLWTEATMHAVAKDPELKRFYRRKLIQKGMGKARIAAARKLGIRLWIMLRDQIDYEEFCRRGKRQGGEAHARMPDNNSGPALQ

SEQ ID NO: 296802 - protein, 339 aa, unidentified
MKYFVGLDVSLQETFITILSSEGEVVTEKSVLTEVDDIVDFLLSQNLTYEKLGIESGQLSIHLCKGLTKSGLNAICVDARHMSRLLSAKKVNKNDRNDALGIADMIRVNLYKEVKIKSDESCQIKILLGGRRQLVGVRQQTMATIRGLLKIQGIKIKPRINFNQTVIDNLLKNVNDKMIKLTIKSLLDALRQIESSLLELDQAAIKLCKNDEDCKLLTTIPGVGVVTAMTYKSTLDGAARFKDSSLVGAYMGLTPKQYASGEIDRHGSISKMGPKECRTMLYEAAQCLLIRSKKKSKLRSWGLKLKKKKGNKKAITATARKLAVIMHQMLIDRKEFCYQ

SEQ ID NO: 296803 - protein, 417 aa, unidentified
MRVNEKIERITPDTLICGIDVGKTKCCARFCDYRGLEVYHKVWFDKTENLDAIGCQITAAMYKENKTDVIIAFEPTGHYWLNIDKYFKDCGQETVLMPTYTVKQAKEMHDQNPTKSDPKDALLIARLTSEGKYVKPIERDELYQNIYSGYSIYEDIQKEINRIRNKIHVWNDKYFPEVEKVYKIDSVGIKPIYENQLLPNEIKNMTLENFIELMTKDNSRANKKSIMKLKELCEKSNGISSDAFTKKEIKRLYERFIELLKELEEYEKELIELASQIDYVEKAIGITGIGYMSMVGIIAETGDLKNYEHAKQVLKMSGLSLKESSSGQKKGKKHISKRGRSKLRHNLKQIGICLVGKNNFFLQLHNYYTTKREHPLTKLISINAIIRKFMYILMAIVRNGNSFDEEKAIRESCISFS

SEQ ID NO: 296804 - protein, 310 aa, unidentified
MEQVFIGIDVAKDRLDVHVRPSGEAFAVARDGEGLAALVDRLRAVAPRLIVSEATGGFEQVVAGALGAAGLPIAVVNPRQIRDFARALGRLAKTDRIDAETIALFAERVQPELRPLPDAEARLLGELVARRRQVIEMIVAEGNRARLLESRRLKKRIERHRSALQDELSKIDSEIDDTIRGTPIWRENEDLLKSVPGVGNTLARTLLAELPELGSLGRRQIAALVGVAPFNRDSGTLRGKRTVWGGRATIRASLYMAALVASRFNPVIARFYRRLLAAGKPKKLALTACMRKLLIILNAIIREQRPWQGA

SEQ ID NO: 296805 - protein, 339 aa, unidentified
MDKYAVSGIDVSAKELWVGLQREGGKNEPERKFANTASGHQEVKRYLRRAAARVRVCLESTGLYGLDLALCLQADSRLEVMVANPRAVKDFAKALLERSKSDPIDTWVLTEYAARMPFRRWQPPSPAALSLTALARRIHALTEAATREKNRLHALSATDTSLRVLVTELKRSLQWIERSQARLTRAARKVIAAEPRLERRFRLLLSLPGVGESSALQLLGELALIPADAEVRQWVAYAGLDPCECSSGSSLRKRPRISKVGNRHLRRALYMPALTAAHHDPAFGSYYRHLQQRGKCKMVALVAVMRKLLHAAFGMFKHDALFDGTRVFGRPAAAIGAAA

SEQ ID NO: 296806 - protein, 412 aa, unidentified
MSQMLVGIDVSLRSHHVHFMHGEGHTLADFSVRNDVEGADTLIQKIIRTAEKNQTDQLKIGMEATDQYSWHLAHYLKAQCKKVVPHLQTAIYMLNARKVSRFKKGYDMLPKNDKIDAWVIADHLRFGRLPHEMQETLIYDALRRLTRTRFHLVHEIARNKTYMLNQLYLKFSGLRQDNPFSDTFGATSVAVIEELDPGIIADMPLEELVEFLQEKGKNRFVAPEEMAKYLKQLARNSYRLDKVMADPVNLSLSVILSTIQHMETQVKRLDKEIERMMKGIPQTLTSVKGIGPVYAAGLIAEIGDIHRFDDHHALAKYAGFVWTQHQSGEYESENTSRMRTGNKYLRYYLVQASDAIRKHDTEYKAFYQKKYQEVTKHQHKRALVLTARKLVRLVHSLLRTKQLYTPKEERRE

SEQ ID NO: 296807 - protein, 359 aa, unidentified
MDATTVAVDLAKNIFELAVADEHWRVVERHRLSRHQFEHWFANRAVGRVVMEACGSAHHWARWLTSRNIKVQLLPPRYVRPYVKRNKTDAADAAALLEALRCADIVPVRVKSVEQQALQSLHRIRSAWMATRTARINGLRGFCRELGLVIAEGSRLGLEQIARALADPTSTLPELLRGTMRLLVEEIRLLEARIAQLERELTAAARASAACTTLLSVPGVGLLTATAMVAATGGSVAHFQDARHFASWFGLTPKEHSSGGTRHLGRISKRGDRYLRMLLTHGARSVLRAATVTQRCGRPLDPLRAWALAVQARSNHNKATCALANKLARICYATLRDSTPFERTRLDHKLERQAFAMPL

SEQ ID NO: 296808 - protein, 316 aa, unidentified
MTEAQLHVGIDVSKGTLDVAVAPTGQQWRVSNTEEGLGPLVKRLQGLSPALVVLEATGSLEVPVAAALGAAGLPVAVVNPRQVRDFARATGKLAKTDKLDAQVLALFAERVRPVPRPLPEPQTQELTALLARRRQIVAMLVTEQNRLDRALPRVRPGIQEHIAWLAGKLGELNDGMGKLLRESPLWREREDLLRGVPGIGPTVAATLLAELPELGTLDRRQAAALVGVAPLNRDSGTLRGRRTVWGGRATVRAALYMAALVATRFNPVIRPFYQRLLAAGKPKKVALTACMHKLLTILNAMLKHRSPWQANHARIS

SEQ ID NO: 296809 - protein, 401 aa, unidentified
MPTVRENSQRIKRFRELKATLRTDRTRLLVGIDVAQAEHVAHVRQAHTRVVIPQLTIPNTPRGFTQLWTRLQQAQRATGCREIVCGLEPTGTYHQALATFLEAQGADVVLLSSSVAYWNRRTQDGTWDKHDQKDAANCADLLEQGKVLFYSQPTGPLAELRQLVRCLRRARTELAACKARWRTTLRPALAPMGAALPQRLWAELPPVLQAWERAAPGRPAVPKGRLALGLATACADLGAQVTAVQARITTLEAACTPVAERLPAYPLLRSIPGVGATVAAVLLAEIGDIAWFTQFSQLRKLAGLDIVRVQSGQFAGQARISKCGRSLLRWALYHAAMGLARTTAGRPRLAALKAKRHGDRYAGFKAIVELAAKQLRVVWGVWRSGTPYDPRRAGGLRRQAR

SEQ ID NO: 296810 - protein, 341 aa, unidentified
MKNKSFIGIDISKNVIDVSIFCEETPIKDFSHDVFNNSRKGFGEMCTWLKKNHVVLSNCLFGMEFTGSYSMELEKFLNTRNYQFCMLSTHVVKHYPMGPKDKSDKIDSAKIADFLYRYNGTECVKPYNMPDKTMQRLKALMNERKFLVEQRTCFMNRRQLCITKEDAQLYDGYIKKFSRDIENIELEEQKLLATDDSLLSTYKNLLTIPGIGFVNAINVIVITRNFTAFETARQYASYVGVAPHFRTSGTSVKWRPRPSARCDGQAKADLSMAATVVVQYDAELQSFYNRKLGGKQDSDTKRKALNAVKFKLVLRMFAIGKQNREWEPLDSKSSNEKLAIS

SEQ ID NO: 296811 - protein, 363 aa, unidentified
MNFIGVDLHKKSITVCVMDEKRKVLARKTLACTQTDEIVEFCRQFRPFKVVVEATASYLWFVELVEPLAEEVVLANPKKLRVIAESTKKTDRLDAQVLAEFLARDQIPRAYMPTPRQRQHRRLVRHRQYLRQRMTSVRCKIRHILSDYNADRKDLFSTQCGPAYFKEIALSDADRFVIKQLWSEWQDHQSRILALTKKIKAFIVKAPNREKETRAILKTAPGVGFVTAEVIVSEVGDVSRFRNAKAICAYAGLVPTVRQTGGKKSKDLRITKEGSGLLRWALVESAWRLVKTSPKWSAFFSRLRKRSGSKRAIVAVARKLLCVLYAMLKTSTPYKIVATETKAPKPTRRRLVRKSSPKETVTT

SEQ ID NO: 296812 - protein, 310 aa, unidentified
MDACVVGIDVSKDRLDVHVAPSGEAFTVGNDHAGVEGLAARLGPLGPKAIALEATGGFETLAVAALTGAGLPVMVVNPAQVRAFAGALGRRAKTDPIDAGVIAAFVSATGAELRPLPDAETRMLGELVARRRQIVTMIVAEENRGRMLNAREARQSIKRLLAALRRELESLDADLDDRIRKSPVWQVRQKLLTSAPGVGPTVARTLIAELPELGRLDRRQVASLAGLAPWTRQSGKWRGRSFIGGGRSRVRAALFMAALVASRHNPVLKAFRDRLVAAGKPKIVAVVATMRKLLTILNAMIRDQKPWQTA

SEQ ID NO: 296813 - protein, 343 aa, unidentified
MQAVTTIGLDIAKSVFQIHGVDAAGNVIVRRQLKRRYVLPFFQKLPPCLVGIEACASSHHWSRELQALGHMVRLMPPAYVKPYVKRHKNDAADAEAICEAVTRANMRFVATKTPEQQSCLMLHRTRHLFIRHQTSVINAIRAHLAEFGIVAPVGRNGVEQLLDVAADASDKRLPETARACLLALGAQLRMLKAQILNFDRQIMAWHRSSEASKRLDEIPGVGPALATALVASVADPKAFRSGRNFSAWVGLVPKQHSSGGKYKLGSISKQGDRYLRSLFTAGALAVIRYAKVHGTKHRPWLTALLVRRPTKVAAIALANKIARMAWAMMARGDRYKEPVALAA

SEQ ID NO: 296814 - protein, 418 aa, unidentified
MDRGVADIIHPIACGLDVHSAVIAACLVSPGPRGGPHYEERSFSTTLRGLKEMRDWLVASGCQAVGMEATGVYWIPVYAVLEGKVPMVVGNPNHMANLRGHKTDRKDAKWIAGLTRHGLIRPSFVPPAEFRDARELTRARRQLINARTGIRNEITRILAHQGIPLGVKGLLSDIFGVSGMGILEALAEGRDVLEELPKLLYRTVKGKKEAISAALEAGLRTTIRPLMAMHLARLEAVEEDIKQMEALIAKHLAPYQDRLDLLLTIPGVSLISACVIIAELGIDMTVWPTAKHLSAWGGVSPGCRESGGKTRKAKTRKGNPYVCTTMVECAGAAVKKKNCQFAGVYRHLCARTGNKMKARMGIARKLLVVVHHVLETLQPYVEPKAKEPTLRSREKSIRRHILELKKLGIEVPAPGISA

SEQ ID NO: 296815 - protein, 370 aa, unidentified
MGEGTTFIGLDAHKKTIQVALLTPGSRVHVEWEVQNEPAAVRRLAKRLLREGAGRVRACYEAGPCGYALQRQLQEAGVDCQVIAPSLIPIKPGEHIKTDRRDARKLAELLRADLLTEVHPPTPEEESIRDLCRAREDAKEDLLRSRHRLVKMLVRRGILWPPGRNSWTQAHREWLRGLVFERESDRAVFDDYLLALEQVEERVRTLEAKLESISQVEPYREPVAWLRCFRGIDTITAMTIVAELHDFRRFTSPRGLMSYLGLVPKEHSSGESRRRGSITKAGNNHVRRVLIETAWHYRHPYAIGAALRKRREGQPAKVVAIADKAGQRLYRRFYRLGARGKPGCRIVVAVARELVGFLWSILYPRAVALA

SEQ ID NO: 296816 - protein, 391 aa, unidentified
MVCVGIDVAKDKHDCCILDSDGTIRADCFTIPNNMDGFRQLLRMIRDCTTKSDKIKVGLEATGHYSYNILGFLLDNDLAAYVMNPLHTNLYRKSLSLRKTKTDRVDARTIATMLLSDVDLKSYTDTAYHNEELKSLTRYRFDKVRERAKLKQSVSRLVTILFPELEKLVPTLHIASIYALLSEYPGAKQISEIHLTKLTNLLTAASKGHYGKAKAVQIRETARASIGSVMPAKSLELKHTIKLIQELTSEINEIEDSIQQIMDDLNPPILSIPGMGVNSAAVILAEIGDFSNFSSPDKILAYAGCSPSTYQSGKLTNCYAHMEKRGSRYLRYALYNATKYVCHWNPVFAEYLAKKRAEGKHYNVALSHATKKLVRLIYALQKSGKAYLAAT

SEQ ID NO: 296817 - protein, 341 aa, unidentified
MARYIGIDLHRNRFTVCMIAENGRKYRKTVEMSLLDNFAKTLRPDDELAVEMTTNTRLFKGVVEKCVGRVVVVDSAKFKVISESTKKTDKNDAENLAFFLSKDMLPELRMKDAGRERLHSLCQTKDKLTKQRTQLKNKINNSLASIGILLKREELSSDKSLDRVLALDLDPVTMVEMEVIVEQIHSLNRGIAKLKNEIVRKGERYEDHKIISSIKGIGSASASLLLSIIGDVKDFANEKKLAAYFGLVPRVSNSNDTQHSGRITKRGSKLGRTTLVQCGLIAKRYSPYLFRFHERIKKRRGGGKANIALAKKLVGIIYEALTNRWVFTDFTKFKYVKLSAA

SEQ ID NO: 296818 - protein, 322 aa, unidentified
MLYAGLDLSRKRLDFHLLDGQGVTVEVGAAPPDADGLRGLAKRLDRHGSPIRAAIESMNGARFVHDRLEQAGWQVEIADAQKVKGLAPLACKTDRIDAWVLAELCRRDLVPAIWLPDPHVRAERERARWRLHLVRHRSSLKQRVHAVLLAHGKPCPVSDLFGVSGRRLLARLALPEPWRSTVAASLRLIDQLDHEIADCEAELRRLGADHRYVPLLLTTPGIGWVLAYTIAAEIGDITRFASPRKLAGYSGLCPRVYQSGETDRRGPLAKQGPKYLRWALVEAAVHASTHPAYRERYQRTKARIGKQRGAKVAQVDLARRLA

SEQ ID NO: 296819 - protein, 367 aa, unidentified
MPNTKLQSPSDFEGQKFYIGIDVHKNAWSVTIRSLNLHLEHFSQPPSAKALINHLHKKYPGGEYYSAYEAGFCGTGIHEELCKAGVNNIVVHAADIPFTDKQNKNKTDIRDSRAIAFHLEKGNLHGIYIMPRDRQELRSLFRFRQAKVRDLARTTNRLKSFLLYFGVKLGDAFEGKEYLSAKALDCLAHLELNSEAGRITLKTYMDDLVYHRGQLLKITQALRTEIQTKYSKPYQCLLSVPGIGPITASALLAEIGDLNRFDNPAEYCSFIGLIPWEDSSGESTYTKGIQPRCNKHIRPLIVEASWMAIRKEPKLLKYYRRHAVKNSKHAIIKVARRLALIARAAAQKLQPYNPDYYPASEKVKLMA

SEQ ID NO: 296820 - protein, 344 aa, unidentified
MSEVITIGLDIAKNVFHAHGADAAGQMIFSRRLTRAKLLDFFAAQPACLVAMEACGGAHHWARQLTQFGHSVRLIPPAYVKPFVKRQKNDAVDAEAICEAAQRPGMRFVAVKTEEQQASGMVFRTRDLMVRQRTQITNALRGHLAEYGWVAPKGKMHMNLLAGLIDEDEMASTLPPAARAMLKVMTDHLERIDEQIADLDREIARRAREDDTARRLMTIPGIGPVTAAAILSLAPPIETFAKGRDFAAWLGLTPLQRSTGGKPKLGSISKMGDRTIRRLLIIGGSSMVRQACRFGAPAGSWLESMLTRKPRMLVSVALANKMARIVWALLTRHEDFKAPAVVAA

SEQ ID NO: 296821 - protein, 337 aa, unidentified
MLFCGIDLHSNNSVVVVTDDADKVLYSRRLPNNLTEICDALSPYLKDLFGVVVESTFNWYWLVDGLIEAGHSVHLANTVAIKQYDGLKYRGDESDARHLAHILRLGLLPEGHIMPPPLRAVRDLSRKRMQLVQQRTTQLLSIGTCMAQQTGGQISGDSIKRLTEADIDKMPIGSTEAIGVKANLAVMDALQTQIDGIEKVLMAHCHNSPGYRLLNTVPGIGATLATVILLETGDVGRFADVGNYASYCRCVSSTHLSNGKKKGEGNTKNGNRYLAWAYIEAANFAIRFCEPARKFYQRKKAKRNAIVATKAVAHKLARACFLMLKTGEEFSVERCFT

SEQ ID NO: 296822 - protein, 456 aa, unidentified
MKKSSLNKKSPKPSQDESLNVINPHAAGIDLGSREHWVCVPASSTADNIRSFGCTTPDLVALADWLDECDVSSIAMESTSVEWIPLFQILSERDFEVFLVNAKAVQTVPGRKSDVKDCQWLQQLHSYGLLAPSFVPEGEIAVLRSYLRQRENLIKNSSTHIQRMQKALTQMNLQLHKVITDITGVTGLNIIRAIISGEREPKKLAKLADQRIKSSPEVIRKALTGNYREEMVFILHQELCLYETYQKQIQLLDQQIESCFSKFPSHTDETPPKSQKKKHRRSNHPQFDLHSHLYRITGVDFTLIDGLDVLTVQTIISEVGLDKSKFKSVKHFCSWLGLCPGCRITGGKRKSSQTRQVANRAATAFRIAAQAVSRSQSALGAFYRRIKARAGAPKAITATAHKIARIFYTLWTTKQSYTDIGADYYEQQYRSRVVNNLSRRAQSLGFTLVEANPTSG

SEQ ID NO: 296823 - protein, 370 aa, unidentified
MAKRNMFVGMDVHKESIDISIAEDGRDGEVRHYGVIPGDLEAVAKVVRALRKPTRRLRFVYEAGPCGFGIHRYLTAQEEDCVVVNPSSMPKRSGDRIKTDRRDGDALARLHRAGELTAIYIPTADDEALRDLVRAREDAVGLGTQAKHRLKAFLLRQGRRYPGRAGWTQPYRRWLADLSFPLAPQHITLQEYRDTIDETERRVERVTDQLRQLTPAWRWAPVVDALQALRGVSFVTAVGLVTEIGDIRRFTHPRQLMAYLGLVPSEYSSGPSVRRGGITKAGNPHARRLLAEAAWAYQGVPRIGRQMLYRQEALSKTVCAIAWKAQLRLTSRFRKLVARGKAKPKVATAIARELTGFIWAIAREVPPPPA

SEQ ID NO: 296824 - protein, 432 aa, unidentified
MASPTGLTHRLTDTARLSFTGFVGPLGEATARDRTGVRDLIGAWSKSPATVLSARPAGACRPTGISERTAVTSMTHQPLEVTAGVDTHGETHHAAVIDRLGRHLADREFPATGQGYRDLTAWLSCHGTVTAVGVEGTGAYGAELARHLTRQGLRVVEVDRPDRKTRRMKGKSDPIDAYAAATAVASNRATGTPKTRDGIVEAIRSLRVARRGAVKARTQAMNQLRQLLITGEADLRARLRDLSADALIAACARLRPGPDLSDPAQALKFALRRLARRHQYLGEEIAGLDAELKALTARAAPALLELKGVGSDVAGQLLATVGDNPDRLRSEAAFAHLCGVAPIPASSGRRDRHRLNRGGDRAANHALHTVVLCRMRHEERTRAYVERRTSDGLAKKDIMRCLKRYVVREVYQVLTSKNTPTSLRRDGFTEAA

SEQ ID NO: 296825 - protein, 412 aa, unidentified
MQDILTCAMGLDVYRDIIVACLAKGELGSDPEIEIRSFSTLIPEMKKLRDWVLDADCRHVAMESTGIYWQPIYEMLEPCFDGEINILVVNARHMKNVPGRKTDMRDAQWIATLLRAGLLKGSFIPDKEFRELRHLTRYRKSIVHDITAQKNRIDKFLQSSGFRFAAFLSDAFGASGRNIIRNLIQNGSIDRAALDKCLKTQTRKRIDQILIALNGNLSIHQRSFLAMTFGHLESLEAHRKAVEDAITGEILKHSEALDLLCSIPGIDVTAAAAIIAEIGTDMSSFSDPQHICSWAGLSPGNNESAGKRKSAHINKGNPYLKSMLCEISWVISGKRTLYLSGWYWRIKQRKGSKRATIALARKLLTLIYSILKTGQPYDEDCFEQRRKRCERKRAHRMVNELQKLGYTVVPPN

SEQ ID NO: 296826 - protein, 414 aa, unidentified
MSESFSFFVGIDLGSEQHHIEVINEQGGNAGRRAVDHGGAAVTEFLHWLAQLTSVVAPPEVAVAVEAPRGALIDALLERGYAVFSINPKQLDRFRDRFSVAGAKDDRRDALVLAQSLRTDGEHFRRLRADDPRIVRVRELSRGEQSLQQDLRRACNQLWNYLQRYFPAVLQLSSSADEPWLWDLLRRCQALPTRAARFRPETIASLLRRHHIRRLTAEQVHLALREPLPLAPGVAEALAEQVLTLLPRLQLLRQQRLDLSQRVEQLIEELTADENFAEHRSLAILRSLPGVGRVSAAAVLAEAFTPLAEKDYRSLRALAGVAPVTKQSGKTRLVSMRRACDNRLRCALFHAANVHMQKDERARRIYHRLRQCGNSHARALRGVADRLLELLCTLLRKQSLYDPAKRLIQQQVPA

SEQ ID NO: 296827 - protein, 389 aa, unidentified
MSQYNTVFVGLDQHKESIAVAYAPEEREAEVAFLGPVGTRQCDIDKLVRTLQSKASNLLFAYEAGPCGYWLYRYLKRKGLRCLVIAPSLIPRKSGDRVKTDRKDAVQIARLLRSGDLSGVYVPEIEDEAIRDLCRARQGAMHDMKASRLRLKSFLLRQDIRYTGRATWNPAHLRWLSEVVCPTPAQQIVYQEYLRAITQHYERLGRVEAELHQQVKGWRLSPLVEAYQAMRGVQFHVAVTTAAELGDIRRFDKPRQLMAFVGLHPSEDSSGPRHRKGGIAKTGNLYARTALIEGAWSYRYPAKVSRQIQERQEALSPAIRDISWKAQVRLCKRFRKLIAQGKHPNVAVTAVARELVAFLWAIAQQVQLPAAVKPLSGTTGDEAAAPSVN

SEQ ID NO: 296828 - protein, 381 aa, unidentified
MDVIYPRCAGLDVHTETIVACALWEEEGEIQKEIQTFSTFSTFSKGLGDLLDWLEDHGVTHVAMESTGVYWKPVFAFLEGYVDLTLANPQRIKNVPGRKTDVSDAEWIAKLLRHGLIEKSFVPPAPIRELRDFTRLRKKWVGQLSSEKNRIQKVLESSNVKLGSVLSDLFGVSGRNILARLLEKGYVDKDELDECLRGRLKTKKQAVYDSLLGTLTEHELYLLRLLWKHVEELERLIEEVDQHIDRLLEPYREEVDLLMTMPGIKKQTAAVIIAEMGTDMSVFETPERAASWTGLSLGNHESAGKRKSTRTTKGNPHLRSALCEAAWSAARSKTHPLSRKFWSLAARCGKKKALIATARRMLVIIFCMISRKEPFRQPQLI

SEQ ID NO: 296829 - protein, 377 aa, unidentified
MSKIRFVGLDVHAETIAVAVAEVGGEVRSLGIIPNRLESIRKLVGKLGPVQHLKACYEAGPTGYVLYWQLTQLGVACKVIAPTLVPTKAGDRVKTDRRDAEKLARCYRAGELTSVWVPDAAHEALRDLVRAREAAKKDQLRARHRLGKFLLRYGQRPTDAGKAWTKKYLEWIKTHVRFDQPALETTLAHYLHEVEHTAEQILKLEKAIDEAVAQASPEVRSVIEALQSLRGVAQMTAATIVCELGSLSRFESPRQLMGYSGLVSREHSSGNRIRRGAITKTGNAHLRRVLVEAAWAYQHRPNVTGFLLRRQKSLALSDEVKQIAWKAQYRLHKRYQALALHGKSKNQIVTALGRELLGFVWAIAVHTEAQCKLVKAA

SEQ ID NO: 296830 - protein, 433 aa, unidentified
MSKFFNSPVVGIDVSADFSYAAILAPNGEVYKKSFKIKHDVSGFNHLVNEIKKVEKEFNMKTATFMESTGVYHLSLFHYLKNTFDNTFVINPLVTKCNKNVDIRKVKNDKKDALSIANIGKFQNIKLSQTNDLDIFLLKNLVREYYKLTDTCSTFKKKLSADLRIIFPNYNTIFSDPTSNTSLEILSNYPTPKSIIDTPKEDVIKILLEKSKKGLTWSEKIYSKLITVAKEANIIGVPLDGLSVKISSSLALIKAFKSEIDNLLNEINTLIESSEFPEPIKGNIELINSIPGIGSLTAITLIAEIGDINGFIKPKHLIAFFGIDSSVNQSGKFLGDQSKISKRGTRIGRRALYAVALASIRRNRNGIPINKVLLEYYQVNLKGKKAKVALVAIMHKILNYIFAVLRNQTPFEQRDPKIHKQMFLENKTLHSAA

SEQ ID NO: 296831 - protein, 364 aa, unidentified
MLIIGCDYHPGFQQIACVDTDTGELREHRLVHREEAEQFYRELKQRNLWVRVGMESSGHSRWFERLLHELGFELWIGDPAEIRTKRVRKQKTDRQDAQLLLRLLMEDRFPRIWVPDAENRDLRQLLWHRHRLVQMRTRVMNQLHVVPLNEGLRRKKALWRPAGRKELESIVLARWASRRRQDLLDVLDQLTPKIQELTRALEEEVEKRPVTRRLMTHPGVGPLTALAYELVIGTPERFHCGKQLASYIGLVPTEESSGDRRRLGHISKQGNVLLRFLLVEAAQVTVRSQQEWRNQFFHLAMRRGRKIAKVAMARKLAVHLYWMWRQGCDYGQMHKLGSHAGEPGNPDGVQSITDVMIGHPAPSK

SEQ ID NO: 296832 - protein, 330 aa, unidentified
MQAITTVGLDIAKSVFQVHGVDAAGQVVIRRQLKRRYVLMFFQKVPACLVGIEACASAHHWSRELQALGHTVRLMPPAYVKPYVKRHKNDATDAEAICEAVGRPTMRFVATKTPEQQSCLTLHRTRHLFIRQQTTVINALRAHLAEFGIVAPVGRNGVEQLLGVAADSTDKRLPEVARACVAALGAQLRMLKAQILQFDRMIMLWHRSNEASRRLDDIPGVGPALATALVASIADPKVFRSGRDFSAWIGLVPKQKSSGGKDRLGSISKRGDRYLRSLFTAGALAVIRYAKIHGTGHRPWLTALLARRSTMRGHALLADKARSRLRSAGR

SEQ ID NO: 296833 - protein, 387 aa, unidentified
MPQVNDLSRCLAALDQDSTLIAVIEMSQSSWLVAGIVPGIERHPAKKLEPDQTALLRLLHRWRAEAERAGRAINRIAVAFEAGRDGVWLARWLRAREVDAQVIHPNSIAVAREHRRAKTDRLDVALLKRSFLGWLRGEPDHCQMIAIPTLEEEDARRPGREREGLVGERTRIINRIKSTLAWLGIRGFKPHLRNAAARLEMLRTPEGMPLPANTLAELHREMTRLQLIGRQIREIETARLERLRRQPHAGAHPMIRLLTQVRGVGVETADLLANEAFARPLRDQRAVARYGGLTGAPDESGSRRREKGLARAGNARIRRGMIQLAWRFLMFQKDSHLAQWYWRRTVDARGATRKTMIVALARKLLASLWRLATTGEVPEGVVLRPAL

SEQ ID NO: 296834 - protein, 355 aa, unidentified
MQQAGNGMLTIGIDLGDRRSAYCVLGKDGEVMEEGAITSTPLSFERHFLKYPRSLVALEVCFHSRWASQVLERCGHEVLVANACKVKLITQANRKNDRVDARALARLARADRRLLYPIRHRSEEAQMVLAAIRSRDALVRARTKLVNCVRGMVKPTGVRLPICSTETFHKRVPELIPPRLRPAVGRMLEQIAQLNHAILEYEREIHRMAREQYPETEVLEQVHGVGPLTALAFIVTLDDRERFAHSRQVGCYLGLQPKQRQSGESNPQMGIGKDGDPYLRTLMVQAAHCILGPFGPDSDLRRWGLMIASRGGARGKKRAIVAVARKLSVLLHRLWVTGEVYEPLRNGATLSAVAP

SEQ ID NO: 296835 - protein, 444 aa, unidentified
MQLVHTHCAGLDVHKKTVVACARIVQDDGTRTTHIRTFPSTTAGLLNLLDWLLSLGITQVAMESTGEFWKPVYNLLEGNVTILVVNAQHMKQVPGRKTDVKDAEWIAELLAHGLLRASFVPPAPQRALRDLTRQRTNLVQERARVVNQMQKVLEWANIKLSSVVTDVTGVSARAMLEALVAGSTDVSALAEMAKGRLRAKRSELEQALAGTLQSHHAFMIAQHLSHLDFLEEQIAAFDQAVETAISVGGRPSEPDAPTSEGGESSRPEGVGDEAGNTSWLAARTLCDAVPGIGKRVAETIIAELGTDMSRFASAGHAASWAKLAPGQHESAGKRKSSRIGKGNRHLRQALIQAAQAAVKKSETFLSAFYRRLAARRGKKKAIVAVAHKLLVIVYTLLKTGECYQERGATALDERQKDRLLVRLQRRIAQLGYTVSLEPNPVAAS

SEQ ID NO: 296836 - protein, 316 aa, unidentified
MKNYIGIDISKSSIDVYDGKKSYKFENNDSGFKKIIALVKNIKETIFIFEPTGIYSYELTNFCSKKKISIVMVGPKESRDFARSLKVRSKTDKIDAKILYKYQLHVEPSMVKVPKINHHAIKIQEMLNVYEGIQASKQRFKNQLESTNKTHKDLVRTLNRIISDLDMEATKLFNKIELLLLKDAEIKKRYDAIITIPSIGQKSALYLTAFFLKYPTANAKQMTALIGLDPVMKDSGLFRGKQRISKHGGQQLRNLLYLPTLCAIQHNSWIKAFYERLTSQSKTKKLAVIASMRKLILMAFSIFKSKEIYQPLPVEI

SEQ ID NO: 296837 - protein, 422 aa, unidentified
MVIIINNQLNCLYVGIDVSKQSNQVYITDFNQSFSKSFNALNNNHGAKFIETNLLTYFKDTLYTHVVVVLESTGIYSAHIATYLSASFELLPYHIEVYCINPKISRNYRASFSDMDKTDPKDAFILADLARIGRTKSLNPFKGTQKLALQRLTRHRVHLVESLNKEKNYVLTNIFLKFSEFGNKDSKFTSNTFSKTAVSILEEYSSPEDIINTPFDELVAFISETSRNRFTDINEVAKLVKKAANASYRLDKVAYEPINYAISSSLVLVRCFEDEIKKIDKSIETLAKGFSQNEYLSLRSIPGIGPVFASGILSEIGSVSQFKNEEALAKYAGITWRKNQSGNFEADDTKMTKTGNHYLRYYLIQAGNSVKNYIPLYNDYYHKKFNEVTNHQHKRALALTSRKLIRLIYGLMSKGQLYNKNY

SEQ ID NO: 296838 - protein, 430 aa, unidentified
MKSNTQNKKIEAITEKTLVIGIDVGSETHYARAFDYRGIEYSKKPFKFSNTEAGFVTFKEWILDLKEKHEKDKVVPGMEPTGHYWFNLGKYLQDNEMKPVLVNPHHVKKSKELDDNNPTKNDRKDPKVIAGLVREGRYMIPYLPDGVYADLRTASNIRFQLQSELTRIQNRISRWFNIYFPEYKTVYGKPDAKSGMLILKEAPLPEDILTLGIDGVDQIWRDAKMRAVGKARAKTLIEAAEHSVGSKEGAVSARMEIRMLLEDYESRNMRLQEVMVLIEELVKQIPMAEKLLEIKGVGIKTVSGFLAEIGDISRFNSPKELQKLAGLALVENSSGKHKGETTISRRGRKRLRYLLFEVAMSLVAKNPEFRELHNYYTTRRLNPLKKMQSLMAIAAKLIRVFFAMLTKGVDYDPKKMVSDIKRPAVYLQAA

SEQ ID NO: 296839 - protein, 337 aa, unidentified
MSSLPVFVGLDYHQDSVQVCVLDQQGKQLCNRSVSNDARTIQRVATRHGLPRRIAIEACCGAADLAEELATQRGLSVQLAHPGYVNRMKRSPDKTDLGDAQLLADLVRVNYLPKVWLAPRAIRELRRLVRHRAQLVNRRKDVKLRMRGLLRENRLQCQEAQAWTKAWLAWLTDQAELSDSDRWLVEDHLAELASLTDRIKAIEAKIQTQTKDDPLVARLQEQSGVGPVTAVTMRAEIGRFDRFDTGKQLSRFCGVTPRNASSGARQADAGLIKAGNPGLRKVLIELAHRLIRQPGGKWAKLAGGMLQRGKPKNVVVAAVANRWVRWLHHELRRETAV

SEQ ID NO: 296840 - protein, 321 aa, unidentified
MAKIICGVDVSSQFLDVFLNPRCQRFPNTVAGIADLLALCQQHHVDLVAVEASGGYERRMYRQLWAAGLPVALCNARAVRDFAKSMGRLEKTDPMDAALIAEYAAANQKLVAHPPQSSAHDQLRALVTRLRQLTETRATQLQQRLLVTDPVVLETFTRLLAFLTSEIRQLQDRIAQLIDADPLWHHLEHAFRSIKGVADRTVACLMAELPEIGTLSHKAVSKLVGLAPLADESGRRHGRRSIRGGRATVRHLLFIVASVVRRYHPDFAAFSQRLAAAGKAKKVILVALAHKLLIRLNAKARDARRQLLPMASLPLTTTIPS

SEQ ID NO: 296841 - protein, 344 aa, unidentified
MNCNTQNAKIASITEKTLIVGIDVGSETHFARAFDWWNYEYTKKPLEFSNTEAGFMMFKAWVEDIAEKQGKTAVIPGMEPTGHYWFALGKFLQDSGMKPVHVNPHHVKKSKELDDNNPNKNDRKDPKTIAALVNEGRFSYPYIPTGIYAEIRSLSNLRFQTQEELTRIKNRIARWFAIYFPEYKDVYGDLMAVSGRMILKEAPLPEDIRILGVNGVNQIWRNAKLRGTGMKRAKILVSAAEHSVGSKEAPEAARIELKNLLNDMDVYVSRMEELLQTIEEKLKTIPYVDKLMEIKGIGLITVSGFIAEVGDIGRFDNPKQLQKLAGYAIVANDSGKHNGESRIS

SEQ ID NO: 296842 - protein, 342 aa, unidentified
MEAKRYIGIDLHRDCFTACLRLENGREYLKQWKLEELAKFTAKLRPTDQVAVEVTGNTRLFHEAVAPYVERVVAVNPSQFKVITHSVKKTDPNDARNLALYLAKDLLPEVRMKDKTQAQIASLTQTRDTMVKLRTALKNKVNNLCSAHGVNLNKESLASQKGLRAVLEMRFDPLVNLELKIIIDQIRSLNQSIAELEQAIGKEGQKLEGHKNLTSIKGIGGLSAGILLSIIGDIGDFSDEGKLAAYFGIVPRISNSNETEHSGRITKRGTKLGRTTLVQCALIAQRHSPHLKNYYEKKKSRGTGKAIIALARKFLGIIYRTLKNKWLFEDFPNFVLAEEATA

SEQ ID NO: 296843 - protein, 428 aa, unidentified
MKKTGMEKLEAITAKTLIGGIDIAKKVHWARFVDYRGIPIGKAIRFENNKAGFEHIVAETERLRKAHGMDYVLLGMEPTGPYWKALAWRLKGLGLRVVTVNSHHTKQAKSLDDNSPTKNDKKDALVIARLVKDGRYFEPYLPEDVFGELRVSSNTRIALMKRMNGVKNRVMGILDEYFPEFTDVFRKPLKGKASMQILKSCPFPVHILELGVEGLLAEVKKAVKKTVGKKKVSALLEAARDSIGVGYGLESARMQMKMLIEELEFLQKQLEEAEARMRVLLEMTGYAELLLGIDGVGVVSAASFLGEIGDPLRFDSPRQISRMAGYNLVENSSGQSKSGTSISKRGRKQLWALLYRMAMVMVSKNSELKLLYHHLKTRRDNPLKGKQALVVVSKKIITIIYQILKTRKAYEPALVLGAVRKQQLGLAA

SEQ ID NO: 296844 - protein, 391 aa, unidentified
MIYIGIDVAKDKHDCFITNSDSEVLFKAFTILNNLDGFNNLYQKIESVMDDVTKVKVGLEATGHYSYNLLGYLIDKGLPTYVINPLHTNLYRKSLSLRQTKTDKVDARTIASMLMSDVNLKSYSDTSYHNEELKSLTRYRFDKVKERAKLKTSVSRLVCILFPELEKLVPTLHMASVYALLSEFPSAKHVATAHLTRLTNLLSESSKGRYGKDTAITFRDSARASIGSNMPAKSLELKHTIKLIQELDSEIDEIENEIKIIMDEINSPILSIPGINYRMGAMIIAEIGDFNRFDSPDKILAYAGFSPSTYQSGQLDGAYAHMEKRGSRYLRYALYNATKYVCHWDPTFAAYLAKKRAEGKHYNVAISHAVKKLVRVIYHLEKTKQQYIKAA

SEQ ID NO: 296845 - protein, 414 aa, unidentified
MEKLLERCAALDVHKRQVTACAHVPDRQGERAELRAEFETMTPDLLALRDWLKGLGVTHVAMEATGVYWKPVYYLLEDDFELLLVNASHVKNVPGRKTDVADAQWLCQLLEHGLLRGSFVPPKPIRELRDLTRYRKSLVWERQREANRLQKLLEDANIKLASVATRVLGASGRAMLAELCEGRNDPEALAELARGKLRRRLPELRRALTGRFSSHHALLVSQLLSHIDYLDEAIDALSNEIEQRLRPFEHKLELLTTIPGVAQRTAEVILAELGPDMQRFPDHRHAASWAALCPGNEESAGKRKTGKTRKGDSWLRTALIEAANSAAGRTRDTYLNAQYVRIKRRHGHSKAIVAVAHSILIAAYYILQQEKPYQELGGDYFMQRENTDRLTRRLVQQLERLGQHVTLEPALEPR

SEQ ID NO: 296846 - protein, 348 aa, unidentified
MENVSRIGMDTSKSIFVLHGVDASDQVGLRKKLRRKEVVEFFRKLRPTRIGIEACGASHYWARQLSALGHQVLLIAPQHVKPYVRRNKNDAADAEAICEAMSRPRTWFVPAKTAEQQAGLMLAGTREAFVRRRTQLSNTIRSYAAEFGLVSSRGLDKIEPLLARIAADDDLPTLAKEMFADLGEDYALLQKRLEIIERKLRLWQRNDEQSRRLAEIPGVGVVGAALLAMKVPDPKAFRSGRDFAAWLGLTPKDHSTAGKQRLGVITRAGDETLRSVLVVGATALLRQVRLGRSHHSRWLADLLRRKPPKLVAVALANKTARIAWKLMVSGESYDRTRVGIAAREAAPA

SEQ ID NO: 296847 - protein, 347 aa, unidentified
MLHAGLDLSRRRVDVHVLNEAGETLVVDAFPPDADGLAHLVRHVASFREEVHAVIESMNGARFVHDTLELHGWGVEIADALRVKGLAPLACKTDKIDAKVLAELSRRDLVPAIWLPTPSVRAERERARFRLHLVHHRVALKNRIHATLLAFGHPCPVSDLFGESGRALLNRLAIPEPWAGTVSASLRLIDELDGQIDATERELRRLGANHPYMSLLQTVPGVGWVLAYTIASEVGDIARFESPKKLVGYTGLCPRVYQSGGTDRRGRIAKNGPTYLRWALIEASIHACKSPLYKPAYDRTKARLGRDRGGKVARVELGRKLAEAMWHMLTKGERFAPARSQTVALVA

SEQ ID NO: 296848 - protein, 373 aa, unidentified
MNYNTVYVGMDVHKETFSLCCYTNEKELAEYSQKVDAHYSKVLNYLEAMRFHYGDDVMFICGYEAGCLGFTLYHQLTSHNVKCIILAPTTMSKPTGRKKVKTDKRDAALIARCLAHHDYSPVHIPTEQDEQVKEYIRMRQDHKLALKKIKQQILAFCLRHNYRYDTTKSHWTQAHLTWLRSLEPEGLYQEILTEYLATYDQLTDKLERLDKRIEELASKEDYQENVSHLSCLLGVKTQTALSTLVEVGDFKRFASAQQFASYLGLTPGEDSSGEDQNRLGITKAGNSHIRTLLVEAAQSYTHGKPGYKSKALKARQKGNPADIIAYADKANERLRRRYYQLVLGQNKKANVAKTAVARELACFIWGMMTDNIH

SEQ ID NO: 296849 - protein, 411 aa, unidentified
MEVFCGIDWAEDHHDIALVDRDGNLLARRRIGDDAAGLAQLLALLAEHGDTPGDPIPVAIETPRGLLVACLRAAGRQVYPINPMSVARYRDRHSVAGRKSDHGDSVVLASVLRTDRHAHRPLPADSELAQAIAVLARAQQDAVWDRTTAHNRLRSHLREYFPGFLAAFAGARGGIMRPEARTILAAAPTPAAAAALTLTQLRGLLRKAGRSRGIDTEAARLREAFGAGQMRQLPLVEQAMGRQALALLGQLDAACAAASDLEHAAAESFNLHPDAGIITSFPGLGPLTGARVLAEIGDDRSRFQDAKGLKAYAGAAPITRASGKTRSVTHRRVKNNRLNAAGYSWAFAALTASPGARAHYDRRRDDGDRHAAAQRNLFGRLLGCLHHCLITGQHYDEATAFPARPNLPAAA

SEQ ID NO: 296850 - protein, 339 aa, unidentified
MKLYAAIDLHSNNSVLVVLDEKDRIVYERRLPNDLQYILGQLAPYRESVEAIAVESTFNWYWLVDGLMEGGYKVKLVNTAAVKIYEGLKYTGDEHDARHLAHLLRLGVLPTGHIYPREERGTRDLLRKRAHLVRCRTAQILSIQNLVSRNSGKGIKTDEVRDLEENRISQVCGGDAARAMAMQSSLAVLKCLDEQIRAIEGVVLKKAKLKPAFQKLLTVDGIGKILGMTIAYEAGTMDRFERVGQFASYARCVSSSRWSNGKKKGEGNRKNGNKYLSWAFVEAAHFAVRYNERVRKFYQRKKAKTNGAVAAKAVAHKLARACYHVLKEQVSFEEARAFA

SEQ ID NO: 296851 - protein, 317 aa, unidentified
MSKTITIVAGIDVAKAKLDVAIHSCKPRWQVTNDPAGFHDLAGLLRSRKVTRVGLEATGGYERDVVEYLRKAGFSVVVMQPRQVRAFGEFILCRSKSDRIDAGLIAACVAHHQIEREAPDPRIAAFADQLTFIEQTEEDIVRIKVRLEHTRDPKLRRVMLVDMERLKTRRAKMIAKLASALRAHEDLARRLDLVGSIDGIGPRTALAFIIRMPELGRISREQAAALAGLAPFVHDSGDRKGERHIAGGRERLRKSVYSAALPAAFRWNAQLVALYQRLTEAGKPHKLALVACARKLVIFANTVLARGTEWSSRPAAS

SEQ ID NO: 296852 - protein, 426 aa, unidentified
MKSNTQNAKITAITEKTLIVGIDVGSETHYARAFSWRGFEFSRKPLEFSNSEEGFETLKAWIEDLKKKRGLDKVIPGMEPTGHYWFNLGKFLQNNGMRPVHVNPHHVKKSKEMDDNDPSKNDRKDPKVIAGLVNEGRYFYPYIPDGIYAEIRVLSGLRVLAQSEITRLKNRIARWFSIYFPNYKDVYGNVGAISGLMILRAAPLPEDIVKLGVGGVNQIWRDAKLRGVGIKRARTLVEAAEHSVGSRDAQEAARIELQILLSDYDRQTKREAELMALINEKIREVPYIDKLLEIRGVGLKTVIGFVAEVGDIKRFDDPKQIQKLSGYAIVKNQSGKHKGESHISYRGRKRLRYVMYEAAVSVVSHSPEFRSIHQYYTTRDKNPLKKMQSMIAVACKLIRIFYVILKNGTKYDAAKMMGDIRRPEAA

SEQ ID NO: 296853 - protein, 363 aa, unidentified
MNATALSPMVGVDLSKNVFELAVADAQWRVVERARLTRSQFERWCAKRAVGLVVMEACGSAHHWGRWLTGMGIEVRLLPARYVRAYVKRNKTDAADAAALLEAARASDIVPVRIKSVEQQALQSLHRTRSLWMSTRTSRINALRGFCREFGIAIAAGSRIGLEQIGRVLADPHSALPALLRDTMQLLVEEIRLLETRISQLERELTELARQSPACQTLLSVPGIGLLTATALVAATSGQVNHFRDARHFASWFGLTPKESSSGMTRRLGRISKRGDRYLRMLLTHGARSVLRAATVAQQRGRSLDALRSWALNVQGRTHHNRATCALANKMARICYAVLRDGNDYGVARVNRKMQRETYAMPT

SEQ ID NO: 296854 - protein, 482 aa, unidentified
MKKKNIYVNQSQELLTLFEEAGDSAKIMCVPIDYAKKDHVVMFCNGHGDILRKPFSVKNNPEGVKYITEQVSRSCRHHKINQNHVFFGGEDVGSYAENFASTLRSGGWLVAGVNAHDAKKQRANLQASTDRLDLMGIATMLLNRRANCSPAQSGIYRNLRTLVRHRRRLVVMTTEVRNRIHAIVDRLFPGFLDERKSGITPFSKSSLYLMENRFSASQIRRRRRSTLIEALRGLGTPKPDCAVAKLEEYAQQVLKTPDEYVSTLQLSMAQHVKHYRCLQENIEQLERETALWLAQTQGAFLTSVRGIGIVLAAGVSAEIGDPFEQKPLNNLVSYSGIIPRVIQTGGPEGEIYTGKVAKRSNRILKDYVVQSASHLGLHGPEDLMIEHKRRDAAGQHADFGIARRYLRMAMCLMRTSQVYLPPRLRKPGMKPEERAGYYLMTWPYLRDKWQKLGALEAAFSEDRPLGRWRNMVQEFYKIKLTL

SEQ ID NO: 296855 - protein, 355 aa, unidentified
MNSIKYIGMDLHSATISAAVANDAGKLIMEATMATEASAVLGFIGGLQGTLYVAFEEGIHAAWLYDLLRPHVAEVVACDPRQLPRRKGENRNDKIDAQQLAQWLRLGILKPVYHSPNGLRTLKELVRSYLTLVSDSTRIMNRLKAIYRARAIPAKGMRVYAPRLREAWLKQLREPGVHHRAQLLYRQLDALLPLRRQAKKAMIAESRKHAAQKILGSIPTLGPVRVAVLMGVIQTPHRFRRNRKLWTYTGLGLVSRSTANYRIVEGQLTRAGKPALILGLNLNHNHVLKEIFKDAAATAVSRPGPLREFYARQLATGKDPEIARVIVARKLATLVLTLWKKGERFNAEHLKPQAA

SEQ ID NO: 296856 - protein, 392 aa, unidentified
MTCTDHPLPAPTAARSDDSTLFAALELSRKSWLVATNAPGEEKVSKRTIAAGDGRALLDLLAGLREKAERRIGKPVKVVVIQEAGLDGFWLHRLLEANGIESHVVDPASIAVDRRKRRCKTDALDVDALLRTLMAWARGERRVCSMVRPPSPEDEDHRRLSREREALVKERIQHTNRIKGLLAAQGITDFEPLRPGHRARLDGLTTGDGRALPPRLKEEIRRQLARLDAVITDLKAVEAGRDALLADDTAAVSTAGGTPPAAAALSRLKGLGPEFVSILCLELLFRSFNNRREVAAYAGLTPSPFKSGGIDREQGISKSGNPRLRKMMIQLAWMWIRYQPGSAISRWFAGFAGTKRGRIRRIGIVAVARKLLVALWRFATQGVVPDGAALKS

SEQ ID NO: 296857 - protein, 413 aa, unidentified
MTRIIAGIDVHKRVLMVVVGLAAEGQEDTSLRFQSRRFGTTVAELEHLAAWLQQHGVQEVVMESTAQYWKPVWLALEAHFQLYLAQAWSNRAPRGKKADFKDAQRLVRRQLAGELTLSFVPDAEQRLMRSLTRRRQQLTRQRVRIQNQVESLLEETRIKLSSKVSDLFGASGLRILTALASGVSDAKRLAALGDPRLQCSSEELAEALTGVCSEIHRRLLQQHLDTLELVDRQLAELASMAASEMHQHTEAVSRLVKIPGIRVLAAQQIIAEAGPQAEAFASAAQFSSWIGVCPGREESAEHNYSSRCAKGNKYLRAVLCQAAQAAARTKNSFFEYKLKRLLPKLGYVKAIWAIARHLSVIIWKILHEGAEYIEYGARSTPEACKRRLQRLQKEFRALGYQVELKPLTPGITG

SEQ ID NO: 296858 - protein, 426 aa, unidentified
MWDARRRVLKIKSLKHGIIQDKRGNIMRTVFGIDVSKASSEVAILVNGEKIHGYTMLNDAIGFNRLLNDLKTVHNPEIIFEATGVYSRRLRVFLEEYGYAYTQLNPLEAKKQLDSLRVRKTDKIDAEKLAHSQFILNRKPTYAQEEVYQHLRDLSRFYQNLTEDIVRAKNRLHKVLQVTFPELENLLSTPTGEQYWNLVMAFPCNEFVLSLSQSNLCEIIRQSTSKRISEKRVTYLVDKLTKLANQSYCAVKKTSPMLEEVRYYAQELLRLSERRQVVLNDMVALAQPLPEYDILRSIPGIAETTATSIIGELGDIRRFQSTNQINAFIGIDLRHYESGNFLAKEHITKRGNPYARKILFKCIHNIASASHTNPCHIADFYEKRKRQSTIASTKPHTIASIHRLIRTMYYLITHNKLYDYSLTQNR

SEQ ID NO: 296859 - protein, 408 aa, unidentified
MKTLHKRCAGLDVHKAEVVACVRLISKRKVEREVRRFPTTTQGLLALAEWLESAGCTQVAMEATGVYWKPVWHILEGRFALILANAAHVRNVPGRKSDVNDATWLADLLAHGLIRSSFVPPPAIQELRDLTRTRRQLTREIVQHVQRIQAVLEQANIKLCSVITDIMGASGRRMLMALIAGETDAEKLAALGHERLGCTRAELVEVLTGRVREHHRFLLGQHLRTIEQLEDSVAAFDARIEAALSPFHDIVERLKEVPGLAATATETVIAEIGTDMSPFPTVGHLLSWAGFAPRLDESAGKRRSTRIRKGAPWLKPVLVQAAWGAARKKNSYFQAQFLRLKARHGAKKAAIAVAASILTTVYHMLRDGTCYQDLGPEYFTRRNPAQAAAKLANRIRNLGYHVEIRAAA

SEQ ID NO: 296860 - protein, 400 aa, unidentified
MRVVFGIDVSRASSEVAILINGEKVHGYTIPNDAIGFNRLLGDLKTVHQPEIVFEATGVYSRRLQAFFEDNSYAYTRLNPLESKKQLDSLRVRKTDKIDAEKLATSQFILNRKPSYVQEALYQELRDLSRFYQNLTEDIVCAKNRLHKVLQVTFPELENILSAPTGEQYWNLVMTFPCNSFVLELDDATLRAIIRQSTSKRISEKRVTYLVDKLTKLANQSYCAVKKTSPMMEEVKYYAGELLRLSEYRKSVLEEMVTLAQPLPEYEILLSIPGIAETTATSIIGELGDIRRFHSANQINAFIGIDLRHYESGDFLAKEHITKRGNPYARKILFKCIHNIASASHTNPCHIADFYDKRKRQSQVTSTKPHTIASIHRLIRTMYYLITHNKLYDYTSTQNR

SEQ ID NO: 296861 - protein, 391 aa, unidentified
MSMYFIGIDISKYKHDCCIISAADQKVVSKVTIKNNKAGFNELLTIIHSLANPADIRIGFESTAHYALNLELFLENSLLTFMEVNPVLISEYKKSKTLRRTKTDSVDCESIARWLMTVEYKPHSKGFYHAYSLKSLTRLRDKLIRQRSFYLVKITNVLDHTFPEFKPFFNERLSKTALYLLENYGSAEKMARMNSASYEKLRSVSRGKFSPQQFLRLKELAVNTVGVNNSIFDVELNSLLSLYKSLVKEINTIEKEINKLIEEVHPHYMSVPGIGPLSAAVIYSEYGDISNFTNPGQMLAFAGIEPGINESGTESHGGKMVKRGSSQLRYTLINCCLPLIRFDMTFATYYAKKRGEGKPHRVAITHVAKKLIRVIYALESQDIDFNAQKLR

SEQ ID NO: 296862 - protein, 386 aa, unidentified
MKTVAGLDVHKDSVYLCILRENGEKIERVYGVLTPQLDSMRDFMAKNKVSEVAMESTSVYWIPIWRVLVDSFELKLVNPYFIRQLPGRKSDVKDAQWIAECVMKELIRGSFIPSPLVQRLRLYDRRIFEINAELVRKYSKIDAILQRCNIRLSNYVSNTDCKSYKAVVKQISEGVTSPQELLRHVHKRIINKHGEDTILAALTGVVSDSEIDMLAQYVAESAILEDNKNKCIEKMREICNSEFKEQMKNLQEIPGVSERSALTVLAEIGPDVNAFPSAKHLVSWCGFNPRNDESNKKIKSNKITHGNRFIRIASVQCAWAASRTKDCYFSKFYAFHTQVRKKFKLKVVVAVARKVLVCIWHILKFNVPYKDFEPQKSVTKDCTQLA

SEQ ID NO: 296863 - protein, 415 aa, unidentified
MALKIVYKICCGIDVHKTFVVACIASTNDKGVTSYESHRFSTYTSGLKTLLQWLLDRDCKDVCMESTGKYWIPVYNILESDCSIILAHPKYVKAIRGKKTDKKDAKWIADLFKHDLVAGSFMPPADIRQLRDLMRYRFKLTCFKSSEKNRLQNCLTVSNIQLGNVVSDTFGKSAQAILDKLLENPADTSFDLEPLVYKSLKKKLPELRDAIDGYITPEQAGKLKVIKAHYENLESRKAELEELILALAAPYQQELTILQTAPGISSPFTAIGIISEIGTNMEAFPSAKHLCSWAGLTPTNNESAGKKKSVRVSKAGCYIKPLLVQCANAVVKSTKHPEMRNRYLRLKKRRGHKKAIIAIARMLLTALYHMLKNGENYNAELYQKSDLLPVDREITVEQALMIARNQGYKIKSATA

SEQ ID NO: 296864 - protein, 393 aa, unidentified
MICVGIDVAKDKYDCFILSSEGEVLADVFTIPNNAEGFDTLLQTIRRCARPEDKIKVGLEATGHYSYNILGFLLNEGLDTYVINPLHTNLYRKSLSLRKTKTDRVDARTIAAMLMSDVDLKSYTDTAYHNEELKSLTRYRFDKVRERAKLKQSVSRLVTILFPELEKLVSTLHMASVYALLSEFPGAKQVSEAHLTHLKAVLYDASKGRYGSDMATTLRDAARCSVGSVMSAKSLELRHTIRLIHELDAEIEDIEAAIQSMMGEIQSPITTIPGMGVRMGAMILAEIGDFSRFDSPDKILAYAGMSPSTYQSGQLSLSGAYSHMEKRGSRYLRYALYNATKYVCLWNPTFAAYLAKKRAEGKHYNVALSHATKKLVRLIYALEKSKWPYSTAA

SEQ ID NO: 296865 - protein, 338 aa, unidentified
MNKPKFSIGLDVHEKMTAYAVRAYTGKVVLSGECATRFEDLHKALEPYLASCIIGIESCTSYYHVYWSFKKAGYNIVVANTLRIRQLVAKNDRLDAERLSDMLRLGSFPTSYIPDEKLMKARTMVNLRQNFVEESTRFQNQIKSVLAKHGLYIDEKTNFSKKWCGQLQLIMAEHTELLELRYAYEHYLLIESKIELLNAEMIAYCKIHWRKPMELLDSIPGIAETLASYFISEVCPIRRFSSKKKLRRYAGVVPCSRESGGHVYGSSLPKTSSRSLLRWALVQASWAAVRGKNNLAQYYRRKKKTRTKSRAIMAVSSSLCDIIFSVLSSGKPYTGGAS

SEQ ID NO: 296866 - protein, 309 aa, unidentified
MKTTIGIDVSSATLQACLLRDGDSSQLQRSFENSKKGVRKLTHWVKTFSPCTVVMEATGGYEKAAKEHLMKSDIIPYVANPNQIRHFAQGMGKQVKTDRIDAYVIASFARVVQLKTPVKSSETEIQLKELITRRLELLGMRTAEQNRLRTAGKIVKKSIRKTLKVFEKELERLEDEIIELSRSDGEIERKKELLCTQSGVGQITALTMIALVPELGQVNRKEIASICGVAPMTRESGNWKGRSFVCGGRAMARKALYMPALVAITHDKELAEFYNRLVEKGKPKKVALVAVMRKLLVKLNHLLKYHFYS

SEQ ID NO: 296867 - protein, 392 aa, unidentified
MGDRRGDRRLVGIDLGIISAHTVRVLAGDGSVLCRRKAVPTVASLAEAEQAALAETAHGTRLEVVIEPTGPAWLPIAVFFTARGHTVYRVSSAKAHDLRRVLSRQAKSNGIDADTLARLPLVCPAGLYPLELPDASRVALDRRVRACDRLTQAGATHKRRLKDLVRQLLPTSPLAGDLGAADLAVLDRTGGDPHALLRIGPARLARLITRASTGHQDSADRVQRWLAAGRAALELYGEHPAVAFSDLAAEVQTEVRLLRAVQAELDRHTTQREYCYRWVDPLGLARSLPGLAEVGGPALAATMGPASRFATASRFRSFTGLAPRASETGNTDRKGQPMSKAGNRLLRTTLVRAADTARKLDPVGFRNSAMCVEQRGSGQDIICRWPCPFSTS

SEQ ID NO: 296868 - protein, 355 aa, unidentified
MTSTKYIGLDVHKESISIAVLNSAGKVVMECVIETKASTILQFIHGLGGDVHLTFEEGTWAGWLYDLLKPHVTELVVCNPRKNALLKEGSKSDRIDARKLAELLYMSKLSSVYHGEHGLRMLKELSRSYLTITKDLGRVMNRLKALYRGWAIPCAGTQVYAPRYRSEWLSKIREAGVRRRAELYYQQLDALRLVRQQARKELLAEARKHRATKLLRQIPGIGPLRAAHLVALMQTPHRFRTKRQLWTYSGLGLETHDSAQYRVVKGQLQRSKKPVTLRGLNTNHNHDLKDIFKGAAMRASTAAGPLHDFYEALLAKGRKPTMSRLTLARKIAAITLIVWKKEVRFDANYLKQQAA

SEQ ID NO: 296869 - protein, 380 aa, unidentified
MKKFITHIGMDTDSHGFDIAIAEGFGSNNQEVRSWGRIPATLAAVDKLIKQLRKQGHQELRFVYEAGPCGYGIYRYLQGKAGIVCVVVAPSRIPRQPGERVKTNRRDARKLARLDRSGDLEAIYVPSEEDEAMRDLSRGRAATVEAATRVKQQLKSLLLRHGIKYPGKGESWSSDYREWLRRLQLPHEAQAYVLAEGLVALDEAEARVTRLTERIRELLPGWRMQPVVAALQALRGVAMITAVEMVAEVGDLTRFSNPREVMGYLGLVPSEDSTGDKRRQGSITKTGNGHARRSLVESAWAYARPPRVTRALKQRQQGLSREVIEISWRAQVRLCGRYRRLSARGKNKKKIIIAVARELCAFMWAIAVATGDKRMPARAV

SEQ ID NO: 296870 - protein, 342 aa, unidentified
MEKVSIVGFDLAKGVFQVVVRSAANEKVLCKRLRRSQVEPFFARLDPCMVAMEACASAHFWARRLRALGHEVRLIPPIYVKPYVVRNKNDARDADGLSLAVQRPDIPTVPIKSPEQQAGASLHRVRDLLLRQRTQGINQIRGLAGEYGLIAHAGRQGFKELIEQIATADLPEVAREVLLLQADHHRELGEKIDELTRTICAQARACQEARRLMTIPGLAEIGAHAMIARLPDAKSFRSGRDLAAWLGLTRLDHSTGGKPRTQGHISKRGDRALRRLLVLGATSVIAHQRRTKTLDPWIAGLLQRRPFRVVATALAAKMARIAWALLVRGETYQSGHQPRLAA

SEQ ID NO: 296871 - protein, 371 aa, unidentified
MKQQSKSSNITVGLDLGDRRHRFCALDERGEVVEEGSICNERDSLRKLAGRYHGALGVMEAGAHSPWISRFLEALGWRVVVSNPRKERAIYQHERKSDQRDALMLARIGRMDLALLYPVRHGTAEAQQDLLRIKLRDSLVRARVAVINSVRFTLKSLGYTVRNPSSARFHKVVMEEVPESVREMITPSVQALAELTARIKMLELEINTLAQMKYPQSAQLQQIPGVGPITALYFVLKIEDPNRFAHVRDVGAYAGLCPRRDQSGESDPQLRISKRGDAYLRRLLVSAAHYILAPFGPQSALRAYGLMLAADGTAQAKKRATVAVARKLAVLLLSLWKSQQPYQPFPGARLNGQQEDRRSGTIALHRMEATD

SEQ ID NO: 296872 - protein, 426 aa, unidentified
MKKKLFIGIDFSKSKFDATILEKAEQTSYDQEKFTNDEEGYKALLKWVGEQSSIKRSDWLFCGEQTGLYSRGLSHFLYGKRLSMWLDNPLQIKKCSGIKRGHDDRIDSHNIAQYAIRYIDKYVAWKPASKEVETLQLLHSYRDRLVRVKVSLSNAATEIRRAISRGKTSRFVFEDSNVEIRHLEKKIDSIEAQMTRTVMQSEMRENYELVCSVKGVGPITAIALLVHTNNFTSFENVRQLSTYCGCAPFPDSSGTVDRGNRISKLANKELKVLLTSCARSAVVHDKVLTAYYDRKIAEGKKERVVINNVRNKLLHRIFAVVNSKIPYSADYINTLEKTVPCPANTLEKPVPSPANPLEKPVPSPANPLSRSETTGKTANEMQTNRPLVERTVNKDLAFGAKQSLKGLPGRGAKTVSTDSGMHLHPV

SEQ ID NO: 296873 - protein, 366 aa, unidentified
MKKNSTVAKNRNEIFKQPKLTIGLDLGDRTSHYCILDEAGTVILEHSLPTTPKGIQQVFSRNPRSRIALEAGTHSPWVSRQLTQMGHEVIVAHARNVRLIDESSRKDDQLDARTLARLARIDPGLLGPVRHRSAQAQIHLTVIRARAALVGTRTALVNAARGLTKSYGERLRKCGTEQMNREIAKGLSQELREALDPLWGEIESLNERIAEYDRRIEQIAQQVYPEVARLQQVKGVGTLIALTYVLTLDDPHRFRRSRDAGCFLGLRPGRRNSGRSEPQLHISKEGDRYLRTLLVQGAHYILGPFGQDSDLRRWGLKLAERGGKNAKKRAVVAVARKLAVLLHKLWVSGEVYEPLRNNHNVVSAVA

SEQ ID NO: 296874 - protein, 343 aa, unidentified
MSKNKIQILRQNIGLDVSKEEFEANLVVLNEQLENRYMGRKVFNNTLKGIENFIEWANKKADPSVELEVTMEATGVYHENLAFSLYEQGWNIHVVLPNLVKKFIESHGIKSKTDKLDAKSLGQMGVERKLTRWQPASKNIKQLKALTRERSKRLKEQTKVKNQLHALKNSYNPPSSSIERYKELIKFLEDQIKAMEKEITHLIKKDEVLNAKMQKIISTPGLGITTVACIIAETNGFAGITSIKQLQSYAGYDIQIRESGKWKGKTKISKKGNSYIRHALYFPAYTITKYSSHHKVFYNRLCDNKEKSLIAATAVQRKLLGLIYTLWKKDTYFDPDYIQNKAA

SEQ ID NO: 296875 - protein, 353 aa, unidentified
MENQEIRAEIILGVDTHLDVHVGVVIDAAGRVLGTLSVGTNNEGYRQLLCWAQAFGMLRRAGVEGTGSYGSALTHVLQSNGVTVIEINRPDRSRRRGRGKSDATDAESAARSVLAGDAKVIPKAHNGLAEALRTLNLVRRSAVKAKTQTVNQIRALLVSAPQAIRDAVYRADAAKCVAACAALLQDAVSTALASLQTALRLLAKRWTLLNDELRELDTQLARLTKKAAPRLLSRFGVGPQTAATLLVTAGDNPTRLHSEAALAALCGTSPLQASSGKVQRHRLNRGGDRQANNALWTIAMVRMRSDPRTRDYVAKRTGEGLSKKEIHRCLKRYIVRELYPLILADLKDSASSA

SEQ ID NO: 296876 - protein, 470 aa, unidentified
MAKATVFDTINSPSCGLDIHKDMIEACVIDKEGEKHQKTFDTMRKSLYAIRDWILSFGCLHVLMESTSVYWIPIYEILEDVTGMDVGVGNARHMKQVPGRPVTDKADADWISRLCMMGLVLKSFVVGRKFRELREYTRYHKKLVQERARQINRIEKLLQINGFKLSSVLSDITGASGMRLLKKLRDNGSVTLLEVQAALHKRVKKSPEEIESAINGQMKLTSRLLLGKMLTRLETCDKEISEIYSMMVEHSQDYRSQINQLDGIPGLAEQSVIYLIAEISTDMSRFKTASHISAWAGLAPKNNESAGKLKSSKTQRANIYVKSVLIECAWAAVRTRNTRLSNWYWTNVGRLGQKKAITAVARKLLVYVYAMLKSGELYDDSLDVADTERRKAEKLDSARKTVEHRSNTTKMLKHRDDMRQDAPVTTASISQAKPDVCPTMSSADKPSTPRKRGRPRKAVDIDNQAESQMV

SEQ ID NO: 296877 - protein, 416 aa, unidentified
MKLFIGLDVSSQKLDTCFLTDSKEILFEGSLSNDLIGAGEIKQRILEYQETFGFCQIVIGMESTSVYSFHPAMFFYLDEDLKLLPVEVTVENPYRIKQYSRMFDQDKTDKIDAQIIADYLRVDLHTLSPIKEEVYIGLQRLTRSRYQLVTQMVEAKQHFLENLTYKCNTLSKELTNEDNKTSVFGATIMNLLTEDITLDEFSEMPLEAAAELLQKLGKGRFKNPEQLVKSIKKAVRSSYRLGKVTKNSIDLVLGIIANEIKFLKKQIKEIEKAIIALLETIPEAQCLLSVPGLGPVYTAGLIAEIGQIERFDDQSKLAKYAGLTWTKNQSGNSQSENTPLNRSGNRYFRYYLIEATNRVRSTLPEFKEYYQKKKNEVPKHKHKRALVLTGRKFVRLIDALLRNGQFYQQTKVVIEK

SEQ ID NO: 296878 - protein, 401 aa, unidentified
MKTVLSVDVAKNKSMIMLMNSDGEILIDTKEIKHNLENFEKVKEEIKENNPENLTVFMESTGTYHLPVERYFKENGFNTLVINSLTTKNNYDTIRKTKTDKKDCYRLAKLFFVNEVEYHELSKKDLYANLKAMTRQYFYLLHQNVSCKNRYKRLLNICFPELEKIFKSTRIYDDTALNFIKEFPHAEIVKEKRIDTLYNNLYKTNGRNLNFYKKLATTIKIASNNSYPGVDKEHKDVKNLSDMAKIVQNNNNVINELRDKMIETAKKSPYYEIINSFYGIGEILTAEILGELGDITRFDSPKQLIAFCGLDPTIKQSGKSINVKGAISKRGNKYARYILFNCSQMVVKLGTSNYPEHPVYIYYQSKKAEGKHYYECLTACSTKILRMLYSMCKNNKQFLEN

SEQ ID NO: 296879 - protein, 355 aa, unidentified
MSQEKYIGMDVHQATVSAAVRDRNGNLLMECVLETKADTLLEFVQGLHGTLSLAFEEGTLAAWLHDLLKPHVNQVVVCDPRKAALLRNGNKNDRIDARNLSELLRTNQLKPVYHGEHGLRTLKELGRSYLTVSKEMTRTMNRIKSLYRSWAIPCAGTTVYAPRHRREWLAKMAEPGARVRAEHLYEQLDHLQPIRVRARRELLQESHKHDVVKRLRQIPSIGQIRAALLVALLQTPHRFRSKRQIWAYSGFAIETHDSGEYRYVRGKIQRNRESITVRGLNRNHNPDLKNIFKGAAISASRRPGPLQDFYETRVAMGMRPTMARLTLARKIAAITLTLWKKGANFDPQQLRRQAA

SEQ ID NO: 296880 - protein, 311 aa, unidentified
MNNTIGIDISKDTLDAHRLADGQHKQFLNGKTGHAQLVKWIGKQSDPLIIFEATGAYHRQLERVLCTHIIPFVKVNPKQARRFAQASGKLAKTDRVDCEMLAKMGAALQLMPKPFTAENLYDLRELLSARRALIKDRTAAKARKATVINALIKQQLEKRLRQIKNDIAKIDALMLDVAREDQYMSERLDILFSIPGIGVITALMILVDMPEIGALNNKQVASLAGLAPMSQSSGKWIGKARIQGGRPNLRNAIFMPALVAIRHNADLKTKYDQLVTAGKEKKVAITAVMRKLLVLANALLRDNRKWAEKAA

SEQ ID NO: 296881 - protein, 372 aa, unidentified
MGWLPSAPNGIGMCQDGGVNSHWMERTATVTKTIMIGVDLAKNVIQLHAARMTGEVEYRKQLSREKFRRFMAEQPPAVVVMEACGSANYWARELSRVGHTVKLIAPHYVRPFVKRQKNDAADAEAIVIAAQRPEMRFVAAKSEDQQGRAMLFRTRTRLVHQRTELINMLRAFLYEFGHAVPQGVQQCRRIEAIVKEANSDLPEIVRSECLEILDQITGMTARIKRSDERIRALAAQTDTARRLQTMPGVGPMTALAVDAFAPPMESFKSGRDFAAWLGLVPRQHSSGGKARHGRISKAGQADIRRLLIIGAMSRLNWMGRKSIIAGSWLANLSARKPRMLVAIALANKMARAIWAMLTRQENFRDPMAATVA

SEQ ID NO: 296882 - protein, 391 aa, unidentified
MIYIGIDVAKDKHDCFITNSDSEVLFKAFTIFNNLDGFNDLYQKIESVMDDVTKVKVGLEATGHYSYNLLGYLIDKGLPTYVINPLHTNLYRKSLSLRQTKTDKVDARTIASMLMSDVNLKSYSDTSYHNEELKSLTRYRFDKVKERAKLKTSVSRLVCILFPELEKLVPTLHMASVYALLSEFPSAKHVATAHLTRLTNLLSKSSKGRYGKDTAITFRDSARASIGSNMPAKSLELKHTIKLIQELDSEIDEIENEIKIIMDEINSPILSIPGINYRMGAMIIAEIGDFNRFDSPDKILAYAGFSPSTYQSGQLDGAYAHMEKRGSRYLRYALYNATKYVCHWDPTFAAYLAKKRAEGKHYNVAISHAVKKLVRVIYHLEKTKQQYIKAS

SEQ ID NO: 296883 - protein, 317 aa, unidentified
MATVYVGIDVCKEWLDIHLHPLGRSFRVTNDTAGLRRLKRELDALDQMPRSALHIVMEATGKWHRAVQRSLHADGFYVSVVDPLRARLFAKACGFLAKTDRLDARLLAIMGEALKPAQTPPQDQALEALQELVNARSAANGERTALSNRMKTAVTAFLRKELTRRLAALDTHIARLDAEIERSIGAEPEMRRRLDILISIPGIGAVTAASLIAGLCELGACSGKQAAMLAGLAPLACESGERAGHRAIRGGRPAPRNAIYMAALSASRHNPDLAHFAERLKKAGKPNKVVLVAVMRKLIVLANTLITKNRIWTPNPP

SEQ ID NO: 296884 - protein, 416 aa, unidentified
MKIVRPICCGMDVHKNIIVATIGITNKKTRITEYIQETFSTLNPDLLNLKQWLINHKCFDACMESTGKYWIPIFNILEDEINIYLTHPKYVKAIKGKKTDKKDSKWICDLFKHDLIKFSFIPPKEIRALREISRYRYKLVGMRSSERNRYQNCMTVSNIGIGSVFSDPFGKSAQAIMKEVLESDIIEDEKILKCIHGSCKNKDKILDSIKHCNIETDQRFKMNESMTHMEELQVHINNCEIEIMKRAAPMFDRFMHITQLPGISTLSAILIISEIGVDMKQFESDKQLACWAGLAPANNESANKKKSVRISKAGQYLKPLLVQCALGAIKDKEGYFGIKYSRIKKRRGHKKAIIAIARMMLVSIYHMILTGETFNPSDYESFKNPKPPIKQQILTEESAIEFLKKSGFDVSKLTKP

SEQ ID NO: 296885 - protein, 294 aa, unidentified
MKKGSTAGATSKRNFNGKLTIGLDLGDRSSWYCVLDEAGEVRSEQKLGTTPKAMKEVFATMPRSRIALETGMHSPWVSRLLSELGHEVIVAHARNVRLIGESRRKDDRFDAMTLARLARIDPQLLSPVKHRSAQAQADLTVIRARASLVRARTSLVNAARGLTKSYGERLRGCNPRNMNTEKAQALSPELQDALGPLLQALESLSERIAEYNQQIEQIAKQRYPQTALLKQVKGVGTLIALTYLLTLEDPHRFRKSRDAGCYVGLQPGRRNSGQSEPQMHISKEGDPYLRTLLV

SEQ ID NO: 296886 - protein, 359 aa, unidentified
MKKVTRVKISSKSLTAIAGDVVYVGLDVHKKSIHAAVSVNGRIERHWVMPADYAGVVGKLEPLRAGLKRIVYEAGPTGFGLARALAAAGLAVDVIAPSKTPQPADQSAKSDRLDCFQLCEYASSSRLLSVVAVPTERQEADRQVQRLRDQAIRKLRRVKQQIKSLLLQYSIAEPEGLANWSAKAVVALGALRVDDELRFCLDELLGELGQLQAQVRRINERIEQLGLSQRHGPAMAVLTSHPGVGPITAMTFRTELHQAEQFSDGDQVAKYFGLSPRVRQSGATRRDGPIAKTGRGHVRALLVQAAWRWIAKDDAAKAVYLRLVRNTGLAQKAIVGMARRLAICLWRMMTTGELYRAAA

SEQ ID NO: 296887 - protein, 316 aa, unidentified
MNNTMVEKFVGIDVSKSTLDVCVEPAVQTLHVTYDDAGIRQIADCLKDVSPALIVIEATGGLEVRIATELASQGLPVAVINPRQARDFAKASGRLAKTDQVDAAVLAAFAKAIRPQIRPLKDADTRALDDMVSRRRQLIEMRVQEALRLGTATSKPLQKSLKRHIAWLDKQITSVDNDLNKRLRESEVWRAKDDLLRGIPGVGAVTTLTLLAKCPELGTLNRREIAALTGVAPLANDSGKHRGRRFIWGGRADVRAVLYMAAISAIRCNNIIKAFADRLKKAGKPPKVVIVACMRKLLTIMNAMLKNNTPWNPEYA

SEQ ID NO: 296888 - protein, 318 aa, unidentified
MAQNRTIVGIDVAKDKVDVALRSAGAEATFANTPSGRRQLVKWVKQHQVSKAVLEASGGYERSWARLLQDAGLEVWIVDPKRVRRFAQSAGQLAKTDRIDARMIAWFGETFADGIGRQPDRAREELDRLVSARTDLMDLRARLAHLGEDDQPDEVRRCYRKIEKDVKEQVSVLEAAIEARIEANAQFAELARLICSVPNMGKISSAGLIAFLPELGLVSNKQASALVGVVPYEDSSGKHQGRRFIQGGRRKLRNLLYLPIVGAATRGNPVLKAYYKRLRENGKEPKVALIACMRKLIVILNTMVARGQIWDPQKHAIA

SEQ ID NO: 296889 - protein, 391 aa, unidentified
MIFVGIDVAKDKHDCFILNSEGTVLADVFTIANNRIGFETLLSRIQSCSQGESKIKVGLEATGHYSYNLLGFLLDSGLATYVINPLHTNLYRKSLSLRRTKTDRIDVRTIAMMLMSDVDLKSYSNTAYHNEELKSLTRYRFDKVKERAKLKSSVARLVNILFPELEKLVSSLHIAVVYALLSNYPGASYIANANTEELAETLCTASKGRYTKSKAAKIQVAAGVSIGSKMPAKSMELKHTIALIRELDKEISEVESAIDKITSQMDSPIFTIPGIGRHMGAMILAEVGDFSNFASADKLLAYAGLSPSTYQSGQLQNCYAHMEKRGSRYLRYALFNAAKYVCLWCPTFSAYLEKKRSEGKHYNVAISHAAKKLVRLIFAMQRSGKAFLADY

SEQ ID NO: 296890 - protein, 426 aa, unidentified
MPPDRDATPIRSFATFTGDLHRLAAWLTACRVTHVAMEATGVYWIPLHEILETRGFQVMLVNARHTKNLPGRKSDVSDCEWLRDLHILGLLRGRFRPVDGIVALRGYLRHRATLIENAGALVQRMQKALVQMNVQLPLVVSDITGVTGLRILRDIVAGHRDPQQLAQHRDYRCHASEAEIVAALTGNYRAEHLFVLQQTLELFDRYQQQLTACDGAIEAHLAHLTATAVPSATPLPPARRRQKPRENEPRFDVRTPLHQLTGADLSQIDGIGPYNALRLIAEIGTDMTRWPTDKHFTSWLTLAPQNKVSGGRLLSSRTQPSANRAAATLRLAAMNLGRTQTALGAFYRRLAYRVGKAKAVTATARKLAILVYHTLKGDLTYQDPGADAYDAQDRARTIRRLRQRADHLGFALVDLKTGELSEGTVS

SEQ ID NO: 296891 - protein, 343 aa, unidentified
MKISRVGVDLAKNVFQIHGTDAHGNAVWKRKLSREKWIEAICTKTPEGCKIGMEACAGSHHWARRLSEYGFDVKLIPPQFVTPYVKSNKNDANDAEAICEAMSRPNMRFVKMKTVEQQDIQAIHRIRSELMSHRTAKMNQIRGLVAEYGLVAPKQVSALRKALPLWLEDAENGLTDRFRHLVSDLLRDLMYLEERISGLDGEIREVANTDPMAIRLQQLRGVGPLVATALIATVGNGDQFTKGKQMAASIGLTPRQYSSGGKDRLLGISKRGDAYLRTILIHGARSTIAHAKHREDRLSLWVMALAKRSHGNVAAVALANKTARMAWAMMRNNTDYDPERAAA

SEQ ID NO: 296892 - protein, 356 aa, unidentified
MTRILAIDLGKFKSVSCLLDTATNETEFWTMSTDRPYLLTLLKNYAPDLVVIESCGLAGWVHDVCTAEGYEVLVCNPNQEAWKWKHIKRKTDRDDALKLAKLAALGQLVPVYIPCRQQREYRRLVKYRKVVLGRIIRVQNNIRSIFAQRGMEMTRGQQAWALARYDSIAQHRKPLAECGLDDLWRGELDLELSQLEHLRQRQHEIHQRLKALAVADQRVQLLQTIPGVGRKTAEVVVAYLDDPHRFQNARQVSSYAGMVPRRYQSGEMDRQGKIHKRGPRLLRTALVEAAWMMLRYNPWAREIYQRICGGQKTRKKKAIVAVARKLLVRCWVMLLRKEPWNKEIMVNQPPGSAVAV

SEQ ID NO: 296893 - protein, 342 aa, unidentified
MEVDILGIDLAKRVFQLHGADVRGRAVYRNKVSRAALIETVRVLHPRMIAMEACGSAHHWARRFQEAGVEVRLISPHYVSPFVKTNKNDRNDAEAIVEAASRPSMNFVAVKSVEQQDMQAAHRVRELLVQQRTAIINQARGLLGERGIAIAQSPAAFRRAIPEILIQSEGELTSFCQSLIMTLVQHLRALEEEIAVADGWIRSFMNRSALCQKIAAVPGIGPITATAIVAAVGRADGFRNGRHLAAWLGLVPRQHSSGGKSQLYGISKRGDKYLRTLLIHGARSVLIRVSAKLDARSRWLQKLIERRGFNRACVALANKNARIIQVLLSTEATYQPVALVDA

SEQ ID NO: 296894 - protein, 424 aa, unidentified
MGKFTKTLCISERKEYHIMEGPIITVDVSKGSCHYQPFIENGHPMRKPKQLSATIDGFQKLGQTIKDLEAKTEREDIPVIFEATGVYHRPLQKYLEDHKIRYYIISPLLSATYRKTDLHSNKTDALDCAHIAKAYYCEKELRQYQAQPQEYKRLYQLSRIYESELVHLRKRKVSLRSMLDIIYPRIDKTFKGNQNLYDPIPMEILKRYPHPSLLLSHREDTIVKTVGHRAGHLKGYTERIVHKIYEKAKECYSGCDIDDIEVVKLPSLIENVQEQKKKCNSLLKEMIEIARTCPYFAPIVSIVGIGENLAARIIAELRDVNRFDNRAAIVAYAGLNPKIQQSGDIDGLHLKISKKGNKHLRCLLYLGAQCNYRLRKEDPLYEFTKKKRQQTQCPLSSKAAYTASAHKLLVIIYSLCKNGTLYHS

SEQ ID NO: 296895 - protein, 344 aa, unidentified
MKISVYAVDLAKGKFQVHGFDSRGERRLAKTLSRAGMQRLFAAREERGEVVMEACGSAHYWGRYLEDLGYRVRLIAAQHVKPFVVGNKTDANDADAIYEASRRAGIRSVPIKSIAQQDALLVHAQRERLVKARTALANQLRGELAERGVVFGKKIGILHRGVVAFLEQAVGGDVTDYLQRWARERLDEWRVLDERIKDCEHEMQHAYRTNPACVLIGAVEGIGVITATATVASVGDARQYASGRHFSAWLGLTPKERSSGQMRHLGGITKRGNSYLRKLFVHGARAAVRVAQRKTDVRSRWINALVERRGHNKAVVALANKNARIVWALLSSGECYRTPVAETA

SEQ ID NO: 296896 - protein, 345 aa, unidentified
MKIVGCDLHTRYQQIAMLDKETGELVERRLEHESGEARAFYAGLRAPVRVGIEATGHTRWFERMLGELGHELWIGDAAQIRAAMVRKQKTDARDAAHLLELLASERFPRIWRPTLAERDLRQLIWHRQKLVWMRNAIGNQLHSLAMGEGVCRKKKLFTQKGRTELEGLKLDPWASRRRQELLRWLDQLDASLEEFDQAVGEQAEQNAAAVLLMTHPGVGPVTSLAFVLTLGPVGRFGRSKQVASYLGLNPREHSSGGRQKLGAISKQGNPIMRSLLVEAGHSAARLDVELRQDYQRLKLRRGSGVAKVAIARKLAVRMYWMLRRQVNYAQLVRMQGSPWGTLVPK

SEQ ID NO: 296897 - protein, 390 aa, unidentified
MIVVGVDTHKCSHALCAVDEGTGRGRGSREIKADEPGHVAAVRWARGLDEERVWAIEDCRHVSRRLEQALLAAGERVIRVAPKMMGSSRKGERERGKSDPIDAQAVARAVVKDGVDRFPAAYLDERAMEIRLLFDHREDLVKERTRAQNRLRWHLLELCPELEARLGRGALSAPRQLERLDRKLRRLGSSVRLRIAREQLAQIRALTRQADQLEAELAVLISRYRPKLLEEQGCGALTAALMIGHTAGAERFASDACFARQAGTAPIPCSSGQKSQHRLDRGGDRQLNRALHTIAITRASRDPATKEYLERKRAEGNTDKGALRCLKRYLARHFWRLLAEPPLEPAQAATSEQPAAPTEPQPTAPIPERPAPRREVDRASTAPIPMPCIT

SEQ ID NO: 296898 - protein, 340 aa, unidentified
MGTVTTIGLDLAKNVFQVHGVDADGVAVLRQRLTRGRMLKFFAKLPPCLIGIEACASSHFWARQLMALGHDVKLMPAQYVKPYVKRGKNDAADAEAICEAVTRPTMRFVGIKSPEQQGAMMLHRVRLILNRQRTQLSNALRAHIAEFGIVAPIGRNGIDQLLDIVADTEDARLPADVRTCLDMLAAQLRIVKEQILENDRRIMASARETEIGRRLMEIPGVGPLLASAIVATVPDPSIFRSGRDLAAWIGLVPRQNSSGGKERLGAITKAGHRYLRQMLIVGAVAVIRFAERHKSKRPWLVQLLARKKVKVAAVALANKNARMIWAMMTNGERYREPQIA

SEQ ID NO: 296899 - protein, 414 aa, unidentified
MKTCGLDVHKDMIFCAIYNGKDSVVKQFSSFTPDLRDMCGYIKGEGVTTVAMESTGIYIEAIRTVLRQSGMKAVVVNPFLIKQMPGRKSDVKDAEWIAKLHHKQMLSESFVPDGTLAELRAYTREHRKLTQRRTQVLTKIDRLLVAGGIRLSSCVSSLDTKGFLKVARAVAGGDTDPERLEKMVQGCTKHKRDGTLRKALTGCMERHHMWRIAVAMEELDLYDRLIAEAKDKMEGLTEAHYHEEARLLQTIPGVGRLGAISIIAEIGTDMGVFGSGGRLAGWAGLRPRNDESAGKCKSTAITKGGAHLKPILVQCAWSAVRVRDSKFQQCFTRLCVRKSAKKAIVAIARKLLVTAYALLLNHEEYSPNKAGDGVTPEQLHRRIQYHIAQTERLRRRMTLASRMTAPNSNNTTIA

SEQ ID NO: 296900 - protein, 341 aa, unidentified
MNKASTIGLDLAKQVFQVHGADATGAVVFRKRLRRTGVLQFFASQAPCRVAMEACASSHYWGRELSRIGHEVRLIPPAYVKPFVKRQKNDAADAEAICEASQRPTTRFVQIKSETAQAAAVVFRARDLLVRQRTQIINALRGHLAEFGLVVPTGPAHVGRLLAEAEDYAHSLPQAVRPILGVLIEALHSLDEKIAVLDVEISRRAEEDEDARRLKTIPGIGPVTAAAISALAPPAQTFARGRDFAARLGLTPLQRSTGGKQKLGGTSKRGERTIRRLLIIGASAVVRWAARKGAPAGSWLERMLARKPRMLVAVALANKMARIIWALLAKGGIYRASIVAT

SEQ ID NO: 296901 - protein, 330 aa, unidentified
MHAWVGIDVGKATLVVVLLRGTEPLRATMDNTPAGHANLLNWLAKHHRKLALEQVHACLEATGMYGDEVALTLHQTGYVVSVVNPARIKAFAESRLSRNKTDAADAWLIAEFCRTQTPPAWSPPAPEVLTLRRLARHLDDLKTMRQQEINRLAAGALDAAIHQRLESHIAFLDDQIAAVWQDIHDHIDHHPDLKRQRDLLDSIPGIGHLSACLLLAELPDLNRFDRAEQLAAYAGVTPKQHTSGTSIRGHTRMARQGNPTLRTRLYFPALSAKTHNPLIRPLAQRLKSEGHCALSIIVAAMRKLLHQIFGILKSGQPFDPDFLTKRLPNT

SEQ ID NO: 296902 - protein, 350 aa, unidentified
MTATTDHYLGIDVHKRQAQVAVLDDEGEVTEEIRVAKADLDEIVQKYAGSSAAPEAGSNYFTIYDRLDEELDVTLANPVKADWLADQKQNNDRKDAKNLARYLRLGKVPESYVPPEEYRRYRALARGRKKLVDKRSDFKNEVSSLLDQNGVTYDESLWSDQGREFLRELTLDDASELLLGQWLEAIDEFTVKIKRMQRRIEEVAAEVDELDTLMSAPGIAAFSGLMIHGEIGEVGRFDRAAEVVSYAGLDPVIRESGDSRREGRISKEGNGYLRWILVQCANTAVHNAEDPYLSQFYWRLRKNRNKPHKVAIVATARKLLVALFNMLSKNEPYDHAHNARIETISTTSGQ

SEQ ID NO: 296903 - protein, 435 aa, unidentified
MTIRPRLILSCYDGCGLGGEGLGVLFVGDDWAEDHHDVEVQDDGGRRLARVRLPEGLVGIERLHALIGEHLSDELVDGDPREAARSVVVGIETDRGPWVQALLAAGYQVYPVNPMSVARYRERHSTSGAKSDRGDAHILADLVRLDRDRHRPLAGDSDLAEAVKIVARTHQSLIWDRQRHVLRLRSALREFFPAALQAFDDLSAAEAVELLERAPSPTAAARLSRSKIAAAFARARRRDVDAQAAKVQELLRAPALRQPAVVEDAYAAVVAAQVRLIAAVSTQIHALAAQVDEHFGKHPDAEIYLSQPGIGPVLGARVLAEFGDDEHRYLDAKARKNYAGTSPITKASGCKQVVLARYARNTRLGDALHQQAFSALRASPGARAYYDQLRARGKNHHAALRQLSNRLVGILHGCLKTRTCYDESTAWSEDLTAAA

SEQ ID NO: 296904 - protein, 365 aa, unidentified
MTTRQRGTSSNTDPPGRREVVLGVDTHGEVHVAAVISPLGKVLGTESFPATGAGYRRLLVWARKRGTVCRAGVEGTGTFGAGLARYLLAQQVEVYEVNRPDRSARRLLGKSDPLDAQAAARAVLSGRARARAKSGDGPVHSARILKLARDSAVKARTQAINQLKAVLVIADPALRERLSSLGNRELFRTCARLGPGDGEDGENAVAQATHMTLRMLAERIEQLTGQINELNQRLTRLVEHHAPQLLVPVGIGPDSAVTLLITMGDNPERLNTEASFAALCGVSPIEYSSGRRITRRLNCGGDRQVNAALHRIVFTRLRHDPRTQAYYERRTQEGKTRREIIRCLKRYAAREVFNLVRAASTVPPL

SEQ ID NO: 296905 - protein, 378 aa, unidentified
MSKIRFVGLDVHAETVAVAVAEPNGEVRSLGLIPNRPESIRRLVRKLEPVEQLRFCYEAGPTGYVLYWQLTALGTKCEVVAPSLVPTKPGDRVKTDRRDALKLARCYRAGDLTPVWVPDAAHEALRDLVRAREAAKGDLLRARHRLSKFLLRHGWRRPESLKSPWTNAHLEWIKTKVHFDQPAQEIALTDYVHQVEHLVARIERLDQAVLEAARSVPPQMRAVIEALQALRGIAQVTAVTIVAELGQISRFAKARQLMGYSGLVPSEESSGQRERRGAITKTGNAHLRRVIVEAAWAYQFRPWLGGYLLKRQVGLSEEVKEIAWKAQHRLHSRYRKLLAQGKNKPQIVTAVGRELLGFVWAIGVNVETRMREPQQVAA

SEQ ID NO: 296906 - protein, 350 aa, unidentified
MNVNHYIGLDVHKKSISYCVKTADGTMVEEGKLRATHAALREWAEKRREPWHGAMEATLFSGWIYDALKPYATELQMGHPAMMKAIGASKKKNDKLDARKTADLVRCNLLPVCYVAPPEIRELRRMLRYRNVVVAQAVRLKNKMSGLLMEVGAEYNKQRLHGKEYFSELLDTIEEVPESVKDLLRLSRGALEMFQTTQRQLLDQLQKQPLLAQRVTLLKSIRGVGEVTALTWALEVGDPQRLASVGHAVSYCGLTSALDSSADKQQRGPISKQRNAHLQTVLVEAAKLAPRWNPQLAAIHAREIQRGHRNRATLEVARKLVAYLLAVDKSGKPFQIRTPATVEQEVETTA

SEQ ID NO: 296907 - protein, 351 aa, unidentified
MKVTTIGIDLAKSVFQIHGIDERGNVVLRRQLRRAQMVLFFSKLETCLIGLEACGSSHYWARKLAALGHTVRLMAPQFVKPYRKNDKNDGNDAAAVCEAVGRPSMRFVSVKSPEQQAELSVHRVRQRLMRQRTALINQLRGLLAEYGLVLAQGATHVRSQLPALLENSSDSLPPLALELFQDLYEELCQLEQRLADYDRRVERLYRGNPLCQKLGELDGIGALTATAFVATVAHAAQFHNGRQCAAWLGLTPKQDSSGGKTRLLGISKRGDVYLRTLLVHGARSIMRHTPKRDDPKSRWVEQLRKRRGENIAAVALAAKHARILWALMVRSEPSAQLIAAHSIEPPAQPNL

SEQ ID NO: 296908 - protein, 338 aa, unidentified
MEQITTIGLDLAKNVFQVHGVDVAGKVLVRKQLRRAEALRFFAALPPCLVGMEACGTAHHWARELTKLGHTVRLMPPAYVKPYVKRGKTDAADAAAIAEAVTRPTMRFVAVKTVDQQSVLMLHKVRELLVRQRTMLINALRGHLAEFGIVAARGPGGVTAVITALHEAQGGLPDLARQVLHGLIDQMRVICAEITKAEKRIMAWHRASEASQRLATIPGIGPITASAIAAAVPDATLFRSGRQFAAWLGLTPRAHSSGGKQRLGGISKQGDGYIRRLLVIGATAVIRFARQDNASKTWAARLLERKSARLVSVALANKTARIAWAILARNQSYTAPAV

SEQ ID NO: 296909 - protein, 378 aa, unidentified
MNRIIKIGMDVHTTNYTLCIFEPSFEHDGTVHCITQVKPEVKNIIRVIETFKKKHENEELNIVCGYEAGCLGYSLYHELKEKGIECVILAPTTMKTEKGGRKLKNDYRDAKMIAECLAYGGYSAVHVPTELDNSVKEFIRMRDDIKENLKSIKQQIIAFLTRNGKQFEGKSFWTRKHIDWINTVSFSEPLLQDTLKEYMIEYNHLCDRVETLDKQIEEISLKEEYVEKVQQLQCLIGIKTHTALSLIVETSDFNRFKKGNMYSAYLGLIPGDDSSAGHENKLGITKAGNSHLRKLLVEAAQGYTRGRVGFKSKDLKSRQEKCSSEVVAYADRANERLRRKYYRMTLRGKKFNVAKTAIARELACFVWGIMTDHIDLCN

SEQ ID NO: 296910 - protein, 427 aa, unidentified
MKYNQNTKIMQITEKTLIVGVDIAKEIHHARAFDFRGIEYGKRIEFSNDIDGMKRFLKWAADIMNKSNKEHLMVGMEPTGHYWLCFAQFLRDKKHKVVLVNPFHVKRSKEFDDNSPTKNDRKDPKTIAMLVKDGRYVEPNIPEGIYSELRIAVDIREMLTKDLNKIKNRVARWLDIYFPEFNKVFADWEGKAALITLKEFPTPAKILGIGAEEILAAWKKEINRAVGAKRALKLIEAASQSVGKRDGIEMAEVEIKIILEQYEMLVKQLKKIESKIEELFMQVPGANEMLSIKGVGVITAAIFIAEVGDITRYEHPKQIQKLAGYNLVENSSGQHKGQTTISKRGRRRLRSALYKMIMPILANNKEFQELHKYYTTRKENPLKKKQSMIVLCCKLIRVFFVILKKGVKYNGNKMLRDIKRPEIRNAA

SEQ ID NO: 296911 - protein, 482 aa, unidentified
MANRNKSTFERLTNGRLNRKQRRELERKLSAEDPGLEIVNRNVAGIDVGNESHFVAVPPGRDAQPVQEFGSWTADLERMADWLKACGIEMVVMQSTGVYWIALYDVLESRGFKICLANARHTKNLPGRKSDVQESQWLLKLHTFGLLRNSFRPPDEIRALRSLWRLRDRHVKDAARAAQHMQKSMVTMNIQLSNAISDITGVTGQAIIRAILAGERNPEKLAKLRDRRIQATEEEVARSLEGNWREDMLFELKQAVEAYDFIQKQMAGCDQRLQTLMAELPTREVEAPGVTAEAAGKPARKKRADRKQKNAPRFDLHTELKRVCGVDLTSIDGIDVMTAQTIVAELGTDFSRWQDEAHFASWLGLSPSRDISGGKVLKQGTLKVKNRVATALRTAANTLLHSDSYLGARFRSLRTRRGAPKAIKAMARYLACLIHRMFTRGQAWVDRGAREFENRCTQRELSALQRKAAAHGFKLVNLQVPA

SEQ ID NO: 296912 - protein, 320 aa, unidentified
MLSFCGIDVSKDRLDVMLLPEAQSFSVSNDAAGWAKLVEQLRGSSIAAIGIEASGGYERGAVRSLQAAGMPVRQVNPFKLRQFARASGILAKNDPLDARMIASFVAVMPTRPAQRATPAAEQLVEMLAVRRQLSAEKIAAENASRLLEDPMLQRLSRRRIARLAADIELLDKRLVEIVATDATLAHRYRLLTSMPGVGPVLACTLIALLPELGGMSRKQVAALVGVAPYAFESGTLKGRRCIWGGRANVRQVLYMAAMSASNWNPALKLFHDRLKGAGKLPKVVIVAVMRKMITTLNAMVRDDIAWADRLSGRHSVTTAR

SEQ ID NO: 296913 - protein, 351 aa, unidentified
MNYVGVDYHKKYSYMVVKNEDGRVEGRGTVNNTKEEVQQFLEPYRPGMAVVEATRNWGLIYDWLDEVLDDVTLAHPLKVKAIAEARIKTDKISADILADLLRAGLLPKAYAPSKQTRDIKNILRQRMFFVRIQTMVKNRIYDILDRHPEVLSQVPEASDLFGVAGMQWLSQTTLSGEDNILLSSELRLLKYLKEEIMQSNGIVKKLAKKDARARLLQSIPGIGPFFSVLILYEIDDISRFRDEKKLCAYAGIVPSTHASGGKVFHGRITKTGNKWLRWAAIEAAQTAVRSDSEFRAYYQSIRVRKGTNAAKVATARRLLTIVYRLLRQGRFYGRRTTNQERNIIPAALVTS

SEQ ID NO: 296914 - protein, 337 aa, unidentified
MYYVGLDVHRDTSFCVIMDKAGDTIAERNLENDVLEFANFFAQFNQRMEAAMEATTDAYFIQALLDELQIPVHLAHPRKLRLIAESSSKTDRTDAHLIADLLRMGRLPEAYLAPSEVTEMRQLTRGRQSLVNTRTRLKNQVSAILRRHGCKCPLSDKFGKAGRAWLDSVQLPTIAAMMLEIYLAVIDVLSAYIAQCGSKLQEISRHDERIRRLQEIPGIAEVFGPMIVAEIGEISRFCTKRRFVAYCGLAPIVRQSADKTYTGPLRGDCNRWLRYAFIEAAHSCARSPGRYRHYYQRKVEQRDTKVAAIATARRLCRLVFAILWSGERYRPDDAQAA

SEQ ID NO: 296915 - protein, 315 aa, unidentified
MTKHLLPVNVGVDVGKNQLDLYLLERDRALTVPNEEQAILVLVRSLSRYRVERIVVEATGRLEQPFVRAALAAGLPVIGVSPLKIRRFADVIGQLAKTDQIDTRLIAQFAATVKPLPRPASDANAQAIKDLVVRRRQLTSLRTMEKNRRQVMPNDLKPSFDRILKALDRELKSLEQLINLAIDQHASSRHKRELLTSMPGIGNCVAATLIGDLPELGSLDRRQIASLTGVAPFNRDSGTLRGKRRIRGGRTHSRTALFLSAMVATRFNPDIKRFYQRLLTAGKHKKVALTACIRKIVTALNAMLRDNLPWRSAIA

SEQ ID NO: 296916 - protein, 344 aa, unidentified
MQATTIGLDLAKNVFQVHGEDAHGKVVVRKRLTRGQVLRWFANTPAARVGIEACGGAHYWARELMGLGHDVRILPPQYVKPFVRTNKSDVADAEAICGAMASGRIPSVAVASPAQQDMQALHRVRQRLMANRTALGNQTRGLLLEYGIALPKGMARLREGLRLVLERPSASLSATFLALLQEQYSELLDWDRKIAHYTARIERAVEADPGARRLRAVPGIGALTASALLAKVAAGAYGNGRHFAAALGLVPRHEGTGGKLRLLGISKRGDRYLRCLLIHGARAVVSQMKDRQDPLRCWLRRLVERRGHNKAVVALANKNARIAWALIAGAQEYAPQRACAQPMP

SEQ ID NO: 296917 - protein, 349 aa, unidentified
MRIIGGLDVHRSQITYDWIDTDTGQHQRGQLAPAHREHLRVWLEQFRDRPAAFALEGCTGWRYVVEELKRAGIAAHLAEPADTSTLRGPKRHAKTDRTDARHLRGLLAAGRLPESWIPPAHVLEARTQVRCYRALLDEHTAWLQRVHATLFHHGVPAQRNLLAADRRARLDRGSGLSPAARQLVAVALRTLDHLDAELDRLRAELTWFARRQPGCQALDGLYGIGPVTAVAIWAELGDPARFTSSRHAVRHTGLDITVYSSDGKRTPGHLARQGPPVLRWALFEAAKCAARPSSPDHAYYLQVKGRLGGNRATLAVARKLARRCYHTLGTLGDLAYAPPSDTPDLGRVA

SEQ ID NO: 296918 - protein, 341 aa, unidentified
MDTVSLVGIDLGKHCFHLHAQDASGRMVFRKKLTRSQMFALLGNFPSCTVVMEACAGAHWIARRLQALGHEAKLISPHFVKPFRQGNKNDFADAQAICEAASRPSMRFVSPRNEAQQVVSALHRVREALVRERTGTINQIHAFLLEFGISLPRGMAVIRRLLAVLETQALPPRLVAVLERLQAHFKYLDEQIGQLEHELLTQLHEDERSERLLEIPGIGPITASVLMSELGDAHQYGSARQFAASIGLVPRQYSTGGKPTLLGISKRGDKELRRLLVQCARVIMLGIERRTDSLGTWVRSLLARRHSNVVACALANKLARIAWAILAKGTHYRSAPAALAA

SEQ ID NO: 296919 - protein, 388 aa, unidentified
MHVYVGVDIAKELHYAAIMDSDGVVSKPFSFENNDKGFNLLLSHLAPYDKESILIGYESTAHYQENLAFFLKSLGYRTAEINPLQTAALRKANIRNTKTDSVDARLICLALMNHHIQGDQRDSVRLDDLYQLCKMRMDTMKKRTTCKIQFVAIMDRIFPELASFFDNNLHINTIYRLIESFPLPSQIKKTRIDILTKLLHKASKGHFKKEKAQKLKDLADISVGIPSDIFAFQAQQLVHQIEFYTDQIQTIEERINTNPDVMSSPLMTIPGIGTFCVACILSAIKNINDFGAPCKILAYAGLDPVIRQSGKFNASHTRMSKRGNSLLRYALVWSAGNVVKNNHTFAEYYRHKTEDQGKSHYQALGHCAKKLVKSIYHMLKYNESFNLD

SEQ ID NO: 296920 - protein, 333 aa, unidentified
MNKSETTFLPCGIEISAAILVVAVSGKAPCEFANTPAGHQSLIRMLQLAGSEVRVCMEATGLYGLDLALALHAAGIAFRIANPRSVRNFARAMMQRSKTDRLDVLVLREYAARMPFEPWRPPSSQALHLMAIAHRLQALTRMITAEKNRLHAASLSHAWPALVRRDLVRSIQSLERALKRLTLAALDLVGSDPQLARRNELLLSVPGIGVTSALQVLAEILRLGPDCGVRQWVAYAGLDPRHYTSGTSVAKKPVISKSGNAHLRRALYMPALVTVQHEPHFRGFYQHLLDRGKTKLQALVAVMRKLLHAIFGMFKHDQLFDGSKIYALETSCA

SEQ ID NO: 296921 - protein, 425 aa, unidentified
MKSTQNEKISQIKIETLVVGIDIGKDTHYARAFDYRGIELAKLLKFSNTDQGFECLNQWMRDICKQQEKTEIIVGFEPTGHYWFTLGDHLKCQGHKLAIVNPFHVKRTKELDDNSPTKNDRKDPKTIAMLVKDGRYREVYIPDDIYQDLREAVSERERLQEQLTSIHNRVVRWLDIRFPEFTTVFKDWRRNAALITLKSFPTPEKVMETGIDKLVETWRKQMKRASLKRAEALVKAASRSVGRTSGKVASEAGLQNLLAEYDLYCQQYEKVEQLMQELLMQVPNAEKLLDIKGVGLITAATFVGEVGDISRFQDPRQIQKLAGLNLVENSSGKHKGKTTISRRGRRRLRHGLFFSMIAMLGKNQEFRLLHQRNLMRENNPLNKMQSIIALCGKLIRVFFAILTKGVDYNPEKMLTDMEQSIRVAA

SEQ ID NO: 296922 - protein, 416 aa, unidentified
MTDQQRWYAGVDWASENHHVRITDGGGRDIGEKLFRHGGEGLAEMAGWLLATSGAIDAGQIHIAIEVPHGPVVETLLERRFNVYAINPKQLDRFRDRFSPAGCKDDSRDAEVLASALRTDPRCFRLLAVADPIVIELREWSRITEDLVAERTRLTNRMREQLWRYFPAMLELENDLGAEWLLDLWQLVPTPHKAARMREASVAKIIKRNRIRRFDAAHVLSVLRTQSVTVACGTTEAVSGHVATLIARIRLVNQQLKDAHQRLDSLTQRLALSQETEPGQQRQHDAAILASLPGVGRIVLATLLAEAWDALQRRDYAALRSLTGVAPVTKRSGKSRIVIRRHACHPRLANAVYHWARVAVQHDPRSRLKYATLRGRGHSHARALRSVADRLLNVACAMLRAGTTFNPSMVPENASC

SEQ ID NO: 296923 - protein, 407 aa, unidentified
MNAVGIDVSKGKSMVAIMRPFGEVVAMPYEVTHNTSDLLGLAASIKKLKGETKVVMECTGSYYQPIAHTLNEAGLFVSTVHAKLIHDYGNNSIRKVKTDKADAIKIANYGLSNWMELPKFVPEEDIRIMLKTFSRQYSKYQDLKVMLKNNFISLTDRTFPAVSELFTSTARKSDGHEKWIDFSLKFWHCECVSELTPKAFASRYQKWCQKEGYRFSKEKADDIYASACGHCSVIQKNDTSKLLVAQTIGQINAVSENIAVVAREMKRLAESLPEYRVVSQMFGIGDILGPQLIAEIGDVFRYHNKGSLVAFAGLEAPPYQSGKFESTSRGISKKGSPHLRKTLFQITKIYLQKTPADEPVYQFIDRKRAEGKHYYSYMTAASAKFLRIYYARVKEFLLALGQDPTQA

SEQ ID NO: 296924 - protein, 343 aa, unidentified
MNNSARIVYGVDIAKNVFQLQWVEPETGEVVNKPVKRAGFLAHFANRAPCLVGMEACGGAQHWARRLVEMGHEVKLMPGKAVKAFVTGNKNDAADARAIWMATQQRGVKVVALKTEQQQAVLALHRMRQQLVKFRTMQINGLRGLLAEYGEVMGVGRAAIDKAIAGVLATLADRLPAALVDTLREQWAMLAELDEKIGQIERRLLAWKKHDRASLVIAEIPGVGLLTATAAVATMGDPKAFRSGREFAAWLGLAPRQTGSGGKVRLHGISKRGDTYLRTLLIHGARSVVTHAKTPGAWVQSISGRRPTNVVIVALANKMARTIWALLAHDRQYDKVHVSTRPV

SEQ ID NO: 296925 - protein, 372 aa, unidentified
MDESSKILYVGLDVHKDSIAVAYAPDDRGAEVVSLGAIGTRQSDIDKLIRKLQSKGAATLVFVYEAGPCGYGLYRYLTGKGVAGHVVAPSLIPRKAGDRVKTDRRDAMTLARLMRSGDLTSIYVPGVEDEALRDLSRGRDDAMQDLKRSKRRLKSFLLRQDIRYEGRATWNAAHLRWLAEVVCATPPQQIVFQEYLRAVNEEQERRERLERELHEAVKSWRLYPMVEAIQALRGVELTGAVILMTELGDLTRFDNPRQLMSYLGLTPSEYSSGERRRQGGITKAGNSHARRALVEGAWAYRYPAKVSRHLQLRLEKLPAEVQAISWKAQVRLCKRYRQLTARGKHVNQVVVAIAREMAAFAWAIARLVPQAS

SEQ ID NO: 296926 - protein, 338 aa, unidentified
MDLYTGIDLHSNNGFYGILNEKGERIFNKKLPNDLPRVLKTLEPLKKDIKAIAVESTYNWYWLVDGLMDAGYPVDLANPAGMTQYNGLKHADDKSDAFFLAELLRLHILPKGYIYPREERAVRDMLRRRMLLVQQRTTHILSFQSMISRQTGSGMPCRTIKELKEEDIQDYFNDEYLILIGETNISVIRHLTEKIRRFEKEVQKRVKIKPEYEKIQTVPGIGNILVLTIMLETGPISRYAGAGNYASYCRTVKAIHTSNNKKKRNLNKKNGNKYLGWAYVEAANFMRRWCPEAKRYHQKKMARSKQVVATKSLASKISKACYYIMRDQVDFDVKKMFG

SEQ ID NO: 296927 - protein, 421 aa, unidentified
MRGSRTKRVKAMKEDTLIVTVDIGMASNTGYCTSVDGRDIKPFKFDNTREGLERFWSMIVVSKNRFRCSDVMVGYESTGPYAEPLLHYLRQRPVTIVQVNPMHTKRIKELNDNSPLKTDDKDPRVIADVLRLGHALSVVIPEGDAAYLRRLNNARERHVGERTALLNQLQQLIFLIFPEFKRVFNDIKVKTAQHILTRYTTPERIGSLNQKELGEEMRKQSMGRFGVQQAELLIRLARDTIGLQEGIAGLVLDIRHILMQLEAVHGFVAEIEAEMGKALERIPYSTRILSMKGLGVVTVAGLIGEVGDFTKFSTQSEIMKLAGLDLYEISSGKRKGQRRISKRGRSLLRKILYNAAISTIRKNGIMSTQYANLIGRGMVRTSALIVIAKKLLRIVHAMVRDSRDYICNYESPKRLEIRKAA

SEQ ID NO: 296928 - protein, 372 aa, unidentified
MIPESITWVGMDAHKISIKVAAFFPGQPEPVEWQEDTTAEAVRRLCRKLRREAPGEVRCCYEAGPTGYALQRQLRAAGLGCTVIAPSLTPVKPGVHIKTDRRDARKLAELFRAGLLTEVHPPSESDEALRDLCRCRDDVRVDLLRARHRLSKFLLRRHCIYRQTKHHWGTRHWAWLEELRFDDPMSQATFDSYMLAVQQLEERQAQLDRQLEEFGGRDPYREPVAWLRCFKGIDTVTAVCLVAELHDFRRFRSARELMSYVGLVPSECSSGEYQRRGAITKAGNRHVRRLLVEAAWHHRFRPALSAPLKRRREGQPARVLAIADRAQERLAARYRRMTGRGIIAPKAIVAMARELTGYIWALLHPAAAPTRN

SEQ ID NO: 296929 - protein, 467 aa, unidentified
MSSESCNFFWDYDPDIKPAMILRMPKCVLERECECARTSDRHLPISGNGNMNAEKEIVCGADIHRDFLVATMISRSGLKLQEQFGMDQDGLLAFRSWILDHRCLRVAVESTGNYWYPIFCILEGHVEFILANAFQIKNIEGKKTDRLDSERIAIYCLNDLIKPSRIYPKDYRDLRSITRSREALVNARSKLKNQIHQSLAVCCIKLSSVISDSFGKSGRYIIEQLLEGKTIEQIISMIPSKRIKKKADELRKAIRNGLDPVQILLIKTNLDAIDYLSEKIKLLDAEIAIKVKPFEEDLNIILSVPGIGLTSAATILAEMGDYRDFQDADKLAMYFGIVPAVYQSAGKLRTGKITKRGSKHMRRILVQVAKAISKTKKSSKLKRFFLRVFTRSGKKNVAAIALARKVLCIIYHLLMKREDYQEPEVKKNKPKIPSCGSPLSMMDIDEMIKTISQAGYLVKKGLTEGCG

SEQ ID NO: 296930 - protein, 340 aa, unidentified
MLGRDLHKNNRDMECIGIDVSKKALEVAAVRKTGEFTEKVLGTHTFENDGRGLEELLSWAERKAPHDGTLFVMEATGTYYELAADYLHNAGKSVVVELPNKIKAYSKVRNVKTKTDRVDAKVIASYGLNCRTRLWKPMTENLAQMRSFIRQSCSLVRERTACKNQLHALEHSPNAPEMLKQDLIARIETLTGYIEKYQGEALRLAAEDTGFYARAIKVASIKGVRILTVLSVLCETNGFSICDNVRQAVSYAGLDISLCDSGSFKSRGRISKRGNARIRQALYLPAITASHYGPEGIQKLYARVADRHPDAKKVAIIAAERKLYTLIYTLWKKNEPFKAQ

SEQ ID NO: 296931 - protein, 323 aa, unidentified
MSDPINNYTMIGVDVAKLKLDIAIDDKKVLTIDNKEESFKKLLKIIPDIDQVCFVMEATGGYERKLVSFLQSKGIAVAVVNAKRVRDYANSMGAYAKNDHIDAQMIRHYAHAAFAKNRLKLRESRTEIAQQLEDLLRRRNQLVGQRAVEKQHLEATINKESVRSITRMIKQFDKEIERIEVKIKAYIDADENLKKSMEQLIQVQGIGEVMVLTILTQLPELGKLSNKEIVALVGLAPYCKDSGKKTGRRAVFGGRMLIRSTLYMATLSAVRYNKPIREFYQRLIAHGKLKKVALVACMRKLLTILNSMAKTESEWNPDFAKTA

SEQ ID NO: 296932 - protein, 376 aa, unidentified
MGQRPFIPQEYDVFGGLDVDKKSISVTFINHQQGFIRSLHMPYSVEHLVKHVRKHFAEQKVAFAYEAGPTGYGLYDGLSAQGYNCLVAAPSMIPRALGQRVKTNRLDSRGLSENLRGGQLKSIHVPSPIYRELRHLTQLRDTLVSEGAGTKQRIKSLLLFEGIPFPLAPAGSQWSLKVKAQLRKLQCSKSVRFKLDQLLDRVEFSEKQGVKVSKEIRQFCHNDPELSQCIEYMMSVCGIGWIVASQLLARIGDWRELQNVRQLAGFLGLVPSERSTGEKTHRGAITHSGDGRLRSKLIQASWSAIRQDGELREFFRSVCRRHPRGVGARVAIVAVARKLSTRISVVLMQQRPYVVRQKIHSAPLTQEETSPQGTTR

SEQ ID NO: 296933 - protein, 410 aa, unidentified
MEVLHPRCAGLDVHRDSVVACARLVRPGGVERHVETFGTTTSELERLARWLDGHAITHVAMEATGVYWKPVWAVLAEMFEPVLANAAHVKDVPGRKTDVSDAMWLADLLAHGLIRSSFVPPLAIQALRDLTRTRKQLTREKASHVQRIDKLLQAANLKLGSVLSDIMGESGRAILDALAGGESDPERLAGLVRARLRASRADLVEALRGRLAAHQRLLLGLHLGQVDAIDAAIARIDAELGDRLEPFRDAVARLTSIPGVGALSAAVIVAEIGLDMGRFPTAAHLISWAGLCPRHDESAGKRRSTRLRPGDPWLKTLLVQVAWCATRAKDTYLRALFGRLRARRGPRKAIVAVAASILTAIYWMLRRGVAYQDLGADHFERRDRARLAARLTRKLRELGFDVTLAEPAPA

SEQ ID NO: 296934 - protein, 327 aa, unidentified
MKKLYFIGIDVSKEKLSCFDGKEEFSVKNDLDLEEFKRLLRRKYKDLKRIVLIFEATGIYSYFLKAFCNTKHIKAYILNPKKTPNLAKVLGQRSKTDKIDARTIYCFKDLISKEQIKVPQIDETLEKIYAYFSSYKFLIKQRVALSNHLDALERNPFAPRDLMKRMQERYLELRAEEKRLMEKMEQIIAEAEDTQEDLSNLCSIKGIGINNAICLLILFKRYQVENRQQVTALLGFDVKTRQSGTSVYSRGQISKQGNGMMRSMLYMAALNAVRTNLRMKFFYKRLINRGKPRKVALIAIARKLALIAYAIYKTKEPFKEYVGIYRY

SEQ ID NO: 296935 - protein, 343 aa, unidentified
MSACYFIGLDIHKKMIAYCIKTVDGRLVDQGMVASDRASLSTWMQGLPGPWVGAMEATIFTGWVYDFLAPHALALKVAHPEMLKAITAAKKKNDRADAEKIADLLRVNLLPECTMLPQEIRELRRILRYRNHLVRTAVNMHNKMSGLLMEVGAGYSKSRLRGKKYFHELLERLDEIPPSVKEMLLLSRAGFEMFQTFQKRLIHTLRSNPLIQARVARLMTITGVGEVTALSWVLEIGPVARFGSIRKAISYCGLCSAQRESAGKQQRGPISKKRNKHLQTILVEAAKLAPRWNPQLAAIHQRELSRGNRNRATLAVARRLVAYMMAVDKGEGNFVLREEQKAA

SEQ ID NO: 296936 - protein, 349 aa, unidentified
MSMLAELVEVVIGVDTHKHTHTAAVVQAATGAVLARATVSADPAGYAELDALAEQHSKLRAWALEGSGGYGAGLARHLTDHGSLVIELDRPVRPKRRAGAKSDPIDAERAARDALARTHLAQPKTGAERAALQMHLTARRAAVEAAADAQRQLHALVVTAPERVRGKFRGQSTRVMISTAQALRTPRGRDAELTAASTVLRALARRIRFLEAEALEHERAIRTLVRSWRPDLLELSGVGPIVAATVLASWSHPGRCRDEAAFAMLAGTAPIPASSGLTARYRLNRSGDRQLNRALHVITLSRLRHDPATRDYAERRRTQGRSNREIQRCLKRYIGRQLYRHLEAGPIAA

SEQ ID NO: 296937 - protein, 392 aa, unidentified
MYIVGIDIGKNHHEASIVSPEGKQIGRSLRFATTHKGADSLMRFIFKNIGNSPCVFGMEATGHYWYPIYSFLKAKGYTIYVINPIQSDSLRKMYIRQTKNVSIDSFLIAEVIRFGQFGTTSMADENILAMRQLCRYRDSVISSRTEIKLRIGTIMEQIFPEYEKQFSSLWVSTSMGILEKYLTPENIENAPIDELFEIIKDKSHNRLTRAKAISIKEAAADTFGIKIAQDAFSFQLKQLIDRMNFLDKQIEALDIEIMKYYEQFDCYLHTIPGIGIIGAATILAEIGDISRFKNSSSLIAFAGIDPTVRQSGEFNSTHNHMSKRGSPYLRHAIFLAATTCSFHNSPLNAYYKKKRDQGKHHLTATGAVARKLTTIIYAVLRDSKPYEPKKFC

SEQ ID NO: 296938 - protein, 348 aa, unidentified
MSRMKRLAVQQLDVSKDYLVIGLDLAKTDTAVIAITTDGELYAIDRLKYSDLLNQARQLGSTVFAMEPCNGMTYLVHELEELGHECRVINGEAVKDYVKSHFAGQKNDLNDAQAIAFLAQDEMLKFIRVKAKSEMTMQTLQVVRQQLIKQRTCSVVCIKGICQNYGLVISKSIMSEAKIRPIIEETQKLPDEIKEPLKRLLRNAARFTIDIKQIDKAIEQGLKGNETAERLLEVPGLGPQCVSRLLTTIGDINRFEGPKNLAAYYGLVPRSHTTGHNEKMGKITKQHTKGRLPKSALKKWIDKKLSAGMPCSKLSIALAAKLLRIAFAVLKYKKKFDIKKAGVARCSL

SEQ ID NO: 296939 - protein, 341 aa, unidentified
MEDKDNNNYRHYIGMEWSQETVVLARMRSSSTDILETIKMRPEIKLIKEYLRKLPGSKVLTIEETTTSHWLYVELCNEVERIVICDPYRNGLLKDGPKNDKKDSETLCKLLRNGLLKEVYHSNDKLFELRKFVSVYEDYVKASVRMKNQHSAFYRAIGRKAKKEEGIKFEGELLNFINDMQHDAILYLKQSRDKFEYQMDKFSRSNADIRRIREISGIGKKLAVIITAIVIDMNRFENKYKFWSYCGLIKYERESGGRLYGKKNPRYSRILKGAFRSAAMAAMSGNNDIREYYEYLLKEGLSFTNAKNEISRYIAKSVYGVMKYKTDYRSYQWRENKKKAA

SEQ ID NO: 296940 - protein, 440 aa, unidentified
MAMRKREDEVFPNAAGIDVGASSHWVAVPGHCTDAPVREFGAMTDDLHAMAEWLLACGVDVVALESTGVYWIPVYELLESRGLKVWLVDARQVKYVPGRKSDVADCQWLQKLMSHGLLRAAFRPAGEVCVLRAVARSREVLLTEQASWVQRMQKALVQMNIQLTEVISDVMGQTGQAIIRDIVAGQRDPAVLARHRHRRIKASEQDIVRALTGHWREEHLFVLGQALGMYDDIARHLHECDTKLQTLLAERSSACVDVGKTPRTGSKARAQFDLRQQLANWAGCDLTRINGLGLESVMKILSELGTDLSRFANVKHFCSWLGLCPATKISGGKVISARTKRSANRVRQALKMAAMSLSHSDSALGAFYRKLCTRMDKPRANTATAHKLARLVYFMLTRGEAFVDEGQQRYEEQQRERSIAALKRRAATLGFQINPIGTTA

SEQ ID NO: 296941 - protein, 458 aa, unidentified
MNRKRSKPKSDRSMPMVHPNAAAIDIGATMHMAAVRADRTPEPVRSFGTFTTDLHRLVDWFTECGVETVVMESTSVYWIPIFELLDARGFAVFLVNARDAKHVPGRKTDVSDAQWLQRLHSYGLLRASFRPKGQIAELRAYVRQRERLLEYAASHIQHMQKALTEMNLQLHHVVADVTGATGLRIIRAILGGERDSKVLARLRDYRCHSGVETIEKALTGNYRAEHLFALEQALALYNAYQEKASACDARIESVLKELSISRGRNAGPLPSPRRRLHRKANGPDFDVRTALFNLLGKDLTQIDGLGSYLSLKLIAECGDDLSAWPTAKHFTSWLCLAPSNKISGGKVLSSRTRRSGSRSAALLRLAAVTVGRTDTALGAFYRRLSARIGKAKAVTATARKIAVLFYNAVCHGMEYVDPGSSYYETRYRTRVVENLHRRAKAFGFALLPLESKAGAVVS

SEQ ID NO: 296942 - protein, 338 aa, unidentified
MYYTGIDLHKFTSYLTTIDSDGCIVKQANIKNVDYNFLQYFSDLSGEHQTTVESTCTWYWLNDLLTSINIPLVLAHAKYVKAIAYAKVKTDKVDSHILAQLLRLNFIPEAHKISNENRTLRDALRSRLKIVQRHTSVTNSMALVLAKYNLTEPEGLQNIPKLQYEQLSAHASLLKEQMLTLEKSLYPYLIPNEDIQRLLWIPGIGKMNAFTIVLEADDINRFADVKNFFSYCRLVPSARNSAGKSKQRSSKDGNRYLKIVFTDAATHAVQYYSEIRKYHNSLLRKKNKQIAKTIIAKEIAEIVFHVLKNRTNFNNKFKGVELQHKKSLQWPRVVSPYA

SEQ ID NO: 296943 - protein, 368 aa, unidentified
MEFMGIDLHTNCFNCCILDEGTSKKVVSYSIDDESLEKFYKTLTPDTYVIVESTTNAFKFTELIRDKVKDVNISNTYAMKLISFTNKKTDKVDAEKLARVLKMQILSGEEQIKRVELPPPIIQDLRALFSTYKLLGKQRTQLKNRIHSLLKQNLYPFNKVMIFNNKMRDKILNISDSRELKFQLMILFKELDNLDETIILLKKEIEIVGAPYMKEIDLLTSMQGISVFTAIAIISDIIDVNRFPNSKKFSSYLRSAPKVESSNDKTLIKSTNKQGRKLTIALLYQSLNHFIDSNRAVENWYYKLSKYKKVGKVRMGTCRRFITVIYQILKKEEYYWFMDSKNHDRKMHDYEVLLRKNRINISKWKEVS

SEQ ID NO: 296944 - protein, 339 aa, unidentified
MKFALGLDMHKDSVAYALINKEGKVQQQGDMKQSQKAILELVEWIPKDKLIIGMESSTYIYPIYDALNDAGYKVKVAHPTKLIRITKSASKNDEKDALHIARQLLRNDFPESYMLSKEMRDKRELVRQHFRLTAEQTRVKNQIHSLIAKHNYRLKSKLGTKKSIEFLKEIQLPNYARITLNLFIDQLLRIKASLRVIKNELHHEALKNEEMQKLIRLDGIFEFSAATFLFELGDWHRFKSVSGLTSYIGLIPTMSSSAGKTYHGRMRYDGNHYIKYAFTRAAEQAIRKENKFKAYFDKLMKKGKKRRTVLCAVANKMIRCCYGVLHNEELANQALLEMG

SEQ ID NO: 296945 - protein, 409 aa, unidentified
MEVIHPRCAALDLGKDILVGAVRLQSGSSVERACRTFGTTRRELLDLAGWMTSLGITHVVMEATGSYWRAVWQVLEKTFELTLASPAQIKNLPGRKTDVNDATWMVDLHAHGLVRGSFVPPAQIAALRELTRTRKQFVREIGRHTLRIQKILDVADLKITGPISEILGLSGRRIIKALIAGETNPERLADLADPHIKASRSDLIEALQGELTPQQRRLLKIHLKLVESLESAVEQIDRDIAKAVAPFRGVIEQLKEVPGLSDVSAPALVAEIGLDMTRFPTAGHLVSWARLCPRMDQSAGKVLSTRSLKSSAWVKTLLIQAAWCAMRTHRSYFRAQYYRLRARRGAKKAIGAVAASILTTVYHMIRNGHPYRDLGFEHFGRSSRDQVMRHSVARLRQLGYRVTLEKGVA

SEQ ID NO: 296946 - protein, 373 aa, unidentified
MINDNKLSFDGQDIYVGIDTGKKSWTVTILTEQIEHKTFTQPPDPDLLVRYLHKHFPSGHYKCAYEAGYFGFWIHESLTRQGLDCIVVHPSDIPTRDKERCNRNDTVDSRKIARNLREGSLIPLHIPHRELQEDRCLVRLRMTMTKKQTRCKNQIKGLLSYYGIKIPEEISSSHWSNRFIIWLEGLTEEGDDESTRGNENKENRFRHRSGKQALRMLLSELKYYRTNIAQITREIRHLSEQEYYKESVGYLKTIPGISTLSAMVILTELGDIRRFKDIDHLASYVGLIPQEDSSGGEDNHGGVTRRRNTNLRHLIIESSWVAVRKDPALLMSLIQLSKRMPKNKAIIRIARKLLSRIYYVLKNRKNYVIGVVS

SEQ ID NO: 296947 - protein, 344 aa, unidentified
MGEVSTIGLDIAKAVFQVHGVDGSGAVVIRKRISRVKVLEFFADLPACLIGIEACPSAHHWGRELAGLGHTVKLMPPSYVKAYLKRSKNDANDAAAICEAVTRPSMRFVPIKTKQQQTALMLHRTRQLLVRQRTMLSNALRGHLAELGIVSAKGRNGTAELLKIIADGADNRVAASARGILNVLAGQYSALGAEIGSIDKGILTLHRSCEASRRLAEIPGIGPIVATALVAEIGDWKAFASGRNLAAWIGLVPKQHTTGGKDRLGSITKQGNRYLRWLLVVGAMAVVRYAKKHGTKNRPWLGQLMERRPTKVAAVALANKIARVAWAIMVHGDRYKEPKVLMAA

SEQ ID NO: 296948 - protein, 344 aa, unidentified
MVTFGVDAHKRTHTIVAVDDHGTPLGQTTIGTTSKDHLGLVRWAARFGAERRWAVEDCRHLSRRLERDLLGAGEQIVRVPPKLMAHVRDSARTYGKSDPIDALAVARAAQREPDLPAARLDGPERELRLLVDHRESLVAERTRLICRLRWHLHELDPGWEPKARSLDSQRTLDAILRRLAGQTGLVARLARELTNRCADLTVSINALKVEIAELAQQLAPALLAIPGCGALTAAKIVGETAGVDRFKSRDAYARYNGTAPLPVWSANKARHRLSRTGNRQLNAALHRIALSQARWHPPAQALIERRRSGGNSGREATRILKRRLSDAVFQALQTDQFEHSSLAA

SEQ ID NO: 296949 - protein, 368 aa, unidentified
MDKGTRFVGLDVHKASITVAVAGAFGDPEDHGQIPTEAAAIRKLVDRLGSLDTRLSVAYEAGPTGYALHRQLAALGIECIVVAPSLIPTKPGDRVKTDRRDAAKLARLLRSGDLTPVWIPDEAGEALRDLVRARDDAKADQLRARHRLSKFLLRRAVHPPAGVRAWSRAHEAWLERVTFAEPADQVVLDDYRAVARAATERVKRLEAALMRTAATGPLAELTAALQAIRGIGFLSAVTIAAEAGDLRRFASARQFMAYTGLVPSEYSSGASRHRGRITKTGNRLIRHVLGQAAHNARYRPNVSYGLRARQRNVPPAIVELDRRAQARLHHRYRSLVGRIGKNKTVIAVARELAGFVWAAGQHVTPTAA

SEQ ID NO: 296950 - protein, 397 aa, unidentified
MYIVGIDIAKRKHEAAVIDGEGAVIIKPFSFTNNCSGYNRLLAMLAKAKLPLDEVSFAMEATGHYWLALFTRLQKEGFRVQVINPVQTNSIRSFYIRQAKTDPRDALLIAEVIRFGHFSESTLHPENIYELRELCRGRHAIVSMQADVKRKVVALLDQVFPEYETAFTNMFGDTSMAILQTCPTPKELSEMSLEELCHLIEVSSHKRFRMAKAQELQALARNSFGFAMAGDVFSTMIRLYAKHLDFLKQQVREMDRKIAEIMDTLDTPITTITGIGPTLGAYILSEIGDISRFSSAAKLAAYAGIDPTMRQSGEYNGVRNRMSKRGSPYLRHAIWLAASSAVLHDPALKFYFQKKRDEGKPYMASVGHACRKMVSIIYAVMRDNKAYTPCIPNEISA

SEQ ID NO: 296951 - protein, 357 aa, unidentified
MSLNQRITTEFSPCTPSAPQSPDLSIQTFHLVALGVAGKVLVRKKFTQRQLLRYTANMQTSLIGMEACSGAHFLGRALRKQGHDVRLIAAQFVKAFVKSNKNDFVDAEAIAEAVERKNMRFVPIKTDDQLDLQAIHRVRDRLISRRTAVINQLRAFLLERGLVFAKTPAKLRVALPDILENAELDLTAQMRSLIDLLWKEWKTVEDQIKGLSSELERISDDDPGCTRIRQIPGIGPIVATAIVAAIGNGAAFRKGRDFAAWLGVVPRQYSTGGKARLFGISKRGNVYLRKMLIHGARAAVLRIKRDRAPIGAWLDALDARAPKNVVVVAMANKLARIAWAVLSSGEDYRPNGNMITA

SEQ ID NO: 296952 - protein, 402 aa, unidentified
MTAGQLWAGVDVGKEHHWVAVIDDTGAVVLSRKLVNDEHQIRDLVREVDRLGEQVSWTVDLSTVYASLLLMVLADVGKSVRYLSGRQVWQASVTYRGGEAKTDAKDARVIADQSRMRAGDLPLLHPNDHLITELRMLTAHRADLVADRTRTINRLRQQLVGVCPALERAAQLTSDRGWVVLLARYQRPKAIRQSGITRLTRILADAGVRNASTIAAAAVAAAKTQTVRLPGEEVAAGLVAELAQGVIALDERIKTTDADIEDRFRRHPLAQVITSLPGMGFRLGAEFLAAVGDPTLIGSPDQLAAWAGLAPVSRDSGKRTGRLHTPKRYSRRLRRVMYMSALTAIRCDPASRTYYQRKREQGKRPIPATICLARRRTNVLYALIRDNRTWQPDSPPITKTAA

SEQ ID NO: 296953 - protein, 367 aa, unidentified
MNKSSKAFVGMDVHKESIDWAIAERDGEVRSFGRTGGDLTAVARTVRKLVASGKTLVFVYEAGPCGFGIHRWLKVQGHECWVVSPSLTPKKPGERIKTDTRDAIKLARLARAGELTAIYVPEAADEALRDLVRAREDAVAMQRQARHRLQALLLRNDIRYVGKTAWTPAHQRWIARLKLPYAPQQIAFEEYVQAVQEATTRIDRLTAAIQAAVSTWRWQPVVAALQAMRGVQLIHAVRIVAELGDLTRFGTPRALMGFLGLVPTEHSSGGKRAQGAITKAGNSSARRAMVEAAWAYQHPARITPIIARRQGGVPKIVLDIAWKAQLRLCARFRKLAVRGVNRNKLVVAVARELAGFVWAIGQQVRPV

SEQ ID NO: 296954 - protein, 324 aa, unidentified
MMTPALGIDVSKDRLDAEIAACGKPRSKYFANSPDGWRQLLAWLKELKIKRVHACLEATGRYSLGIALVLWEAGHIVSIVNPAQIHDFARTKLGRNKTDAVDAGHIREYAEIFKPQPWTPPSPAMQRLGELQTIRAGIVSSLTEWKNRCGSGLADDTALALVKATITHFAAQLAEVDKAIAGTIDNDPDLSAKRDLLLSISGVGEVLAGLVLSELPGTDVLRSSAQAVAYVGLNPRSHRSGSSIDRPTRISKIGNATLRSALYMPALSAMQHNPVVAALAKRLKAQGRLKGKQIAVAAMRKLLVLCFGVLKSGKPFDPALAMPN

SEQ ID NO: 296955 - protein, 368 aa, unidentified
MGRKSSKLFVGMDVHKESIDITLAEQGGEVRHYGGIGGEQSALIRTVRKLESLGKSLVFVYEAGPCGFWIYRLLQERGHPCWVVAPSNTPRRVRDRIKTDRRDSLKLAGLARAGELTPIYVPDAADEAMRDLVRAREDAVATQRQARHRLAALLLRNDIRYGGKTAWTEAHRRWIARLHLPGAAQRIAFEEYVLTVDEATASVQRLTRSMEQELGHWRWQPVVHALQACRGIQLIHAVRIVAEVGDLSRFTHPRQLMAYLGLIPSEDSSGERRRQGPITKAGNRSARRALVEAAWAYRHHAAVSPLIVRRQTGLAKPVLDIAWKAQLRLCARFRRLTARGINRNKIVVAVARELAGFVWAIGQRVKLN

SEQ ID NO: 296956 - protein, 404 aa, unidentified
MIFLGVDWAEAHHDLCVLDEEGRVLGRRRIDTGVTGMADLHRLVGEHAEEPGEVAVGVEVDRGLLVSAVVASGYEVYAINPLSVSRYRDRHHVSGAKSDPGDAKLLADLVRTDRHNHRLVAGDSELGEAVKILARAHQNAIWARQRQVNALRSALREYYPAALEAFGTDLDSTDALSVLRIAPTPELGRQASMSKLVSALRRGGRQRNLETRAAQIQRVLRSDQLGQPAVISGAYGRTTSSAVRLVASYNEEISELETVLSEHFEQHPDAKIIRSLPGIGMVLGARVLGEFGDDRTRYAGPKSRRNYAGTSPITKASGKSRVVLARFARNRRLADALDQWAFCSLTKSPGARRYYDELRARDKTHHQALRQLANRWVGILHGCLEHQTLYDEVLAWKRYDEIAA

SEQ ID NO: 296957 - protein, 345 aa, unidentified
MNYCGIDIGSKSSYVHMTTKSGRKVTRGEVATTREGLRERLVPYVRWGLRVAIEAGNQTHWIYKVLVEMGAKVTVVNPTQVKLIAQSRKKTDKIDAKILCELLRIGALPHPVHMPGEQARALRGLLEARRQLISARTKLCNVVRGLVRQEGVQLPARALSSLAGWKQLLKQGFEAAHVLTIVASYHPAFKCLTESIRDLDRALIQYERKDPRAARLQTMPKVGRIAALTFLAAVDDVKRFGSSRKLVGYSGLAPSVRASSERIEYGPITRAGRRELRGVWVQIAHLVAVDKNPASRPLRTWFNRVARRRGKKTAVVALARRLLVIAYHLLKAETDYDPARVKRVA

SEQ ID NO: 296958 - protein, 349 aa, unidentified
MLADELDYVVGVDTHRDEHVLAVVAAATGAVLARRAVRANGGGYLAALRFAEEAADGARGWAVEGAGHYGAGLARYLASRGETVLEVGRSARGERRLCGKDDQLDAVRAGRAALGSEPLPRPRSGERREALRLLLLARRGAVDVRREALVQLRSVIVTAPDRLREELRGLAVGRLLERCGRLRRSGSGGADELATRLVLRSLAARVEAATAEAAELEREILVHVQALAPQLLEEPGVGPIVAAQLIVAWSHRGRVRSEAAFARLAGVAPVPASSGQTSRQRLSRGGDRQLNRALHTIVLHRRQHDPATRDYIARRTVEGKSRREATRLLKRYLARHLYRLLQNQEPLLA

SEQ ID NO: 296959 - protein, 359 aa, unidentified
MIVIGIDPHMKTHTAVAVDAASGRTLAEKTVSSDARGHEELLLWARALGSERCFAVEDCRYVSGRLERHLLPRGERLVRVPPKLMARARSSARTYGKSDPIDAACVARAALREPGLPEAHLAGPEQDVRLLVDHRDDLVGERQRIQKRLRWHLHDLEVDLELPPRVLDRYVWLDRIAEALQAVSPDTRRRIALEQTRRCRELTAEIRALEREIRTMMRALAPELLTLPGCSALSAAQLVGQVAGASRFAGEAAFAMHVGTAPLPVSSGKSTRHRLNRCGNRRLNATIHMIAITQARMHPPAIAYMERKRAEGMSSREARRCLKRHITRMVFKTMLRSERARAGQVLQAKFGPEVLAVAV

SEQ ID NO: 296960 - protein, 339 aa, unidentified
MLYVGIDIAKNKHDVTALNVPGKTVLKPLTFSNNKAGFELLDLSLRQLNQDCLIALEDTGHYAFNLLNFLHEQGYKVYTYTPLLIKEFAKSLSLRKTKTNKKDAHGIALKLLSDPNREQFQHNNRQVELKILTRHIHRLKKKQSDWKVQYTRCLDIIFPELDKIVEKHSEYTYQLLTCYPNPQKRLEAGFDKLIEIKRLTASKIQDILSVAPRSIGTTSPAREFEIIKHYKRLIDKAETCVNDLMAEFNSVITTVTGIGNRLEAVILAEIRNIHAFDNPAQLQAFAGLDSSIYQSGQIDLAGRMIKRGSPHLRWALIQAAKACPRFSPAFKAYLKTKLE

SEQ ID NO: 296961 - protein, 414 aa, unidentified
MSKAGKRMIVNSPTVIVGIDIGKYTHVAVALMPDGRFTKTFSLHNTREGYEALLERICFWKEECGTGEAIIGMESTGHYWEVPARWLAGKGLKVVLVNALHTKRAKEIEDNSPGKTDAKDTRIIAQLVRYGKYLSCVLPEGAMAELRELTRIRQHIVTELTQKRNYLRRLLDSVFPEIFTVFRKSWGKTFLHLIRLYPLPEDLIDAGLPAVAARLKQSCKNLKIKKLETLYALAGETVGIPVARGAYASGIRNTAGRILTLQDEKAGVEKQMENLLAEVPESRFLLSLRGVGVVSAAIILGETGGLSRYTSSKEVIKLAGLNLFEISSGTHRGRVRISKRGRPLLRHILFILATVQAKKGMPLNGEYRAFLERKMPPVKALIALSRKLVRLFFALTRDQRCYTETLSAVTTKAA

SEQ ID NO: 296962 - protein, 424 aa, unidentified
MMNHPKMKYTYVGVDSHKDTHCAFIINCFFEKVGTFTVKNAPNEFEAFVEMVKKYKLEGTSLVFGFEDVSEYGRQLVSFLLKKKFVVKHVNSYLVAHERKSLNVTQKTDEFDAECAARVLLNRFDSLPKADVQDKYWILKNLVTHREAMVKSNITLKNRLHSLLASHYPSYTNFFCSIDTLGALAFYEKYPSPSKIKDVTAEELNEFLTGASGRGNPKDKAQKILNYINADGDTTIEHQEIRDSTVISVVKMIRSNMEELRTIDKKLEELLEHFDYKLTSIRGVSTAIAAGLISEIGDISRFSKPAKLARYSGVAPITQASGKSEAQFADTRGNKALHHIFYSLALSLISVSQSKKARNIYFHNYFQKKVSEGKTKRQALNCLQRRLVNIIWGMMTYKTEYRNPELQLIEEPQKNPSLKKPSIK

SEQ ID NO: 296963 - protein, 349 aa, unidentified
MEIDTIGIDLGKTVFHLVGLNRAGEVVIRRKFSRLQLLRFTANLGIRLIGMEACGGSHFLGRSLREQGHEVRLMPAQYVKPYVKTNKNDYIDAEAIAEAVGRANMRFVPIKSDEQLDMQSLHRVRDRWVARRTSVINQMRGLLLERGITFRKGRRHAEACLPGVLEDADNLLSGLLRMLLAQLQGELRHLQSQIDEADTLIARAAGDHEACRRLMAIPGIGPLTATAVVASIGSGAEFRKGRSFAAWLGLVPKQESTGGRQKLLSISKRGNHYLRRLFVSGARAVLQCRDKQSSGLSAWLTQLASRVHTNIAAVALANKMARVAWAVLAKSEAYRPPLSVISTEALACN

SEQ ID NO: 296964 - protein, 449 aa, unidentified
MSDIPTSSTQPEFGALIGIDWGDKKHAWALQAGDSTKIEKGDIEHTPEAIQQWAAGLRQRFPTGRLAVALEQSRGPLVFALSKYEHLTLFPIHPTSAAEYRKIFRPSGAKSDGPDAVLHLDMLARHRDKLRPLNPDTPETRALQLLTEDRRQLVNERTRYSNRLTANLKSYYPQVLQWFDDLYAPVTLDFLDQWPTLEELQKAKPGVWSEFFQEHNCRDAKTQQRLAAIPMAVTATTDFAVVTAGRAGVCAAVRLLRNLNQAIQEYDRQIDQLAKGHPDFAIFQSLPGAGKVMVPRLIAAFGTQRDRYQRAADIQQYSGIAPVTEASGQQLWVHWRWGCPKFLRQTFHEWAAQSIAQCDWAAAYYRVQREDKNKSHHAAVRSLAYKWIRIAFRCWKDRQLYDDSKYELALKTRAKATPEPKQPSAFPLPLRWISCAGFQKLAEKNEENT

SEQ ID NO: 296965 - protein, 402 aa, unidentified
MTYDYVIGMDVGKYFHHACVLDIDGTQVLSKRINQNEKSLRTLFSTFSAHDHKVLVVVDQPNNIGRLTVAVAQDIGIDVRYLPGLAMRQLSRIHAGNAKTDIRDAYIIAHAAKNLPESLRSVDRVEEAFLQLKVLNGIDEDLARSYTRLINQIRSALVGCYPQFEQALRGQIIHRKWVLHLLARYGGPTKVKRLGKAKAAAFARRYKARNPEPVLDAIFAAISEQTVTIAGAHYAEMGIAMSAKDALLKLEHRKQIEQEVIELINDIPHTQILLSMPGIGPKTAAQILMTAGDMSDFPSAGHLASYAGLSPRTNQSGTSIMSNSLNRAGNKKLKNALWQSSFASIRFHERSRQFYERKRRDGKRHNAAVVALARRRLNVLYAMMRNHERYRDPALQQEGIAA

SEQ ID NO: 296966 - protein, 341 aa, unidentified
MNVTTIGIDLAKTVFSIHGTNPHGKVVVRKRLNRPKLLAFFAQLPPCLIGMEACSGAHYWARELTKLGHDARIIAPRFVAPYRKSSKNDDNDAEAICEAVSRPNMRFVPIKTEDQQAVLCLHRIRRELTKERTAQINQIRGLLAEFGLIIPQGRYHARHRIPEILEDAENGLPMLARRLLNNINQRILQLDEEILAYDREIEAMARRDEQAKRLMAIPGIGPQTATAILASAPDPRQFKSGRHFAAWLGLVPRQYSTGGKPRLGRITKRGDKYLRTLLIHGTRAVIAKLADKQDQLSEWAKGLVARRGYKRAAVALAAKNARIIWALLMNQTEFKTQPAEG

SEQ ID NO: 296967 - protein, 346 aa, unidentified
MQFYTRQHKFYCGIDLHARKMYVCILDAGGNIRVHQNIRTDPEAFLRVITPFREDIVVTVECIFTWYWLADLCQKEGIPFVLGHALYMKAIHGGKTKNDKIDSHKIAVLLRGGMIPMAYVYPEKMRATRDLLRRRNHLMRKRAELFAHIQNTNTQYNLSESFGCIAKPQNRNGIVEQFEHPAVQKSMAVDLEVVRTYDTILADLERTIIKLANHHDPVSYALLQSIHGVGRILGLIMLYEIEDIGRFPRVQDFASYSRLVRCSHESNGKKYGTHGNKIGNAHLKWAFSEAAVLFLKGNDPAKKYFDRLIHKHGKAKALSILAHKLGRAVYFMLKNKEAFDQEKFLR

SEQ ID NO: 296968 - protein, 371 aa, unidentified
MTDDITFVGLDVSKETISVGIAPGDPREAVHYFGTIAYRPTALYSLCKKLSRDGSRLHFCYEAGPFGYSLHRRLLDWGYTCDVVAPSLIPKRPGDRVKTDRRDALSLASLLRAGQLTAVWVPDASHEAVRALVRLRHLAAGDVRRAKQQILGFCLMHDRVYRAGTTHWTKTHRNWLVDQKFEHGALALTYSELLGRLERAEEMLARARLELREHLGGWALYPVMDALQALRGFDWENAAMVAAEIGDFQRFPTAGHLMAYVGLVPSEYSSGERRKRGKITKSGNAMVRRVLVEAAWTYRHPARQSSPIRARSAHLPEPIRDKAWQAQTRLCRRMRYLRGRGKHHNAVLAAVARELAGHVWAIARMVEPKMA

SEQ ID NO: 296969 - protein, 382 aa, unidentified
MTILNTLEDFQRLSGALASYGLPVRIGFEATGNYHRTLAHHLGQAGFELKLVSSVGLARTREALHNSWDKNDPKDAQVILHMLEIGAVQFFHDPLVVGTADIQELSKTHEIVSRSKTELWHRILTHYLPLYFPEAERFHRSSRTDWFLAFLEKYPTPTMITAMSQDDFIADAWQVVGKKVYKERFLSDIYATAVNSVGLPVDPDSDAVRMFRMVIAEGRSLVRQRNEIEARSVELLSDLPDYQLLTTIPGIGPINAMTILAEAGDLRRFRHHRQFLKFCGMDLATVQSGMFRGRSRISKYGNARLRRTLWMAGQTAVLTKTNSFRDKFERYISKDRHNAHLRRKAYTAIAAKMARTVHAVVNHGTPYRPFFEGVSPGGRTSL

SEQ ID NO: 296970 - protein, 368 aa, unidentified
MREHITHVAFDMHQASITAAWLLPSASSPELRTIPHEPKPFRRLVRQILAHGPACACYEAGPLGYAPQRQLEAWGLPCEVIAPSLIPRRPGQRIKTDTRDAKKLVGLYRAGELTAIRIPTPEEEDVRELVRCREACGTDALRAQQRLRKFLLRRGLRSPDGPSGSQAWWAWVQALRLPDPAAQRTLDEYCLAATTLRARWKALDPEVAALASRAPWVAPVARLRCLRGIDTLTAVTVLLEVFDFRRFDSPRPFMSFVGLVPREHSSGGKEARGGITKTGNAHLRRVLIEAAWHYRVPPGCRPRPNKAVQARRAGQPPAVVALAEQAETRVHRRFTRLVARGKRPVIAATAVARELCGFLWAAMVAVPA

SEQ ID NO: 296971 - protein, 343 aa, unidentified
MDHFAGLDVSVKETSLCIVDDAGRIVREVKVASEPEALLAVLTNPACHFKRIGLEAGPLSQWLFKALAEAGLPVICVETRHMRAALKAQINKTDRNDARGIAQMMRAGLYRPVHVKTLRSQKLRMLLTHRKLLQSKAIAIENDLRATLRNFGLKVGVVGTVKFEARIKGLVDNTPDLVVLVEPLLIVRRVLREQIGILHRRLLAIVRNDAVCRRLMTVPGVGPVVALTYRATVDVPYRFRNSKAVGAVFGLTPSKHQSGESNRTGGISRCGDEMMRMMLYEAAHIMLVRSAKWSWLKAWAMKIARHRGLKKAIVALARRLAVIMHRIWVDGTEFRWTRGVAAA

SEQ ID NO: 296972 - protein, 366 aa, unidentified
MKKISTMQAFSNEIVKEQKLTIGMDLGDRWSFYCVLDEAGKIILEQKVATTPEAMKQTFGKIPRSLIAIETGTHSPWVSRLLTELGHEVIVAHAQKVELITKSNRKDDRHDARTLARLARIDPELLGPVRHRSAKAQIHLTVIRARAELVSARTALVNAARGLVKSFGERLPKCGTYQVNEKLAEGVSAELRDVLAPLLREVASLNERIKEYDERMEKIAKEVYPEVSLLQQVKGVETQIALTYILTIEDPYRFPKSRQVGCFLGLRPGRRNSGESEPQKKISKEGDRYLRTMMVQGAHYILGPFGEDSDLRRWGLKLAERGGKNAKKRAVVAVARKLAVLLHRLWVSGEVYEPLRNSQKAMRAVA

SEQ ID NO: 296973 - protein, 346 aa, unidentified
MTIVEADRTVIGGVDTHLDVHVAAALDPIGGVLGVESFTVTPRGYRALLEWMRSFGSLSTVGVEGTGAYGAGLARFLMRAGVDVVEVDRPNRQVRRQKGKSDPVDAIEAARGVLSGRSVGRPKTRDGNVEAIRVLLVAKRSAREGRLRTLHQMRQLSYTAPDELRRRFKGLSGADLVAEAAAMRPRRGTDPVEYATKVSLATLGRRALELEEETAHVDTLLAELVETSAPSLLGVFGVGIDTAAVLLVAAGDNPERLRSEAAWAHLCGVAPIQASSGKVVRYRLDRGGDRNANQALWRIVMTRLSFDPRTREYMERRTKEGRSKREVIRILKRYVAREVFRHLPRA

SEQ ID NO: 296974 - protein, 358 aa, unidentified
MNTYYIGADVHSNSTELAIEKRGEIVARYSVPTSIPAIVNVLESLQGKKYLAVEEGPMSGWLYRNLNKKLDQFVSSDPRRNKLIASDGDKDDKIDAGKLASLLRGGFLRAIHHSDDESRAELKHWVSLYHDRVRDAVRCINKIRARCRMHGVKISRVALRDPASRINWLLRTNHSVLANQLKMLWIGYDATVQQVKFAKHQLSTLSKKYEMVQFFSQLPGIGPIRAITIFAFLDTPWRFKKKNKLWKYCGVGLQRSTSGTDKKGRPKPARLKLPWAVNRTLKNAVLGAALSAINQKDNVFKDYYERMLKDGIITSNARHAVARKLLTVMWAMWKTNSPFDEKVVCNELNLSTVSVLSR

SEQ ID NO: 296975 - protein, 393 aa, unidentified
MEYFAGLDVSMEETHICVLDREGVVVHEAKAASRPEAIADELARAPSCRRVVFETGRMAPMLFHGLSHLGLPIVCVESRQAYQALKSLATHKTDRNDARGLAHLARTGFFKPVHVKSLPAHAIRSLIIARKKLVGLRVTLENQIRGLAVVFGVRLPRALTAAFIEQALGASEGIAGLSAAMQGLAAARAAVLAAVVAIDADMKRMVRASEACRRLMTIPGVGQLTALAFTAAIDDPERFKRSRDIGAYLGLVPRRYQSGEVDYTGSISKCGDRRMRTLLYEAANVMLTRYRGQLKLKDWAFAIAKRSTMRKARIALARRLRSSCTRCCETAQSSNPRRRAPPTRQEAEPSSRAERRPREGADDGADSVACGHLLADCDFNQATPHPANPIKCR

SEQ ID NO: 296976 - protein, 406 aa, unidentified
MDLVYSHVCGLDVHKKNVVACIITPEGKEIRTFSTMTDDLIALKEFIKAKGCSVVAMESTGSYWKPIYNLLELESIKILLVNAKHIKNVPGRKTDVKDAEWIASLLQHGLLQGSFVPDREQRELRELVRYRKSLIEEKSRELNRIQKVLEGANIKLSSVVSDINGASSRSILEAIINGEENPETLAELSQGKLKNKMDELKRALKGLINHHQRMLLEIQLRHIDYLDEEIAKLDEEIKNRMLPFEKDLALLDTIPGVGRRTAEQIIAEIGTNMEQFPSAAHLCSWAGLCPGHNESAGKQRSARTRKGNQKLRSSLIEAARAASRAKDTYLSSQYHRIAARRGANRAAVAVAHSILIIVYHILKRKQPYIELGPTYYEEKKRNMIIRQSLKKLESLGLKVTVESGMS

SEQ ID NO: 296977 - protein, 404 aa, unidentified
MDLVYLRCAGLDVHPRSVSACTRIVIEGRVAQEVRTFGTSTRELAEMADWLAACGCTHVAMESTGVYWKPVWHVLEGRFELVLANAMYVRNIPGRKSDVKDAVWIADLLAHGLLRGSFVPPERIQELRDLTRTRKQLVREMTRHAQRIQKTLEDANVKLTEVISNVLGTSGRAILRALISGESDPEKLVDLTGGRLKAPREMLIDALRGRVTDHHRFMLKMHLEQVEHLEDAIRDVEARADQAPFRAATELLMTIPGVSEVTARVILAEIGDDMSRFPTAGNLISWAGLCPRLDESAGRRRSNRTRRGAPWLKTVLVQAARAAANKRDSYPRAQYLRLKARRGPNKAVLAVAASMLTAAYHMLKYGVEYRDLGPNHFERDKQVQADRLLRRLRALGIEVTLKAA

SEQ ID NO: 296978 - protein, 388 aa, unidentified
MIYVGIDIAKLNHFAAAVSSDGEILIEPFKFTNDYDGFYLLLSKLAPLDQNSIIIGLESTAHYGDNLVRFLISKDFKVCVLNPIQTSFMRKNNVRKTKTDKVDTFVIAKTLMMQDSLRFLTLEDLDYLELKELGRFRQKLVKQRTRLKIQLTSYVDQVFPELQYFFKSGLHQHSVYALLKEAPTPNAIASMHMTHLAHILEVASHGHFGKDKARDLRVLAQKSVGANDSAISIQITQTIQQIELLDSQLEKIEAEMTDIMKFNDSVIMTIPGIGYINGGMILGEIGDIHRFSNPNKLLAFAGLDPSVYQSGNFQAKTTRMSKRGSRVLRYALVNAAWNVVRNNATFKAYYDAKRAEGRSHYNALGHCAGKLVRVIWKMLTDEVEFNLE

SEQ ID NO: 296979 - protein, 344 aa, unidentified
MDYFAGLDVSVKETSICIVDDAGKIVREVKVASEPEALLAVLKNPAYHFKRIGLEAGPLSQWLFSALADAGLPVICVETRHMQAVLKAQINKTDRNDARGIAQMMRAGLYRPVHVKTIRSQKLRMLLTHRKLLQSKAIAIENDLRGTLRNFGLKVGMVGKVKFEARIKELVENLPDLAARGEPMLIVRRTRREQIVILHRRLLAIVRDDEVCRRLMTTPGVGPVVALTYRATVDVPARFRKSKAVGAVFGLTCAKYQSGEVDRNGRISRCGDEMMRVMLYEAAQSMLHSKKWSWLKAWAMQVARRRGMKKAIVALARRLAVIMHRIWVDGTEFRWTRERATAAA

SEQ ID NO: 296980 - protein, 384 aa, unidentified
MKKHTSGWVEMKAAAVNVGTVGTESRRDQLVSSVLYQAVVGLDVSDRQAHYCVLDLQGEVAVEGVVATKETSLRVQFEGKARIRIALEAGTHSAWISRLLAELGHEVIVANPRNLRMISENDCKNNPADARLLARLAHVGPELLSPIQHRSAKTQNDLALVRAREVAVQTRTKIVNAVRGIVKSSGYRLPSSATSSFARKAKEACPGVLKPALLPLLRVIEDLTREVELYDKLVAKKADSEYPETKAIRTIHGVGPLTALTLVLVLDNDRTRFRRSRDVGCYIGLRPKQRESGTKSPQLGKTKSGDPLLRRLATQCAQYILGPFGQDSALRRWGLSLALRGGKNAKKRAIVAVARKLVILMHRLWISQEIYQPMRGVVMNPAAA

SEQ ID NO: 296981 - protein, 349 aa, unidentified
MIIGCDLHTRYQQIATLDTDTGDLVERRLEHESGEARAFYSALQGQVRVGIEATGHTHWFEAMLAELGHELWMGDAAKIRASVVRKQKTDARDAEHLLDLLRQDRFPQIWRPSPAERDLRQLVWHRQKLVWMRGAVKNQLHALAMGEGVCRKKKLFTAKGRKELEGLALGPWASYRRQELLRMFDELAAATAKLDLAVEQAAKDQPLAMRLMTHPGVGPVTSLAFVLIIGPVERFERSKQVVSYLGLNPQEHSSGGKQRLGAISKQGNPMMRSLLVEAGHTAARFDPALKRMYQRLKFRRGASVAKVAVARKLAVRMYWMLRSTADYAQLVRMQGSPWATLVENSSSLG

SEQ ID NO: 296982 - protein, 408 aa, unidentified
MTVVGIDVSKGKSMVAAMKPGGELVTTPYEVKHSGIELSRFALDVLCMEPDTRVVMEATGRYHEPVAALLHSEGIFVSVLNPLLIKQSGAGSLRKVKSDPKDALKIAKYGLDNWSTLREYTPMEAIRQQLKLCARQCDLYSKNIVMLTNNLISLSDKTFPGVNELFSSPEKENGHLKWVDFYRTFWHCDCINRMSPDAFEERYKKWCKRKGYHFSADAADALYAASCGLYTTLPRDNNAKLLVTVATDQLIALRENQSKLETEMLNLCKQLPEYETVMAMYGVGKSTGPHLMAELGDVRRFPHRSSIVAFAGVDPGVVGSGKMQLSSVTTSKRGSPQLRKALFQVVSTYVKCKPENEAVYQFYAKKRDEGKPFFVCTTAAANKFLRIYYARVKECLNAAESATQVEEG

SEQ ID NO: 296983 - protein, 428 aa, unidentified
MLWGMRRGKCTGRRSVKTSVASIGADAKPTMEPPMRKPKRRKPLNDLSRCPTALNVNETLIAVIELSQKTWLVAGIIPGIERQPLKKLEPDENALLSLLDRWRKEAEKAGYKIKRVAVAFEAGRDGFWLARWLRARGIEAHVIHASSVAVPREHRRAKTDRLDTELLKRAFLGWLRGEREHCKMAAIPTIAEEDARRPSRERESLVGEQNRIINRMKAALARLGIRGFNPKLEKAADHLEDLRTPEGEPIPPNTLSELRRDMERRRFVMHQIRQIEAARLERLKQATRGRGGSHAMVRLLARVKSISVETADMLVHEALSRNLRDRRAVARYAGLTGSPEESGSKRREKGLARSGNIRVRRGMIQLAWRFLMFQKDSALARWYRTRTDNVPGSRKKMIVALARKLLIALWQFVRDGVVPEGFVLRPAQ

SEQ ID NO: 296984 - protein, 328 aa, unidentified
MKKKFILGADISKHTIDIHCFGKPDCLTISNNSKGFKELIKWIKKQVSRDFEGVIIVMEYTGIYTYNFENFLHAESIDYVKRPALDIKRSAGIKRDKTDKADARMISKYGWQRREELQPMKPLSSTQLDLQQLMAYRDKLVADKSSYQSRIKELKGQMQQKLNQHIIQSTENIMQLLKEEIKKTEAAIKELVTKDEALAANYELVQSVKGVGFSTTVHMLIKTENFTRFDARKFACYCGVAPFKNESGTSIRGRTKTSHLANRKIKSLLTMAAISAINHDPQLKTKYEQKLQEGKAKMVALNIIRFKLIERIFSVIKRQSPYILSTAA

SEQ ID NO: 296985 - protein, 346 aa, unidentified
MKKIFIGIDFSKEKFDATLIKAEGLKECAPSMHEVYDNKTSGFRRLVRWVKTQSEGLPIDTWLFCGENTGAYSIGLSNYLYASGYDMCLECAYKIKHSAGILRVKNDKADSKAIAEYAMRNYDKVRLHKPQSSSLTCLREVFLYRHSLVRQKVALTVRRDEKRLTQEKSDARAFMSFTSKHLITEINKAIDKCDQKIKETIAADGELREIFDIITSMPGIGVQNATCLMVYTDNFQKFDMDSRKIACYYGIAPFGRQSGTSVNSRPKVSPFANRMIKSLLSQAALAAIKSDINIQNYYQRLIERGKHPLLIHNNIKNKMLHALVAMVRDRIKYNPDYVYQTNKSVA

SEQ ID NO: 296986 - protein, 355 aa, unidentified
MIKVKTNFEGQTVFVGMDIHKSSWNLGIHLNDQFIRNVHQKPSPHIMVQFLRQQYPGANYKAAYEAGKFGFWIQRQLTASGVDCMVINPADIPKSQKDTLQKTDTRDARNIGLRLQSGVLRGIHIPDEQQEADRVFFRHRKRIWKDLTRCKNRIKGLLAFSGIDIPEQYDNANWSHNFINWLKALDCKQTSRRIALNYMISQMEFLRKELLTISNAIRKMMREQRYKKNYYLLRTIPGIGPLTAASILVEIGDIHRFGTFYHLNSFVGLLPMEHSSGQSDNKLSLTVRKHRQLRSDLVESAWTARRTDPAMALYYQEQIKRKDSKIVIIKIARKLLNRIRYVLLNQKPYEYGIVK

SEQ ID NO: 296987 - protein, 374 aa, unidentified
MRIVALDLGKRKISYCEVKDGQVLRRLTVSCIETLETELGVDQASAVVAIEACREAWHVHDLLTSWGNKVIVVDTTRVRRLGVGQHGRKTDRVDAEVLAFALERGGIPMAHVLSPARRELRRWLGVRRGLVETRAQLITTARGICRELGQPLQGCVVKQFLTHVRKTNLSPEASAVLTPLLKTIETVSAECDMAERQLAALAVQEPVIQLLATVPGVATIVASAFVSVIDDAGRFEHAHQVESYLGLVPGENSSGGKRRVGAITKQGNRYVRSLLIESAWTILRKTSANDPLRQWGQAVVKRRGSRIAVVALARRLVGVLWAMWRYDTFYDPRILAQAGERAAKHTAQSPDERAQALQRASKKRRVLKHVEAAM

SEQ ID NO: 296988 - protein, 627 aa, unidentified
MEFFETGLVEDEKSTKKKIKGGVDVHKRGCNIFLLNEREEKVKEKRIQTNYESFSKFFSPFLQEYDVEVALECGNLAFVICDYLSALGAGSYVVNAFKNRLIAETCQKSDKRDAKTLGYQLSRRILPPRVYHPTYRERELRSLVNHRHKLVADRTRAANRAFALLLRNGIFGSKSYLRNNEEYWKRLLRERLVSESNILYIEFKCFMEQYQLCNRQIGEMEAETKKHIASMYQLEYELLLSIPGVGHCIASVVLAYLGIIQRFENVRHFWSYYGMAPSGRETDGKKVGSSKITKMGPSILRGYLTQGALSILKNKEKEENKPFVEFYERIRTKKGWKKARVALGKKLLGIIYGVLKNRTAYISNYAEHHNGKRKVTDTDAHIVAEAPEAPEAQEALESGNRPGELELELELDDKRQVTDPTDPTDPTEPTEPTEPTDPTETKESTETTETTETTESKRREPPAHPSEPAALGTAGMGMGMGMERGMERLLSIEEIKSLHMVEFLTHQYGLCFLPLGNQYVCRSPFTEEQKPSLIVGQFQGHWLFKDFSSGHGGSLIDFVLLKENFCNVAQTLAYLRNLISGDKLEWLQSKGGGVGVRGVDKYEEKKKGGNYNLNYIYRKLCINEKEV

SEQ ID NO: 296989 - protein, 392 aa, unidentified
MYIIGIDIGKNHHEASIVSPKGKQIGHSLCFATTHKGADSLMNFIFKNIGDSPCVFGMEATGHYWYPIYSFLKAKWYTIYVINPIQSDSLRKMYIRQTKNDSIDSFLIAEVIRFGQFSTTSMADENILAMRQLCRYRDSVISSRTEIKLRISTIMEQIFPEYEKQFSSLWLSTSMGILEKYLTPENIQNAPLDELYGIIKDKSHNRLTMDKALSIKEAAADTFGIKIAQEAFSFQLKQLIGLMHFLDQQIEAPDCQILGYYEKFDCYLHTIPGIGMIGAATILAEIGDTKRFKSSSALVAFAGIDPTVRQSGEFNSIHNHMSKRGSPYLRHAIFLAATTCSFHNSPLNAYYKKKRDQGKHHLTATGAVARKLTTVIYAVLRDGKPYEPKSFC

SEQ ID NO: 296990 - protein, 410 aa, unidentified
MEVMFDRVAGLDVGKESVTVCVRTPGSRRGRHSETRTFKTMTGSLRVMRDWLVESGVTIAAMESTSTYWKPPFYCLEEVMEVWLLNAGHMKAVPGRKSDVRDAEWIAQLLEHGLLAPSFVPPPEIRRLRMLTRYRVQLMGDRAREIVRLELMLEDASIKLSSVASSLKTVSARAMLTAMINGESDPLRLADMAKGKMRRKIPDLAQALTGHFDANHAQLAHSMLRRLDLVEQALVELDQVIVAACRPWQHQIELLQTIPGVGPKVAETIVAETGADMTRFPSAAHLAAWAGVAPAMKESAGRQMPAGKRHGNKWLTAMLIEAAGSVGRMHGKNYLAVQHARLTKRRGMGRAQVAVAHSILVSAYWMLKRDEPYHDLGADWHSRRNDEAHTRRLIAQLEHLGHTVIIDPAA

SEQ ID NO: 296991 - protein, 317 aa, unidentified
MKAPLIFVGIDVSKAQLDVAIRPTATQLSVANDSAGIKALVKRLMKLRPTLVVLESTGGLERQVMCALIHGEIAVAMVNPRQIRDFAKSTGQLAKTDRLDATILAHYAEAVRPQPRPLPDANTVKLRALTGRRRQLIGMIVAEKNRLATADPSVRESIADIISLLEQALDHIDQALDRFIEQSSVCKDKEQRLRITPSIGPITSRTLLAELPELGTLDRKQICALVGLAPFPRDSGTLKGRRCIWGGRAAVRAALYMATLVAIKRNSVIRDFYNRLKAKGKVFKVALVACMRKLLTILNAMITHKTTWSDSFSLQTT

SEQ ID NO: 296992 - protein, 375 aa, unidentified
MEGAPMLDTTTFVGLDVHARSIKAVSLDVMTGEVRAATFGYDAGAVAGWVRSVDHRARCVYESGVTGFDLQKRLSGLGVDCVVGAVSKMIKPSADRRRKNDRNDAEFLARMLSVGNVVEVWVPDDECEAARDLTRALEDARDDLSRSKQRLSKFLLRHGLAFDERTPTGRRKGNWTRAHWSWIESIGFAERADEEVLAYYVDAVRRAAEEKARLEGLVEAEARKPRWRKRVDSLRCLKGVDTASAADLVFEAGEFSRFGNARSFAAWVGLTPSEHSSGESDRRGAITKAGNKHLRKTLVEAAWHYLTCSGRPKDLAKGQAPDRGARRHAAKGVRRLAERREALLARGVHGNKANVATARELACWVWAVGLMAEEA

SEQ ID NO: 296993 - protein, 345 aa, unidentified
MQLLAIDLGKQSFHIHGITNEGEVISRKVTRSELENAVQELSPEAIAMEACASAHHWGRRFGAMGFPVRLIHPRFVMPFVKGSKNDAVDAEAIHEAAQRPTMRFVPVKTTEQQDLQMLHRTRDRLITQRTGLINHIRGLLGEYGVVIPVGAVRFRKDIRTAVAEAKLSTLAKQNFNALITEFEASDKRVAEIDRKLIAICKTDDRCKRLATLPGIGPVIATALIAAVDDGRHFSSGRAMAAWIGLVPRQYTTGGKPRLGGIGKRGNQYLRRQLIHGARSVLIRIAGRSDRRPNGRRTYLLARATTKPSWQSPTKQHASPGPCCAMEKATKPHNRGARRFECRDAR

SEQ ID NO: 296994 - protein, 380 aa, unidentified
MTRATRGGEYTGPTEQSLHLSFELGLKDWKLGFTTDLSAKARLRVMPARDLGRLEREIAEAKRSFGLAATARVRSCYEAGRDGFWLHRYLVSQGIDNGVVDSSSIEVNRRMRRAKSDGLDARKLLTMLVRYHAGEGKVWSVVRVPTVEEEDRRQLHRELRTLKKERTRTTNRIKGLLANQGIRLEKNGDLRQRLGRLRLWDGSPLPAGLVARLQREWEHAEFLHGKILELERERRQAILEGQSPALEKVRQLMLLKAIGPSGSWVYVHEFFGWRRFRNRKEVGAAAGLTPTPYQSGDGSREQGISKAGSRPIRAVAIEMAWCWLRYQPRSKLSLWYQERFGRGGKRARKVGIVAVARKLLIDLWRFLEHGVIPEGAALKA

SEQ ID NO: 296995 - protein, 325 aa, unidentified
MEPKKLCCGIDVSHTSLDVCYQNNLGELFHLKVGNNNKGFATILEHTGRDYHFVMEATGVYYIRLAFYLHERCCELSVVNALSIKRYIQMQLERNKSDKKDAAWICRYAMEQHPSYWEMPDSAYFESKQLYNTIREYAEQIKRFNNQLHSLKLLPVPSKDTIKSLEKVKQQLEKEIINLEGKLETLLQSWQPGQLKSISSIKGIGKRATAMLIVFTQGFKNTRSHRQLISFAGLSPTEYSSGSSIQGKPRIYKRGGKNLRDVLYMCSMNAIKTNTACKTLYERLRTNGKTGKQALIAVCNKLLKQVFAVVKNNSLYQPNYCSAKP

SEQ ID NO: 296996 - protein, 354 aa, unidentified
MTIVAHSRPFVVGVDTHAKNHVYAIVATGTGELLETRDFPTTSAGINRSIAWIARRTGADLDTLWVIEGAGSYGALLAGAVGAAGYQVAEAARMDARHGVGKSDPLDAHRIAAAVLPLEEQQLRRPRLNEGVRAALQVLVTARESMTTERTRSVNALTALLRANDLGLDARKPLTGTQIADVTRWRARREPLALSVARSEAVRLAKHITGLDSDIKTNTSRISGLVEISEAAPLLQETGFGPVTAAICLTVWSHHGRVHSEAAFASLAGVSPIPASSGNTVRHRLNRGGDRTLNKALHLIAMSRMTFDTETIGYVEKRQAEGRTKKEIRRCVKRYLARRIYRTLNALNPRLCHP

SEQ ID NO: 296997 - protein, 411 aa, unidentified
MLKIVYPVCCGLDVHKSFVFACIASTNERGVTNYQNKRFSTFSKGLRELSAWLAVNNCSDVCMESTGKYWIPVYNILETTCKVVLAHPKYVKAIRGKKTDKKDAKWIADIFKHDLVSGSFIPPPDIRQLRDLVRYHFKLTSYTTGEKNRAQNCLTVSNFKLDDVFNDVFGKSATAIIERILENPGEPFDVKPFVDGRCRTPVEEIQAAVDGVICTEQSEKLRIIRTHMDDLDKAKDNLMSAILALAEKFLPQINLVSSVPGIRAFSAIAIIGEIGVDMSVFPTAKHLCSWAGLTPQNNESAGKKKTTRISRAGAYIKPLLVQCALNAIRCKDNPEISSRYLKLKKRRSHKKAIIAIARMLLTAIYNILKKTESYNSELYKKFDMPPKNFNISLDYAIRVLQSKGYSVSPPA

SEQ ID NO: 296998 - protein, 413 aa, unidentified
MEIVVPVCCGLDVHKASVAACLRRVGPTGRLHQEARRFGTMTADLLALGDWLVAGGCTHVAMESTGVYWKPVFNLLEGRVPHVWVVNARHVKAVPGRKTDQKDAEWLAQLLQHGLLKPSFVPPAPVRALREVTRYRSQCVAARADEANRIQKLLEAANLKLAAVATDILGVSGRAILAALVRGETDATVLAGLAKGRLRRKQAPLLAALAGRITPVQRALLGTQLTHVEFLDHTIVALDVQVATLLAPHAAALARLDTIPGVDRRTAEVLLAELGPDMTVFPSAEACAAWAGACPGLNETGGKRRSGKRRQGSPWLHTALVQAAWAASHTKTYLGAQYHRFARRLGVPKKAVVAVAHTLLVIAYHILKEETTYRELGHDYFSRQNTAQLQQRLIRRLAALGLRVTVEPLAAAA

SEQ ID NO: 296999 - protein, 425 aa, unidentified
MTMHAEAATPTPEEDFAVFIAIDWADKKHVWALVKADSSKREQGDIETTPEAVGTWVSELLARFPGQRIAVALEQKRGPLLCLLSKYPELVLYPVHPATVSRMRAALYPSSSKDDPKDADLLLDILLHHRKHLRRLDADTIETRKLQMLVEDRRNLVDQQTAHTLQLRARLKLYFPQALRWLPELDSPLAADFLKRWPTLPLLQKARLETIESFFHQHNCRSKALLCQRLQEIPKAVVATEDAAVVDSGTAIVRALLDLISVLRTHVAALDRQIAAIAAVHPELPIVASLPGAGAALEPRLIAALGTQRERLDSASELQALSGIAPVERCSGQSEWIHFRWACPKFLRQTFHEWAGHSIAQSRWAKAYYDAQIAKNKGHHAAVRALAFKWQRILFRCWKDRQPYDEKRYIEALRRRGSPLAKALS

SEQ ID NO: 297000 - protein, 449 aa, unidentified
MHGAHIGGQRAGAFLDLVRGVDPERVLLVGIDVAKATWFVVASNLLGEVVVDGVRLVADRAGLAELERVLGAASARVNAAMVVVGIEAAGHQHQTLTAHLLDRDELVVRVLNPAQVAAVRKQQGNRRRKTDWLDAAAICELLARGEGALVHLDGSAAAALRPLWSGRKDLVDTRSRLRQQAGALVDCLWPGCSAKDTVAGVTPVLCDLFATKAGRVLLELLAQGWTPARVAATSVAALRGLFAVRGCRLTRPLAARLIGRAQAALPAHPAATAGKAATLAALLGTIDTLDREIACLEAAMAPLLARTQGAKLTQLRGVGVVAAAGFVAFVGSTDRWAEWSKVWRAAGLDPARSQSGPADARLGISREGSAWGRRAILDLAAAVCQQPGPWRDRLRTRTTQQHKPAKVALAATANAIGRTLFALMASGADFDPRFEAKRAAARKAGGQAA

SEQ ID NO: 297001 - protein, 347 aa, unidentified
MMVIGIDAHKRTHTAVSADELGRKLSTKTVGTTSSDHLALLKWARAQPDPERLWALEDCRNMTRRLESDLIAAGERVVRVPPKLMAHARDSARTYGKSDPIDALAIARAALREPDLPVARLDGVEREIRLLVDHREDLVAERTRVIARLRWHLHELDPGWTPPGKLERASAYDRVTVHLAQFDGLVARLAATLVEHYRRLTIEIDELAGEINERIQRIAPSLLAIAGCAGLTAAKIIGETAGVDRFRSKDAFARHNGSAPLPVWSSNRARHRLSRTGNRQLNAALHRIALTQARCHPDARALLARRKAKGDGGMEALRILKRRLSDVVYRAMLADLDHRSAETPTAA

SEQ ID NO: 297002 - protein, 343 aa, unidentified
MDHFAGLDVSVKETSVCIVDDTGKIVREVKVASEPEALLAVLKDCAYRFKRIGLEAGPLSQWLYSGLAEAELPVVCVETRHMQAVLKARINKTDRNDARGIAQMMRAGLYRPVHVKTLRSQKLRMLLTHRQLLLSKAIAIENELRGTLRNFGLKVGMVGTVKFETRIRELVENLPDLAVLVEPLLVVRRVSRQQIGLLHRYLLTIARDDDVCRRLMTVPGVGPVVALTYRATVDVPARFKNSKAVAASFGLTPCKYQSGEIDRDGRISRCGDEMMRVMLYEAAQVMLTRTNKWSWLKAWAMQIARHRGMKKAIVALARRLAVILHRIWVDGTVFRWTREVVTA

SEQ ID NO: 297003 - protein, 326 aa, unidentified
MQGKEASEQETKVKSSVGIDVSKDWLDVHMLPAQESLRVANTQDGIRRLKRRLMRLNLGLVVFEATGKWHRQLWRSLHASGIPAAVIDPFRLRMFAKAQGIFAKTDRLDAAVLAAFAAVMTPAVRPPAAEAVEAIAELVTARDSAVAEQTSLKNQMAAASDSFLRRQLVRRIASLGKVIAALERETKKRILANPGLARRYAILTSIPSIGFVVAATLVARLGELGALPDKAIAMLAGLAPIADQSGQREGKRVIWGGRARVRRLLYLAAVGAVRCNPQMKAFYSRLRNAGKPAKVAIIAVARKLVLLANTLIANNRTWMPDAPKPA

SEQ ID NO: 297004 - protein, 455 aa, unidentified
MKVNKVSALRVKRGLHRVNGAEPQVVGLTPQTTDNRKTDTMKTYILRQIKPVEPQKSIRTPRPKPVGSVLAVVHLERPEPAVKGPSLFIGLDVHNDSIAVSLAPSDSTEVRRYGIIGGEHDDVLKLAHKLQAAHPGTLLKFCYEAGPRGFALCRCLQAHGWDCILVCPSKVPRKPGERVKTDRRDADDLARLYRAGELTGIYVPDPEDEAMRDLIRARFQVGKQQHRARQQLKMYLLRQNLRYGGQTSWSPAHLRYLAKIKMPFPVQQIVFQEMLEVISEATARLERYDQEIERAVPGWRWEPVVRALMSLRGMALLHAATLVAELGDFNRFEQPGQLMGYLGLVPSEHTTGKDRQQGGITKMGNAPARRALVEAAWQYRIPARLSPHLKKRQEGLPKAITDIAWEAQRRLHHRYTHLTRVGKKKAQVAVTAVARELSGFVWAIARQVKPKPVAG

SEQ ID NO: 297005 - protein, 344 aa, unidentified
MEHFAGLDVSVKETSVCIVDETGRIVREVKVASEPDALLAVLKSGAYHFKRVGLEAGPLSQWLYSALGEANLPVICVETRHMRAVLKAQINKTDRNDARGIAQMMRAGLYRAVHVKTLRSQKLRTLLTHRKLLQSKAIAIENDLRGTLRNFGLKVGIVGTARFEARIRELVETLPDLTLLVEPLLVVRRALREQIAVLHRRVLAVVRDDEVCRRLMTVPGVGPVVALTFRTTVDVPARFRNSRAVGAVLGLTPCKYQSGESDYTGAISKCGDEMMRVMLYEAAQIMLTRTIKWSWLKAWAMQIARRRGMKKAIVALARRLAVIMHRIWVDGTEFRWTRQEAAAA

SEQ ID NO: 297006 - protein, 373 aa, unidentified
MTDYDAYIGLDVHKDSISVAIADAGRSGEVRLFGAIPNEPDAISKLVKKLSSRHGRVEFVYEAGPCGYNVFRQIEALGFVCRVVAPSHTPVRPGNRQKNDTRDAVMLARLLRAGELTFVWVPDVVHEAMRDLVRARSVASHDARKARTLIQLFLLKHDLRYSAKSWTSRHRTWLRNRHFQHHAQQIAFQSYLNRLEQAEARKKELEDQIAVISQTWSLARTVMNLQAFKGIGLVIAATLVAEVGIFSRFDSPRKLMAYLGLVPGEHSSGSSVRPRGITKTGNSALRALLFEAAWSYRVQAKVGNWMHKRRPDVPQAINDIAWKAQVRLSSRYRKLVGSGKKSNVAITAVARELVGFLWDVARKTEVEPMSPAA

SEQ ID NO: 297007 - protein, 467 aa, unidentified
MKTFYIGIDVSKGYADIAIMEESGGLVSGGGRYDDTPQGHEGVKGVVQGFARREEEFAIKAGLESSGGLERNWLKLFKKLSTAYQGKVYLLNPLAVKKFLERDLHRNVTDAISAKGIAKYLRQGMRSQDIPYEDPEIEGSVSLYRCLRTAIGRASQMKNELQSLLPRTQPYLVQYCRQGIPTWVLTLLRDYPTAPKLARAKPEKLAKIPFITLEKAKTVIEDAKESIAAQNDRHTGIAVSFLSSELLDAEERLGEIKQALCDELSEDDGVKVMQSIPGIGLWSAVCLRLEIGAIERFPSPECLVAYAGLDPRIRQSGDSERHIGISRRGRRQIRAIIYLVALTAIRHNPVLKHFYGRLKETGKKPMVAVVACMRKMLHIIYGCWISGKLFDPCRHMRLKENTPPADKASLRTIPDHQSLSLKAPISRREAMKRKAKALPQTRNTRDMRGLGSAFQGHFTTLILKGAK

SEQ ID NO: 297008 - protein, 344 aa, unidentified
MSYHVGLDVSLDSVSICVVDQEGSVFREGKTGCDPGEVLRFLESCNVPLKRVGLEAGNLSIWLYHGLLAAGLPVMCIETRHAAAALKAQNIKTDRNDARGLAQIMRTGWFRAVHVKSHASQKLRVLLQSRRCLLDKRLDIERQIRGTLKTFGMKTGVVTSATYESRIRELIMNDTELQTFLEALLLTRRYMSEQCLKMDKMIIAIGKNSEVCRRLMTIPGVGVLTALSFMTAVDIPERFRKSRNVGVALGLTPRKYASGEVDYDGHITKCGDFMARNHLFEAAKSLMCRVQKWNALKAWGMRIAKRSSMKNACVAVARKLAVIMHRMWIDGTEFQWTAEPAVAA

SEQ ID NO: 297009 - protein, 368 aa, unidentified
MGKYDYTGKTVYMGIDVHKKTYACVSVCAGEIVKKDTMPASPLALINYIKNNFSGAIVETVYEAGFSGFHLHRKLIDAGVKNRIVHPGSIEVATRDRVKTDKRDAKKMAVQLSAGRLRGIYIPTLEQEAKRSASRLRNSIVKLRHQVGQKIKALLFTQGLIPMDDDTALSKRWLNQKIEEVEALNYPVGFYYTLKRYADKWLSFTNDLAEIKKEVLMMQSDEEKALLLIYESAPGIGEITALKLKDELGDMQQFTSEKKLFNYLGFTPVEYSSGENVHQGHISRQGRAMLRHIFVEAAWIAVRRDPQLNEIYKRLLIKRGSKRAIVGIARRLAGRLRSCVRDGTLYEIKKEALSAESTDAINDCCVTS

SEQ ID NO: 297010 - protein, 398 aa, unidentified
MYQQFCGIDVSKDSFDITLLESSGEVKLQEKLTMDREGFNTLLEHLSSYPKEKLLVSMEATGIYHLPLLSFLLENSFHSVVVNPILIKSFIGSTTLRKTKNDKKDATSIALFSLKSYQSLHLASADAIENIRPLIRERESLSKEVAKLKTEIKANLVQLFPELLKNTNIFTKSILNLLLQAPSRKAIRNLKKQKIQKLLDSTSGNKVRISADEILSLAKNSIAISDKYLEKVLTSKIRRLITVQDELSFLDEELQNSLEDTDINDDIEILQSIPGIGTVTSKNFMVEVSSIDKFKSVKQLCAFIGIDPSVRQSGTSINYKGKISKRGNANLRRTIWQMAIGTIRSCEKFNTYFNKKREEGKKFKQAVIATANKLLKTIFILLKNKTKFNENLAYGVSK

SEQ ID NO: 297011 - protein, 337 aa, unidentified
MLYGAIDLHARYSQIRIVDAEGRVIRDQRVVTSADRLLAVFARPEPLRILLESSTESEWVAAVLEAGGHEVIVADPNFAPMYGECHRRVKTDRRDVTALAEANRRGWYRLAYRRSAAQRATAQQLRVRRQLVQMRTGMISVVRAILRQSGYRVGSGSSACINARISALGLPDALHAIIAPLRRALDLVTAEIHALDRQLDAAAVADPIVRRLLTVPGVGPVVALTFRSFVDDVHRCQHAGQVSAAIGLVPREDSSAERRHRGHISKAGPNELRSLLVQAAWSCWHTRRSGPLRVWANQLATRRGNRIAVTALARRLSRILFAIWRDESVFAIASVAA

SEQ ID NO: 297012 - protein, 311 aa, unidentified
MNPSLVHAGLDIAKATLDLHLQGQSLSFAHDPPGCAALVARLRALGMPVLVVCEATGGWERPVVAALHAAQIALSITNPRQVRDFARGRGQRAKTDRIDARMLAAFGVANLPEPTPAPSAVQAELSAWVTRREQIQAMLSAETTRQIPGLPKTVARDIASSITRLQKQRAQITARLAALLSATPELAAKAARLCSIQGVGPGTAATLLGHLPELGTRGGRTLAALAGVAPFNDDSGPRRGQRRIAGGRASVRCALYMAAFNAIRYNPVLKPFYQRLRDAGKPFKLALIATARKLLTTLNTLLQKPQFTPRS

SEQ ID NO: 297013 - protein, 372 aa, unidentified
MKTKTTKSLTPAVVPTPTAPVPAGGFTLGLDLGDRSHYVCVLDATGQVLHEGPLVNDRVALALLLTHYPAATVALEAGTHSPWISRYLTGLGATVIVANPRKLHAISRHERKCDRRDAVMLARLARADVALLHPIKHGSAQAQHDLLGLKLRDALVRTRVNLINTVRFTLKSLGHRVSNPSSEAFHKSILTAVPADCLPVVQPVLAVRTLLTEQIKTLERDLVARSQRDYPVTQRLQQIAGVGPLTALCFVLKIGEPARFGRSRDVGPYLGLCPGRDQSGGTDKQLRISKCGDGLLRRLLVSAAHYILGPFGPDCALRAYGQHLAGTSAREKKRAVVAVARKLAVLLLSLWKHGTDYEPRVPAAPTLVLTPA

SEQ ID NO: 297014 - protein, 390 aa, unidentified
MIYVGIDVAKTTHYAAAADSDGVVLVEPFAFDNDAPGFAKFISKIASFPKEQLIIGLESTGIYSENLICFLFDSGYKLAVINPIQTATLRKTNIRKTKTDKVDTLLIIKSLMVNSYRLYTEQDTQSLKLKSLCRFRQSLKKSKARLKIQLSGYVNLLFPELLSFFKSGIHISTCYTLLKRCSSPAEIAALRLDSLSRLLSNASRGRFSRSTAETLKSLAKSSVGVKNPYISIQIAQTIQQIELLEQQIDEIENVIKDTICELDSVIMSIPGIGAIDGAMILGEIGNIDRFASPAKLLAYAGLDPTVCQSGKFKARSTKMSKRGSKILRFALINSAWQLTLKNDTFFNYYQLKLSQGLSHYGALGHVAHKLVRVIFTLLKHNVLFDPTRLV

SEQ ID NO: 297015 - protein, 416 aa, unidentified
MEVMFKFCAGLDVHKKIIVACVLLSSPEGLQRHIKTFSTMLVGLEALAAWLAGFGVTHVAMESTGVYWKPVYNVLSAHFDVWIVNARDLKQVPGRKTDVKDAEWIAQLMRLGLLKRSFIPAVEQRDLRDLTRYRTRLTAERAAASNRLQKVMEDANIKLAAVATDSQGVSARAMLEALINGETDPAQLAELAKGRLRAKIPVLEQALSGRVREHHRFMWRAVLEHIDELNTRLLILNARIRDLTAPYENIIERLAAIPGVDRYTAEVILAEIGPNVTPFPTAKHLASWACLCPGNDISANKRRSGKTRRGNNWLRTALVEAAWAASRAKDTYLSSQFHRLRARRGDKRAAVAVAHSILIVVYHLLAKPEAVFTELGGDYFCKRNPEQEQRRAIRKLEGLGFTVTLTPVVLAAAAAP

SEQ ID NO: 297016 - protein, 428 aa, unidentified
MGVSVQPDRSHEYTDHALPYQWFVGIDWGSQTHQVCVLDRERHRVGERSVEHEGIALAECAAWLTTLAAGEVHRVAVAIEVPRGAIVELLVERGLHVFAINPKQLDRFRDRHTVAGAKDDRRDAFVLADSLRTDRPSFRQVHVEEPHLLMLRELSRTEEALLTEFRRATNQLREQLHRFYAPLLQLCPAADEPWLWDLLELAPTPAHAADLTEAHVAGVLQTHRIRRVSAGDVLKVVQAPALPVAPGTAEAASAHCALLLPCIRVLAAQLQTCARQVESLLTTLGTVEAPSAPPSDVAIIRSLPGVGRKITAWLFAEAAQPLAERDYQILRTQGGVAPVTKQSGKRRQVVMRRGCNPRLRNALYHMAHCVAQRDAYFASVYAALKTKGQSHGRAIRSIGDRLLRMLVAMLRNHTLYDPSWRQPVLMER

SEQ ID NO: 297017 - protein, 420 aa, unidentified
MPNPLTTLYVGIDVSKDSNVVCCLSFEGKKLFSGSFKNNNDESQNLQSKIVEIQKNNSFDSIQIVLESTGVYSFHIGLFLSSSELLNAVGTTVFVVNPKMTKNYSKSYIDMTKSDPSDSFMLADFARCGRTKMLKPFRGKQRLALQRLTRYRKHLIDLLCQEKMYVLNNIFIKFSEFNNKSHDFRTFSDSFSTSAIEILTNYFSPETIASTPVEKLATSLRKYSKNKIGDPLAIASKLQSAARASYRLDKIMYESINACIASSFCLIRTYEKQIKDVEEQIGLLIKGLDNQNEYNSLISIPGIGPVYASGILSEIGSISDFNSDDALANFAGLTWKKTQSGNFDASDTPMQKNGNSYLRYYLIEATQNIISNIPSYKEYFDKKKSEVTTHAYPRARVLTARKVLRLIYSLVSQNKLYQPK

SEQ ID NO: 297018 - protein, 347 aa, unidentified
MLHAGLDLSRRKVDVCLLSDQGEHLDQLVVPPDAGSLRTLARRIEDVHAQPVCAVIESMTGARVVHDTLEAEGWSVEIADAQKVKGLAPLACKTDKIDSMVLAVLSHRDLVPAIWLPDPTVREERELARFRLHLVKHRSMLKHRIHSTLINFGRPCPVTDLFGVEGRKLLERLDVPEPWRGNVLASVKLIDDLERQTTEAERRLKQGHADHPYIPLLRSVPGIGWVLAFTIAAEIGEIERFESPQKLAGYTGLCPRVVQSGDSDRRGPLSKHGPRYLRWALLEATMHALRHPAYAERYQRNKKRLGRQRGAKVAQIDIARRLSHAIWHMLSRNEKFAPRGAALRLAA

SEQ ID NO: 297019 - protein, 411 aa, unidentified
MKFIGLDWKDKGYTTRIINKEGADLSGSFEVEKNREDFIEFIHKVRKYCDGDSNILFGIERERDPIVEYLLTLGYKVYLVCPNMMKSLRKRYSSTGKYNDDFDSYIIADTVRTDRNRLTQIEPRDENIRKIEFLLRNREKAVNDKTRLTNRLTCYLKEYFPAFLDLFNDITCPTALSFLKAYPTYYNIKELSREEIRTFLKEHHYHKESGILRIYKAIKKGQVKIDATVIQERSRSAILLIKRIELLNEEIKEYENDLKETTETDKDAEIFRSLPGSGDTLSPGLMVIFGKKRSRYENAEEINSLSGIVPFTKQSGNWETHLFRFGCNHFYRNIITRLAYCSLTKSEWAKGYYNEKKAEGKSHYHALRCLARIWIKVAFALWKKREKYNEDKHMAAVQRHKIRNRLARKSA

SEQ ID NO: 297020 - protein, 365 aa, unidentified
MSKDIKESAGEPRRYVGIDLGDKKSRVCSVGEQGEVMSQEWVVTTPEALFKRFHGKSEMRIAMEVGTHSRWASELLRRCGHDVRVADARQLALITNSNAKSDKRDARTLAQLLRADPRLLSPIEHRAEKLQMDLTVIRMRDNLIETRTRLVSSVRGVVKATGARLPDCETTRFPQQVVDVIAEPLRPALAPVLEVIDQLNEELYEYDCLLEHWARTRYEESSRMTQVKGVGTLTALTFMLTVGDKERFSRSRDVGSFLGLRPRLDQSGDSHPQLRITKAGDGLLRKTLVECAQYMLGPFGQDSDLRRWGLKMIEDGNRSKRARQRAVVGVARRLAVLLMSLWKSGQTYDPLRHSRAQESSKEVAA

SEQ ID NO: 297021 - protein, 391 aa, unidentified
MILAGIDVAKDKHDCFIMNSDEEILVKAFTFSNNLEGFNFLYEKIRSVTKPKDKIKVGLETTGHYSYNLLGFLLNKGLPTFVINPLHTNLFRKSLTLRKTKTDKVDSRTIAMMLMSDVALKPYTDTSYHNEELKSLSRYRFTKVQERAKLKTSVSRLVQILFPELEKIVCTIHMSSIYHLLEEYPGASYIASVHLTKLTNLLMEASHGRYNRNTAIKFREAARNSIGSILPAKSLELKHTIKLIRELTVEIDEIDAEIKKMMDSIASPITTIPGIGYSMGAMIISEIGDFSRFSSPDKILAYAGLSPSTYQSGQLNNCYSHMEKRGSRYLRYALFTVAQKVCIWDNTFAEYLSKKRAEGKHYYVAISHTVKKLVRVIFHLERTGQAYLKAA

SEQ ID NO: 297022 - protein, 364 aa, unidentified
MKEITLLGIDLAKNVFQLKGLDKHHKEVFKKRLSRSKLESFVRGLPSCTIMMESCGGSNHWGRVFGTMGHEVKLISPQHVTPYVGNHKNDDKDTDGILECGTRPRTKFVTVKTLEQQDMQSILRIRERLVGNRVSLSNQIRGLLLEYGIVIPQGFSHLKKHISQLLDANSNELSEELKEGISDCYEEFKELSKRIAYYDRKIETISNKHEYCRLLRTIPGVGPISALALYAAVGNGSQFKNGRMMAAHIGLVPKQSSSGEKHRLLGIIKKGHADLKKLLIHGARAVVYHAGKKTDWRSEWITALSSKKHTNVVTTAVANRTARIAWAVLQSCKPYQAKNDELVEGSACYPQPYHALRKNEGLLA

SEQ ID NO: 297023 - protein, 379 aa, unidentified
MADCISYIGLDVHKESIAVAVASGGLRGEVRQYGRVTNTARALDRLLRKLGGAGVRLRFCYEAGPCGYGIQRRLAANGHECVVVAPSLIPKRPGDRVKTDRRDATSLAKLHRAGELTAVWVPDIGHEAMRDLVRARLDAVHSLRRARQQLCGFLLRQGCHYGRPAWTKLHRPHGTSPWAEGSRLAGLKFDQAVHHIVLEDYIAAVEAAEARRDRLRAQIEAMLPDWTLAPVVAALQTMRGMALVNAATLIAELGDLSRFANPRQLMAYLGLVPSEHSSGASIKRAGITKAGNGAAPRLLIEAAWSYRFPARLSRELLLRQESQPKPIRDIAWKGQVRLCARYRRPARSGKPANIVTTAIARELAGFVWAIARQVTIPAN

SEQ ID NO: 297024 - protein, 343 aa, unidentified
MQVHTIGIDLAKNVFQVHGVNERHEVVLVRQLRRKKMIGFFSKVAPCLIGMEACATSHHWARELTKLGLTVRLIPPIYVKAYVKRQKNDAADAAAICEAVTRPTMRFVPIKTEEQQAALAVHRTRNLLIRQRTQLINSLRAHLAELGIVADQGREGLAKLVAIISEASSTQSLPSEMLQALDVMLAQLASLQLQIGELDRCIQAQHRASDVSRRLESIPGIGVIGATAIAATVTDPSQFKSGRDLAAWVGLVPKQNSTGGKVRLGSISKQGDRYLRRLLVIGATSVVKLARIFPAKYPWIVKLLARKPAKVVAIAVANKLARIAWAIMSKGETFRRPVYTVRM

SEQ ID NO: 297025 - protein, 366 aa, unidentified
MSKSSTVVSNRVEIFKDDKLTIGVDLGDRFSHYCVLNGAGEVIWEDRLPTTPKGIDEVFSKIPPSRVALETGTHSPWVSRQLARLGHEVIVAHARNVRLIGGSSRKDDRLDARTLARLARIDPGLLGPVRHRSAKAQIHLTVIRARAGLVSARTALVNAARGLTKSYGERLQKCGTQQMNRESAKGLSQELRDALDPLLAEIESLNARIAEYDRRIEQIAKEVYPQVALLKQVKGVGTLIALTYVLTLDDPHRFCRSRDAGCFVGLRPGRRNPGMSQPQLHISKEGDRYLRTMLVQGAHYILGPFGEDSDLRRWGLRLAERGGKNAKKRAVVAVARKLAVLLHKLWVSGEVYEPLRNNHKVVGRVA

SEQ ID NO: 297026 - protein, 391 aa, unidentified
MVCVGIDVAKDKHDCCILDSDGTVRADCFTIPNNMDGFKQLLQTIRDCTKKSDKIKVGLEATGHYSYNILGFLLDNGLPTYVINPLHTNLYRKSLSLRKTKTDRVDARTIATMLLSDVDLKSYTDTAYHNEELKSLTRYRFDKVRERAKLKQSVSRLVTILFPELEKLVPSLHIASVYSLISEYPGAKQVSEVHLTKLTNLLTTASKGRYGKDKAIQIRDAAKTSIGSVMPAKSLELKHTIKLIKELTSEIDEIEDSIQQIMDELHPPILSIPGVGIQSVAMILAEIGDFSNFESPDKILAYAGCSPSTYQSGKLTNCYAHMEKRGSRYLRCALYNATKYVCHWNPVFAEYLAKKRAEGKHYNVALSHAMKKLVRLIYALQKSGKAYLTAA

SEQ ID NO: 297027 - protein, 349 aa, unidentified
MIVGVDVHRREHCAALIDERGVVLGTLSFPNTAAGVRKLRTWLGARDAGGAVVGIENGAGYGQMLCSALAAAGLEVLNVPAWRTKRDRGKHGPGKSDPGDAVAIARVVLCDRERLGPALEPELVRALAIVETLRRQTVARRTDAIQRLRALWTQFDPEAEVAVGNVLAARTLRRLRRLRLGSGVLGDAATSCLHRIAAEIARLDAVVGDLDKQLAELLAQSGNPLEDVCGAGLQVAATLIAQSGDVRRFRNRAAYARYGGVAPIPCGSGASAGRHRLHRGGNRQVNAALHRIAIVQAQWDPAAQAYLERKLAEGKTPREARRALKRHLANIVYRRLKGWAESTLPAVTS

SEQ ID NO: 297028 - protein, 346 aa, unidentified
MEQITTIGLDLAKQVFQVHAADAGGVQIFNRKLRRAEVLRFFEKTPACLVGMEACGSAHYWAREISALGHDVRLIPPVYVKPFVKRGKTDAADAEAISEAVTRKTMRFVPVKSADQQAAAIVLKTRALLVNQRTQVINALRGHLSEFGIIAAAGTTKVAGLISIVRDETDLRLPKAARHALMEVASQIEALKAQIEKLEKVIVATVKRDDDARRLVTIPGVGAITAASVRALVPDPGGFKSGRHFAAWLGLTPKPHSSGGKERLGRISKMGNPALRSLLVVGATAVLRHARGNPNASKWLTALLARRPYRIVAVALANKTARIIWALLVKGGTYQDNGASNQRATA

SEQ ID NO: 297029 - protein, 345 aa, unidentified
MGVLIGIDPHKATNAVAAIDERGELLEYAVFSTNRSGLRSLERWGKRFPERRWAVEGVRGLGRSVALRLVAAGETVVDVPAKLCSRARLLATGNARKNDRVDAFHVALAALRGERLAEVGEEEQAEVLRMLSERREDLIKERTRTLNRLHGLLRDLLAGEAPKNLSAEKAARVLRGVRPRSGPTRTRRRLAADLLRDVRRLDRQLCELECRIREALKEASTSLTRMFGVGPILAAKIIGRVGNVARFPTKAHFASYTGTAPIEASSGEVVRHRLSRAGNRKLNHVLHMIAICQARHDTEGRAYYRRKLAEGKSEKEALRCLKRRISDAVYKQLQADLAVAIPAAA

SEQ ID NO: 297030 - protein, 375 aa, unidentified
MIDASPQPTVTDPTVTDPTVTDPTVTDPTVTDPTVTDPTVVGIDIAKSTFEVALITPRSSGKPRHKQFANSADGFEKLTAWLLEREVSQVHACLEATGIYGDDLAHFLHQAGYQVSVVNPARIKAFAQSQLSRNKTDKADAALIAQFCQSQHPPLWSPPEPMVSELQALMRHLESLLQTQQQQKNRQEAERSDTVKASLQSLIDYLSQEIERLKKQIQDHIDQHPALKQQQSLLVSIPGLGPLTAAKLLGEVTQFSVYNNARQVAAYAGLTPRQHQSGSSVRGQTRLSKIGNSRVRKALYMPALVAMRHNPLIQTFCQRLRERGKCSMVIVGAVMRKLLHLAYGVLKSGQPFNPNYLQANPNYLQEIGQKLAPNT

SEQ ID NO: 297031 - protein, 387 aa, unidentified
MLEVNTIGLDLAKNVFQAHGSDASGTVLFKKKLRRDHVLRFLAAQPASTVAMEACAGGHYWAREIAKLGHDVRLIAPGYVKPFVKRQKNDAADAEAICEAAQRPTMRFVAVKSEDQQAAAMVFRVRDLVVRQRTQIINAIRGHLAEFGLVAAQGLFHVAKLIAEIEDKDSTIPEAARPILSLLVEQLRSLNERVAVVDREIARRAREDAEARRLMTIPGVGPITATALAALAPSATTFKRGRDFAAWLGLTTLQRSSGGEQKLGETSRMGERTLRRLLIIGASATVRWAMRKGEAADPWLTRMLGRKPPMLVIIALANKTARIVWANHHGSSTTAAWAGLGPASESRSRGAYPHLSRSFSACCQFTIEPPSACCSTLWTETSLSLRQ

SEQ ID NO: 297032 - protein, 373 aa, unidentified
MPKYSTAFGMDVHLRSTTVCALDADTGEAVTRRFPGNPWGEIAGWMEGFPGPSLAAYESGYLGFAPQRELAGLGVECVVAAVSKIPRSAADSASKNDRNDAARMAKAILAHDISPVWVPSPEVEGIRDLAGAYDGATARLATAKQRLLAFLAKRGFVYGGTTPAGNPRKYWTYDFLRWLDKVRPEGDGGVRTLAALRNEVEAAAEARADLLSEYRAAVDASPIAAEVAALQSIKGCAFALAAAFSAEVGDFTRFRSGRQVTAYSGLAPSQRSSGDSVRLGGISGAGNALVRKLAVEGSWCYAAARHQPKLMPRDTGVPLEIRMHGRKGSERLLRRREEMLARGMPAAKANAATAAELVRWLWALGMMCREGAE

SEQ ID NO: 297033 - protein, 424 aa, unidentified
MNVDSTDEPRFAAYVAIDWGDSKHAWSMQPADSDRRERGEIEHSPEAVAAWAAMLSARFGGQPVPLAVEQSRGSLVFMLGKYEQLHVYPIHQRAAAQFRAALVPSGAKDDPSDAELLLDLLTHHRARLRRLKPDTEQTRLVQHLVEGRRKLVNERTRQSNRLTAQLKLYFPQMLDWFGDIDSPLATGLLKRWPTLEALQKARPTTVRSFFTQHNCRSQELIDQRLEAIGRAIAVRDRALIQAAVAMTRVLVELIATLREGIAGFDRQIAQAVAAHPDFAIFDSFPGAGPALAPRLLAAFGSQRDRYQSAADLQTFSGIAPVTVRSGKSEWVHVRWACPRFLRQTFHEWAAHSIGFCDWARAYYRQQRDRGNDHHAAVRALAFKWIRIAFRCWKDGVLYDDTRYVQSLRHRASPLTAILDKAALS

SEQ ID NO: 297034 - protein, 408 aa, unidentified
MKTLQKRCAGLDVHKKEVVACLRLVIRGKATYEVRRFPTTTRGLLELADWLEQAGCTHVAMEATGVYWKPVWHMLEGRFQQILANAAHIKGVPGRKSDVNDATWISDLLAHGLIRASFVPPQPIQELRDLTRTRKQLTREIVQHTQRIQAVLEEANVKLSSVITDILGLSGRRILKAIVAGETDPVRLSELGGTRLAATRSELADALHGRVHSHHCFLIGQHLKTIEQLEETITAFDARIEAALDLFRDAVERLKDVPGLSETSAQILIAEIGMDMKQFPTAGHLLSWAGLVPRLDESAGKRRSTRVRKGAPWLKPVLVQCAHAAARKKNSYFEAQYLRLKARRGPKKAVVAVAASILTTAYHMLADGTCYQDLGADHFARRNPRRVVAKLASRIRSLGYEVVIKAAA

SEQ ID NO: 297035 - protein, 307 aa, unidentified
MRAAGIDVGKTNLDLAFDDRPGARRFPNTPAGIAGLVRALTAAGVERVLVEATGGYEEPVLEACCDAGQWIARINPRQARDFARATGELAKTDAIDAQLLALMAGMFGDRLRRHVAPPQWQRELRDWLRRRGQVVILIQAQKQQAALAAPAVRKLVARTVTALDRELAAIERAMKALIDTHATAAMRSSKGLGPVFQATMLALLPELGHLNRREIAKLVGVAPMNRDSGQGKGKRRIRGGRAPVRVALYMATLSAVRWDPLMKAHYQQLRQRGKLAKVALVACMRKLLGIVNARRRDELRAEGLAIA

SEQ ID NO: 297036 - protein, 374 aa, unidentified
MKRTSLPLLGWMAPLRHLSAKLLSDRISSEWEPSMGEVTTIGLDLAKHVFQVHGVDAEGATVLRKQLRRAQVLAFFSRLPPCLVGLEACATAHYWARELRALGHEVRLMPAQYVKAYVKRNKHDAADAEAICEAVVRPTMRFVPVKTADQQAAVLLHRGRERLVRQRTGLVNALRGHLAEFGVIAPQGLRNVGKLIAIVRDERDARLPDLARQVLQVLAAQIEQLEAAVAAIEKQLMAWHKSNPVSQRLASVPGIGPIIATAIAATVVEPSGFRSGREFAAWLGLVPRQNSTGGKHRLGGISKRGNQYLRRLLINGASANLLRSKATNADPWVIGLRQRRPSLVVAVALANKTARIAWAVMHRHENYQRVATAA

SEQ ID NO: 297037 - protein, 410 aa, unidentified
MDVVYSRCAGLDIHKKTIMACVIVPGPQGKPQKTIQAFGTMTDDIVALGDWLAAQQVTHVAMESTGVYWQPLWNLLEQRFALLLVNAQHIKQVPGRKTDVGDCEWIADLLRHGLLRASFVPDRAQRELRELTRYRTALLQDRAAEVNRLQKTLEGANIKLAAVASDVLGKSGRQILDALVAGGTEAGDLAQFAKGRLREKIPQLERALVGSFRPHQQFMVARHLAFIDAIDETVAQVSAEVAERVRPVEADVELLDAITGIGRRTAEVWLAEVGTALERFPTHSHLASWAGMCPGNNESAGKRKSGKTRKGNSSLRTALVEAAQAAARKRDSYLSAQYRRLAARRGKKKAIIALGHSLLIIAYHILKRRIDFQDLGPTYFDERNRTMVERRLVRRLERLGYKVALEPVAA

SEQ ID NO: 297038 - protein, 410 aa, unidentified
MAERFVGIDVALHEHRVAVLDRDGEAVGPSFTIAASQDGVATLLRTLDARAATAAQTLIGLEASGHLWENLEAALVGAGYRVLVLNPLQTRRYRDVVRRKAKTDDIDAHVIAGLLRSGAAQASYVPDEPIQSLRELARLRARLMADRQDYLRRLVAQLDVVLPEHHAVLGDLLTARARGILAQFPTAQHLATATPRAIRRAAADAGARGFALDDATGVRDSARRSLYRGKAAAARAHVVRTLVGQLERLTTAIDEVDRAATTLLPPSEPGTGPSDTELLQTIPGIGPQTAATLLGELGTLTRFTDARALVAYVGFYPVINQSGDRAATPRLSRVGSRIARHSLYLAAVNAVRRSGEWRTIYLRKKAQGKTGKQALVVVAVKLLHAVYAMLKHRQPYNPSRLLVASATIGT

SEQ ID NO: 297039 - protein, 323 aa, unidentified
MSPVVGIDVAKRSFDLAIDLANSKYRTKAKLPNDPKGFQILQTWLQTHAQADSWIVMEATGTYHEALAEFVYGLGYRVCVLNPAQMALYARSQLTRVKTDRSDAKLIASYGQRHAAQLRPWQPDPPALKRLKALVRRRDDLLQMLQMERNRLDVAALVVRDSLLENIGQLQARIAQIERAIDDQIDQDPTLRGQRELLVSIDGIAGTSAALMLAELGNVERFAHASAVTAFAGLNPRLQESGKRQGQVCISRTGSPRLRAGLFLPALVAMTHNPVVRALKQRMRERGKANKQIICAAMRKLLHIDYGVLKSRTPFDPQKTLVC

SEQ ID NO: 297040 - protein, 327 aa, unidentified
MNQQTIKENETPLVCIGIDVAKHELAIFIDTPEEHLTIANSKAELSGLIKKLERLNIERIVVEASGGYEALIVSTLAVKGLPVCLVNPKRVRDFAKGLGILAKTDRLDAEVLANFGRLAEPMLYTLLSEETRELAAILTRRRQLIEILVGEKNRTDTASKAVGKSLREHIKWLEKRIERIDDELSKRLAETEIWKRRDEILQSVPGVGPVLSITLMGLLPELGTVSRKQIAALVGVAPMTQESGKWKGKAKIQGGRSDVRSVLYMAAMTATRCNPLISDFYHRLLEQGKLPKVAIIACARKLLTILNAMIRDNKIWTPVSVEPVFSA

SEQ ID NO: 297041 - protein, 323 aa, unidentified
MNTYKETFGIDIPKDVFDCYGSIQGHLQFKNSAVGFKMFLEKVTKDTLVVMEATGYYHYRLAQYLFKNGMDVSVVNPLSVKRFIQMKLAKVKTDKSDAKAICEYGCTQEVPLYTALTDVQSECLQLFRLLDSFLKKRTATKNKIHGEQVLGIPSSWVYRSLKRDKKHLDKEIQGIEATLLSLVKQDQQQQLTLLQRIPGIGLKTALFLIVVTDGFQKFETSSQLCSYVGITPTIRASGSSVRGRSRISKVGNRKLRNLLFLCSFTACKHNKGCSAVYERIVNKGKSKKLALIAVSNKLIKQSFAIAKSGHPYDETYVSVVLSK

SEQ ID NO: 297042 - protein, 344 aa, unidentified
MSVTTIGLDLAKSIFQIHGVDARGNSVLKRRVRRGELLAFFGSLPACLVGMEACSSAHHWARELLALGHEVRLIPPQYAKPYVKRNKTDAADAEAICEAVGRPNMRFVPVKSRESQGLLTLHRVRSLVVRQRTASVNAARGLLSEFGITAPKGMCRIATLRRDMEAATEDVLPREARAALDVLFEHLDDLTKKLDAVDRDILAWHKTSEASQRLATAPGVGPLTATALIAAVGDASQFASARHFAAWLGLTPRISASGSREHIGRISKGGDRYLRTLLIHGARALVGTSFRRGVKPRPWLQALIGRRPVNVASVAVAHKTARALWAMIRREEAYRPPAIFMAAA

SEQ ID NO: 297043 - protein, 430 aa, unidentified
MQKNYSTQNEKIERITENTLVIGVDIAKERHYARMVNWRKQEGQKGKSFKNNKTGYEKFIGWVNKGIKQSGASDVVVAMEPTGTYYFVFEEYLEKQGIEVVIVNGRDVRRTSEIMGNESSKNDPRDALIIAQLTVDGRYGPSTRPKEGVYAELRELSSLRDLLATDDTRHKNRLHNQLSQLFPEYQKYQKRGFSLGMLAALKHFGTLEALIQAGPDGIHQLWKEQHIKNYGQKKAHALYTLARQSIGIKRNSLAAAHKLRILINNYEANQQALAETEEKLQQQLEQLPQAQQLMDIPGIGPVIAGTFLAEIGDIQNYNSPKQIQKLAGYAITSKSSGKHNGKETSSKMGRKLLKTILYKAGIVLISKNKAFRQIYDYYTIERKKPLIKMKAVIAISCKLIRVFYAMLKNGTAFDEKKMLNDIHRPQTKTA

SEQ ID NO: 297044 - protein, 336 aa, unidentified
MAVQVWSAGIDVGKGAIDTAVHGKPDAMHHATRDDPGLRDLIVWLGDHDVVRVGLEASGGYEREVIDTLEDAGFEVHLLNPRQFRRFAEAKGRLAKNDRADARVIAEFMAKMVDRTADRRDRSLDVLVEHLSVRRRLVTWVADSVNAREHLRDPAMRKVIEAQRKGFDTALKKLDKTIAGLIGAHPDWRETERRLRSVPGVGAVLAATLIGLLPELGRLSRHGIAALVGVAPFDDDSGKRRGPREIHGGRATVRHALYMAALVGKRHNPLLAAFAARLKGKKPKVILVACMRKLIVMLNAMMRDKADWNAAGKLAARSAIPSRDEMTGERSHGAQA

SEQ ID NO: 297045 - protein, 339 aa, unidentified
MIDTETGEIKAKRLTHTTEEFKEFIGNRDNTRLVMESCWNWSKTYELVKDLVEEVILAHPLKVKAIASAKIKTDAIDSRTLAELLMADLVPQAHLRKAENRVKQRIIRHRAFMVVMRTRVKCRIHDLVDSQLLPAEVLQARPKNLFLKKGMRWLTSLEWTNEGDRRMLKSYLRLLELINQEISSSNEMIEEIYRKDKDAQLLTTIPGIGVTLATLISTEIDGIERFSSPSKLCSYAGLVPSTRSSGGKTYHGRLTSEGNRWLRWALIEAVVPASYADDEIRQRLNALRKIKSANVAKTIMARWLLKIVYHVLKESRPYMAAYPASRSPGRLLFALASSH

SEQ ID NO: 297046 - protein, 406 aa, unidentified
MEDTTYDVYLGLDVGKTAHHGCALAADGTKVYDKPLPQDEASLRTVVDELKAHGRVLLIVDQPNTIGALPVAVARAADCGVAYLPGLAMRKAADLYPGQAKTDPRDAFIIANTARTMPHTLRAVDRNAEVFSALKMLSGLDDDIARDCTRTINRLRSILVQIFPSLERVFAGEILQRAFVLELLIHYAGPTKLKRAGKTRVLAWSRKRTKKDPEALIDAIFQALAAQTVTVPGTAAAEVAIPMLATNIKSLKAQRESIAGQVEEMLDDFPLSQVLMSMPGVGIKTAANILLAVGDCSDFPDASHLAAYAGIAPVTRRSGTSIRGEFPARSGNKRLKNALFRSAWIASNCHEASRSYYTKKRAEGKRHNAAVMCLARRRCNVMFAMLTRGEFFRELPPRATPETAAA

SEQ ID NO: 297047 - protein, 360 aa, unidentified
MTVVGIDAHKNWHTLVAVDDVGKRIAVLTVEARAEGHRKIVSWLEQFDDVQVAVEDCRHLTRRLEADLLDAGHKVVRVHTRLMAGMRRSGREPGKSDPIDAEAVARVALREDDLPTAELPGPAREIKLLSDHRRSLVARRTAMQSKVRWFLHEIDPDLHVPSRGLRRYQLLDDLIGVLENHAGAVAEIARDLLEDIRSLTRRINEIESRLTRLVRARHPRLLEVPGLGVLGAAMIVGETAGARRFKSKDAFARFNGTAPIPVWSGNNVRVRLSRGGNRRINTALHMAAVTQLRIGAEGAAYYDKLIAAGKTRTEALRLLRRRISDRVFAAMRSDEPQASLAPEATSSTSSNEITGLRAAA

SEQ ID NO: 297048 - protein, 347 aa, unidentified
MQKVSVIGMDLGDKNNKAVGLSDDGEIVDRAEVACTPEGVQMYLERHPGALLVIETGTHCRWVSRMGSELGYEVLVGNARKLRMIWKSSRKNDWNDAEMLARVARTDRKLLAPVRLRGDGDQGLMRLVKARDLLVRNRTSIVNEIRGFCKSEGARLPKCSAESFARMEYEVPAAVRAVVKPLFAVLRELTRKVALYDKMITNATGKLYRAEIELLEPIGGVGPVTSAAFLAAVGDPAMFGSARDAGPYFGLAPKQDQSGQTDRQMRITKEGNAVVRRLLVIAANYIMGPFGKDSDLRRHGMRIAERGGKNARKRAKVAVARKLAVLMLAILKNRSAYCPLKNAEVAA

SEQ ID NO: 297049 - protein, 402 aa, unidentified
MEKYAGIGIAKRTHWMCVTDGEGRFLMEPRPYDNDADGLSRMVADLDLYGGDVAVGMESTGCYWRSCYKALAEGGYPVSVINPVVTCAERKSGNLGRAKTDRVDCLVVADALRKQGIAPTPSPDADAAQLRDLCRFRRAVSESMSRTKIQAVALLDQVWPEYGKLFSDKFGDSSRSVLRRFALDEMDADGLADDLRGASRNRFGAAKASDVLQSLRSTCGVPATDAVRLQLRLLLDQLDFCAAQLAEIDAEADALLDAVAPTLPTVPGVGRATAAQIAAEVGDVTRFRDAKSLVAYAGLDPTRRQSGGFDPDRNRISKRGSAHLRRSLYIAAQASLRADCEFRDFYDRLRGRGYSHRYAVCAVARKMLCVCWALMRSGEEYDRDRHRARGKAPEGASPVDAG

SEQ ID NO: 297050 - protein, 320 aa, unidentified
MTSKGAEKMQNDTIGVDVSKDHLDAHRLADGASRRFANDKCGHRAFMKWFAQTPVQRVVFEPTGPYHRAFEPALGAAGVSFVKVNPRQARRFAEAIGSLAKTDRLDAAMLARMGAMLELKARPPRSEALLELKELHLAREALVKDRTAAKNRGKVLGAPLLKRQNAQRLEQIKRQITAIEAAILEQIRADPDLAQRFAILTTIPGVSAITAFALLIEMPELGALEPGQAASLAGLAPVARQSGRWTGRAFIRGGRASVRQAIYMPALVATRFNPDMKIRYTQLINAGKPAKVALTAVMRKLILLANAILKANRRWTPKPA

SEQ ID NO: 297051 - protein, 417 aa, unidentified
MKKHSNSLKQSEAPAKRRKLGVVVERKPQEVMAELVVKLAGQLDVEIVPAVEGKKDGRDAVRPNLNRLTVGVDLGDQWSNYCILGLGGETLVEGQFRTRKQEVAEFFQALAMSRVVVEVGTHSAWVREIIAGFGHEVLVANPRLMEGSKRRRRKSDRIDAEKLARLGRMDPKSLHPIEHRSTEVREDLVILRARDALVKSRTELINSVRGQVKSMRGRVTGCSSVAFSQKAIAEIPEEVHETLQPLLRLIATLSEEIKTFDQRIEKLAAEKYMQTQLLRQVSGVGPVTALAFVLTLETPLRFARSRDVGPYLGLVPKQEDSGDIQPQLGISKAGDRMLRKLLVGSAHYILGPFGPDTDLRRFGMRLCERGGKNAKKRAAVAVARKLAVLLHRLWASGEVYEPLGHGSVTRPAQAVAA

SEQ ID NO: 297052 - protein, 428 aa, unidentified
MNCNTQNAKIASITEKTLIVGIDVGSETHYARAFDWRNYEYTKKPLEFSNTEAGFQTFKAWMEDMAEKHGKTAVIPGMEPTGHYWFALGKFLQDNGMKPVHVNPHHVKKSKELDDNNPNKNDRKDPKTIAALVNEGRFSYPYIPTGIYAEIRSLSNLRFQTQEELTRIKNRLARWFAIYFPEYKDVYGDLKAVSGRMVLKEAPLPEDIRKLGVEGVNRIWREAKLRGAGMKRAKTLVTAAEHSVGSKEAPEATRMELNNLLNDMDVYTARQEELLRNIEEKLKEIPYTDNLLAVKGIGLVTVSGFIAEAGDIGRFDNPKQLQKLAGYAIVSNESGKHNGESRISYRGRKRLRYVLYEAAISLVGKNAEFRKIHEYYRTRKENPLKKMQSVVAVACKILRIFYAILTKGVEYDPKKLLGDIKRPQVQAA

SEQ ID NO: 297053 - protein, 431 aa, unidentified
MSKYLNSLVVGIDVASEFSFAAFLAPDGSKYRKPFKIFHTAEGFKYFIEQIKKAEEEFSTKPVFFMESTGVYHLTLFHFLKDNNFETFVINPLVTNCNKNKDIRKVKNDRNDALSIASLGKFEDIKVSSDSDINILTLKLLVRDYYKLIDTRSVFKKKLSSSLCITFNGYQNVFSNTCGLVSINILKKYPNPQAVISAPKQDIIDILINSRKGIKWAEKKYTKLIESAENAQFVSLTSPWLSVSITTSISIYEAIDGEIATLLAKIEGFINSDQMSPAFRKNILLLMSIPGIGYNTAITILAEIGAIDRFITPKQLVAFFGVDPAVNESGKFKGDRVKISKRGTRFGRRALYAVALASIRMKRNGEATNHILLKYYKENLKGKKAKVALVAVMHKLIKYLFAVLRNQQEYQIRDPKLHQKMFLENKTVLAA

SEQ ID NO: 297054 - protein, 405 aa, unidentified
MKHVIAFDVSMGKSYMVIYSALKKCIFEGEINHSRPDFISLKHRIEELTESYGEQPYIVFESTGVYSRQLERFMNENGFTFCPLNPLEAKLQCDSLRIHKTDKSDAHKLALTHFSTNRLNRKGTEELFLQLKSLSRFYSELDDELSVIRNRMHKVIQQTFPELEKIFTTKSDLFLNIVQLFPHPDLVLLHSKTVIKNKIRKCTEKNISPARAEKKALQLLEAARISYPAVSSSDVLCEQLKSYARRYQELLSSKERCIDDMVRLAQNRIEYHILLSFPGIGPNTAVRLIAEIGDIRRFDNNRQLNAFAGIDIRRYQSGKTFYKDKINKRGNKHLRKLLYIIVQNMIRHRRLGHNHIVEYYDKLKTQPYNKCHKVASIACVNKLLKSIFHLITHKMNYDFRLATQS

SEQ ID NO: 297055 - protein, 419 aa, unidentified
MSFKILKFNCCGLDVHKTWIYACVGITDSNNRTEYKQARFSSFIKGLNELCDWLAKYNCKDVCMESTGKYWIPVFNILEQHEIWVTLSHPKYTKPMKGNKTDRKDAKWICDLYMCGMVKPSFIPPADIRELRDLVRYRFKLTCMITGEKNRAQNCLTVSNLKLDDVFSDVFGKSSRSITEQILQHPGEKFDVSPFVDGRCKTPIEEIQAAVDGVISKEQAVKLRQCLDHIDELQKHISEVEQEILRLSDKYEAALNLIRTVPGFDKNPMTAIQVLSEIGGDMSVFPTAKHLVSWAGCCPRNDKSDRKIKSTRISRAGSYFKPVLVQVANALIKSKKHPEFTTRYKRIKARRGHKKAIIAICRMILTAIWHILSDLKPYTPEGFLESRPVNKEKVLTTSQALNLLKQRGYLIKDDPSPVS

SEQ ID NO: 297056 - protein, 310 aa, unidentified
MSSSFVSIGIDVSKDRLDIHMPQGYLSIDNTIVAIEEWLSTLKGVKVDRIVCEASGGYECTFLQACLTGSFPICVVNAKRVRDFAKSMGQLAKTDKIDAQTIALFGITFKPPLYESGIQRHYKELVKRRRQLIDQIKKEKQHLEKASLHNVIEDIKENLAALGRRVESIESRIRDYISQNPTQQQSLSLLTSCKGIGETTAVTLLAELPELGNISDQAVTALVGLAPFNHDSGAMRGQRHIRGGRGEVRKSLYMATISAIRFNYDIKVFYEKLISKGKATKVAIVACMRKLLITLNAIMKRKTPWKEKYI

SEQ ID NO: 297057 - protein, 354 aa, unidentified
MSQNPTTAIAIVGIDIGKNSFHVVGLDQRGAIVLRQKWSRGQVEARFANMPPCLIGMEACVGAHHLSRRLKALGHDARLMPARYVRPYSKGQKNDFRDAEAIAEAVQRPTMKFVATKTADQLDLQALHRVRERLVSQRTGIINQIRAFLLERGVAVRQGLRFLRAELPRILATPPDVLSPRMVRVIEGLAGDWRRLDERVESLSGEVEAVARQDAGCERLMSVPGIGPIISSAMVAAIGTGDVFSKGRDFAAWLGLVPTQISTGDRTILGKISKRGNRYLRVLFVQAAWVVLIKPKSWERHGLKPWIEAAKKRLHRNVLAIALANKLARIAWSVLAHGRTFEARKIDEAAAQAV

SEQ ID NO: 297058 - protein, 343 aa, unidentified
MESMHYIGLDIHKKIIAYCIKTWSGSIIGQGTIPATRAALSTWMGKLPQPWTAAMEATLFTGWIYDYLKPHGFKIKVAHPEMLKAITAAKKKNDKADAEKITDLLRVDMLPECYMAPQELRELRRVLRYRNHIVRTAVKEKNKISGLLMEVGATYAKKRLHSKKYFDELVGSIEDVPESVINMVKLSRSNLEIFSGIQKTLIKTLKENALIRDRVKRLMTIQGVGEITALTWVLETGEPERFSSIKQAVSYCGLCSAQHESAGKEHRGPISKKRNKHIQTILIEAAKLAPIWNSQLADVHQKELVKGNRNKATLAVARKLVAFMLSVEKSGKDYCDMKAKKAA

SEQ ID NO: 297059 - protein, 367 aa, unidentified
MKKVSIAATRQSRNISQQKLTIGLDLGDRNSWYCVLDEAGQIQLEQRVRTSAKELREVFGAMPRSRMAVEIGTHSPWISRLLSELGHEVIVANARKVRLIGESRKKDDRLDAQTLARLARIDPELLCPVKHRSAQAQADLMMIRARAGLVRARTGLVNTARGLAKSYGERLRGCNVRNMNAEKAEGLSPELQRALEPLLSAIEELSQQICEYNEGIEALAQASYPQVALLKQIKGVGTLIALTYLLTLEDAHRFGKSRDVGCYLGLQPGRRNSGQSEPQMHISKEGDPYLRTLLVQGAQHILGPFGADCDLRRWGLKLAERGGKNGKKRAIVATARKLAVLLHHLWVSGEVYEPLHNSSRMTVAAAA

SEQ ID NO: 297060 - protein, 402 aa, unidentified
MNAVGIDVSKGKSMVAIMRPFGEIVSTPFEIKHTSSDINSLVKLIKSIEGESRIVMEHTGRYYEVLAHQLSEANLFVSAINPKLIKDFDNDSLRKVKTDKADSVKIARYALDKWQNLKQYSIMDELRNQLKTMNRQFGFYMKHKTAMKNNLIGILDQTYPGVNTYFDSPARSDGSQKWVDFASTYWHVDCVRKMSINAFIDHYENWCKRKKYNFSKSKAEEIYGKAKELVPVLPKDDITKLIIKQAVDQLNSASITVESLRTLMNETASKLPEYPVVMAMKGVGTSLDPQLMAEIGDVSRFTHKGAITAFAGVDPGVNESGSYEQKSVPTSKRGSSDLRKTLFQVMDVLIKTHPQDDPVYQFLDKKRAQKKPYYVYMTAGANKFLRIYYGRVKEYLASLPES

SEQ ID NO: 297061 - protein, 434 aa, unidentified
MPAAAFRFGETWLGVLMANVMIGVDPHKGSHTAVAIGAGEEPLGELRVDACPSQAEQLRAWAVAWPQRAWAIEGAAGLGNLLAQQLVAAGERVLDVPPKLAARVRLLQAGDTNKNDPNDAYSVAVAALRSKLARPVLADGHAVVLKVWAKRHRDLARLRNQACCRLHAVLCDLVPGGVRREISAGRAARLLEQVRPADAVTTARCELAGEFLADIRRLDAQLCECHNKLAAAVRASGTSLTGLFGVGPVIAGTVIGDVRHVFRFPRRDHFASWNGTAPVEVSSGDRRKVYRLSLRGNRRVNHAIHMAAISQIRHKHSDGRAFYEKKLAEGKTHKEALRALKRRISDAIYAALAADARRAASACSKSPGGQPGDHSASRAAGSHPAHRHFGQATPGPAPTIRPGANSSRAPTQPNRARRRAAHSPASSKKPPATT

SEQ ID NO: 297062 - protein, 370 aa, unidentified
MKDYSEVFVAFDVAKLKNAVAIAQDGRDGEVRYLGEIRSTEAATRKLVAKLATKHAKLTFCYEAGPTGYGLYRLIKSLGHDCIVVAPSLTPSKPGDRVKTNRRDAVGMARLLRAGELTAVWVPDERHEAMRELARARAVAQKDLRSKRQQISGCLLRMGYHYPGKKTWGRAHLNWLTSFKLDHLEQRIAFEELMGAMRQAKERSERLEQAIREVIPDWSLAQQVVALQAMRGIDLITAVGVLAEIGDLSRFESPRQLMAYLGLIPSERSTGDRVRRGSITKAGNTRARRLLIESAWSYRHPARVSKDKQAKVEAAPRAVREIAWKAQTRLCGRFRSLTRNGKKSTIVATAIARELSAFIWAINREVAATQ

SEQ ID NO: 297063 - protein, 388 aa, unidentified
MFYVGVDLAKRKHSAAVIRDDGKRLVRGFGFPNTKEGFEALLARLASAGAHAAESQVCLEATGHYGRNLMAFLEARGYEVFEVNPLLTASWRRATSVRKVKSDAVDAEALALWLLAGNPTARRRAKDESDDLRSLARSRTSLSHMIGDCKRRAVAILDVTFPELHGFFSDDFGVAATAVLRRWQSADALSHARVDSIRKEERAAGGRLSEARAAELRGLARSSAGTASAPLAFQLRQLLAQIEFTRGQMAELDAELARMVAGSPVLTIPGVGTVLGAGILGEVGDVSRFASAKKLLAFAGCDPSVFESGEFVGSRAHMSKRGSPYLRWYLWLAADMARRYDPAFGAYYAKKRSEGKCHKVAVSAVVRKLVSVIYAVLRDGTPYVCPAS

SEQ ID NO: 297064 - protein, 340 aa, unidentified
MNEITRIAIDTSKSVFTLHGTDAQGRAILRRNLRRQEMIGFFKTLAPLEVVLEACGGSHYWGRTLAAVGHRVRLIPPQYVKPFVKRGKNDRNDAEAISEAASRPEMREVPVKSAEAQAEAMLLSIRELLMRQRTQLINALRGHATEFGLVAAKGTKGLAELRAEIAAGDALPPAAVYALQQLDREIDQVEGRLAEIDKRLAAQHRANAQSRRLAEIPGVGLMNALNFTLRVDPSQFKSGRHFAAWLGLTPKEHSTGGKQRMGGISRAGDERLRQLLVLGATAVISHAKKGRPGISAWLLNLLERKPRKLAAVALANKMARIIWAMLTSGEAYRRSAPIAA

SEQ ID NO: 297065 - protein, 430 aa, unidentified
MKSNTQNAKIEAITEKTLVLGIDVGSETHYARAFDYRGIEYSKKPFKFSNTEAGFVTFKEWILDLQERHEKDKVVPGMEPTGHYWFNLGKFLQDNEMKPVLVNPHHVKKSKELDDNNPTKNDRKDPKVIAGLVKEGRYMIPYLPEGVYADLRTASNMRFQIQSELTRIQNRISRWVNIYFPEYKTVYGKPDAVSGMMILKQAPLPEDILTLGVEGVNQIWRDAKMRAVGKARAKTLIEAARHSVGAKEGTMAARMEIRMLLEDYESRNNHLQEVMTLIEELVKQIPMAEKLMDIKGVGIKTVSGFLAEVGDVSRFSNPKELQKLAGLALVENSSGKHKGQTTISRRGRKRLRYLLFEVAMSLVAKNPEFRELHNYYTTRRLNPLKKMQSLMAIAAKLIRVFYAMLTKGVDYDPKKMVSDIKRPAAYLQAA

SEQ ID NO: 297066 - protein, 342 aa, unidentified
MQISTIGLDIAKNVFQVHAVDVAGQVVVRRQLRRSEMLKFFRKLAPCRVGMEACGTAHYWGRELAALGHDVRLLPASRVKPYVKPGKKNDAADAAAILEAMDRPGMTHVPVKSVEQQAVLMLHRSRDLLVRHRTMLINAIRAHLSEMGFVARQGQGGSKELLALLDDAGDERVPALVRAALLPLAGQLREAEARITAYEAEIVAWHKGNAASLRLADIPGIGPITATAIAASIGDPKRFASGRQFAAWLGLVPRQNSSGGKDRLGAITKMGDPYIRRLLVLGATGTIRYARNTTGKSAWLDVLLSRKPARLAAVALANKRARIAWALLAHGTIYSQTQPAAA

SEQ ID NO: 297067 - protein, 448 aa, unidentified
MGKSTKKSNVVKKISQLQIINPTAAGIDVSDSEMMVAFPINSEQIEVRAYECFTRDLHTLAQTLQSFGITSVAMESTGVYWIPLFLMLQDYGFEVYLVNAKHVKNVTGRKDDESDAEWIQKLHRCGLLSASFQPDNMIRTLRSIVRHRKNLVRMKAGYTNRMQKALELMNIKLHTIISDIDGKTGRLIIEAILKGERNPEVLADLRDKRIKASREDIIKSLEGNWTSEHMFELKQCYQLYCYHQQMIDECDKEIEKQLIEQLASKNEGLIPDLPKVKRKTVKKNRVDFELTSYLKEIIGVDVTEVVGLSEITVLTIMSEVGTDMSKWKTENHFTSWLGLAPNTKISGGKIISSRIQKKKHHAGQAFRMAANGLHNSKSPLGDFYRRIRSKAGAAKAVVATARKIAIIYYKMVSNKEAYNPKAMEDHQQKYKEKKISQLKRKIEQLEAA

SEQ ID NO: 297068 - protein, 402 aa, unidentified
MERYAGIDLASEEHRLSIVDGEGGQLEQRRIGHDEQGIAALCRRLRALGVGRVALERPDGLVVERLLDAGLTVVAVHPNQLAAARDRYRVAGGKSDGFDSYVLAELCRTDMHRLRALEPDGDETKALRALTRTREDLVQARVALANQLRAQLEACWPGALVFAHVDSPISLAFLRRYPSPADAKGIGPKRLAGWLARHGYSGCQAPEELIERMRRAPEGRAGGLEAGARRAAVLGLVAALEPIVAQIRELNSQIRGALRSHPDATIFAPLFRDAKTVVCPAALIAELGDSRERYPSDAALAADAGMSPVAVESGKRRVASFRRACDKRLRDAVATLADSTRHWHPWASDVYARARERGQDHPHAIRTLGRAWVRVLWRCWQDGVPYDPTLHGNLRRFQTAGG

SEQ ID NO: 297069 - protein, 354 aa, unidentified
MIIIGADYHPGFQQIAFVDTDSGEFQERRLQHREEAEKFYRDLAAQGMQVRVGMEASGQARWFERLLSELHFELWIGDAADIRTRRVRKQKTDRQDAQLILQLMLEDRFPKIWVPSWENRDLRQLLWHRHRMVQARTRIMNQLQAVALNEGLRCKKRLWRKHGREQLEAFRLAPWASRRRRDLLELLDRLNPTIAELSQAIEREAKKFPEARCLMTHPGVGALTALAFVLIIGQADRFQCGKQIASYLGLVPLEDSSGNRRRLGHITKQGSSTLRFLLVEAAQVTARSIPEWRSKYFHLAMRRGRKIAKVAMARRLAIALYWMWRKGWDYERVKKFGSHAGQLEPGHGVQSNTE

SEQ ID NO: 297070 - protein, 460 aa, unidentified
MRKRSKRTKGIEEAHPFAGMSRVNANAAGVDIGAEEIVVCVEGDENTQIVKGFGNYTVDLQSIGQWLKEHHVKTVAMESTGVYWIPLFEVLENMDFKCLLISSRSLRRVPGRKSDIQDAQWIQTLHSYGLLESSFRPQADLVALRTLLRHRAQLLEHRAPHILHMQKAMLQMNVQLSQALSDITGETGMAIMRAIVAGERDPQKLAAFRDRNCKKSAEEIGRALTGTWRTEHLFVLKQSLELYDSYTKQVEICDAEIDRMYALTRPDWDGGELKPLPVGKRNSHSKNAPKDQETIRQHLKRICGVDLSAVDGIGVSNAQKVIMESGSDMLQFPKEGNYCSWLGLAPKHEISGGKVLKNKTLKTKNRAGQTFRMAAQSVKNSDCVFGLMFRRFRSRMDNRQATVATAHAIARVVYRMLKYKVEYEAIDVTEYEKQYEEQQIKYVKKKAAKLGFQLVPTVPA

SEQ ID NO: 297071 - protein, 343 aa, unidentified
MSVIIGVDPHKATHTAVAISSSEHELARKKVRSGAHQAEQLLDWAASFETRTWAIEFAGGLGYLLAQQLVAAGETVVDVPATLASRVRVLATGRSNKNDPNDAVSVGVAALRSPGLRRVEAAGHSEVLRLLAKRNTDIGNHRTRVVCRMHALLAELAGGGISKEINASDVDRFLATLAPATPVERARYGLAVELLEDIRRLDAQLKASHQRIRVAVRASGTSVTDLFGVGPIIAAELIGYTGDVCRFRNRDQFAAYNGTAPVEFSSGGRIVHRLSERGNRQLNHAIHMAAICQLRQPHSDGRAYFERKVAEGKTNKEAIRALKRQISNAVYRHLVADARHTAR

SEQ ID NO: 297072 - protein, 343 aa, unidentified
MEHYVGLDVSLKQTSICVVNQVGSVVREGVVDSEPEAIATFVRSKAPGAVRIGLETGPTATWLWTELKQLGLPVICIDARHARAVLKMQINKSDRNDAAGIARIMQTGWFKEVRVKDLDSHSVRALLASRALLVKIKRDLENQVRGLLKNVGLVIGRAKFNVFAVRAEELIEDRPELIAVVGPLLKARKAIEQQTDDLDRKVLKLARYDAQVRRFMTVPGVGPITALCFKATIDDPTRFKRSRSVGAYVGLTTRRHASGEIDWTGRISKCGDAMLRSYLFEAAGVLLTRVPKWSALKAWGMRLAKRNGLRKAKVAVARKLAVILHRMWIDGTEFNWSKKEVAA

SEQ ID NO: 297073 - protein, 286 aa, unidentified
MEYFAGLDVSMAETHVCVMNRDGAVVYEVKVPSTPADIAAGLAKAPACGRIVFETGRMAPMLYHGLRQLGLPIFCIESRQAHQALKSLATHKTDRNDARGLAHLARTGFFKPVYVKSLPAHAVRALIIARKKLVGQRVTLENQIRGLAVVFGVRLPRALRPAFVRQALQASEGIPGLSAAMRGLVAARAAVLAAVSAIDADIRQLVRASAACRRLMTIPGVGQLTALAFTAAIDDPSRFRRSRDIGAYLGLVPRRYQSGEVDYTGSISKCGDRRVRTLLYEAATSC

SEQ ID NO: 297074 - protein, 422 aa, unidentified
MHEERRWFVGIDWASQEHVVTLCDAQGNKIGEREFVHGGTGLSDMIAWLLKASGGAPGEIHVAIETPHGPIVEALLERGFNVYSINPKQLDRFRDRFTVSEAKDDSLDAYVLADSLRTDMHLFRQLIVSEPLIVELREWSRIDEELKAERVRLANRLRNQLWRYYPQMLELADDLSGEWVLDLWEAAQTPEKAARVREATVARILKSHRIRRFDAAHVISELRKPALSVAQGTTEAATAHIRLVVAQLRLLNRQLADAGLQLDRLCKKLAEPIAGDEGENVPGQRQEHRDVTILDSLPGVGRTVLVAMLAEAPDALQRRDYHALRNLCGSAPVTRRSGKSCLVMRRRACNRRLRNAAFYWAQTASQCDPTSRAKYKALRARGHGHARALRSVVDRLLYVACAMLENRTLFNPSFAEKKAAAA

SEQ ID NO: 297075 - protein, 387 aa, unidentified
MIKKRGRVVGLDVHPDSFAGAVVEGSDPASAQVLSTSTRVELERLEQWALRHTRTDDTLVLEASGNAFSVAERLRAIGRKAEILDSHRAGKVGKVYCANDRVDAVKIARIYLSALSPIVWQPDQKTLERREVFSAYQAVVKESTRAKQQLRSMLNEHCVRLEKGFRLCHPNAITRLLRLREWTPARTMLLQQLHGSLVSARARRTLLRRHMAQEIVTDEALLRLTRLCGINLITLYGVIAAVGDVRRFSHSKKLVAYLGLNPSVSQSGNFEGGGALKRHGRGALRALLIQSGKKLLEVTNPLQKWGLAVAARRGRNKAAVAVARKLCVAVWHVLMGHIVGALERLDTLETKLSKFATEMGPAALSALGYHNKADFVEKKLYVLRSYP

SEQ ID NO: 297076 - protein, 341 aa, unidentified
MKLRTIGIDLAKNVFQACGVNEHMKSQFNKRLKRNELLDFMRQQAPTMVVMEACYSSHYWGREMAKLGHDVKLIPAQHVTPFVRGNKNDPNDSFAITEASQRPYIRFVPVKTEFQQEILCLHRIRERLIKNKGALSNQARGLLSEFGVVFPCGHKALLNGLNGVIDNAQYSHRLQNMMIDMLSEYETTLKRLKGIEQQLGIFVEGSESGRILLSIPGIGIINASALLASIDKGQAFNNPKEFAVWLGLTPKQHASGNINKMGGITKRGDRYLRKQLVHGARSVVSRAAKKTDSLSLWATKLRVTKPFNKVAVAMAHRLARLIWILLTRQEHYSATPTGVSA

SEQ ID NO: 297077 - protein, 409 aa, unidentified
MDVIVERQGALDVHKEQVTVCARVPDERGERVSHVAEFKTTVRGLLVLRDWLKAHRVTQVTMEATGVYWKPVWHLLEDEFELVLVNARHVKQVPGRKTDVSDAMWLCQLAEAGLLRSSFVPPKPIRALRQLTRYRKAQISERQREANRLHKALEDTGIKLDCVATDILGKSGRAMLDALVAGTTDPEVLAELAKGRMRTKIPALREALEGRFEPLHALLIGTILAHIDFLDEQIERISAAIEEQLAPVAAAVKLLRTAPGIQQRTAENIIAEIGLDMTCFPTAGHLASWAGQCPGNDQSAGKRRSGRTRKGSKWLDVALKDAALSAIRTDGSYLQALYRRKKPQLGHGRAIGAVKHSIICACWHMLQTGEIYNDLGGDYYARRDPQRQIRRLVAQLERLGQKVSLAAAA

SEQ ID NO: 297078 - protein, 410 aa, unidentified
MTKEDFIYVGIDLHKETHTAVMIDCYNNKLGEITFPNRPADFPKLVTKVKKCNTDAKEVVYGLENAYGYGRPLAVWLIDKGYFVKDVNTAISHRQAKHRGAMYRKSDSDDAEAIALATLNMLDKLPDACPNDAYWSLVQLVHRRDNIMKQRTRLVNQLHEQLCIAYPSYKSFFNDISRPTALYFWEHYPSKKYLKGKSVEDLRAELVPVSHNKCSTKTCEKILDAVASDKVKNNAYQDARDMVTLSIVSDLQHYGSQLTEVDKMLEQMYKMLGCTLTTIPGVNVITAVKILAEIGDIKRFANANKLAQFAGIAPLHLSSSGKGKDLATKQGNRRLQATIYFLAIQMVQVSSKGTPRNSVVRAYYEKRKAEGKTSQQALICISRRLISIIYGMLKHGTEYRMPVVESAGEK

SEQ ID NO: 297079 - protein, 341 aa, unidentified
MNVTTIGLDIAKSVFQVHGEDCNGKVVVQKRLRRSQVVAWFSQLPRSLIGIEACGTAHYWARTLRELGHEVRLIPAAYVKPFVRRNKNDARDAAAICAALNRPDMRFVAIKSVEQQASRGLERSRDLLVKQRTQLMNCTRSLLAELGIIAAQGRRGFAELVARVSDSDAAIPPVLLTALLPLIRQIEGLHTTIAALEDRIIAAARENPVMRRLAGIPGIGGLTAHAIVTAVGDGRQFGSARDFAAWCGLTPQEHASAAKRHDKGISRQGDIRLRKLLALGASTVMRNARSRTDRATAWQRGILARRPVKVAVLAQAAKNARIAWALLVSGETYRTATPTAA

SEQ ID NO: 297080 - protein, 373 aa, unidentified
MKKTTRWVGLDVHAATIAVAVAEKDGTVGSLGTIPNRPESVRGLFKKLGKDGCKVHVCYEAGPCGYGLYWQLSELGIECDVVAPTLIPVKTGDRVKTDRRDAEKLARLLRSGDLTAIWVPDVEQQALRDLVRARHAAKRDQLRHRNRLGKFLLQLDVRRPEKIVAWSQKHMVWLEAQKMAHASHQEVFDDYLNEVKRAKERIERLEKAIDGAIERSPKHLQKLIAALQSLRGVAKIGAATLVTEVGRFRRFENARQLMAYVGVVPSEHSSGGSTHRGSISKTGNARMRHVVGEAAWSYRHRPSNGPTLKKRQKDQSEDVKAIAWKAQHRLHGRFQKLSARGKHHGRVITAIGRELLGFVWAIGCKVEAELDAA

SEQ ID NO: 297081 - protein, 346 aa, unidentified
MTIVEGTRPVTGGVDTHLDVHVAAALDDIGGLLGLESFEASAAGNDKLLCWLASFGSVVRVGVEGTGSYGAGLARFLRAAGVEVVEVDRPNRQARRRTGKSDPADAVEAARAALSGRAQGAGKTRDGNVEAIRALVVAKRSMRSTKIKTLNQIRHLGFTASDELRDRFRGVSRFHLGATAAALRPRAGSDPVTFATKTALAVLGRRVVALDEEKGRLDALLAELVAKTAPQLLELHGVGVDTAAALLVTAGDNPDRLRSEAAWAHLCGVAPIPASSGKVTRYRLNRGGDRQANSALWTIVITRMSSDPRTRDYVTRRLEEGRSKADVIRILKRYVAREVYRHLPRD

SEQ ID NO: 297082 - protein, 457 aa, unidentified
MAKSTTKLPAHKSKSSSVITGPAHIVEARYPSALGVDVHAQLLVCAFQRMRDHKIETVFANFETGRSGLAEFAAWCKKCDPCIVVMESTGVLWRSPYEALEAAGFTADQLALVNARDVKAVIGRKTDREDAKRLAEIARVGNIRKSFVPTKEFRDMRTLARLYQKQVSDIAAHRNRFHKLLNSAGCRAGSVFSDIRGVVATAIIRALLLEPDSFARIVAEKSRRLRASAAKIRDALAFEISPVMREQLIDELQKIDQSEQAAERTMQRLKTMQEPYSTQIAKLQSIPGIKETAARLIFAELTDQIGKHFSSSEKFCSWMGICPGNKISADKSYSGAAPKGNKWLRRTLVECAHGIGLSKCIFKETFIVFKMRCGTRRAVVAISHLLARIIYAMLKSGTDFIYTDARHSLRDERCKRLRREVKELNRMTPQGEPRQALIARETGEILGVVPAQFVSAL

SEQ ID NO: 297083 - protein, 397 aa, unidentified
MPRTNLQKQNDFSGQDFYVGLDVHKRSWSVTIRSLGIQVGHFTQPPGAEGLYDYLQRNFPGGHYHSAYEAGFCGTYAHEELCKLGINNILLHAADIPVTDKQKKNKTDLHDSRAIAEHLERGNLHGIHVLSRDQQELRGLFRLRQSKVADMVRSNNKLKSFLMYHSIVIPETVSTTGFLSVKVLDWLAIELSSMAGTLTLQQYIADLKYQREQLYRITKSLRTEILILHKQTYESLLSVPGIGSITAMGLIAELADFSRFDDPDKYSSYLGLCPWEDSSGDTVKTKGMQPRCNSHLRPLLIEASWKAISKSRSMFAYYSKHAGKDSKKAIVKVARKLAMIAKGVAISGKPYQEDYLKQKQQKYQKMKALKAERFSSGIAEQHINKQPGTELYVPMPG

SEQ ID NO: 297084 - protein, 327 aa, unidentified
MTASVSSHNHIFIGIDVGGASFEAAWHRGGCTQYQNRPDAIAAFVARLSLAKQIIRIAVEPTGGYEKPLVKALRGAGLPVEMVHTSRFAAYRTLIGAKAKSDTSDARLLAAYAAAPEEVRGRKAEYVVLPQDAVREQLAELAARRDQLKHMIHAETCRLSTVRNQSVRDEITAHLQALRQADCKIHDTMMQLVRQRDELRNAKRLLKTIKGIGDKTALTSIAAVPELGLISNKAAAALIGVAPFVRRSGTMTAPARIHGGRAPVRNAFYMAAVTASRHNPVLAPFYARLIAAGKPPKVALVAVMRRLVVYANAVLRSGRPWKGAEII

SEQ ID NO: 297085 - protein, 416 aa, unidentified
MDTMYERCCGLDIHKKTIEACFRSGKKKTHMSFGTTSAELRKLTMWLVENDCQSVAMESTGSYWKPIFNILELSGTDMKIIVVNARHMKNVPGRKTDVNDAEWIAELLQYGLLRPSFIPDREQRELRELSRYRKSLVEERAREINRLQKMLEGGNIKLTSVVSEVTGYSSRRLLDRLLRSDEPMTEDVISGLVHTSLAGKSKELETALDGLLSELQKELLIKVLDHIDDMSKRIADLDDFCRKQMKKYEDALDKLDEIPGIARRTAETILIETGLDMSRFPTAKHFARWAGLAPGNNESAGKRSSGRTTKGNPTLKSTLIQSAKVAARKKDSFFKARYQKIAARRGANRASVAVAHSMLIAIYHILKSGERFKDLGEDYYNQFNKEKKKKYYLKKLTKLGVNLKEATLSISIQTAT

SEQ ID NO: 297086 - protein, 375 aa, unidentified
MKKKVRFLGLDVHAETIAVAIAEPEGEVRSLGTIPNRSESIRKLIKKLGPAEKLRACYEAGPTGYVVYWLLAELGVHCDVVAPTLVPVKAGDRVKTDRRDAEKLARCYRSGDLTAVWVPDEGSEALRDLVRAREAAKQDELRARHRLGKFLLRSGQRPPSGVKPWTRAYLIWVAQLRFTQIAREATRQDYLHEVEHMRERVTRLEQAITEAVKLASPALQQVINDLQALRGIAEISAVTIAAELGQVSRFDSARQLMGYCGTVPSEDSSGKRTRRGSITKTGNAHLRRIVVEAAWSYRRPPCIWYGLRKRQESISEEAKEIAWKAQHRLHKRYMKLGAAGKDQRKIVTAVARELLGFIWAIGTRAETVAGQRLAA

SEQ ID NO: 297087 - protein, 411 aa, unidentified
MPDSDRIAGIDVHKAMLAVVVVEGTSQSCRCIERAKFGATESELRRLAAWLAGRRVRDAVMESTAQYWKPIWMQLEGQFQLYLAQAQSNRAPRGRKSDFRDAERLARRHLAHELILSFVPNAEQRLWRTMSRTKYQLRRERILVQNQLESLLEEMRIKLSGCVSDLLGASSRRILQALSSGERDAEQLAAMADPGLRASRDQLTDALAQAAWLTPAHRQILGLFLERLDLIDAQIQTLEVSLAGAMRQHQDAVRRLAEVPGLGPDSAQQIIAEVGPTAATFPSAPELAAWVGTAPGREESAGVSISNRSPKGNRMMRRVLNQAANAAVRAKGSFFNQLYHRLVVRLGHNKAIWAVANRLCRLVWKILHQGVHYIEHGNQPDPSRLKQSVQRMIRELKHLGYSVQPTAQIAN

SEQ ID NO: 297088 - protein, 340 aa, unidentified
MKITTIGLDLAKNVFQVHGVDEHGKAVLRKTLKRNQVLTFFANLPACLIGMEACAGAHYWARELIQLGHTVKLIAPQFVKPYVKGNKNDANDAQAICEAVGRPTMRFVPVKSVEQQDLQALHRVRSNLVKERTAKVNQARGLLGEYGIVIGQGVAHVRRRLPEILEDAENGLTSQAREMFADLGEQIMKLDEQVRTYQAKIEQICQASAACRKLTQVNGIGPLTATALVAALADGSAFDQARQVPAWLGLTPKQDSSGGKAKLLGISKRGDSYLRTLLIHGGRAVVKAAQGKDDAQSRWINELVRRRNKNIAAVAVANKNARIAWALLTRAEAYREPATA

SEQ ID NO: 297089 - protein, 453 aa, unidentified
MLKSGVPHSKMKIADRQVGEQHKTGGGTNMNNTQNQKIAQVTDKTLIVGVDIGSENHFARAILARGFEVSKKPFPFTNTEEGFESFVTWIYNLAVAHKLTKIMVAMEPTGHYWFAFVAFLKKYDVQVVLVAPQHVKHSKEMDDNTQEKDDRKDPIVIARLVPEGRYLIPYIPEDIFAELRVAFNRRCELVEEQVRITNRMIRWFDIYFPEYRRVYGRIDAKTGIMILKRAPLPADILGIGADGICEIWKDAKVRGNGPKKAKQLYSAAEHSIGMKGGASVRWKLWQLLEEYELIERQLNDILQLIEGLLYQIPGADKLLKIPGAGLVTVAGFLSEVGDIKRFSDPKQIQKLAGLAVVENSSGKRKGLPGISKRGRSRLRWVLFQLARSMVMFNPEMKAYHQYYTTRKENPLKKLQSLVAISARIARIFYGILKNGTEYDPTMVMKDFNKAVAA

SEQ ID NO: 297090 - protein, 300 aa, unidentified
MEIIGLDLHKRESQLSSKADDGTITDRRIVTSRERFTAVLGGRPRARILLEASTESEWVARHLESLGHDVIVADPNDAPMYANRSRRTKTDKRDARTLLDACETGAWRPAYRLSEARRHVRAELAVRDALVRTRTRYIALAKALVRRDGLRVPTSSSAWVPARIAALDLSPALTTERAPLFDDITRFHSAHELEAYLGVVPSERSSGEKRQLGHITKAGNGRLRWLLVEAAWQILRSRSAETAALRAWTRTIAQRRGKRIAAVALARRLAGVLYAMWRDGVPYDAQQLRPRATTAQQRAG

SEQ ID NO: 297091 - protein, 332 aa, unidentified
MMTPALGIDVSKDRLDVETTACGKPRSKYFANSPDGWRHLIAWLKELKIKRVHACLEATGRYSLGIALALWEAGHIVSIVNPAQIRDLARTKLGRNKTDAVDAGHIREYAEIFKPQPWTPPSPAMQRLGELQTIRAGIVSSLTEWKNRCGSGLADDTALALVKATITHFAAQLAEVDKAIAGTIDNDPDLSAKRDLLLSISGVGEVLAGLVLSELPGTDVLRSSAQAVAYVGLNPRSHRSGSSIDRPTRISKIGNATLRSALYMPALSAMQHNPVVAALAKRLKAQGRLKGKQIAVAAMRKLLVPCFGVLKSGKPFDPALAMPNWQHTAAAH

SEQ ID NO: 297092 - protein, 353 aa, unidentified
MEHVGIDWAYRMAQWCALDPGGEIAGEGRFAADRDGLARLVLELGDEVKACLEMMSGALWVRDQLVACGWQVEVADARKVKTVAPLAAKTDKVDARLLAELSRRELVPALWLPSLDERALRERLRRRMHLVRLRTSAKGRIFGLQTQWGIRISLRRLRRADGMTLLERAGMPAVWRHSISECLALIDFLDARIAPLDAELRPFAQADPRAVLLDTIPGVAELLALTIAVEIGEISRFAGPQKLVSYGRLAPRVRQSGEGRPHTGPLNKSGSRLLGWAAVEAAQQAWRESNPWHQLYLDVSRRSRNHNSAKAAVARKILIAAWHMLSRNQPFKPAPRSTRDTSVPASSRLALAA

SEQ ID NO: 297093 - protein, 408 aa, unidentified
MNPLFVGIDVSSRNNVAYLMKPDGSKHSSFSVQNNLGGAKILSERIVSALESVPLSDLVIGLEATSIYGDSLVYALREDGSLGRFQRKIHVLNPKQVRKFKEAYPDLPKNDWVDAFVIADHLRFGRIAKEVYMDDYRYQALRTLTRSRFDIIQNLTREKQRFANYLFLKCSGIAQAKDIQNTSATTIALMERFETVDDLANADLDELTAFIAETGRGRFADPDAAAKAVQAAARGSYRLPKTVNDTVNQAMAVSIASMRALKEQVKVLDKAIEQQFEIIPNTLTSIPGIGKVYSAGIIAEIGDIHRFDSQASVAKFAGLVWHRNQSGVFEAEHSQMIKSGNRYLRYYLLEAANSVRRCDSEFRRYYDLKFKEVNKYQHKRALALTARKLVRLVFRLLKDNRLYIPPED

SEQ ID NO: 297094 - protein, 405 aa, unidentified
MNRYDTLTQVGLDVHRKFSTASLRDASGKILARERLEHMDRSKLRERISQWPAGTPVILEATFGWGWLSDELLASNMRPHLASSNKVAAWRKGRGMAKSNRTDADLLSELWNEKPTLRRGMTHRWWEVWLAPQEIRDQRELLRHRMALVQAQTQVKNRIHATLHRHGTITEFSDLFGVEGRRFLSLLSDDKTLRPSARQTLKEDLILLDALRRLIARATRRFRMTMKRSEIGRHLMTLPGVSTILGYTLVAEIGHIERFASSRCLLQYSLLAPQSDDTGEDRQGKPIGRRIGHAGRTTLQWAFIQAAHSAVRRDTFFRDLFNRRTKGGKEDRGRGYITVANRMCRIAYAVWKNQTDYQATPPPRPGSRKYKERISSGSGPALARIGHEPETVQTPEPARAREATL

SEQ ID NO: 297095 - protein, 415 aa, unidentified
MEGLDPSYLVGIDWASDKHDICVLDPAGTVVEAFTIAHTADGLRELIRRLRRFASPEHLPIGIERPSGLLVDTLVEAGFPVVPIHPNALKATRPRYAAAPGKSDPGDAYILADMLRTDGHRFRPLRVPSDRTKALRAAVRTRDDLVATRVQLPNQLRSILDSFWAGAAAIFADVDSPIALDFLDSYPTPENAARLGPKRLERFLKRTGYSGRRPVDQLLERLRSAPAGQAAKLESETKGQLVRSLVAVLRPLGAQIRELDGLIAAHLAQHPDGEILQSFPRTGTVNAAQILAELGDDRLRFATEDQLAAEGGVAPVTKTSGKHRAVLCRFACNKRLRKALTTWADNSRHAHPWARHVYREARRRGCDHTHAVRILARAWVRVLWRCWQNETTYDPSKHGRAIPFLTQHEPSPMAA

SEQ ID NO: 297096 - protein, 326 aa, unidentified
MKNYVGIDVAKTSLAVAFPLPNGGWTNTAFANTPEGIRSLVKQLPAQAHCILEATGSYSVLVTYMLCQASIDVSVINPKQSHNFAKMRMSVTKTDPRDAVLLAEYGRLIQPALYQMATDSLLRLRQKRALLRQYHKQRRTLLNLQHSFAVLPVKDSSTEQSLQTMINSFEGVITHLQQEICQLCEAEYHEQYQRLLSIKGISHKVATALIETTNGFQDFQSAKAVAKFIGLAPTTFQSGKMNTHRGICRTGDSHLRSMLYVASWSAIRCNTACREFYQRLKAAGKPSKLALIAVANKLLRQAFALVRFGEDFNDNYQPKFRSAPCI

SEQ ID NO: 297097 - protein, 346 aa, unidentified
MQSTTIAVDLAKSVFQIAVSRRPGKVCESHRLSRGQFLRFFAERRPALVLLEACGSAHFWAREIQALGHRVELLPPHLVRHHADCRSKTDKGDAKALLEAHRDDRVRPVPVKSVAQQTLAALHRLRSAWLADRTARINLVRGVLREFGLPIPVGARHVVVAALALLKEDKLPAPLRPGLAAACREIGEFETRIADVERQLRALAAELPVVERLQSIPGVGLLTSTALVALVGDVQRFPTSRHFASYLGLVPKEYSSGLRRRLGSISKAGDTYLRTLLIGGARSVLLATQRYQRQEPDRLRRWALQVHRLRGHNPAAVALANKLARIVWAVWRNDTRFASRPGTTTG

SEQ ID NO: 297098 - protein, 408 aa, unidentified
MQAVHERCAGLDIHKKTVVACVLTGSGKQIRTYGTMTRQLEALADWLAAEQVSHVAMESTGVYWKPVYNLLENRGLELLVVNARHIKNVPGRKTDVKDAEWIADLLRHGLLRASFIPGRDERELRELVRYRRTVIEQRAHDVQRIQKVLEGANIKLSDVASDIMGASGRAMLERLIEGEDDPVALSQLAQKGLRKKQDQLQQALAGSIGAHQRAMLRHLLDHVKFLERQIEELDGQIQERTRPFEQVIDHLDAIWGLGRRSVEEILAEIGVDMSRWPTHRHIASWAKISPGNHESAGKRYSGRTGMGNRWLRAILVEAARNVSRNPHSYYAALYHRLSQRRGKKRAMVAVAHSLLVAIYHMIKDGTLHHDLGSDHFERLDWGQIARRAVRRLERLGYQVTIQEAAPAA

SEQ ID NO: 297099 - protein, 359 aa, unidentified
MLYVGIDQHKRHLTVFVRNEQGDMTLRRQVRTRWEEVDSFLESLLQQSLPAGGYVAVMEVCGFNGWLVKRLTRWGCTRVYVITAPPRVRNKTDRRDAAKLSEMLWINRERIAKGQRLLQVHEIYLPTPDEQDARQVVHLRHRLGQEHTRIKNRILGILRRHNLEQECPTKGVFTQQGCRWLVRVQLPEIDRIELDMCLSQYALSCDHLAQVNGLIRQQTMKQPTVTLLRSLPKIGEYTALALWAHIGPIARFPRARSLANYFGLTPGCRNSGESNRPGSITKAGHPIVRFLLSQAVLNALRHDPGLRSWYRQVKRRRGAKTARVAVMRRLCEALWHMLSKQERYRRVGSAKKNDPVEVA

SEQ ID NO: 297100 - protein, 403 aa, unidentified
MNAVGIDVSKGKSMVTILRPFGEIVSSPFEIKHTSSDIHSLIKLIHSIEGESRVVMEHTGRYYEALAHQLSAADLFVSAVNPKLVKDFNNDSLRKIKSDKADSVKIARYALDKWQSLEPYSITDELRAQLKVMNRQFHFYVKQKTAMKNNLIGLIDQTYPNANTYFNSPTRSDGSQKWVDFVSTYWHVDCIRKMSLNAFVEHYQNWCKRKKYAFKKSKAEEIYTKTKELVPVFPKNEITKHIIRQAVDQLNSTSVTVETIRTLMNETASKLPEYSIVMQFKGIGPSLGPQLMAEIGDVTRFTHKGALTAFAGVDPGVNESGSYAQKSVPTSKRGSSNLRKTLFQVMDVLIKTMPQDDPVYQFMDRKRTQGKPYYVYMTAGANKFLRIYYGRVKEYLSVLPDPS

SEQ ID NO: 297101 - protein, 328 aa, unidentified
MEHFIGCDAHKKFSIFASIDEKGEYGPTFRVRHDLEVFRKFLKELPAGSKIALETSGCYYWMVDEMERAEHIPLLAHALTAKRRMEGRHKTNERDARGLAMLLRNGTLPVVWIPPAELRDQREMLRWRMCLSQMRTQIKNRIHGVLQRYNLDIAVSDLFGDGGRVKLLARQGELPPHSRQSVLEQLKTIDSLETQIGECERILEEILYPSVERDLLDSLPCVGKILSAVMALEIGDVRRFSGPDHLVSYAGVVPAARESADWKRKDKCPRDCNVYLKWAYVEAANLISAHSKHWADRHVVQLYQRVKESTKMHGKAAVAVARHLAEAS

SEQ ID NO: 297102 - protein, 409 aa, unidentified
MTESSDYESVQVFIGVDVGKDTHHAVAINRSGKRLFDKALPNDENKLRSLISDLKQHGQILLVVDQPATIGALPVAVARSEGVLVGYLPGLAMRRIADLHAGEAKTDARDAAIIAEAARTLPHALRTLKLADEQIAELSMLCGFDDDLAAQTTQASNRIRGLLTQIHPALERVLGPRLEHPAVLDLLQRYPSPEKLASLGEKKLAAQLCKLAPRLGKRLAADIAQALAEQTVVVPGTNAAAVVLPRLALQLITLRKQRDEVALEVEQRVLAHPLYPVLTSMPGVGVRTAARLLTEVACRAFASAAHLAAYAGLAPVTRRSGSSIRGEHPSRRGNKALKRALFLSAFAALRDPLSRAYYTRKMSQGKRHNQALIALARRRCDVLFAMMRDGTFYTRRGHNMLDNLIGAPP

SEQ ID NO: 297103 - protein, 414 aa, unidentified
MLLVGDDWAEDHHDVELMDPTGRVLARARLPEGVVGIAGLHAMIAEQLGEDADDGDVEVVIGIETDRGPWVAALIAAGYTVFAINPLQVARYRERHRVSGAKSDPADAHTIADMVRTDAHQLRPVAGDTAGAEAVKVVARAHKQLIMERTRHVLRWRHALREYFPAALKAFDRLEAADTLELLTRAPDPAAAAALTQAQIRAALKRARRRNIDAKAADIQAVLRTEQLGREDVITAAYAATTRSAAAVIGTLNEQITIMEGQVEAHFGRHPDAEIIVSQPGLGPILGARVLAEFGDDPHRYATAKGRKNYAGTSPITRASGKRKIVAARYVHNDRLIDALMAQAFAALKASPGARAYYDRQRARGVDHNPALRQVANRLVGILHGCLKTRTHYDEQTAWAAHQTDRPQKTATAA

SEQ ID NO: 297104 - protein, 345 aa, unidentified
MIIGCDFHPSWQQVSWLNTETGEAGEQKLVHGTGEAKRFYQQLAAPVLIGMEATGNSQWFVELVEDVGHQIWIGDAAQIRASYVRKQKTDKRDAAHILKLVVQGRFPRLWMPDREQRDLRQLVLHRHKLVEIRSRVKNELQHLSMNKGMQKKRTLWSQAGQKMLRQLPLKPWAACRREDLLGLLSTLNQQIGVLDAAVQTAAEENPQAKLLMTQPGVGPNTALAYVLTIGEVSRFPRGKQVASYLGLIPREHSSGGRQKLGVITKQGNRMLRSLLVEAAQTAVRLDPGMKKEYLHRCHQKPKGVAKVAAARKLAVRLYWMLRTNLSYPEIVRIESSPRVPLVGAS

SEQ ID NO: 297105 - protein, 344 aa, unidentified
MKIAVLGIDLGKNVCSVVGLDPSGAVVLRRRVRRDTLIDLVAKLPSCIVGMEACCGAHHLGRLFAAQGHDVRLMSPEYVRPYVKAQKNDDRDAEGIAEAATRPTMRFVEMKTEDQLDMQTLHRSRERLVGERTALINQLRAILLDRGIVVPQGKRKLEQYLVILMNEHNGEGLSARMRMLVADIRAQWQELDRRIGEFDAEFVRWAKENEDARRLVTIPGVGVTISTALIAAVGKAETFEHGRDLAAWLGLVPRQSTTGGKPRLMGISKRGNKYLRKLLIHGARAALPYVAEKDTALGRWAKSLLSRVHQNVAVVAFANKLARICWAVLRSGQRFAAQEAPLVV

SEQ ID NO: 297106 - protein, 365 aa, unidentified
MASVTSAPGPIHLGMDTSKKTIVVAVLMPGEEIPVLDRIWNEEGSVRHLVGRLGEVSALRACYEAGPCGFELHRLLSAMGVACDVVAPSLIPRRAGERVKTDRRDASRLARLHRAGELTAIRVPTEAEEAVRDLVRARAALMADRRRAQQRITAMLLRHGRVWRGTSWTEAHERWIAGQRFGEPALALALAHYRAALDTRRAELDAVEAELAAWAGKPPLGEAVARLGCYRGIAALNGLTLAAEVVDWRRFPAARAFMGFTGLVPAEYSSGERTRRGSITKAGSAPVRTALIEAAWSYRFRPAIGVTLRRRQHGAAPDTLARSWQAQRRLHTRYKAMTARGKPAGVAVTAMARELAGFAWAEMTS

SEQ ID NO: 297107 - protein, 316 aa, unidentified
MSQTNKNIIYAGIDVAKRTLALDWAGGGRQLANEARGHGAVVKLLGKSAFAVHVIVEASGGYEQALVGALHEAQLRVSVVEPGRIRAFARAKGLRAKTDPIDASVLRAFGEAIRPEPTLPPTQEQLRLGELVTRRSQLIDSLVAESNRSAHYRDALLRRQATAYRRLLQRQIEQCEQTIAQLIAADGAMQQRSQRLQQVKGVGAITAAILLADMPELGSLRNETAAALAGVAPYNDDSGPIRGIRRIRGGRASVRRALYMAALSAVRHDPVFQRFYQRLRGTGKKPLVALVAVMRKLIILLNHLLKNPALVLQHAT

SEQ ID NO: 297108 - protein, 345 aa, unidentified
MLIIGCDFHAGFQVLSIFDNRRGEVREKRLAHPAEAKEFYRDLSEPARVGIEAGAPCQWFRRLLAECGHELWVGDAGKIRAAETRKQKTDRRDAELLMRLMVEGRFPRIWVPSEEERDVRQLLMDRHHRLRARTAAKNQLQSLAMNQGVQKGQRLWSEAGRQWLADLEMMPHAARRRDQLLSWVGMLDQQIAALDVVIAAEAKRRAEARLLMTHPGIGPQTALAMVLTLGEVSRFAHARKVPSYLGLVPSEYSSGGKQRLGHISKQGSALMRFLLVEAGQSAVRLDEQLKRAYKRMWVRKGNRAIAKVMVARRLAVRLYWMLRNQWTYAELVRHAGEPESFCGKQ

SEQ ID NO: 297109 - protein, 337 aa, unidentified
MDRIAVFVGLDYHQDSVQVCVMDGGGRVLANRPCANEWDEIEAMVDRCGQVVRAGIEACTGAASLAEELSERAGWSVDQAHPGYVSRMKQNPDKTDYTDAQMLADLVRVGYLPRVWTAPREVRELRVLIRYRQQLAKARRNAKLRICAILREQRAGRGPGRRWTRAWLKWLGEGACMSEQSHWVVGEHLAELDSLETRLRRVEDRLEALTRDDPIVQRLLLYKGIGVVTAWTIRAMVGRFDRFRTGKQLSRFCGLTPCNASSGHRQADAGLIRAGDPELRTIIIEAAHRLIRYDPRWKTLAAKMRAGGKKACVVAAAVANRWIRWLFHQMQPERLAA

SEQ ID NO: 297110 - protein, 432 aa, unidentified
MKHNQSSKQNQRIMRISETTLVIGTDIAKRNHVARAFNYRGIELGKRCLFTNDDNGLNNLIAWASSLQKEHGMNDIIMGVEPTGHYWFPLYHFMKCRGIEVVLINPHHVNKSKELDDNSPTKNDVKDAKIIGKLVIDGRYTKPQLPEGVYADLRVYMNQRERLNLDLNRAKARIHNWLDRFFPEYTQVFKKWEGKASLITLEHFPLPQEVVQAGETSIVATWKKNGVERAVGAKRAALLYRTASKSIGLTEGVTAAKHELAMCLEQYTMLSRQLDQLMELVEALVKQIPGAEEMMSIPCVKLTAVAGFLAEVGDLNNYVHSQQIVRHAGLSLRENSSGDRKGETTISKRGRCRLRALLYRATLTLVAKNPEFRALHHYYTTRMDNPLKKKQSMIALCNKLIRVLFELGRKQKKYDATKVLGPHREAQLQIAA

SEQ ID NO: 297111 - protein, 371 aa, unidentified
MGWLPPSPDGTEMCQTVVLKEPRNGEADEMKDTMIGVDLAKAVFQLHGASMTGQVKFCKKLTRVQFQKFMAGQSPAVVVLEACGSAHHWARELTALGHDVKLIAPQYVRPFVKRQKNDAADAKAIVIAAQRPEMRFVEPKSKEQQARAVLFRARERLVHQRTELVNALRAVLYEFGHTVPKGIGNIKRIDAILEEPNCDLPTLVRTECGDFVKQIAEKTARIDAKTKTAKEAAATADTARRLQTMPGVGPLTALAVEAFAPAMQSFKRGRDFAAWLGLVPRQHSSGGKERLGRVSKAGQADIRRLLIIGAMSRLNWMGRKTIPEGSWLARMLARKPRMLVAIALANKMARGIWAMLTKNENYRDPALAVAA

SEQ ID NO: 297112 - protein, 328 aa, unidentified
MLEENKGKEDKVLEDVPVFIGIDVSKAQLDICVRPLASRESFANDEVGVRTLVKGLRELQPALIVLEATGGVERRVVRALASEELPVVVVNPRQVRDFAKATGQLAKTDRIDAEVLARFGEAVRPELRPLPDVCSQELRALVARRRQITEMIVAESNRLSGASKRVRKRIDAHIRWLEAELDRADKALDQNIGQSPIWREKEDLLKSVPGIGPVISRTLLAELPELGQCNRKQIAALVGVAPLNWDSGIFRGRRAIWGGRSAVRAALYMAALVASRRNAVIQDFYRRLRNTGKAPKVALVACMRKLLTILNAMIKHKTHWSLNTVQAT

SEQ ID NO: 297113 - protein, 343 aa, unidentified
MAIVILGIDLGKNICSLVGVGEDGSVILRRRMRRQTVLTFAAKLPSCVVAMEACCGAHHLGRLLTAQGHTVKLMSPEYVRPYVKAQKNDDRDAEGIAEAASRPTMRFVDLKSQEQLDLQSLHRVRSRLVGVRRTLLNQLRAILLERGHIFPQGRRKFEAAIDTLVADPAYEISRRIRQLVIDIRSEWQALDSRIEALNGEFVAIARHDDTARRLVTIPGVGVLNATALVAAVGDGAAFRRGRDLGAWLGLVPKQHTTGGKPKLLGISKRGNKYLRMLFIHGARAAMPSLSASQSPLGGWLRGLLARTHRNIAIVALANKLARIAWATLRRKTSFDLRHLAVAG

SEQ ID NO: 297114 - protein, 320 aa, unidentified
MAKQVEKRILGVDVAKRWLDVYGVDAGDSTRIDNTEAGICAWLDSQAGPTRIAVEATNRYHELFVERAYAQGHRIYLIDAFRLSRYREAVGHRAKTDRCDAELLARYLQQEEDHLRLWEPRDPRQTRLWRLLKRRATLVQTTVRLRQSLADIGALDDAAKELIRHCQQLVRTVDRELRMQAKRLDWEQDLRLASDIPGLGPTTSLALVATFHRHNFRNADAFVAFIGLDVRVRDSGRFRGRRKLTKKGDPEIRRLLYNAAMTACRQEHWRPYYQSLRDRGLSGTAALMILARKMVRVCYALLKTQLPFEPGIEKPPCAVT

SEQ ID NO: 297115 - protein, 355 aa, unidentified
MDHIGIDVHKRESQICILAEGGELMEQRIRTEPDRFAAVLGKRPRARILIEASTDSEWVARCLEGLGHEVIVADPNFAPMYATRTRKVKTDRRDARTLADANVLGAYRPAHRLSDAQRHVRGRLGVREALVRTRTRYISLIRALLRQQGYRVPSGSAEGFVHRVGAMALPGQVRSLIAPLLAVMLPVNRQLAYSDEVIEHLAAQDPRVQRLRTVPSIGPVTAAAFVATLDDAQRFRHAHQVEAYLGLVPREFSSGDSQRRGPITKAGPGRARWLLIQAAVSILRRRPPEAEALWTWALRIAARRGKHVAVVALARRLAGILYALLRDGSVFQLRRAVGVPEAAMGAMNRHAARAR

SEQ ID NO: 297116 - protein, 347 aa, unidentified
MDHIGIDVHKRESQICLLAEGGELMERRIRTEPERFAAVLGGRPRARIVIEASTDSEWVARCLEALGHEVVVADPNFAPMYATRTRKVKTDRRDARALADACVLGAYRRAHRLSDPQRHVRGRLLVRDALVRTRTRYISLIRALLRQQGYRVPSGSAEAFATRVRALALPGPLLSLIAPLLAVMRPLNRQLAYSDATIEHVAAHDERVQRLRTVPSVGPVTAAAFVATIDDVRRFSHAHQVEAYLGLVPRELSSGDSQRRGSITKAGPPRPRWLLIQAAVSILRRRPPEAEALRAWALRIAARRGKQIAVVALARRLAGILYALLRDGTVFTPRRSPQPVAAATLLV

SEQ ID NO: 297117 - protein, 336 aa, unidentified
MATISFFIGIDISKATLDFAVVVANKVLFHYQTTNDKAGIESFTKQLRTQYPDATFTNSLYCMEHTGIYNNHLLNFLHSKQAKVWLEHPIHIKDSLGMIRGKNDKVDAQRIATYAYKNRDEVRLWVPKRDIIQKLDRLTALRNRLIKVRKMIQSPLTDFEGFVSKKDLNETREACQDTLKSLDRDIKKVNQDIQTAIQNDAYLKELYEYIESVKGIGPAIATEILIVSNEFKNINEPKKFACHAGVVPFSYSSGKYKGKAKTSNKANKQLKALLHNGAMSAIQHSPEIKEYYLRKISEGKNEMLVINNICNKLIHRVFSCVHRKEKYKDFYMPSVA

SEQ ID NO: 297118 - protein, 373 aa, unidentified
MPRYSTAFGMDVHLRSTTVCALDAETGEAVTRRFRGNPWGEVAEWMSGFPGPSLAAYESGYLGFAPQRELSGLGVDCVVAAVSRVPRSAADLSSKNDRNDAARMAKAILSHDVTPVWVPSPEIEGLRDLAAAHDAATARLAAAKQRLLAFLARRGYAYGGTTPAGNPRRYWTYGFLRWLDGIHPADDGGIRALAALRNEVEAADETREAVLAEYRAAVAAGPLSAEVEALQSIKGCGFALAAAFASEVGDFSRFRSGRQVTAYFGLAPKQRSSADSVRLGGISGAGNALVRKLAVEGSWCYAQAGHQPKLMPKGSGVPLEVRMHGRKGSERLLRRREEMLERGMPQAKANAATAAELVRWLWALGMMCREGAE

SEQ ID NO: 297119 - protein, 418 aa, unidentified
MEVIHNRCAGMDVSKKDAKVCVRVAGAGRRKTVETVRTWGATTNQVLALRDHLVAEQVSLVVMEATSDYWKPFYYLLEDAGFELMLVNARHVKNMPGRKTDVTDAAWLAQLGAHGLVRASFVPPAPIRELRDLTRARVMLTRERGREIQRLEKLLEDARIKLSSVATDITGVSGRLMLQALIDGHRDPGALADLAKRRLRTKIPELTEALTGRFTEHHAFLAGIFLETIDQRTRQIDELNQRIDQAMTPFRAFCDLICTIPGKGRRTAEVVVAETGADMTVFPSPKHLASWAGVCPGSNESAGRVKSTQTRPGNPYLKAALGTAALSIAATHGTFRAAKYRRLAARRGGKKALVAIEHTVLTAIWSMGNTGAEYDDPGPDYYIRHNPERVLRNATRQLERLGYSVTLSPTAQTAQDSF

SEQ ID NO: 297120 - protein, 400 aa, unidentified
MPNLTTDMTTNNTQPSPTAAAPQGVKQYRLIKLGVDVHWREYVVVRQIDGTSPQPPQRFSPEGFIAWVAKQVKLADEVHCCYEAGPFGFVLHKRLVAPGIKSYVVRPRNWDEYGKKVKTDRRDALALLSCLDRYLAGNHEALTVIRVPADQEERARSDTRQRAQLLAERKRLAAQGLSTARYYGDDLPEEWWRAKKFEVLRAELPEFLVTLLGRWQRLLLVVNEELEALSGHVESAQTQELPTGLGALTAQVLDREIGDWDRFKNRRQVASYTGLVPCEDSSGERRFRGSITKHGNPRVRHILIEASWRLQRFQPEYRAVKNRRGALDEAKARNNKAAKKKLGVGLARQFIVDWWRIRTGRTTPEKLGLQMSWPAAYVLRGKTPPPAPVLVPATAPESAA

SEQ ID NO: 297121 - protein, 340 aa, unidentified
MSEIKTIGLDLAKHVFQVHGVDAAGECVLRKRLRRSQVISFFAQLPRCLVGIEACATAHYWARELQAAGHEVRLMPAQYVKAYVKRNKTDAADAEAICEAVRRPTMRFVPIKTAEQQAAVLLHRGRERLVRQRTTLVNALRAHLAEFGVVAPAGLRNVSQLIAIVRDASDRRLPDLARPVLRVLATQVELAQAAVAKVEKELTAWHRSNPLSQRLATIPGIGPIIATAIAAMVVEPSGFASAREFAAWLGLVPRQHSTGGKARLGGISKRGNRYLRRLLINGASANLLRSKATNADPWVIGLRRRRPSLVVAVALANKTARIAWAVMHRQEDYRSLAVAA

SEQ ID NO: 297122 - protein, 422 aa, unidentified
MKYVGIDWGGEVHVVALANATGELLEEWEVEHTPQAVEALLSRLKGLGGSAEICIALEPGSPLLMTQLLGEGYVLYPINPKQADRWRDRYCPSGAKDDRRDAMVLARALASDVQHLQKLEPESELSQELLFRAHARTRLVQQRVAQGNRLRDILKRYYPMILDLGRSIHEPFFLALLLAYPDAEKAARSHRGRIAKIIKKHRLRTLSPDDVCKVLHGPAFSVPHAEFAAHRDEAIDLAVQIQELNKQISQALERMETLFEDHPDRELLLSLKGMGIITAIRVGIGLGSNRVQRLEASTIQCHAGTAPVTKSTGRKRRKGNQPRGYGTHHVIMRRCCDRDIQSGANQWAAGSMIASRWAKAYYTQLREKGNRHNSALRALGNKWVKILVAVLKSRQPYDEERHIRDLVSAKVPWAQGLLPAEN

SEQ ID NO: 297123 - protein, 415 aa, unidentified
MALKIVYKICCGIDVHKTFVVACIASTNDKGVTSYESHRFSTYTSGLKTLLQWLLDRNCKDVCMESTGKYWIPVYNILEKDCSIVLAHPKYVKAIRGKKTDKKDAKWIADLFKHDLVAGSFMPPAGIRQLRDLMRYRFKLTCFKSSEKNRLQNCLTVSNIQLGNVVSDTFGKSAQAILDKILENPADTSFDLEPLVFKSLKKKLPELRDAIDGYITPEQAGKLKVIKSHYENLEARKAELEELILALATPYQQELAILQTAPGISSDFTAIGIISEIGTNMEAFPSAKHLCSWAGLTPTNNESAGKKKSVRVSKAGCYIKPLLVQCANAVVTSKKHPEIRNRYLRIKKRRGHKKAIIAIARMLLTALYHMLKNGENYNAELYRKSDLPPVDREITVEQAILIARNQGYKIKSATA

SEQ ID NO: 297124 - protein, 341 aa, unidentified
MADVQVIGLDIAKSVFQLHGVDASGAVVVQKRLTRARLLPFFERLPPCLVGIEACATSHFWARELANLGHEVKLMPPQYVKPYVKRQKNDMADAEAIAEAVTRPTMRFVGVKTPGEQSAMMLHKVRLMLTRQLVMITNATRAHMAEFGIIAPVGRGGVDRLLVVLDDETDERIPAEARCCLQMLAAQLRLIKLQILENDRQVLALARSTELGRRLMQVPGIGPLVASALVACVPDPSMFQCGRNMAAWVGLVPKQNSSGGKERLGSITKAGNRYLRQMLFSGAMAVIRRALQGTRRTWLIRLLERRKPKVAAMALANKNARIAWAMMMSGESYREPVTIAA

SEQ ID NO: 297125 - protein, 397 aa, unidentified
MYIVGIDIAKRKHEAAVIDGEGAVIIKPFSFTNNCSGYNRLLAMLTKAKLPLDEVSFAMEATGHYWLALFTRLQKEGFRVQVINPVQTNSIRSFYIRQAKTDPRDALLIAEVIRFGHFSESTLHPENIYELRELCRGRHAIVSMQADVKRKVVALLDQVFPEYETAFTNLFGDTSMAILQACPTPKELSEMPLEELCHLIEVSSRKRFRMAKAQELQELARNSFGFAMAGDVFSTMIRLYAKHLVFLKQQVQEMDRKIAEIMDTLDTPITTITGIGPTLGAYILSEIGDISRFSSAAKLAAYAGIDPTMRQSGEYNGVRNRMSKRGSPYLRHAIWLAASSAVLHDPALKLYFQKKRDEGKPYMASVGHACRKMVSIIYAVMRDNKAYTPYVPNEISA

SEQ ID NO: 297126 - protein, 358 aa, unidentified
MGKLYLGVDLHKRSCWVTVLDADGHLLESRKLGTEKWELLEFFGQVAKPAAVAVEATFNWYYFLNVVEPLGLELHLVHPWKTRAIASARIKHDKLDSRVLAELLRTGFLAEAWIAPRAVREQRQLLRYRVHTVQGATRAKNCIHAILNRNGLRPPLRSPFGPQGREFLTAVELPGTDRWEVDGQLARLDLLGQQLAALDREVRRRGRVSPVVRALERIPGIGPFIALLLEAEIGDIQRFPTAKHLASYTGLVPSLYASGEHRWGGAITKQGSTVLRWALVQAAHRAALSPQFQGFYQRQRARHGAGKATVALARKLAVIAYYRWRQALVRPSVADQAEQVRECSCAGAWSEDRPSSSD

SEQ ID NO: 297127 - protein, 370 aa, unidentified
MKNAITYVGLDAHKKDIYVAMLIGHERVPVTWQLPNEPQAIRRLVRRLEREAAGVIQCCYEAGPCGYALQRQLTTERVRCQVVAPALIPRKPGDHIKTNRRDARKLAELLRAGLLTEVAPPTAADEAVRDLARARDDAREDLVRARHRLSKLLLRRGVHFPGRQRAWSEPHRRWLRSLTWEHAADRRVADDYLLAIEQLEARRRELDSALQEIAQTAPYREPVAWLRCFRGIDTLTAMIIVAELHDFRRFHSARALMAYLGLVPSEHSSGEHARRGRITKAGNAFVRRVLIEAAWHYQHRPGVGGGLRGRQAGQPSRVIAIADRAQQRLCRRFRRLVAEHKPTPKVAVAVARELAGFIWAALQESRPLAA

SEQ ID NO: 297128 - protein, 418 aa, unidentified
MNKHNNSGKKSEPTSKPTKSRGPMQRDTKEVLAELVGKLKEKLDPKKVAATSAGEEHPRGELRPNLDRLTVGVDLGDQWSNYCILGLEGETLAEGQLRTTQQHIAEFFQALNAARVVFEVGTHSPWVQEVICGCGHEVLVANPRLMEGSKRRKRKNDRIDANKLARLGRVDPQSLHPMRHRSKEVRQDLVVLRARDALVAARTELINATRGLVKSMGARLPKCSSPSFAQKVEEAVPVEIREALLPLVRMAAALSDCIQGYDEKIEKLGREKYGHTALLRQVKGVGPITALAYVLTLENPERFVKSRDVGPYLGLVPKQEDSGESQPQLGISKAGDSMVRKLLVGSAQYILGPFGPDTDLRRYGLRLCERGGKNAKKRAVVAVARKLAVLLHRLWVTGEVYEPLHHSMSLPTGTATAA

SEQ ID NO: 297129 - protein, 352 aa, unidentified
MSRQVTTMSPKLFIGVDIHKKTWKLHFTTGLVEGSGHTFPPDTQKIKKYVDRNYSDYEISIAYEVGCCGYEPARNFIAFGWDTFVVNPADIPKPAKNNFVKTDKIDAKNIAKQLRSGNLRKLIIPEKPREALRCLTRQRTALVRDYRRIKSRIKSLLLYHQIHIPPDLDTPKWPIKFLDWLKVLKFENQNTNFTLTSMINQYGFIDKEIKSVANTIRAYCKKYHKLDYNLLRSIPGIAGLTAAYILAELGDLRRFTSFKKLASYVGFVPGIQQSGDSFYTTGATPRANRHVRNMIVEASWIAIRTDPVMQNYYRSHAGKNSKAVIFKVGRKLLSKLLSVIKTETPYSTGVIS

SEQ ID NO: 297130 - protein, 351 aa, unidentified
MKFYTKTHKHYCGIDLHARKMFLCILDASGEVLLHRNIATSPESFPKTVAPFRDDLVVGVECMFAWYWLADLCCREGIEFILGHALFMKAVHGDKAKNDKIDSHKIEVLLRGGSFPVAYVYPPEMRATRDLLRRRNHLVHKRAELLAHIQNTAIQYNLPEIGVNLSCEGNRKEVGQHFPDPQVRKIVQVDLAMIDAYDDVFKVLEPDIEKTARRQDRHALMLLRSIHGIGQILGLVMFYETHDIERFPTVQDFASYCRLVRCIHESNSKKMGTGGAKIGNAHLKWAFSEAAVLFVRHNPSAKKLIDDLTKLHGKGKALTILAHKLARAIYHMLKKNVPFNGVDQFASTVRS

SEQ ID NO: 297131 - protein, 337 aa, unidentified
MNTTPKEITTPMEKNEDTFVGIDVAKDELVIHILPTNQQLTVSNSPEGIKKLVKLFKKINPEQVVLEATGGLERNLLTNLVANGITATAVNPRQARDLAKGLGALAKTDAVDAKILARFAQLQCLPTRPVPSLETQEMSDLVARKEQLIQMRTAETNRLHRTTQKTIQKSIEKVIETFNKQIDAIDARIKEMIDANPDWSEKDKILQSVPGVGPKTSQMLISALPELGTINRQEIAALVGVAPFCDDSGKRSGARHIKGGRANVRSALYMATLCAVRYNKTFKKFFDKLIAEGKKFKVALVAAMRKLITILNVMVKTKTCWKESGMPSQKEEKMPDY

SEQ ID NO: 297132 - protein, 335 aa, unidentified
MAKNVIQVHGVDERGKTVLKRQLKRDQVASFFANMPACLVGMEACGSAHHWARKLQSLGHEVKLMAPQFVKPYVKTNKNDVADAEAICEAVARANMRFVPIKTAEQQSVLSLHRARQAFVKARTAQGNQIRGLLNEYGIVIPHGIGHVTRRLAQIVEDGENELPGRFRRLLQRLADNLKEIDRQVGELEQEIKAGHREREASSKLEKIPGIGALTASALTASIGDASCFTSGRQMAAWLGLVPRQRSTGGKATLLGISKRGDTYLRMLLIHGARAVIRVCERKPDPDRWLKGLMGRRNKNVAAVALANKNARIAWALLRYDKEYASDYAPAFAAE

SEQ ID NO: 297133 - protein, 416 aa, unidentified
MKIYPRTRPIQRYIALDIHKEYILAGGMNTSQEWILPPRKLEMSRFEEWAKRHLCESDAVVIETTTNVWDIYDIVQPLVGHAVVAHAGAVRQIAEARVKTDKEDVKRLIRLLIADIVPEVWIPPQPVRELRGLISYRQRLVKTGAMIRNRLHSFLHRHNLLLPEGGLVDGEWWAQQEKISTLEKLQIQQELSLLAQIEAHKAELDRELGRQSLGEIWGKQAIRRMQLPGMGVVIAMTVLSAIGEIHRFEDANHLVGYSGLGAGVHDSGQEHIEKRITKSGRKELRWAMVEAAWRAVRMSPYWKEQYEKYLHRMRRPNQAIVVVARKLLVAVWHVLTKEETDERASEEDLAYKMLLWSWSLSEEARQGLTHKQFAKYALMRLGIQTDLTRFVRRNVPRRIASQEEVRLRMAELGLND

SEQ ID NO: 297134 - protein, 366 aa, unidentified
MVRQAGCATTPDAAGRVTVGVDTHRDVHVAVALNQHGGWLGTRAFPTTPSGFAALTTWATRYGTLGSLGIEGTGSYGAGLARWLRARGLMVVEIERPERRDRQGRRRRGKSDPTDAEAAARAVLAGTAIGQPKAADGKVEMIRVLRVARRSALKARTQAANQLHALVLTAPDRLRARLRGLPLDRLVAVAAAFRPGPRLDTPLAATRLALKSLAGRYQQLSAEIASRDGQLAQLVTTAAPALLAVKGVGPETAGALLVAAGDNPERLRSEGAFARLCGVAPLPASSGRTTRHRLNRGGDRDANRALYLVVLGRMGWDPRTRHYVARRTAEGLSKPEIIRCLKRYLAREVYRLLRAPTDVWTPLDNP

SEQ ID NO: 297135 - protein, 433 aa, unidentified
MNLNRLQVGIDFSRQRADFCLLFPDGQPLVSHRAFANSQPGYQQARQLLLDSLQRYAFDGLDISGEATSYYWFPFFWQLAHDGALAARDLNLFLLNPRWVHWFKKSLPPDDKADSTDPFYIAERTRTRRPTGAWDPQDDWLPLRFYTRLRFHLAQTLTREKNYYLVHLFLLHNTYRRNQPFSDPFGVTSQQVLGGEQSLDELLHLPIEELAERLDDWSSGTLQDPLETAQQLQQVARDSFPLEEPLLTPVQHILEVTLQHIRFLENQIEQVEGWITSQIHARHPEALFLESVPGVGLVLAAGIVAEIGNLDRFFVTPKWDKKHNRSRHRTLREVEDAVAKLAGLWWPKADSGDFVAEDRRLAKTGNRYLRFYLVQAANGMRRHIPAYTSFYHRKFQEATRHKHKRALILTARKSVGLFVGLLHRKEPYRSKEV

SEQ ID NO: 297136 - protein, 473 aa, unidentified
MARKKGKDPAGAGGLELTGEPVEVSDEPAEVIARAAAIDVAKGSGMVCTRVPHDSRPHRRVQRIWQVSARYCEIAALMAELAQMGIQRLVLESTSDYWRIWYYLAEAAGLQVWLVNARDAKHLPGRPKTDKLDCVWLCKLTERGMLRRSFVPPEAVRDLRALTRLRSRLAQDQARHQSRIEKILEDALLKISSVISDLMGASGRRFLAALVAGERAPHKLAAPGDRRLKASPAQLEEALAGRFRDIHALEIGMLLELIDDITAKMARLDTEITARLARVPGIAPACAGCGEIGGGHAPSCPRAGAPVLSVIERLDELTGIGTGAAQVIVAELGTDKTTFPTPGHAAAWAKLASRTIQSGSTSKDGRTGKGNPYLRAALGRAAMTAAKTDTYLGERYRRIARRRGKQKAIVAVSRTICEIAWMIITDPSVRFSELGPDYYARLDAGRQTRNKIRELERLNPGMKITLTPATTAA

SEQ ID NO: 297137 - protein, 344 aa, unidentified
MEIVVGIDVSKERLDVAILPQEEVFAVGNDHAGIDELVERLKGIGVDAIALEATGGFEMLAVAGLSAAGLTVLVVNPAQVRAYAHAIGRRAKTDPIDAAVIAAFVLATKPEIRPLRDAETQALSELVARRRQIVQMIVAEENRLRMALAKQAQKSIKRLLKALRRELESLDADLDSHIRKSPVWRVREALLTSVPGVGATTARTLLAELPELGSLDRRQIASLAGLAPWTRQSGKWKGKSFIGGGQGTRRPIHGRPRRQPIQPRPQGLPRQAGRGRQAQDRRHRRNHAQAAHHPQCHHQGRTTMAKRLTNKTVARPAGEKRLVAAPYSSLVRQGENGRVRRDAE

SEQ ID NO: 297138 - protein, 344 aa, unidentified
MDHFGGLDVSVKETSICIVDDTGRIVKEVKVASEPAALLKVLGNSTYRFKRIGLEAGPLSQWLFSALAEAELPVICVETRHMQAVLKAQINKTDRNDARGIAQMMRAGLYRPVHVKTLRSQKLRMLLTHRKLLQSKAIAIENDLRGTLRNFGLKVGMVGKVRFEARIQELVKNQPDLAVLVEPLLIVRRALREQIVILHRRLLAIVRDDEVCRRLMTTPGVGPVVALTYRATVDVPARFRKSKSVGAVFGLTSSRYQSGEIDWNGKISRCGDEMMRVMLYEAAQSMMHSRKWSWLKAWAMQIARRRGMKKAIVALARRLAVIMHRIWVDGTEFRWTREQAAAAA

SEQ ID NO: 297139 - protein, 377 aa, unidentified
MAIVGGLDIHRRQITYDYLDSDTGEARRGRIQPAGRAELRAWLARFVGKQADFAFEGTTGWRFVAEEVTGAGFGAHLAEPADTRALRGPKRRAKTDRADARHLRDLLLAGTLPESWIPPAHLADLRTRVRLRKALLDERTAWRQRIHAVLFHHGLPERPGLLSAEGRAWLARVELPGAARDAVDLALRMIDRLDAELDPLDAQLLRFARRQPGCRALMRRYGVGALTAAAILAELGDARRFASSRRAVRFTGLDVTVAESDGKRTGAGSAAKAHRCCAGRSTRRPYAPPARAPPTMPIGWRSRTGGAPSAPPCRWPVSSPARPTTPCGSSATRPCGRCRCSRWREHGGTNTRGPTDQLMWCGWLPNAPVATLPSWRP

SEQ ID NO: 297140 - protein, 320 aa, unidentified
MEAVLGIDIAKAKFDVALQCSDGRVRRKSVPNTPAGFTALGVWLTQQRVTRVHACLEATGSYGEALATWLHDAGHRVSVVNPMTIHALAASRLSRTKTDRTDAALIAQYCATQHPAPWQPAPREIRELQALIRRLEALQDMRIQETNRLSSGAVPPAVVRSLETVIATLSDEITAVQQQIRDHFTQHPGLRAQRDLLTSIPGIGDSTAAVLLAELFDKQYRSARQAAAFAGVVPRIAESGTLRRRGRLSKIGPSRLRKALYFPALAGLRFNPSLQALRTRLRAKGKVPMVIVGAAMRKLIHLAYGVLKSQRPYDLTIVRA

SEQ ID NO: 297141 - protein, 352 aa, unidentified
MIIIGVDFHPEFQQIASVDTDSGEFQEKRLAHREEAEKFYRALTSKKVRVGMEASGHAGWFERLLSELRFELNIGDAAAIRSKRVRKQKTDRQDAQLILQLLIENRFPRIWVPSWENRDLRQLLWHRHRMVQARTRIMNQLQAVALNEGLRCKKRLWRDGGREQLESFALAPWANRRRRDLLELLDRLTPTIAELTQAIEGEVEKCPEARRLQTHPGVGALTALAFVLIIGRAERFQCGKQIASYLGLVPLEESSGNRRRLGHITKQGNSLVRFLLVEAAQVTVRSDQEWRNKYFHLALRRGRKIAKVAMARRLAVRMYWMWRKGWNYEQLKKFGSHAGEPGNRDGVMSNTE

SEQ ID NO: 297142 - protein, 388 aa, unidentified
MPKPFDLSKSLTALDQDSTLIVVIEMSQSSWLVAARAPGLARDPLKKLPPDPEQLFKLIDRWREESRRAGRVVRRVCVAFEAGRDGFWLARLLRQHDIEAYVIHPTSIPVKRDHRRAKTDRLDTELLMRAFLGWLRGEADHCSMAAIPTLAEEDAKRPTRERESRVNARSRLVNRMKGALARLGIRGFNPKLRKAAEKLEELRTGAGEPLPPNTLAELRRDMAQLRFVADQIKQIEKAREARLEKAPREGAHPMVLMLASIKGVGLETAEMLVAEVLSRKLRDRRAVARYGGLTGSPDESGSRSREKGLARSGNARVRRGMIQLAWRFLMFQKESALAKWFEARTANGPRGVRKTMIVALARKLLIDLWRFVEDGTMLVGVELFDSRA

SEQ ID NO: 297143 - protein, 377 aa, unidentified
MKKELYLGLDVHKDCIITAVAEEGRKGEVRENGAISNDLHAVEKWIGGLRKAHGKKTLLRACYEAGPCGFGLARRLGQLGVECQVVAPSLTPTRSGDRVKTDKRDARKLARLLRAGELTAVYIPEPTDEAIRDLCRARSDAVDDRRRSQHRLKGFLLRHGYRYQGKSSWSAAHERYLRELVLPHPAMKVILEEYLQGIAAAGERIARCEAAMGDLLEQWRLKPAVHALMAMKGFRTVAAMILVSELGEVHRFAHPRQVMAYLGLVPTENTSSERRRQGHITKCGNAHARWLLVECAQHYALPPKVSQELSRRQQGQPAQVRTISWRAQNRLHNRYRRLLARRLQRNKAIVAMARELCGFIWELLRTQDCYQAQSTPV

SEQ ID NO: 297144 - protein, 430 aa, unidentified
MKYNQNFKIMQITDKTLVIGVDIAKKIHYARTFDWRGIELDRTISFKANSTGFSEFMKWAKKTAEKNGKDKIIVGIEPTGHYWYTFAQALLVEGIMVVQVNPYHVKKAKELDDNSPSKSDRKDPKTIAMLVKDGRYQIPYIPTGKYAELRKANNLREEWLKKMWSIKNKMQRWLDTYFPEFLKVFSDWEGKAAIMTLERMCLPSKIVGHTAEEIVSIWREEIKRAVGIKRAQKLIAIANSSVGIKEGLKMAEYEMQLLLKEYLEVRKILDELEKHLEDIVLNIPGAERLLEVKGIGIKTVAGFLAEIGDITRFSHPKQIIKLAGLNLRENSSGEHKGETKITKRGRSRLRAILFRAILPLAAKNQEFNTLHKYYTTKKENPLKKKQSLIALCNKLIRIAYTLITMDVAYDPAKMMEDCSAPVVKTLFQKF

SEQ ID NO: 297145 - protein, 547 aa, unidentified
MITIGIDPHKASHTAVALDGGGRVQGELRCLANQATLERLLRWAERWPERIWAVEGAAGLGHLLAQQLVAREETVLDVPATLAARARLLAPGHGRKTDGIDAASVATVAQNQPDLRRVGPEDHSAVLRLLSDRRDELSGERRRAVNRLHRLLRDLRPGGAPTELSAARASELLGHIRPGAVVDLERKVMARALVADLRRIDRALTENRSRCAAAVATSGTSLTAVFGISDVLAAKILGHVGDITRFGSADRFASYSGTAPIEVSSGEVTRVGVRNPDSRSGPLSTIGRCGLSSTAGPVAQAGHARSRKSVRSSSGWPGRTPAGGACGSRASFASLASGWLRRRSGPCSELRGTRSRPTAHWPNLDRVPAGSGGRDHRLRLLHRRDRLAPDTLCPRVHRARQPAIHVSPSTAHPDAAWVTQQARTLVMDLDAPASPVRFLIRDRDTKFCRPFDTVLRSEGMRVIRTPIQAPNANAHAERVIETIRAECLDWTLILGRRHLDRTLRIYAEHYNRQRPHRALALGPVSPRDVRRRDLLGGLIHEYHGLAA

SEQ ID NO: 297146 - protein, 340 aa, unidentified
MGQVVRIGLDLAKSVFQVHGVDQAGEIVVRRKLRRSQLLAFFAKQPACLVGMEACASSHHWARELIALGHEVKLMPAQYVKPYVKRSKNDAADAEAICEAVTRPTMRFVAIKSPDQQCAMMLHRVRLVLCRQRTQLSNALRAHLAEFGIVAPVGRLGLERLIEIVADPEDRRLPGGARISLRMLVAQLAVVKAQILENDRRIMADARSTELGRRLMTVPGVGPLLASALTATVADPRIFRSGRDLAAWIGLVPRQNSSGGKERLGSISKAGHRYLRQMLVVGSMAVIRHAGRRAEQRPWLTQLLARKKAKVAAVALANKIARTVWAMMITGDRYREPVAA

SEQ ID NO: 297147 - protein, 356 aa, unidentified
MSYDVKYIGMDVHKEAIVIAVLNESGKLVMESVIETKASSILQFLHGLRGELHVTWEEGTWAAWLYDLLQPQVQHIVVCNPRRNALLKEGSKSDKVDARKLAELLRTGMLRPVYHGENGLRTLRELGRSYQTISKDLTRVMNRLKALYRGWGIPCAGTQVYAARCREEWLSKIPQAGVRRRAELLYQQLDGLQALRRDVRPEFLAESRKHKAAKLLRQIPCIGPVRAARLIGLMQTPHRFRSKRQLWTYSGLGIETHDSAQYRFVSGQVQRSKKPQQVRGLNRNHNHEMKEIFKSAATRASCGRGPFHDFYVALLAKGMKPEMARLTLARKIAAITLILWKKEERFDVEQLKTQAA

SEQ ID NO: 297148 - protein, 317 aa, unidentified
MTNVTFPQLIQRGCGIDVHLKVVVATIDGVGIHKETRSFNTFTSCLTEMKEWLLANGITHVAMESTGVYWKPVMRVLEEDIPNVWIVNARHIKNVPGHKTDKMDSEWICKLLLAGLLKPSYIPPKEQRQLRDLTRYRNKLIQTIAAEKNRMMRVLEDCNIKLSSVVANTSGVTATALIDMLCEGRKLTMADIESVYHKKLSASPQELLEACTGFVEEHHVYMLQMIRKSIAQTQSLVDELSKRIKEILIKYDNVLELLKEIPGFNTKVVEDLVSEIGLDMSAFPSEKHLASWAGICPGNNESAGKKKAEESLTVTNK

SEQ ID NO: 297149 - protein, 596 aa, unidentified
MLPQPAPAPQPPRRVGVGIDTSRYGHYAAFLRDDLQPAAPELQFAESAAGYALLRQRLECIAQRHPPAHFVVRLDAAGQYAENLPHFLHRLATPPADPLAPAARLALTISCGDPQRNQNYRAAVFGPQKSDPVAARAAARFALTERPGRDRPLSLPLRTLRQVAGRLQAVVRQRTRLINQFHHLLALTFPELALQTRDLAAGWVLELVHRYPTAVCLAGASLADLLDVPYLPDAQAGPLLEHARASVASPGGAATEELVRDHVRQLRDAGARQKRLEKLLVSAYQTLPRDNHRATIPGIGDVTAAVLTAFVLDIDRFATPGQLVAYFGVLPIEASSGVDREGQARGPRRYVMSRRGNDLVRRYLWMAALSAVRYNPAVRALYARVVAKHPGRKAIAIGHAMRKLLHLAFAIWKSGRPFDPGHYPWQAPGHVETRGQDKGTEEEAGGKGPAEGDQAAGHRPDTQPARQVVTAACADSVAGAVPFGEATAIDFAHRKRQLPIARALDQLGLSDRLRGRGPQRRCACPLHRGDARGRSFSVNLEENVFQCFDRQCGRKGDVIDLWAAAHGYALREAALDLVRTFGLEPTPRSGTEKRNG

SEQ ID NO: 297150 - protein, 332 aa, unidentified
MSMHLQGGVASSEVRPNAGVDVSKQHLDACVGSEACRVPNDAQGWDELTAMLLAAQVDLVVVEATGGYERGLVCALQGAGVSVARVNPRQARDFAKSMGVLAKTDQVDARTLRAFADVLARHEQRDRYVTPMLEQARAQLAELMTRRRQLVDMRVAEHNRLEHAGTLAARSIRSVIKLLDKQLAALDAGIDDHMNRHFGRQRELLDSVKGVGPVTILTMTAALPELGHLKRRQISKLVGVAPLANDSGNRHGKRRIWGGRAEVRSVLYMAATVAMRHNPVIRTFYQRLLAAGKPKKVAIVACMRKLLTILNAMLRDQALWNASRHVAPAQSA

SEQ ID NO: 297151 - protein, 406 aa, unidentified
MNTTEEIRVCMDIGSRNHRVGIGLSNGPLLEEFDITHTPTGIDHLFERIDSYVRQHNLPVSVAMEAYNGYARPIDQRVLSQGYRLLNVNNHKLAQFKKVFPGPAKTDAIDTQKMFELFLLADHLPISKQVLQEVLPTPEVNEKLKRLTRRRRGLVDEKVVIVNRVQADILACAPGLLDITKSMDNLWFLRFLTSRDDMTKLSRIRKEGLLGIKGVGKCYVEKISKWQKTATFSSQTSYVGEMIIRDAKRILELLDEISQMEQVIDELAVDSEIAKRLRTIPGFGVVCAAELAGEIGTLSRFTGEGSLALYLGMAVLDNSSGAYQGAKQSKHVNRRAKKAMMTAVARHINNNDESNKYYDKKRAEGKKHNQAVRALGRHMVRVMWSMLNRNRDYIHRNSPPGMNKNL

SEQ ID NO: 297152 - protein, 343 aa, unidentified
MDEYEGKQIVGIDLHRQRSVIVRQTDTGEQLAVVRIVNDPVALALQIEKAGPNPEVVLEATYGWYWAVDALEAAGASVHLAHPLGVKGFRYRRVKNDVRDAGDLADLLRMHRLPEAWIAPPATRELRELVRYRAKVVALRSGLKAQVHAVLAKAGVLIPVSDLFGVTGRAKLARVPLGDAYAQRVTSLLELIDVLDAHEARFTAGIAGELHHHRGYTAIQALPGVGPTLAAVFVAEIGDVHRFADPAHLCSWAGLTPKHRESDTVVHRGHITKQGSKLVRWAAVEAIQRHPDTSKISADRKRIEARRGRNIAKVAAARKLLTLVYYGLRDGHIRALSHGQTAA

SEQ ID NO: 297153 - protein, 343 aa, unidentified
MSVCVGIGVHRKRSQLAVIDATGEVLANRDVPNGVEPILKVIGGLPLGTPAAFEAAFGTGWLVELLEGYGFDPHLVHPSRCKAIASARLKNDKAGAEILAQLLRADLLPEAQLAPPAVRQLRALLRHRVQLVRLRTLLRSRIHAVLADHGHGRPAGCWSGPGREWLASLPLPAASREVVDDGLALTGALEVPIGRLDCEIRQRARSDPRVKMLTQLPGVGPFTALVILAETGDVSRFASARKPASWAGLTPAVPGSDRVAHYGHISKQGSAWLRWVLCEAAQTAKRSPQFAGGYQAIARRRGKKIATTAVARKLLTRAWHLLTDAGPAVPQPAAAPAPETGRR

SEQ ID NO: 297154 - protein, 316 aa, unidentified
MNNNAEIIVGIDISKNNLDIQIQEDGQYFTCANDFIGIDKLVEKMNEIHPSLIVLEATGGYEKGVISALVEAQLPVAMVTPLWVRYFARSTGTLAKTDKIDARMLVRYGRANHPPVVIVRSELQERLSVLMTRRSQVSLALINERNHLSTTGYSDVKDLIRESIQNLEQQIKQLEGMIAELIDQSPALKNNEKLICSVPGAGKITAAILLADLPELGTLDHKKIAALVGVAPFNRDSGYYRGKRRIKGGRQSVRRVLFMAAITATKWNPVIKEFYERLLARGKVKKVAIIACMHKLLTIMNAIVRSQTSWKPVNKP

SEQ ID NO: 297155 - protein, 427 aa, unidentified
MAYRIAGIDVHKKVLAVVVADVECDREYEFERRRFGSNPEQLKLLSEWLIEQQVEEVVMESTAQYWQPVWGALERYWRPTCQKQEGAGTMSGKLHLAQAQSNRGRRGRKKDFPDAERLVKRLVAAELVLSFVPDPEQRLWRAVTRRKLQMTRLHVRIQNQLESLLEEAHIKLSGFVTDLLGVSARRMLQALADGETNPAALAALADKRLRATPAQLCDALGACTELNPVYRRLIKMTLEELQFLEQQMGQLDQEIANLLRPHEDAVKRLAEVPGLGVDSAQQIIAEVGPMAASFASHKQLCSWVGVCPGDNESAGVNHSHRSPKGNRQLRRVLNQAANAAARTKGSIFEIVYRRQVPRMGHNQAIGVIAHRLCQLIWILLHRKARYEERGPAVTETSKRKRTARMIRELQALGYRVEALNLQTGASN

SEQ ID NO: 297156 - protein, 357 aa, unidentified
MLSSNIKYIGLDVHKEAISIAVVNGAGKLVMESIVETKASTLLDFLHGLRGELHVTLEEGTWAAWLYDVLKPHVREIVVCNPRRNALLKEGSKSDKIDARKLAELLRAGLLRAVYHGENGLRTLRELARSYLTVSKDLKRVMNRLKALYHSWGICCAGKQVYAPRYREQWLSKIAQVGVRRRAELFYQQLDGLLVLRDTVRGELLAESQKHKAVKILRQVPLIGPLRAALLLALMQTPHRFRSKRQLWTYSGLAVVTHDSAQHRYVDGQLQRSKKPQQIRGLNQNYNHAMKEIFKSTALDASRCAGPLQNFYAGLLAKGMKPDMARLTLARKIAAITLTLWKKGGSFDAEHLKSQAA

SEQ ID NO: 297157 - protein, 409 aa, unidentified
MDVMIERCCGLDVHQATVVACLMVGSSDGRPRKEIRTFGTVTKDLVCLREWLLEQGCTHVAMESTGIYWKPVHAVLQDAFDVTVGNALHMRNLPGRKTDVKDSEWIADLLRHGMIAKSLVPSKPLAELRDLLRYRRKLTESRSAERNRLLKLLDGANIKLSSFVTDVFGVSGMAMLKALLDGKPVDETANLARGRLRKKLPQLALALEGRVEEHHRFILRLQLERLDEIEVHLAKLDARIEDKLQPYAENRALICEVPGMDRINSARVVAELGTDMSLFASEAHVASWAGVCPGNNESAGRRRKSRVRKGNVYLTTTLVEAAQAAVRKKGSYFRDKFHRLKARRGYKRALMAIAHKILRAIYHMLRLRTHYKDLGATYLDQVDQARTTKNLRRRLELLGYKVTLDKIAA

SEQ ID NO: 297158 - protein, 328 aa, unidentified
MVDSQGEIMKEEAITTSPIGFRDYFSSLAPAIVAIEVGPHSRWASQVIRECGHDTIVANASKVKLIFANDGKNDRVDSRSLARLARVDRCLLFPIHHRSNEAQSALSVLRARDALVRARTRLINCVRGLVKPTGIHLSAVSAECFPIRVASRIPTDLHLSTALALEQIQSLSDTIAVYDQYIEHLVETRYPKAKLLQQIPGIGALTALAYILTLDDPARFPKSRQVGCFLGLRPRQDQSGDYNAQLGITKGGDEFLRRLLVNAAHYILGHFGPDSDLRRWGLAIAARGGKRAKKRAVAAVARKLAVLLHHLWVTGEVYEPLHNSGRAA

SEQ ID NO: 297159 - protein, 346 aa, unidentified
MTQYKRIGIDTSKAVFTLHGIDQRDQPTLRINLRRAQMISFFKKLPPSEVAMEACGGAHHWARVLTALGHAVLLIPPQYVKPYVKRGKNDRNDAEAICEAAGRPGMHFVPAKSLSQQAQCMVLKVRDTLIGQRTLLVNTLRGHASEFGVIAGKGVGRVGSLLAAIEQDATIPADAREMIALLGQQIEDLDIKIKALEARLNAAHKANAVSQRLATIPGLGPVTALTLATEIDPAAFASGRHMAAWIGLTPKEHSTGGKQRLVGISRAGNERLRSLLVVCATSVIKAATTPASKQMTGWLRGLLQRKPRKVAAVALANKIARVAWAVMTYGTVYRRSPTNVEVSYAA

SEQ ID NO: 297160 - protein, 412 aa, unidentified
METIFERVAGLDVHKAQVTACVRVPAPSGGREQHLAEFSTTVRGLMGLRDWLEAHGVTHVAMEATGVYWQPVWHVLEDAFELMLVNARHVKQVPGRKTDCSDAAWLCQLMEAGLLRGSFVPPKPQRALRTLTRYRKTQIQERQREANRLHKALEDTGIKLDCVASDILGKSGRAMLDALVGGTTDPEILAELAKGKLRAKIPALREALEGRFEPHHALVIGAILEHLDFLDEHIDRLSEAIEEQLGPFAPGVQLAATMTGVAERSAQVMVAEIGTDMSRFPSAGHLASWAGRCPGNDQSAGKRRSGHTRKGSKWLRIALEEASLAATRTKDSYLQAQYQRLRPRRGHRRALVAVQHSMLVAYWHMFTTGETYRDLGGDYYRKRDPERQTRRLVAQLETLGHKVTLEALPQAA

SEQ ID NO: 297161 - protein, 349 aa, unidentified
MRFYTKQHQHYCGVDLHAGAMYVCILDAAGEIVSHQNIPTRPKSFLRLIKPYRKDLAVAAECMFCWYWLADLCAEEGIAFVLGHALYMRAIHGGKAKNDRIDSHKIAVLLRGGTLPQAYVYPKGMRSTRDLLRRRNHLARKKAELLSHIQNTATQYNLPKPLGRIAKPSERGDLPARFADPAVRRMVEVDLETIEHYEHLLDGLERELVRMATVHDPVNLALLQSIPGVGRILGLVMLYEIEDIARFPRVQDFASYCRLVKPSKESNGKTYGHSGKKIGNAHLRWAFAEAVVLMLKGNKPAQAVVQKLASKHGKGKAFAILSHRLGRAVYYMLKNQVPFDPQRFLRQGT

SEQ ID NO: 297162 - protein, 325 aa, unidentified
MNSERIILGLDVSKRTVDVCLLFQDGRKATCQISNNIHGFNELIDWMHEFDKQHIQACLEPTGKYSRPLAYALHNSGFMVSQVNSYAVKHHGRSKRFRNKTDRIDAFLLADYCLKHNPPLWTPPAQSQTELRELQHRLVNINEQIRQEENRLEAGCDSKLVRDDIEESLGRLYVRRERLTKAAAELAKTDERLGPNFAILRSILGIGDKSAISMLSLIRFEEFDNGRKVANFAGLAPAKHESGTIKHQPRISKIGSTELRAALYFPALVAMQHNPQLRAFANRLRDKGKPPKVIICAVMRKLLVLAAALIRKQELYDPAHVSALN

SEQ ID NO: 297163 - protein, 370 aa, unidentified
MTYITSIGLDVHARSVSACAFDPFTGEVAQRRFGTDAGEIAEWILGFESPKAVYESGPTGFALCRELRALGVDCVVGAVSKMQKPSAEKRRKNDRRDAAFLARLLATRNITEVWVPPVEAEAARDLSRALDDAREDLQRARQRLSKFLLRRGLVFDETDALGRRRGAWTRAFWRWAESCRPSDPAAAAAFDHYVACVRCAESDKRALEKRVLAEARADRWRGAVEALSCIKGIDAVTAFCLATEAGCFSRFPTAGAYASWLGLAPSEHSSGEKEAKGGITKTGNSASRRALVEAAWHFKSCSPKPKAPPAGSAVPAAVKRRCDDATARLRRRRESLGAAGKRPCVANVAVARELACWVWEVGRRAEGTLA

SEQ ID NO: 297164 - protein, 402 aa, unidentified
MTGVVIGIDPHKGSHTAVVLDAAENVLGQVRVKARADQVPHLRRWAQAWPDRVWAIEGARGLGQLLTQQLLGAGERVVDVQPKLAARVRLLNTGAVNKNDPNDARSVAIAALRGRGLGEVTAEDDTMVLRVWSRRYRDLASLRTQVVCRLHAVLCDLVPGGFSKQITAGQAIEVLAGITAHGPIAQARLELAADLVADLQRLDAQRREIKRRVSRAVAASHTTITDIYGVGPIVAATVLGYVRDIHRFPTRDRFAAYNGTAPIEASSGNRKIYRLSRRGNRQLNYVIHMAAVTQIRNRGTAGRAYYDRKLAEGMGGKAALRSLKRKISDSIYARMIDDARPRPHTTVEDPGGQSGNDSVSSAASSHPDTPALRTSHSRATTDPTTVRTLRQRPNLKRSSPAG

SEQ ID NO: 297165 - protein, 438 aa, unidentified
MSNKFIFNLDDLFISVGIDVGADFSWMSIALPNQQIIGKPYKILHNQMNSLATAVSKIKEAEELYSLESRIFLESTGIYHYPLFCYLRDKGFNCSVINPIITKNSTNINIRKVHNDRFDSKKAALVGLKPDLKVSLMPSDLALNCRNLCREYYDLMDNRSAYVNKLQGELRMAFPQYLGIFSKITANTSLTLLETYTSPSAFIEADPQEIIDTIKSTARFGVAYAASKYNAIIQAAHDANEFGYILDSNIKRIRLYISFIRKYDEEIKNILDAMHELIDANEETDFVKQLHLVETFKGAGFLSAVTLMGEIGNFSAFSKPKQLFAYFGLDPAVKQSGKFEGTKIQISKRGSAIARRAIHTLTLQSISTSRTGEAKNPVLRDYYLKKCESKPKLVAMGAVSHKVCNMIFAILRDNKPFEIITPQEHIQQYNAAKCDIAA

SEQ ID NO: 297166 - protein, 343 aa, unidentified
MSNDTRIAVDVAKAVFELAISDRPGHVTRRERLPRGQFLTFMAQQPAATVVMEACGSAHHWGRKIQGLGHRIVLLPPHHVRPYIRRNKTDRTDAKGILEASRNEDIRPVPVKTVDQQVLTSLHRLRSGWMTERTARLNALRGLLRELGVFIPMGAREVVPFVWSLIEDADSDLPEALRPIFAEACREIREIEARVKQVERQLEATAEQLPAVEYLRTIPGVGLLIATALVAFIGDIRRFPSGRHFASYLGLTPREYSSGLKRNLGRISKRGDGYLRTLLIHGARSVLVHARKQQPDRLREWANNLAKTHVHNKAAVAVANKLARIVWAVWHHQRPFALIAKAA

SEQ ID NO: 297167 - protein, 285 aa, unidentified
MQAVTTIGLDIAKSIFQVHGVDAEGNVTIRRKLKRRYVIPFFQKLRPCLVGIEACASSHHWSRELQALGHTVRLMPPAYVKPYVKRHKNDAADAEAICEAVTRANMRFVATKTPEQQSCLMLHRTRHLFIRQQTAVINAIRAHLAEFGIVAPVGRNGVEALLNIAADTSDNRVPEIARACLAALGAQLRTLKAQILEFDTLIMAWHRSNEASKRLDEIPGVGPALATALVASVGDPRAFRSGRDFSAWIGLVPKQSSSGGRRSVSAKPVHDRGAGRDPLCQAPWR

SEQ ID NO: 297168 - protein, 338 aa, unidentified
MNISNLGVDLAKHVFQLHGVDRHGQVVVKKRLRRRQMLAWFADQAPCRVGLEACGSAHYWARELGKLGHEVRLISPQFVKPYVKRGKNDANDAEAICEALSRPSMRFVAVKSTAQQALQAEHRIRARRVRARTALANEVRGLLGEFGIVVPTSLGALRRALPEILEDAENGLPADFRILLAELAEELRNLDERIKAQDARMQARAQCDERIQRLLAVEGIGPMVASALVAAVGDARQFGSGRDLAAWVGLTPREHSSGGKQRLGGITKQGDTYLRTLLIHGARSALRAATNKTDARSRWVSALAMRRNRNIAAVALANKNARIAWAILARETHYRAAA

SEQ ID NO: 297169 - protein, 350 aa, unidentified
MDATTIGIDLAKEVFEVAMANDRWRVIKRERLTRPRFERLLKEHPAAHLILEACGSAHYWARTAQRLGHQVTLLPSQYVRPYVRRQKTDRTDAEAMLEAARSGGIPPVAVKTVTQQDVLALHRMRAPRMMTRTARLNAMRGLLLEHGIAIARGAHTLLRQVAARLANEDDPLPPRLRIVLRLTVDEVRDLEDRIDAIDRELAAVAADDLVVQRLMRIPGIGLLTATAMVATVGHIHAFPRARRFASWLGLTPREHSSGGRRHLSAITKRGDVYLRCLLTHGARAVLRMAHRGARAMSPLPRFHEWALAVERRCGHNKATIAIANKLARIIWVVWTREVEFTMAPPVGCAA

SEQ ID NO: 297170 - protein, 385 aa, unidentified
MAATTRTFDPTALRNTLCISFELGEGTWKLSFTTGFGREVFRRSVPSRDRDAVLRQIEALKERLGLTPGCRVVSCYEAGRDGFWLHRFLEAHGIENLVVDSSSIEVSRRRRRAKTDRLDGESLLDLLLRHLAGSRKRVWSVVRVPTVEQEDRRHLHRELQSAKRDRTRVTNRMKGLLANQGLTLDLQHDVPAQLAALRPWDGSPLPAGLQARLAREWERVVFFTSLIERLEAERRELFRTSPDPAVEKARQLNLLRGIGMNSAWLYAMELFGWRAFRSRREVGAIVGLTPTPDASGQQERERGMSKAGNRHVRAMAIEIAWGWLRFQPRSELTIWYQRRFGSGSKRLRKIGIVALARKLLIALWRFLETGVVPEGAELKADVRIR

SEQ ID NO: 297171 - protein, 352 aa, unidentified
MIIIGVDYHPEFQQIALLDQDTGELQEKRLSHPGEAEKFYRALAVSQKVRVGMEASGHARWFERLLGELQFELWIGDAAAIQSKRGRKQKTDRQDAEHILKLMLKDDFPRIWVPSGENRDLRQLLWHRHRMVQARTRIMNQLQAVAINEGLRCKKRLWRTGRQQLALLRLAPWASRRRHDLLELLDGLNPTIAELSQAIEQEAAKCAEARRLMTHPGVGALTALAFVLIIGDTERFQCGKQVASYLGLVPLEKSSGNRRRLGHITKQGNSLLRFLLVEAAQVTVRSLPEWRSQYFHLLMRRGRKTAKVAMARRLGVDLYWMWREQRDYQSKSSVRTQDSPEQAMVCNRTPRN

SEQ ID NO: 297172 - protein, 400 aa, unidentified
MNAVGIDVSKGKSTVAIMRPFGEVVAEPFEVSHTDAELRKLACFLEKLPGETRIVMEYTGNYWQPIAKVLHDAGLFVSIVNALLIYKYGNNSIRKGKTDKLDAVKIANYCLDRWTGLERYTPVDQIRQALKTCRRQYDQYIRLKVNLKNNLIALLDGTFPGLNILFKSAPRDMDGHEKWVDFAEKFWHRECICGNSEKAFTNQYKKWCAKAGYRFSEEKASSIYAHAVSQVNTLPMTDSIKRLVTLAVSQLNTIIETISVIQHEMLTLAAQLPEYPVVMRMFGVGPVLGPQLMAEIGDVRRFDRKQSLVAFAGVDAPPCQSGTFESKNRHISKRGSPRLRKTLFQVMSTIIQHAPTDDPVFQFLDRKRREGKHYYVYMTAAANKFLRIYYGTVIAYLEKL

SEQ ID NO: 297173 - protein, 354 aa, unidentified
MDIKYIGMDVHKEAIAIAVMNGDGKLVMESILETKAITILEFIQGVRGDLHVTFEEGTWAAWLYDLLKPHVRELVVCDPRKNALMKEGNKSDKIDARKLADLLRGGYLRSVYHGENGLRTLKELARSYLTISKDLTRVMNRVKALYRSWGILCGGQQVYAPRHRAEWLNKIGEAGVRRRAEFFYQQLDALRELRQAVRKDLLAESRKQSATKLLRQVPSIGPIRTALLIALMQTPHRFRTKRQLWTYSGLAIETRDSAQYRYVAGQLQRSKKPQQLRGLNQNHNHDMKAIFKSAATMASSREGAFHDFYQGLLTKGMKPAMARLTLARKIAAITLTVWKKGAHFDAKQLKLQAA

SEQ ID NO: 297174 - protein, 403 aa, unidentified
MNAVGIDVSKGKSMVAIMRPFGEIVVSPFEIKHTSSDINSLIELIHSVDGESRIVMEHTGRYYEALAHELSAANLFVSAINPKLIKDFDNDSLRKVKSDKADSVKIARYALDKWQNLKQYSVMDELGIQLKTMNRQFGFYMKHKTAMKNNLIGILDQTYPGLNAYFDSPARSDGSQKWVDFAATYWHVDCVRKMSLYAFTCHYQKWCKRKKYNFSQSKAEEIYGKAKELVPVLPKDEITKLIIKQAVEQLNNASATVEELRALMNETASKLPEYSIVMNMKGVGPSLGPQLMAEIGDVSRFTHKGAITAFAGVDPGVNESGTYEQRSVPTSKRGSSNLRKTLFQVMDVLIKTMPQDDPVYQFLDKKRAQGKPYYVYMTAGANKFLRIYYGRVKEYLATLPESN

SEQ ID NO: 297175 - protein, 480 aa, unidentified
MNVKANQTKKQVNVENQANLLLSKEELRKRMEGVEKELKSYTWRELETNGKFAKNDKLSFITDDMLIVGCDIGSESHYIRAIDIRGRELGKGAFEFSNTAEGFENAKAWMLKHAAQNEKRQIVLGLEPTGHYWFALAAWMISKGISVVQVNPYAVKQSKEIEDNSQLKDDRKDPKLIANLVKDGNYGMPYLPEKTYADMRRLSMFRDQLTEDRIRNINRLHRELKIYFPEYMDAFGKIDGAFALEVLKVSCIPSEIAALGTEGLRNIWHDAKLRGRGYSRAGKIVNHAEKSVGLEDGTSAGREAVRWFSEQIMKLDEQLARIESTLHKKCMEIPYAENILEIKGVGENILAGIVAEMGDISRFDDVKEIQKLSGMGLVACSSGKHRGQTKISHRGRKRLRYWLFQAAKSAVSHAEEFKQLHVYYTTRARNPLKKMQSLIVIACKILRVIYTILKTGATYDPQKMLKDIKRPEAAPAQMAA

SEQ ID NO: 297176 - protein, 408 aa, unidentified
MQVLYTRCAGLDVHKDTIVACVRCISPPMHQEVRSFGATTAELLKLADWLAEHDCTHVAMEATGVYWKPVWHVLEDEFELVLANAAHIRNVPGRKTDVNDAMWIADLLAHGLIRSSFVPPQAIQQLRDLTRTRKQLVREVSQHSLRIQKVLEDANLKLGSVLSDVLGKSGRAMLDAIVAGETDPACLAALAQGTARNKSAELREALRGRITDHHRTMLRLHLQVVDALQRTLAELDAAVGKALAPIQERARLLTTMPGISDLTASVVVAEIGVDMSRFPTAGHLVSWAGLCPRSDESAGKRRSARVRKSGTWIKTTLVTAAWSAVRVKTSYLRAQFLRIKARRGAKKAILAVAASMLTAAFHMLRDGTEYNDLGSEHFDRQDKSKTIRRLLKRLQDLGCDVPELAHTA

SEQ ID NO: 297177 - protein, 354 aa, unidentified
MLIHINLGNAMTYYAGLDVSLRTVNICVVDEKGERVEETKLASDVQDIVAYLDDLSIELESIGLEAGTLAQYLTYGLQSAGFEVVCMEARQVKAALSAMRNKTDKHDARGIVQLLRSGWYSRVHIKSMESHRIRMLLTSRKAVLSKCIDLENEIRGLFKIFGIKLPPKLGHGAYDAAVCDIIEMDETLSQALLPLLDARLTLYQTFRVLDNRTRHMAHDDLICRRLMSAPGVGFITALTFKAGVDDPTRFKRSRTVAAHFGLTPRRLQSGEMDIEGHISRCGDADVRSTLYTAANAMLTRSSKWSSLKAWGMKLAKTRGHRKAVIAVARKLAVILHRMWIDDAQFQWGTERVRS

SEQ ID NO: 297178 - protein, 452 aa, unidentified
MTAGKDITMHYQKVLKMPESIPYLSVGFDVGADFTWMSIMLPNGILIGKPFKIIHSDPQSRELAISKIKEAQEMYSLESRCFLESTGIYHIPLLCFLRDKGFDCAVINPIITKNSTNMNVRKLHNDKFDSKKAAKVGLDASLKASIVPDDAIIDLRNLVRDYYYFKDLQSAIVLKLHAELKVSFPAYLNVFSKVTTQTSLKLLEAYPLAADMLAAPKDELVEIIRSTARFGETYALARYDAICTAAKDAAVFGRALPSNALRIRLYIKMYREYQAHLDSILEELHQAVGKLEGTPDYDRISFIQTLHGVGFLSAVVLIAEMGSFDLFSSPKKLYAYFGLDPGVNDSGKFHGDRVHMSKRGSSLARRILHMVAINNLKVDKATKTPVNPVIYDYYTRKCASKKKSVAVGAVMHKICNIIFAMLRDNKPFELITPEEHRERYAAEHPESVNPAA

SEQ ID NO: 297179 - protein, 350 aa, unidentified
MNVIKQVVGIDVAKDNFEVRFGAISDQQEERFVGSATFPNEKRGFRKLLEWTKKQLIQVDAPVWFVMEATGSYYEHLAYFLSEHHEQVVVVLPNKIKHFAKTLEAKSKTDRLDARSICQFGLERPLSPWQAPTPQMKLLRELVREHNTLQQMATQVKNQLHAKDHTYQPSAETTKRLHTQLRLFQKQLKSVEQQLHSLVDDDDNLRRRITNITAAKGIGFMTVITAVAETNGFALITSEKQVTSYAGLDIVVKESGTRQGKPSLSKKGNKHLRRAVFMPALAACRFNPTLRELYLRLVRTKANKKVALLAVARKILCLIFTLWKKNVQYDPNYRHQNIRSVPNNLPLVTT

SEQ ID NO: 297180 - protein, 415 aa, unidentified
MSVDGAVALVGIDWASEEHAVCVVDPDGRRLAAFTIKHSAEGFDRLVARLAKLGAPESVWVAIERPDGRLVDRLLETGHPVVPVSPNAIKAWRESEVVSGAKSDPGDAEVIAEYLRLRAHKLDALQPFSEATRALRAVTRARDDLVEQRVAAHNQPEACLDACWPGAKVIFADVTSDIALAFLELYATPTAARGLGEKRLAAFLAKHGYSGRRPAAELLERLRDAPAGLPAGPESNARRDAVLNYVRVIRALNASIKALTRSVIAHLGEHPDNEIFTSLPRSGQVNAGQMLAEWGDCRPAYDDPEAVAALAGLTPVTKKSGKHHAVQFRWACNKRFRRAMTTFADNSRHASPWAADVYQRAIQRGCDHPHAIRVLARAWTRVIYACWRDHTPYDAAQHKAACSLKKKRPARKCAA

SEQ ID NO: 297181 - protein, 370 aa, unidentified
MRIIGCDLHARQQTLAMLDTTTREVVNLTLMHEGNSVLEFYSKLPPPVLVGIEATGPMQWFLKLMEGLGIECRVGHPAQIRAAEPRKQKHDRRDADLILKLLAENRFPAIWLPNQELLDLRALLLHRHQWVRMRVRMQNALQAIALANGLRRGPSLWSYDGQAKIAFLPLLPHAAYRRNRLQAMYKTMESEIESLNKQVAEQAGNRPGAQRLMTHPGVGPVTALATEVFLGDPQRFADGKALASYVGIIPREYSSGGQQRLGGVTKQGSPLLRFLWGEAGAHAARRDPELQRFYRRKLVHKGLGKARVAVARKLGIRLWIMLRDEIDYQEFCRRGQMQQKTVRPVAGMPETGNGAKSHRPSDEATCLPES

SEQ ID NO: 297182 - protein, 373 aa, unidentified
MNYSTVYVGMDVHKEKFSLCCYTNEKEQAEYYQKVDGHYSKVINYLEAMRFHYGDNVTFICGYEAGCLGFTLYHQLTEHNVKCVILAPTTMLSPAGKKKIKTDKRDAALIARCLAHRDYSPVHIPTEQDEQTKEYLRMRDDHKLALKKVKQQILSFCLRHNHRFDGTASYWTQAHLKWLRALKPEGLYQEILSEYLITYDQLTEKIERFDRRIEELASGENYKENVHKLTCFIGVKTATALAVLTEVGDFKRFSTARHFASYIGLTPGEDSSGEGQNRLGITKAGNHHVRSLLVEAAQSYARGQIGYKSRALRERQQGNDPKVIAYADKANERLRRRYYRMVLHNNKKTNVAKTAIARELACFMWGMLTGNIA

SEQ ID NO: 297183 - protein, 291 aa, unidentified
MKNHLELLSQNLGVDVAKDTLDVAFSTIDMQQQVKVKASRKFANTPAGFKQLQKWLESKRIKDVELRILMEATGIYYEQFAWFLYEREYAVSVVLPTKAKRYLQAIGNKSKNDKIDAKGLARMGLQQRLPLWQPLSKNIYRLRLLTRQLEDFNNQRTAFLNQLHALSHSAYSVKEVEKSLKKMVKELEKGIGQLEKAIEKLIQEDEVLSSKVEKVLSLKGVGLKTIAVLLAETNAFATFEKQGQLVSYSGYDIVENQSGQRSGKTRMSKKGNAHIRRAMHMPALGVVRNHR

SEQ ID NO: 297184 - protein, 339 aa, unidentified
MKVVAAVGLDIAKQVFQVHAADKAGRAVVRRKLKRNEVERFFAELEPCVVGIEASGSAHHWARVLSGLGHTVRLMAPQFVKPYVKSQKNDANDAEAICEAVTRPNMRFVPQKSVEQQDLQCLHRVRSRLVANRTQLINQIRGLLAEYGIVLPQHPGQVRSGLPAVLEDAESRLTGFGRELFQNLYEELAQLDEKITVADGRIQIAFQNTPDCRRIAAVEGVGPLIATAIVAAISNGHAFENGRQFSAWLGLVPRQNSSGGKSRLLGISKRGDPYLRTLLIHGARSVVYRAKAKTDRRSLWINDKQQRLGTSKACVAVANKNARIIWSLIAREQEYRRAA

SEQ ID NO: 297185 - protein, 360 aa, unidentified
MPTQSNELNFEGQNIYIGIDVHLKSWTVTILTERLHHKTFTQPARAESLADYLHWHFPKGNYLSAYEAGFSGFWAHYKLVSMGIKNIIVNPADVPTGQKENLQKTDAVDSRKIARSLRGNELTGIHVPRMETLEARTLLRSRDAIVKDLTRMKQRVKSLLYFYGIPYPPEFEKAGTHWSRRFMKWLQDDVQLSTPEGGEALHLLLSSVENQRKLLLKATRKLRDLSRSGRYATEYELLCSVPGIGMITAMDILMELEDISRFPNSDKLAGYIGLIPTSHSSGSKDSKGEMTFRGQTQLREKLIECSWSAARIDPALNMTFNKLVLRMEPNKAITRIARKVLNRIFYVLKYREKYERAVVK

SEQ ID NO: 297186 - protein, 359 aa, unidentified
MQEKINEKTFEGQSIYVGIDVHKKDWKVTIMTAELSYKTFSAGPKAEKLTSYLRSNFPGATYYSAYEAGFSGFWLHKELTNLGINSIVVNPADIPTTDKERKQKEDLRDSRKIAHSLRSGQLKSIHIPKEIVLHDRMLLRTRHALVKDLNRSKNRIKSMLFFLGLNLPERFSSRGSTWSKPFINWLEELSFEYPSSKGGLDAYLDQVRHLRSSVLKVTRQIKELAKNSQYHENVALLITMPGIGLLTAMTLLTELEDISRFKTFEDLCSYVGLVPSTSSSGENDIDTGITPRRNGRLRSALIESAWVAIRNDPALLASYQNLTKRMPGNRAIVRIAKKLLRRMIHVLRKKNSYERGVVK

SEQ ID NO: 297187 - protein, 330 aa, unidentified
MINYGYSHFYGIDVSKDWIDVATETDTFRVKQTSRDIKKFVSNHFKDITRSALCVLESTGGYEHAIAQQLVGAGVNVHVAHPSKVVAFAKAKGRLAKTDKIDAKILKEYGKFIQPHEMRAPHTQEQLDLQELSSRLAQLKIMHHQEACRLSEVKTDIVKKTLKKMIASIELLIENTENAILEIINNNEAMRAKLSLLQSMPGVGKVLSTILITELPELGILNKKQIAALVGVAPLTKQSGKWSGTATTRYGRTAVRKVLYMGALVASKYNEPLKEFYDRLVAAGKPKKVALVAVMRKMIVILNAMVHDNEHYKIMSRVKPAQPAVEANKI

SEQ ID NO: 297188 - protein, 436 aa, unidentified
MDDVEDEPLFAERVAGIDIGKAAIMVTIRVPSDTRRGRRQQETREFRAVLKDLLALAGWLGCWGVTRVGMEATGDYWKPVYFLLAREGFDCVLYHASQVKVLPGRPKTDRLDSVWLAKITERGQLPGSFVPPEDIRRLRTHTRYRRHLIQARTAEKERCEKLLEDAHLKLSSVIRDIHGVSGRDMLTAIIAGQRDPHVLAQLARGRMRIKIRELEEALDCSFFTEQHAFILQMMLANIDYLTRQVDELSAKIQALCEPYARQIAQLDAIPGFGIITAQDIIGEIGVDMSVFPTAGHLCSWARQAPQVSQSAGKRKGKNATGRGNPYIGAALGEAAIGAGRTQTFLGAKYRRLVRHMPKKKAQGAIMRTQLVICHALISDPDAACEDLGTDYYERRQDIRRRARNHVRSLERLGYMVTIEPLSPDPGTGELPITQAS

SEQ ID NO: 297189 - protein, 391 aa, unidentified
MVCVGIDVAKDKHDCCILDSEGTTLVDCFTIPNNMDGFKSLLQTIQDCSQKSDKIKVGLEATGHYSYNILGFLLDNDLPVYVMNPLHTNLYRKSLSLRKTKTDRVDAKTIATMLLSDVDLKSYTDTAYHNEELKSLTRYRFDKVQERAKLKQSVSRLVTILFPELEQLVSSIHGTSIYALLREYPGAKQISEAHLTRLANILVKTSRGHYRKDKATHIRDAARTSIGSVMPAKSLELKHTIKLIQELTSEINEIEDAIRKIMDELKPPILSIPGMGFHSAAMILAEVGDFSNFNSPDKVLAYAGCSPSTYQSGKLTNCYAHMEKRGSRYLRYALYTATKYVCYWNPVFTEYLTKKQAEGKHYNVALSHATKKLVRLIYALQKSGKAYLAIT

SEQ ID NO: 297190 - protein, 314 aa, unidentified
MGTKGNKIEFDQIIERGCGIDVHKKIIVATVRGVGIKEATKSFNSFTESIENMSDWLKDLKVTHVAMESTGVYWKPIFNILEEDFEILLVNARHIKNVPGKKTDKKDSKWIAKLLLSGLLKGSFIPPKEIRELRDLTRYKRKIIEQISSEKNRIQKILEDANIKISSVVSSTSGATATKIISAMIGGEEDIKELLKYRHGKIQSSIEDMASALKGKLTKHHKFMLQTINTSIGQKQELLNNLDKQIEYQLQASALELDAELLQTIPGIGKDGAAYMLAEIGANMEQFPDQKHLASWAGMSPGSYESAGKKKAVE

SEQ ID NO: 297191 - protein, 466 aa, unidentified
MKPFYMGSDVSKGYADFMIIDAQKKPAIQSFQLDDTFEGHQTLYNIVGRFLAKHPNSMLFAGMESTGGYENNWYNSLVAFQGSLNIQTSRLNPLGVKRNSQADLKKNTTDKISAQNIAEYLVAHPEKVAYQQQDQLAGLRKQWGFIQMLTKQRTQFLNQFKGLLYTSNPELLGYCQSETPAWVLKLAIKYPIAVRLKRANVKSVAKIPFVSKEKARQLVTDAKRSVASATDTETEQIIIATARQIIHLNQTIDTQSQRMINNCKLPEVELLKTFDGISDKSAIGLIIEIQTVKRFATAKKLASFFGAHPVYKISGDGVGGIKMSKQGRKQPRHILYMITLAAIKCNPLIKQIYEKHQRNGKHNMAAMGICMHKILRIIYGMLKHNKPFDPRIDIANRQRSAQAKEAVPRKNASRRFQEYDTKAPVSRRQKKKRLERVRSHSVPDTKSGITAPVPVGDIIANILPEL

SEQ ID NO: 297192 - protein, 424 aa, unidentified
MNAKDQNSWEQRKYYLGLDWAKQEHEIVVVDGDGRIMLETRIKHTAEGWHRLREKLVDLAGPDLSFVAATIETNRGPAVERLLELGCAVYPINPNAAQCYRGRKAPSGSKTDRLDALSFADALRTDGHGWRQLNPEDPKTQELRLLCRDETSLIEQQTTLVNQLQQALHEYYPAALEAFDDWTSPSSWAFVERFPTPQALKKAGKRHWEKFLHTHRLYRPETYQKRLEIFASATEFCGSQAVTNAKSMLAVSLAKQLRLLEQQLKAYREHIEKLFQEHPDYSIFDSLPGIGEKLGPRLLSECGEDRDRFEDHEALQCYAGTAPVSFQSGQINRVRFRYACNKNLRTAVHLWANLSRKKCVWAQVYYHQKRLEGKSHACALRCLGQRWLKILWKMWQTKTPYDEQMHTRNQIKHGSWVLALTASK

SEQ ID NO: 297193 - protein, 310 aa, unidentified
MENIALIGIDLGKNSFHIHCQDRRGKAVYRKKFTRPKLIEFLATCPATTIAMEACGGSHFMARKLEELGHSPKLISPQFVRPFVKSNKNDFVDAEAICEAASRPSMRFVQPRTESQQAMRALHRVRESLVQDKVKTTNQMHAFLLEFGISVPRGAAVISRLSTILEDNSLPLYLSQLLLKLQQHYHYLVEQIKDLESQLKRKLDEDEVGQRLLSIPCVGTLTASTISTEIGDGKQYASSRDFAAATGLVPRQYSTGGRTTLLGISKRGNKKIRTLLVQCARVFIQKLEHQSGKLADWVRDLLVSVQREPY

SEQ ID NO: 297194 - protein, 352 aa, unidentified
MEACTGMDMHKRYSVCAPLDAGGRPSAPVRVPHDRETVRSYLRSRPPGSVVALETIGNWYWMVSEIESAGLVPKLAHAGKAKLMAGHINKTDKLDAEGLARLEHNGTLPTVWIPPAELRDQRELTRSRMSIVGMRTKLKNRIHATLDKYLIRIEEVTDIFGKRGRELLEARLAELPPETRQCVGQELELLDQVQRQIDASEARIDAMVKETPEMQRLRTLPGVGRILASVIWLELGTIDRFPRAEKLASYAGTTPRVHSSGGKTRYGHTRSDVNQYLRWAFVEAANGIVMNQRRAPESHAVQMYLRIRRRGGHGKAVVAVARHLAEATYWMLKKQEAYREPKGPQDVSSTQG

SEQ ID NO: 297195 - protein, 347 aa, unidentified
MRFYTKQHRYSCGIDLHAKTMYVCILNQDGETAFHRNLPSTPEGFLRTIAPYREDLVVAVECIFTWYWLADLCAQEGIPFVLGHALYMKAIHGGKAKNDKIDAHKIAVLLRGGMLPMAYVYPAEMRATRDLLRRRCHLMRKRSELLTHIQNTNSQYCLPPFGKKIAYRKNRDGVAGRFADPSVCKSMELDVALIDHYDRLLNEVELYITQTAKVHDVNAFYRLRSVPGIGKILALVILYEIHDIARFPTVQDFASYARLVKCAKESAGKRHGSGGAKIGNAHLKWAFSEASVLFLRQNPPAQRYLDQLASKHGKAKALSILAHKLGRAVYYMLQRREAFDMKKFLCA

SEQ ID NO: 297196 - protein, 352 aa, unidentified
MSPKRTLYPKVTIGLDLGDKMSQVYELDLHGERLNEAKVATTPTGLQRYFGGRTQCRVVLEVGTHSPWVSRLLTECGHETIVANPSAMYGKRRRRRNDRLDAEFLARQGRADIALLHPIRHRGVEAQQHLAIIRARDEIVSLRTALICHVRGAVKSIGGRLPACSAEAFPKRVGAEIPPAVVPALQPMVETIADLTRRIDAYDEQISQLAKRYPDVQRLQQPSGVGLLTALTYLLLVEDPKRFRHSRSAGAYFGLVPRLDESSASSPQLRISKAGDELGRRLLVNAAHYILGPFGPDCELRQFGAAIAERGGKNAKKRAVIAVARKLAVLLHRLWLSETPYDPHYEQHRRAA

SEQ ID NO: 297197 - protein, 402 aa, unidentified
MTAGQVCAGVDVGKEHHWVCVVDDNGSVMLSRRLANDEQPIRELVAEIEQLADEVSWTVDLTTVYAALLLTVLADAGKPVRYLAGRAVWQASAVYRGGEGKTDAKDARVIADQSRMRGADLPVLHPDDNLVTELRMLTSHRADLVADRTRTINRLRQQITAVCPALERAAQPTQDRGWVVLLTRYQRPKTIRQSGVSRLTKMLDDAGVRNAATIATAAVAAAKSQTVRLPGEEVAAGLVAELAGEVIALDDRIKTTDADIEGRFRNHPLAEVITSMPGMGFRLGAEFLAAVGDPALIGSPDQLASWAGLAPVSRDSGKRTGRLHSPQRYSRRLRRVMYMSALTAVRCDPASKAYYQRKRDEGKRPIPATICLARRRINVLYALIRDNRTWQPDSPPIAKSAA

SEQ ID NO: 297198 - protein, 359 aa, unidentified
MITLGVDAHKTVHAAVALDDAGREIATWRGPNSPDGWAELAAWAAAHAASSGTERRWGIEGAGNYGRGLAQHLTAAGETVYDINPRWTAQGRRQARRPGKSDRLDARAVALVVWREAASLPPLQPEEQDETAVLDLLVSEREGALGEATRLRNQLHALLLQLDPQYKVHLPALTTPAGVAAAEAYTGPGRTPLQRAQAASVRRLAQRLRLATEQAADLARQIAARAQAGFFPLTRLKGINLLTAGALAGLLGPGCRFTGEAQLAAYAGVAPLEASSAGRVRHRLNRGGNRRLNAILYRIALTQARCWPPAQAYLARRLREGKTKREAIRALKRYLIRAIWRLWQECVSSHPVTSYGQAA

SEQ ID NO: 297199 - protein, 337 aa, unidentified
MIAVGVDTHKHEHLARALDGLGQLVGGVTVKADPAGYLELADWLSALGEDVVVGIEGTGTYGAGLCEFLLASGIRVVEVERPRREDRRRGKSDAIDALLAARKVLAGDGLSTPRAGGTRQALSALLVAYRSCVAERTRVLNQLQALHTSAPVALRERIGPGNGTKLVARLQRVRARAGAPEAEQLIFSVLGDLGSRARQLEVQARAYKRELSRLIGSLDPTLLDEPGIGPVSAAKLIVCDPARLKGEAAFARCNGTAPKPASSGQTIRHRLSRGGDRQANNALHTIALSRSIHDERTRVYLKRRTSEGKTSREAMRALKRHLSRSLYKRLVTVPLTS

SEQ ID NO: 297200 - protein, 392 aa, unidentified
MLFVGIDIAKRNHEASVIAQDGRVVRKAMRFANSQAGYNKFMDMVRSLKEPVVFGMEATGHYWLTLYTHLRNDGFTVHVINPIQSDALRGMYIRKTKTDSVDSVIIADVIRFGRYCETSVEPGDLQAMRELCRQRFYIIDMASDLKRKVIALLDQVFPEYEKLFSDTFGASSMEILSQYTTPEEMLSVSSQQLAEILEKASRGRLGAEKAVEIQNAARNSFGIVMASCSFSLIIRQYIEQIRSLEASVDVFDAEIARLLSGFDTQLTTITGVGPTLAAVILSEIGGDIRRFSSPAKLAAYAGVDPTVKQSGDFSGSRMKMSKRGSPYLRRAIWLASTVAAFKDPAIHALYERKRAEGKDHMTVIGHVCRKMISIIFAVLRDNTPYVPAAISD

SEQ ID NO: 297201 - protein, 344 aa, unidentified
MLYVGLDLSRKRVDWQALEPEGERVAIGAVPPDRDGLGKLVQRLGDAPVLAVIESMSGARFVHDQLELAGWDVRIADAVKAKGLAPLACKTDKIDCWVLAELARLNLIPEIWLPDPAVRAERERARFRLHLVKHRRSLKNRVHAILFQHGVPNPSSDLFGAGGRRLLARLQLPEPWASTVTASLALIDTLDEQITACERELRQLGADHPYIPLLITCPGIAWILGYTIAAEIGDISRFPTPRKLVGYTGLTPKVEQSGERDRRGPLRKNGPNYLRWALIEAAHTAGRDPRYRPIVERMRARHGKKRGSKIAAIEIGRRLSEAIWHMLTRDRPFAPAGATTPLAA

SEQ ID NO: 297202 - protein, 356 aa, unidentified
MTKGLMAGIDLHSNNVMIGIVDQSGRRLQHRKLACDLKAVEAFLKPFKPRLKSVAVESTFNWYWLVDGLRASGYPAVLANPVKIEQYSGIKHADDKNDAYFLAELQRLNILPTGYIYDPQLRPVRDLLRRRVGLVHQRTALLLSSKSLYMRTTGQELKSNRLKALKPAEAGELYAHPANQLIASLQKEHIEQLDRGIARIEQAVLSSARQLPYYERLNTLPGVGRILGMTITLEVGDIGRFKTAGNFASYCRAVDARRTSNEQGKGWNNRKCGNKYLSWAFVEAANFARRYDERSRKWFDRKAAKTNRILATKALACKLAKAAWHVMAHQVDYEAERVFGRAAGSQGKGLAQSPAD

SEQ ID NO: 297203 - protein, 322 aa, unidentified
MKTTLSNKQKWFNKINLTADDELYVGIDVHKKSYHVALWLNNAPAINFVMPPDNKKVVKMLLKVRIALKRIVYEAGPTGYNLARTLQKEKLPVNVIAPSITPRSAGKQTKTDTIDCRKLAKFAAKGLLRKIAIPTRQQEADRQLTRLRQQLVEKLRRVKIQIKSFLLQHGIEEPKGLSSWSVQATIKLKDIQLSEQLKYCLDMLLKELAFLTEQLKELESKLKELFNKKRYTQKIKILKTHPGIGPIIAGQFVTEIFDPKRFKDKTEIGKYVGLCPQIIQSGQKLRDGPILKTGRPQLRCNLIEAAWTWIRKDSHAYKPTAE

SEQ ID NO: 297204 - protein, 370 aa, unidentified
MNHSTTIFVGLDVHKAFISVAYVPDDRNTDIIYLGPIGTRHSDIDKLIARLKPKASRLVFAYEAGPSGYGLYRHLLSKNHTCLVVAPSLIPRRPGDRVKTNRRDAVQLARLMRSGDLSSVYVPDLEHEAIRDLSRAREDTIQDLTAAKLRLKSFLTRRGIHYTGNARWTPAHLRWLSEVACPTPAQQIVFQEYVHTVSEHQLRLTHLETELREHVSSWKLLPFVNALQALRGVQFTVAVTTIAEVGDLTRFTNPQQLTAYLGLVPSEYSSGEKRRQGGITKTGNAHARRAIIEGAWAYHYPAKVSRQIQERQQNLPKHIQNIAWRAQLRLCKRFRRLTARGKNPNVAVTAIARELACFMWAIAREVKPAV

SEQ ID NO: 297205 - protein, 386 aa, unidentified
MEDGPFIPVQYDVFGGLDVDKKSIAVTFMSHEGLLKSLSLPYQGENLISYVRNHFGGKKMAFAYEAGPTGWGLYDTLTGQGYRCLVAAPSMIPRAPGQRVKTNRLDSRRLCENLRGGQLKGIHVPSHPYRHLRHLIQLRDTFVKEVVGMKLRIKALLLFEGIGFPSAPSGTQWSFMVKDRLRKLPCTEPVRFKLDRLLESLEFSEKQALQSIRQIRRFCRNDPELFQSIKYLMTIPGIGWIVASHLLARIGDPRQIQNVRQLGGFLGLVPTEHSTGDRTVRGSITRAGDSRLRGKLIQSAWAAIRQDAELREFYRSVYERHPRERAARKAIVAVARKLTTRIYAVLKQQRAYVVREKVHSAPLTKEETVPQGTTRGLAEPGEPEFP

SEQ ID NO: 297206 - protein, 420 aa, unidentified
MVYLERGYNLKELPWSKTVSNSFLFKEACMILVGVDVAKDKHDCYIMTSEGEVLFKSFTIANNMEGFNQLYEKILSVIDNFDNVKIGLEATGHYSYNILGYLLDKGLTPYVINPLHSNLYRKSLSLRKTKTDKVDSRIIASMLMSDVSLKPYSNTLYHNEELKSLTRYRFTKVQERAKLKISISRLVTILFPELEKLVPTLQMNSIYALLYEFPSAHAISKAHLTRLTNLLNTTSKGHYTKDKAVLIREAAKNSIGSNMPAKSLELKHTIKLIKELTSEINKIEEEIKIIMNKINSPILTIPGIGLSTGAQILAEIGDFKNFSSPDKLLAFAGLSPSTYQSGNMYSSNAKMEKRGSKYLRFALFNAAIYVSYWEPTFSQYLKKKRVEGKHYYVAISHVVKKLVRLIFHLEKTNERYSTVV

SEQ ID NO: 297207 - protein, 314 aa, unidentified
MSSLVFVGIDVSQARLDIAVRPGASFSITHGEPAIATLVEQLRALSPTLIVLEATGGMEILLTSALANAGLPVVVVNPRQVRDFAKASGHLAKTDALDAQVLAQFAEVMRPQPRPLPDAETRALAALLTRRRQLVEMLTAEKNRLLSAASPIRKRLRTHITWLERELQHLNTHLAEAIRQSPVWREKDELLQSVPGVGPVVTSTLLASLPEPGMLTNKQIAALVGVAPLNRDSGTLRGRRTVWGGRAQVRAVLYMSAIVAARFNPVIRAFYQRLCRAGKAKKVALTACMRKLLVILNTMIKHRTPWHQEEVPLA

SEQ ID NO: 297208 - protein, 466 aa, unidentified
MPKKRSPRSQKQNKRVLEQINHQAAGADIGSDSIWICVGEHLSDEPIRRFGTTTAQLTASAEWMVSVGVQTVAVEATGVYWVAAYEIYEGRGLRPILINSRAIRNFNGMKKSDYVDCQWIHLLHTFGVLQPSVRVEPHMIELREYMRQRRTLIEQASAQIQRMQKALTLMNVRLDQVVTDITGVTGMRILCAIVEGERDPARLAALRDPGCAKSELQMREALTGHWRDEQLFTLRQTIELWNYYRTLITSCDVQIEAVLKKLPRRAVDAPVAKPSAKARKNQISFDARTLLHDRLGIDLVQIKGLDSLTILTVISESGTDLSRFPTDKHYASWLGLAPGTKKSGHRVLSSRSRRTNNRAATALRLAAQSLLKSECEIGAFGRALRARIGAEKAITAVACKLARRIYMSLQTGRVTLDRGAAYHDQQHARRNLASLERRARRLGLQLVPIQQVPPLQTQNPAPMMMS

SEQ ID NO: 297209 - protein, 372 aa, unidentified
MNYNTVYVGMDVHKESFTLCAYTIDAEKGSHFQRTEADYKNVLKYLEFLRTVYGDDANFICGYEAGCLGYTLYHQLTEHDVNCVILAPTTMLEQRSKRRIKTDRRDAEIIGKCLAQHNYSPVHIPTATDEETKEFLRMRDDHKLALKKVKQQILAFCLRHNYRYDGNSHWTAAHIKWLKSLNPEALYKEILDEYLLTYTTLSDKVERLDKRIEELASKDEYRESVKKLCCFIGIKTHTALSVLVEVGDFQRFASAQNFASYLGLVPGEDSSGDGQTRLGITKAGNRHVRMLLTEASQCYARGQIGFKSKELKSRQAGNSPQVIAYADKANERLRRRYYKMVLGKSKKHNVAKTAIARELACFMWGMMTEHIA

SEQ ID NO: 297210 - protein, 432 aa, unidentified
MEKIRKNAAGIDIGAKKVFVAIEGQEVRSFYTFTEDFEKLCHYFFENDIKTVAMEATGVYWSILYEMLEEGGIDVWLVDGRQTKQVPGRKTDVKDCQWIQQLHSYGLLNRCFVAESDIKELRSYQRLREDHIRSASMHINHMQKALTEMNIRLKEVIDQIHGVSGLAIIEAILKGERDKEKLLKLCHTKIVKNKKDEVLKALNGRYTKQGLFALRQAFESYSFYQNQIEQCDQMINDVLKKIGRDKPDQKTNARRKPIRHNKPDIDNLGSMMLKIFDGRDATTLSGITDYSWLQLLSETGTDLTRWPTEKHYTSWLGLAPGQHNSGRMKKNRRKSGRPKAGQIFRQIAQSLLTSKRIALGAFGRRLSARKGSPVAIKSIARKLAVLYWRMMVKGMAFVENGIQKYEEQMLIQKQRSLNRLAKELKVQVVYNM

SEQ ID NO: 297211 - protein, 396 aa, unidentified
MLLAVDVSKRRLDLYSRYQQGRSEHECIDSFANEVPTIDAKLTYYARQALALGYQGLDIVVEPTGRHEQKLTQAAYARGHTVWMVNPEHMYKAGVIHHGDDGKSDPLDGQVLHMMARMGKVSRWVPLPMPWQKLRSLGQWLEDTTLAAADVRIRIIGLRRELFVDYQQSTDLTWGATGKALQEVFGFDPWAITQGTYQNFVQRIHSQNPRIPERGLTRIWKQALQSKCTESHPQQRALLLDQLTHLWHNWEYQEQRKSQLGAQMVGLVNELAPEHWIPPLWPGFSQVMRAKILAETGPLRGFPHWRALAAYAGVKIRMRASGTYRGKDRMTKKGRILLRKHLGQAIFTLTRKDRLLGSYYHRKLGEGMPARKAKVACMRMLVKILYGTEKSGKEFS

SEQ ID NO: 297212 - protein, 369 aa, unidentified
MEQRITYVGLDVHKDTIAVALAEAGKRGEVREYGKIANTASALQSLVSKLARGGHRLRFCYEAGPCGYGIQRQLNTAEQECVVVAPSLIPRKPGERIKTDRRDAVKLARSHRAGELTPVWIPDQAHEAMRDLVRSRTAAVRALRQARQQLSSFLLRHGHHYRRTPWTQPHRRWLAGIKFEQTVHYIVLEDLIATVEAATARRDRLEQHIEATLPDWSLAPVVHALQSLRGLRLVAAAVLVAELGDIARLNSPRQLMAYLGLVPSEASSGSKRRQGGITKAGNGAARRVLIEAAWTYRFPARISRELLVRQERLAKPIRDIAWKAQERLCRRYRRLIWAGKVTSVATAAIARELVGFVWAIARQVQPNGS

SEQ ID NO: 297213 - protein, 416 aa, unidentified
MKSESGGSFAAYVGVDWADSKHDFCLQAADSDRREPGVVAHTPEEIADWASGLRRRFAGPIAVCLEIAKGPLINALQRYDFFVIFPVNPAMLAKYREAFTPSGAKDDPTDAELALELVLRHRDKLKVLKPQSRAMRTLATLVEARRALVGDKTRITNRLAVTLKQYFPQALVWFEHRDTLLFCDFLCRWPTLKHVKRARQSTLQSFFREHNVRFSSVTERRIHGIRDATALTEDDAVIQPCQLLVQALVEQLRATLHAIDRFDEAIATVAETLPDYKLFAALPGAGSILAPRLLVAFGEQRERYASAAEVQQYAGIAPVVERSGNKCWTHWRLACPTFLRQTFIEWAGATIPRSFWAAAYYRQQISKGCSHRVAVRALAFKWIRILYRCWHDRVPYDEATYLNALRRRGSPLLQTS

SEQ ID NO: 297214 - protein, 416 aa, unidentified
MKRNKPKKLGKVNGNTLIATIDIGKKMNYGYFRAPDGRDIKPFGFYNLRDGFDKFWAKLVEFQKGHNLEEIVVGFESTGPYAEPMLHFLKKKEITLVQTNPVHTKRLKELTGNSPNKTDEKDPRVIADVIALGHALTLVIPMGPAAELRRLSQARERAIKSRTSMSNQLQHLLFVIFPELSWKTKSKSVLHLVESCPTPESIVRMGIEALCATLRKVSRGKLGQKRAKEIFEAAKKSVGISEGRESILKEIGHLVSNMRNHDGFIDGLEKEMKHYLEKIPYSHSILSIKGIGEVTAAGLIGEVGDFRKFSTISEITKLAGLDLYEISSGRKKGQRRISKRGRSYLRKVLFFAAINAVKSNGILHAKYQQMLCRGMAKIKALIAICRKLLRITFAIVRDDTVYVSNHQHMSDTKLAA

SEQ ID NO: 297215 - protein, 411 aa, unidentified
MQVLYPRCCGIDIHKASITACVLVAEGKSKERYRLRCGTMTRDLLALADWLMGFGVTHVAMESTGVYWKPIWNVLEGRFELLLVNAQHFKAVPGRKTDVKDCEWLAELLQHGLVRSSFVPPTLVRDLRDLNRNRAILVQQRATVSNRIEKVLEDANIKLGVVASHVLGQSGRTMLHAMSTGEEDIDKLAEMAKAKLRKKIPELRVALFGKMRDHHRFLLRQWLSQLESVEKQIAEFDLEIDRRNEPFQQTVDRLITIPGVDRITASGLVAEIGTNMAQFPSAQHLASWAGLCPGNNESAGKRLSGKTRKGNPWLRRVLCQAAWAASHTKGTYLSAQYHRLAARRGKKRAIIGIAHSILVIAYYLIARGEEYRDKGGDYFDRINCEGLKRYLIRRLEHLGHSVKLEPVPSEA

SEQ ID NO: 297216 - protein, 353 aa, unidentified
MRKMQDYILKGKRIFIGLEDSKRTWKLCVRSEGMIVHEINMSADYMNLLSYLKNRYPDCEIKVMYEAGFGGFWLHDRLESDNIVCIVTPPHKVTQAKVNKVKTDRIDARRLALNLENNDYRSCHVADREHRENRQVSRTLSQIQKNITSNKNRIRKLLDFHGLNAGLPSGAWKPSHYQSLKSMKLSSTLRVCLDIYLRLLDSLETLKSELKERLESISEQDRYRESVRIKESCPGVGRLSAIRFTLEWGDLSRFPTGKHLASYTGLTSSEYSTGEQVHRGRITGQGSGMVRAWLIQCAWRAIKRDPVLLNKFDRVRKNTGSKKKAIVAVARKLAVRIRAIEVLKQPYVVGVIE

SEQ ID NO: 297217 - protein, 334 aa, unidentified
MKELKSSVGIDISKDSFEVCIKQLVSERVVIKATHSFQNSFKGFDDFLKWTLRKVSSPIFVMETTGVYHEDLTHFLYSNDQKVSVVLANKMKHFAKSLNIKTKTDKADAQMIAQYGLERQLEWWQPMMPQMKNLRDLCRERLSLKKDLVRCKCQVHALKHAHSTLYVVLQLKEQQIEFLEKNIQIIENEIIRITGEDKEFSQRVKNIETIKGLRLLTIVTVLCETNGFAQFNNIRQVVSYAGLDIAERQSGLFKGKTRISKKGNSRIRECLYMPALSATSYNEHIKALYQRVIERNPTIKRKGVIAGMRKLLVLIFVLWKKNEVYNMEYNWNAH

SEQ ID NO: 297218 - protein, 346 aa, unidentified
MDKVIRIGIDTSKSVFQLHGVNAGEQPVLRKKLRRKELAAFLGGLDPTAIGIEACGGSHYWARVLEELGHTVKLMAPQLVKPYVQRGKNDAADAAALCEAMSRPGMRFVTAKSPEQQAGLMLIGVRERLVHNRTQLSNAIRGYAMEFGLIAPKGLDKIEPLLARAQADETLPLLARTLFAAQGREYAGLQGEIREIEARLMAWHRGNECSRRLAEVPSIGPIGGTLLAMKVPQAAAFQSGRHFAAWIGLTPRDHSTAGKQRLGGITRAGDPALRSVLVVGAMAVVRQALRNPNRASPWLVDLLKRKPRKLAAVALANKTARIAWKMMMTGERYNPRRAAALIATAA

SEQ ID NO: 297219 - protein, 378 aa, unidentified
MKRILKIGMDVHTTNYTLCAMEPIIGEDDRVFATIKVTPDYKNILMFIENLKLKLGLNDEYDIQCGYEAGCLGYSLYNQLTAAGVKCVILAPTTMLTPQGVRIKTDMRDAYMIAQCLSYGGYHAVYIPTEDDDSVKEYLRMRNDHKLALKKIKQQINAFCIRHGFCYDGTKWTQAHLKWLKKLEITNGLYRETLNEYMASYEEQEAKIERYDKRIEEIAEQTKYHDKVKKLECFLGIKTHTALSLIVETGDFERFAKGNQYAAYLGFAPGENSSSDSIRRLGITKAGNSHLRQLLIEASGGICKGAVGHKSKELRARQNGNTADVIAYADKANTRLRSRYYKFIRHGKKRNVAVAAIARELACFVWGMMTDNIEMKVA

SEQ ID NO: 297220 - protein, 349 aa, unidentified
MNFYTNTHPYYCGIDLHTRLLYVCIIDNENNILVHEKIDDSPDKLLALLKPYLGNIVVGVECMHCWYWVSDFCEEHNIDFILGHALYMKAIHAGKTKNDKIDALKIAKLMRGGNFPLAHAYSKEHRSIRDALRRRTHIMRMSVQLKAHVASTVSQYNLPALETRLDLRNSPDREKMRHFFPDEAVQKSMDLNLNIIETMVSELYKIEHYVKTQAQTHCATDLHILKSFPGIGKILALTILYEVGDIKRFSSVQKFASYSRLVKCKAESAGKTHGTQGNKIGNAHLKWAFSEAAVLYLKGNDNAKRYLAKLQKRMSKAKALSALAHKIGRCTYFMLKNQQVFDEERFLNG

SEQ ID NO: 297221 - protein, 413 aa, unidentified
MDLIIERCAGLDVGKDEVVACVRTPSASGKTRRVELRTFATFTSGLEELAEWLVANGVTEVVMEATGQYWKPIWYVLEELPFELKLVNAKHVKMVPGRKTDLADAAWLAELLEHGLLRSSFVPPAEIRELRDLTRYRKRLIQTRTAECQRVQKVLEDAGIKLDSVASDVLGVSGRAMLHALIDGERDPERLADLAKGTMRKKIPLLREALRGRFREHHATMLRIILGHVEQLEASIALLDDEIDRLMVPFSTARDHLATIPGVAKRSAECIIAEIGADMTRFPTAGHLASWAGMCPANNITGGKRHPAGTTNGNRWLGEVLDQCAVAASHTRETYLAAQYWRLVRRIGRRKAKVAVGHSILVICWHLIANDCDYADLGGDWFARRTDTDKRRDHLIRQLHDLGYGVTLTNLAA

SEQ ID NO: 297222 - protein, 429 aa, unidentified
MNEVDSIRLEEFRQIRKEIRGSSEYLVVGIDVAKYKHYAFYGTATGKTLLKRMIFENNLEGFRKLRVQEDALKVRYGLEKVIYGFEPTANYHKPLGEYLIRCGRHVVLVAGTAVKNNRKTIDGRWDKNDMKDAAVIADLISQGKFLFYEYPLMPLRDLRNLLSLKRRLKKQEQGQKVRIRNHLLAQYFPELDTYYGNWGKEGLAIVRWCLDPSVIAGLEYEDFVRRVAPDARDSLYKQERLKSVWEKAVDSIGCRAGESLDVEAKLMVEGLAYIRGSIREVEDKIEEVCSCFPEYRCLLSIPGFGPDIASQVIAAIGNPFRFDNQRQVLKMAGMDLSANRSGTTSDKAIPRLSKNGNAYLRYALYQAAMIASYKSTPFIQYFTEKLRGREKEKGIKTKMRVKLAAKMLIIAWTLMKKREPFDPKYLTTD

SEQ ID NO: 297223 - protein, 350 aa, unidentified
MEHIGIDVHKNESQICLLTEEGEIQEPRILTRRDRFAALLGKRPRAQILIEASTESEWVARCLEELGHEVIVADPNYAPMYATRSRRVKTDRRDAQALMDACRLGAYRPAHRTSDAQRQVRALLAVRDNLVRTRVRQIQVIRALTRREGLRVRSGEAASFGKRLGEVELPEWLSTLLAPVIAAMNEGNRQLAAADQAILQVVGDDPVVQRLDTAPGVGAVTAVAFVATLDQVERFEGAHQVECYLGLVPSERSSGERQHRGSLTKAGNARMRWLLVEAAWCIWRSRASNAEPLRQWAQRIATRRGRRVAVVALARRLAGILYAMWRDGTEYQAHPGRQHGTTPKQTASAA

SEQ ID NO: 297224 - protein, 411 aa, unidentified
MNTVIKPIVKCAAGLDVHQGSIMCTVLEEQETGAPRRETRRYSTFPRRLKELGRWLQERGVELAVMESTGIYWKSVYAALEEAGVPTYLVNARHVKQVPGRKTDVADSEWLAELARCGLLKASFVPPRDLRELRLLTRYRRKLSGHLAGEKNRLHKVLEDAGMRLGCVVSDIDGVSAQRMIQALTAGEKDPAKMAALALGSLRRKQEDLVLALEGDLSDRHRFLLQRISNHIRWLEEQLQELDSQIVAAMAPYQEEWRLMQTIPGIDHLSAAMLLAEIGPDMGRFGSKEHLSSWAGMCPGNHESAGKKKRVRTPPGNKYIRQLLCEAAHSAAKTNSQFKGFFQGLVIRRGTKRAVIAVGHKLLQVLYVILSKKEPYRDPGVDYERLVVNRNAPRWIAALQKYGYWPPAPAA

SEQ ID NO: 297225 - protein, 386 aa, unidentified
MPQLNDLSRSLVTLDQDATLIAVIEMGQASWLVAGVVPGVERQPLKKLGVDESTLLKLLHRWHEEAEKAGHKIKRIAVAFEAGRDGFWLARWLRACGIEVHVIHASSVAVSREHRRAKTDRLDTELLKRAFLGWLRGERDHCKMVAIPTTQDEDAKRPNRERENLVGEQSRIVNRMKATLTRLGIRGFNPKLKTAAARLDGLRTPEGGPIPPNTLAELRRDMVRRRLVSDQIRQIEDARLERLKHAPGDGPHAMVRLLARVIGVGIETADMLVQEVLSRNMRDRRAVARYGGLTGSPDESGKKRREKGLARSGNARVRRGMIQLAWRFLIFQKDSALAQWFRARTENAPGTRKTMIVALARKLLIVLWRLVREGVVPDGVILRPAQ

SEQ ID NO: 297226 - protein, 356 aa, unidentified
MQTLNQNSIVVGVDVHKYSHTAVAMNAWGEERGTLNFTNNTLETYTDWLEQMGIKENIIVGLEDVNSYGIHLVEDLRSKNYHIRYVPAILTERERNKSTKHDKSDSVDAKRVGKVILTKYEDTLPAKESIANTKELEIARSLDLLLMERRDLTKQKTITKNQLHCLIHQHYTESYRLHCPRSFSKKAIKWFLDDLKENKTILATSIIRRLSRLLFVENQIYTISKEVSVIGETSKEAEALTAIHGCGMITACSIMAEVITVKRFKNKHHFSMYAGIAPTPHSSGRKHKMHTNPFGNRQLNRAIHTIALGQIAIKGDPTGKEYYQRKLSEGKTKLWALRCLKHQLAKRVFQTLKYAR

SEQ ID NO: 297227 - protein, 338 aa, unidentified
MKLFGAIDLHSNNNVTVLIDERDEVVYRKRLPNDLRLIIEQLSPYQCTLEGIVVESTYNWYWLVDGLMEKEHRVHLANTAAIQQYEGLKYTDDDSDARWLAHLLRLGVLPQGYIYPKEERAVRDLLRKRSQLVHHKTAHLLSVHNLYTRNTGQSLSANRIKKLTSEQVDGLFTLGDVALAVKANLSVMRCLEAEIKSLEQVVKERVKLKPAFRYLLTVSGIGQTLALTIMLETGDIGRFSRVGNFASYCRCVGSEKISNGKRKGKGNTKNGNKYLSWAFVEAANFAIRYEPLIARFYQRKKAKTQAVVAIKAVAHKLSRACYYVMRDEVPFDVGRAFA

SEQ ID NO: 297228 - protein, 340 aa, unidentified
MTITTVGIDLAKNVFAVHGVDQNGRTVLVKPKVSRAALPEFIAGLPPCVIGMEACSGAHYWARLFRQYGHEPRLMAAKFVSPYRMAGKSGKNDAADAQAICEAVRRPHMRFVPVKDESQQAMQCLHRTRQGFIEEKTATYNRLRGLISEFGVIAPQSTDALRHIVSVQKSSLPLQVQQYVDDLLEHIDRIEANITEYDRILSRMAKTDHRSQRLMELKGVGPTTACALVASIGNAHDFKNGRQLAAWLGLTPSQYSSGGKSKLGRITKAGDSYLRTLLVQGARSVLIGAEKRNDSFSRWVCMLVERRGYWRAVVAIAAKNARLCWASLHYGDDFRLYSAN

SEQ ID NO: 297229 - protein, 416 aa, unidentified
MKIIYPICCGVDVHKKTIVATIATTDSNNITSYQMKTFSTFNSDIYAFRDWLSAHSCFDVCMESTGKYWIPIFNILEESMNVILTHPKYVRAIKGKKTDKKDSKWIADLFKHDMVRSSFIPPKDIRSLRELGRYRAKLVSMKSSEKNRYQNCMTVSNISLASVLSDPFGKTASGIMEHLLSSKVFDSEYCKTLIKKSARKKTELIIESIQGYSIETDQRFKMNEALTHMRFLDNMILRTEAELFVRIQPYYNMIELISELPGISQLSAALIVSEIGTDMTIFESSKHLTSWAGLTPANNESAGKKKSVRISKAGQFLKPLLVQCALASIRHKKEPYFTNKYAQIKKRRGHKKAIIAIARMMLTSIYHMITTGEHFNPSDYEEFQNPMPKRVVMNEKSAFAFLEEQGYDISAITKVM

SEQ ID NO: 297230 - protein, 364 aa, unidentified
MVVVGTDAHKYSHTFVATAEVGRQLGEKTVKATTAGHATAIMWAREQFGLELIWGIEDCRNMSARLERDLLAAGQQVVRVPTKLMAQTRKSARSRGKSDPIDALAVARAVMRETDLPLATHDETSRELKLLTDRRDVLVAQRTSAINRLRWLVHELDPERAPAARSLDAAKHQQALRTWLDTQPGLVAELARAELTDIIRLTGEINTLAQRISARVHQVAPALLEIPGCAELTAAKIVGEAAGVTRFKSEAAFACHAAVAPIPVWSGNTAGQMRLSRSGNRQLNAALHRIALTQIRMTDSRGQAYYQRLQDAGKTKRAALRCLKRRLARTVFQALRTVHQPSSEHTQPAAACHRSYCSRSCLSG

SEQ ID NO: 297231 - protein, 494 aa, unidentified
MAMQKREDEVFPNAAGIDVGASSHWAAVPPHSTDAPVREFGAMTDDLNALADWLLSCCVDTVALESTGVYWIPVYEVLEQRGLAVWLVDARQVKYVPGRKSDVQDCQWLQRLMSYGLLRAAFRPGADVCVIRAVARQRQVLLTQQASWVQRMQKALIQMNIQLTEVISDVMGQTGQAIIRAIVADERDAKTLARQRHGRIKASEQEIVRALTGNWREEHLFVLGQALGMYDDIAAHLHECDVKLGQLLAERSAASVDLGKAPHAGSKTRAVFDARQQLANWAGVDLTRINGLGLDSVMKILSEIGTHLSGFANVKHFCSWLGLAPASKISGGKVLSARTKRSANRVRQALKMAAMSLSHADCALGAFYRRLCARMDKPRANTATAHKLARMVYFMLTRGEDYEAEKKSPMPAMYANTPPLIVGNTRHSPSYGCVLRLDWACFDAPLGYDQFILSLYVDEGPQRYEEQQRQRSVAALRRRAAALGFQLNPLEGNT

SEQ ID NO: 297232 - protein, 344 aa, unidentified
MNKLSRVGIDLAKNVFQLHGVDRQGKTICRRRLMRDKWLNVLLEQVETGCEIGMEACAGAHHWARQLRARGFTVKLIAPQFVKPYVKSNKNDANDAEAVCEAMSRPSMRFVAIKTVGQQDIQAAHRIRSELIGHRTAKANQIRGLVAEYGLIAPRELARLRAAVPDWLEDAENGLTSRFRGLLHGLWSDLKTLDRRVAELDHEINMIAQSDPMARRLQQLRGVGPMVATALVATVGNAEQFANGRQMAASLGLTPKQHSSGGKDRLLSISKRGDAHLRSILIHGARSVIRTAKLKDDRLSQWVTTLAERRHPNVAAVALANKTTRIAWAMLRHGMDYEPDYIAA

SEQ ID NO: 297233 - protein, 321 aa, unidentified
MNTTMPLGIDVSKAKLDCALWLGSKYRTKTFANTPEGFARLSEWLHQHGADQVHACMEATGIYWEAAALYLADAGQRVSVINPALAKAHGQSLGLRSKTDAVDAKLLADFCREKQPPAWTPPSGAERRLRALVLRHQSLVEMQTQEKNRCESLREEVRTSVETHLAWLAAELERIEQAIAKLLDDDDHLRGQRELLASIPGLGERTIAVLLAYGVSGERFQSARQFVAFAGLSPRLHESGSSVRGKPRLSKIGHAFLRRALYMPAMVTLYKTAWGQRFRQRLATHGKPPKLIIGAMMRKLAQVAFGVIKSGRPFNPAFHGA

SEQ ID NO: 297234 - protein, 321 aa, unidentified
MQQTEFYVGVDVSKATLRCAVHGRAGGQELANEGNAIRAWLAGLPAQALIATESTGRYHQVLVQLAHASGRTAFVLNARDVFFYAKALGARGKTDRTDAQVIARYLAEHHRSLKPWVPASALQARLHELLRCRAAVANKRSALGQALRGVSELGSQAAVMDRHFDELLHEIDARVVELLEQDRQLGLRCAALRTITGIGLLGSALLGALFSRIPFSSADAVVAYSGLDPRPNDSGAKTGRRRVSKRGSPQLRRQMYLSAFAASHSKALGPLYRSIKARGFEPTQALVILARKLLRVAWAVWKSGQPFDPSLVGGANACPRT

SEQ ID NO: 297235 - protein, 384 aa, unidentified
MTKKTTCKQQSTEKDGSLYLAFELSSSTWKLGFCIGLGERVHERKVAAGQTEKLLAEISSAKRRFGLSAASKVKSCYEAGRDGFWLHRYLTSQGIENVIVDSSSIEVNRRARRAKTDRLDVKKLVSMLIRHLGGERKVWSVVRVPSVEEEDHRQLHRELKELRKDRTRAINRVRGLLANQGVRFQMRRGASAEWVEGIRLWNSAGLGIGLKRRLRREWEHLQWIGKQILEVEGERRKALREKDEKAGEHIEKIKRLAQLRAIGIGGAWVLVEEFFGWREFNNRRQVAGLAGLTGTPHDSGEAKREQGISKAGNRYVRGVMVELAWGWLRYQPRSELTRWYKRRFGNGSSRVRKIGIVAVARRLLIDLWRYVEFGVLPEGARMKV

SEQ ID NO: 297236 - protein, 348 aa, unidentified
MESVAGLDVGVKKSALCVVLRDAKSIKTLSRHRTATSPSAIGDWLGSQGVTRVGLEAGAQSSWLARELEKHGLSVTVMETRRQRAFGSYSKVKTDERDARLIGEALAAGLYTKVHVRSAWSQEVRALLGARLQLKRQVQQTRQFVRGHLRAAGIELGRASGKKWLVAAEAAVAERGGILGLSLTAMLSACRAVGEQVVVLDKEIRRLARQDGPCRRMMTAPGAGLLSSLALRASLDNAERFERSAEVGPYLGLTPSRWQSGALDRRGGITKQGDGLVRAYLYEAAVSLLERQKRDCPLRRWGLEQQARLGKRRTRVAVARKLAVLMHKLWRSGETFDWNRGMEMPKTH

SEQ ID NO: 297237 - protein, 440 aa, unidentified
MSSLPVLDPHAAFVDVGSEQMYVSIAGGPPEVFGAVTSELRALRDWLLARNVRSVAMEATGVYWLPLYGVLEEAGLEVLMVNGRQTRNLPGRKTDMKDCQWGATLHAHGLLRAGFVPPAHIRRLQDYLRLRADHISSAASTVQQMQKALERMNIKLHDVISSLTGASGLAVVRAILSGERDPERLLDLCDIQIRRVKADRVKESLRGTWAEEHLFALRQSLAIWEHYQNLIAECDRQIAALLPATDGNDGPPKLSVKPPSRKRPGVNAPKIPKLRQILAQMCGGQDLTRLPAHTEYSVLQIVGEVGTDLTKWNTEKHFTAWMGLAPGSHQSGKRRGSVKRNRNRAGRLFGVMARTLARSKDIALGGFYRRMAARHGGLVANIALARKLATLFWRVMVKGIDYVEHGLAHYEAKVMETKQRSLRRLAAQLGQKLVPVTMAT

SEQ ID NO: 297238 - protein, 351 aa, unidentified
MQLGVDTHKRTHVLVTLDDEGRHLGTRTIPNTPAGWADALAWAREQQQQHRRWGIENGGSLGKGFAQFLLAQGEVAVQEVRPQRTAQYRRRGRTQDKTDQADALAIARLLLAEGAHLPAIQRDDVSTALRLLSDHRDNLPVDRTRLINQLHAQMLQINPGYQERSGALTARRGLRYCRDLTLPEADGVTQTRLLIVRQLVGQILRLEEEITTVTTALSERVRASRTPILALCGVGEVIAARLLGELGTVPRVPSAAALAALAGIAPVAVSSGGRGGFRLNRGGNRQRNRVIHLMALSQRRCDPRAQAYYAKKRAEGKTRRAAMRCLKRRLVDVLYRCFTRDADAQPVAVAA

SEQ ID NO: 297239 - protein, 340 aa, unidentified
MEYKRIAIDTSKAVFTVHGIDAHDRPVLRRNLKRAEFEGLFAKLAPTEVALEACGSSHHWARFLAQHGHQVRLIPPQYVKPFVKRGKNDSADAEAICEAAGRPGMHFVPVKSAARQAAAMPLSVREMLVRQRTQLVNALRGHSSEFGIIAGRGTHQVESLLQQIAASDAVPQRAREMLALLGQQIAQVDTTLATMEKRLVAEHRADPQSKLLAGQPGIGPISAQTLVTKVDPTQFKSGRHFAAWLGLTPKQRSTGGKQRLGGISRAGNERLRQLFVVGAMAVIRQARPGSKTASPWLLQLLERRPRKLAAVALANKMARTAWAMMTNGEAWRMPKASVAA

SEQ ID NO: 297240 - protein, 419 aa, unidentified
MKVVYPTCCGVDVHKSFFVATIIQTEGITPRYTKKRFSTFNNDILRFKQWLIENDCYDVCMESTGKYWVPVYNLLEDKINVVVASPKWVRAVKGNKDDTKDSKWIGNLFRLGLVPGSFIPPKPIRILREYTRYRYKLVSCKSSEKNRYQNSFTVCNIALDSVVSDMFGKSASLITDYLVKTDSFDPEHCRTLLYRSLKKKYNAVVESIVGYEIAPAQKERMIMVKAHLEYIEKSLEMMDEGINRIVEPYENHISLLSSIPGVDRRTAITIIAEIGTDINQFSNSKRLCCWAGLTPGNNESAGKKKSVRITRAGVYLKPALVQAAHAAVKSKDSPYYKNKYERISKRRGKKRAIIAIARMILTAVYHMFKTGEFWNPVDLFKVDLPPILLEKQKQKAIQNAIKLLASQGMTVVTDPPPAA

SEQ ID NO: 297241 - protein, 342 aa, unidentified
MAPQMSVLGIAIAKLVCHVVGMDDTGAVVLRKRIARSEWLAFIANVPPLHMGLEACGSAHYWARCVREHGHDVRLIAPQFIKAYVKSPKNDARDAEAICEAVTRPTMRFVPIKRVEQQDLQALHRIRERLIRARTALVNELRGLLNEYGIILPQSMTKFRALLVGKLQNEQAKLTTLSAELFWHLYDEFLAVEKRLTYDDEKLATIGRAHPACRRLQTIPGIGPLSATALIAAIGDVTQFRNGRQPAAWLGLGPREHSTGGKPRLFGISKRGNRSLRTLLVHGARATLRWVDTKSDDRSRWLKALVARRGRNRAAVALANKNARIAWALRARDQEYHVQVTA

SEQ ID NO: 297242 - protein, 367 aa, unidentified
MKQSSKIFVGMDVHKDSIDITLAEQGGEVRRFGEVRGDRAALLKAVRKLTSRGCELVFVYEAGPCGFWIQRDITALGHPCWVVSPSLIPQRPGNHVKTDRRDSENLARLARAGELTPVHVPDVRDEAIRDLVRARDDAVIAQRRARQQLKALLLRNDIRYVGKTSWTSAHLRWLSELKLPQPAQQIAFQEYVDAITVATGRIERFEQAMRDEVPTWRFAPAVAALQAMRGIQFVHAMTLVAELGDLTRFASPRQLMAYLGLVPSEDSSGPRRRQGSITKAGNTYARRALVEAAWAYRHPARLTRIIALRQDALPKQACDIAWKAQLRLCAKYRRLRARRVLETKIIVALARELSGFVWAIGQHVKPQ

SEQ ID NO: 297243 - protein, 342 aa, unidentified
MVDISRMIVGVDIAKRVFQLYWVEMDTVEEMNVRLSRAKFLNHFANRAPCLVAMEACGGSQHWARRLLSYGHEVRILPAKLVRGFVRGNKNDAHDARAIWTAVQQPGVRTVAVKTEEQQAVLALHRMRQQLVKFRTAQINGLRGLLAEYGEVMPKGRAGLKRDLPGALGRVSERLPGMATETLREQWARVQQLDEEIARIERRLGFWHRSNDASRRIAEIPGVGVLSATAAVAAMGDPKAFKSGREFAAWLGLVPRHVGTGGRVQMLGISKRGDTYLRTLLIHGARSVFTNSKAPPAWARRVAERRPANVATVALANKTARIIWALLAHDRTYQRDLVSQPG

SEQ ID NO: 297244 - protein, 337 aa, unidentified
MEYFAGLDVSMAETQICVMGRNGAVIHKAKVPSTPADIAAELAQLPTCRRIVFETGRMAPMLYHGLRQLGLPVICVESRQAYQALKLLATHKTDHNDARGLAHLARTGFFKPVHVKSLPAHAVRSLIIARKKLVGQRVTLENQIRGLAVVFGVRLPRALSSTFIRQALQASEGIPGLSAAMQGLVAARTAVLAAIVAIDGDIRRMVRASDACRRLMSIPGVGQLTALAFTAAVDNPGRFRRSRDIGAYLGLVPRRHQSGEIDYSGSISKCGDRRLRTLLYEAANVMLTRYKGALKLKEWAFAVAKRSTMRKARIALARRLAIIMHAMLRHGTEFKAA

SEQ ID NO: 297245 - protein, 424 aa, unidentified
MENTAARKRKQVPEGYLIIGVDPHKKRHATVAITQDFTTRDKFKFDNTREGLETMLDRAKVEMVKSGCRGVMFAIETGGHYWRNVAYFLDEQGIPFRFINQFTLKRRREGKDLNRRKNDYRDSEVAAQLLCTGEFTESKLPKGVYAELRTAHNAYRRLVKERTRITNLVKGLLDGLFPEFTQVFKDPCALTAHSVLSICPIPRVIAGMTEDEFEATIEAQHKGRRLMRKKLRALHHTAEASIGIAAGAQSLSVEISFLMEKLNLIGRHTGIIERTFIRLVDATDEGKYLLSIRGLNYIAVAGLLAELGCFKAYRSAKQMIKMAGSNPTESESAGKKRSRTPMSKQGRPVLRYCAWTSVIPMLRFNSDFRAWAKQRRERPVHANPLGGREVVGAALNRLLRLAFAMVKNQTYYQVSKSELTLVAV

SEQ ID NO: 297246 - protein, 340 aa, unidentified
MNIVFLGIDLAKNVFQLCGLNQAGKPVYTKRTGRNELLQTLANIPACLIGIEASTGAFYWQREFEKLGHKVKVISPQYVKPFVRGQKNDGNDAQAIAVALMQPTMQFVPPKSPEQQDIQALHRARQRIVNHRTATVCQIRGLLLDRGIPIGSAVSRARRAIPLILEDAENGLSSCMRRTIAELYDLFNDLERRIHFFDKEIETVFRQSEACQRIAKVKGIGPKTATAVVAAIGKGTEFKNGRHFAAWLGLVPRQHSSGDRLVLMNMTKKGDKHLRTLFIHGARAVVRVATNNNDGYMNQWVNQLKERRGFNKTTVAVANKNARIIWSMLRNETEYQIVGS

SEQ ID NO: 297247 - protein, 348 aa, unidentified
MTLTTIGLDVAKLVFQVHGVDENSRAALKRKLHRHEVVTFFEELPRCTVFLEACGASHYWARLLTALGHEVKLIAPEAVKPFAKKGKKNDAVDAAALCVAGSRPEIQFVPIKSVAQQAVLALHTARSLLVKQQTMLANAIRGLASEFGLVVPQGLHRLEELMVQVTAEASFPAVGRQALIVLHAQLQAAAERIVMLEEQIVVHARQNASARRLATIPGIGPITASLIAATVGDNITAFTSARHFAAWLGLVPRQHSTGGKPRLGGITKAGNTEIRRLLVLGATSMVRRAETWNSAAGIWLRCVLARRPVRLTTVALANKMARIAWALLTRNDVYRAQGRSKVAAGAAA

SEQ ID NO: 297248 - protein, 425 aa, unidentified
MNFNTNEKINQVSENTLVIGIDIAKHKHFACAIDDRGRVLQKSFPITQSRIGFEGFYERLLALKTTHEKQEILVGFEPTGHYWMNLAAFLTSYGIPFVMVNPMHVNRSKELDDNLQTKNDQKDALVIARLMRDGRFSYPRHLEGIEAELRNGATLRSKIQEDLNALQNRMIRWLDRFFPEFTQVFKSFGKMAYAVLEKTPLPTDIVGKSPEELLFLYRQVDGLKSPQLPKAKQLVEVAESSIGLTEGIVMAKFEIATLLSQHKLMQAQLDDLTSQLAELAKQMTDYDYLASVPGIGDVTIVDLLSEIGSLTQYTHPRQLIKLAGLTLRENSSGQQKGQKRISKRGRRKLRALLFRVMMPLILHNPAFKQLHEYYTTRTVNPLRKKQSIVVLCGKLLKILHALCKKKTMFNEQQMMNDFASLQTAA

SEQ ID NO: 297249 - protein, 416 aa, unidentified
MKTEPKQTFERYIAIDSHKFYVVVGGINDQLDHTLPQRRLSLEKFRQWAPGHLRPTDAVVIEASTNTWVLYDLVAPLVGKIVVVHPPKVKLIASAAIKTDKIDVFKLAKLLLIGWLPEVWVPPQHVRDLRALISHRWRLVCTRTATKNRLHSVLQRNAIRAPQKQPFTPKHRGWWAELEVSTTEQLRVRQDLENLDHLTRQIAEIDAELEQLSTSEQWGQVVPYVMQLPGFGLTITMTVLAAIGDISRFPKDKKLVGYAGLGTRVHDSGLTHRKGHITKAGRKDLRWAAVEAAWSAVRYDSYWKAQFQALKRRMHPNQAIVAIARKLLIALWHVLTKKQAYRQGTEEQVVRKMIRWSWQMNEQARLGLTRQQFARYTLMHLGVGNEITRIVYGGYPRRIASVDEVLALRPELRPQE

SEQ ID NO: 297250 - protein, 308 aa, unidentified
MGVFVGIDVAKATLAVALRPGGERFEVTNDAAGHRALVQRLQGLSVARIVLEATGGYERAVLATLAERWPTVRVPPHRARAFANAMGRLAKTDPIDAALLAHLAEVVDIPPTVAASPSQQLLQALVQRRGQLVQQRDDERRRLQQAAQAWVAASVRRQLRHLASEIARLEKAIAQAMAETDACIAQQLASVPGIGPVTCATLIAFLPELGQLGRREIAALVGVAPYNLDSGQKQGKRRIRGGRAQVRRVLYMATWSAIRTQADLKARYRALRERGKCAKVALVACMRVLLVRLNAMVRDSVPWQMPAG

SEQ ID NO: 297251 - protein, 398 aa, unidentified
MINGHDEIAVFLGLDVGKSGHHAVAQDRSGKKLLDRALPNDEAKLRELYGRMKAHGPVLLVVDQPATIGALPVAVALDEGVTVAYLPGLAMRRIADLHPGSAKTDARDARVIADAARTMPHTLRALKVDDETIAELTVLSGFDDDLAGQITATSNRIRGLLTQIHPALERVLGPHMDHPAVLDLIETWPTPAALTTAGKTRVRTRLLKKAPRLGGRLTEEIFAALAAQTVVVTGTNAAGIVLPRLATQLAALRQQRAEVAEQVEELVAAHPLSKVLTTMPGVGVRTCARILTEVVGKDFPTAGHLASYAGLAPVTRRSGTSIRGEHPPRGGNKILKRALFLSAFAALSDPVSRAYYDRKRTQQKKHNAALIALARRRTDVLYAMLRDNKPYAQPAAAA

SEQ ID NO: 297252 - protein, 342 aa, unidentified
MTVIIGIDPHKASHMAVAIDGEERPLGELAVSADQKQTQCLLAWAELLGAERTWAIESAGGLGKLLSQELVAAGECVVDVPPTLSARVRLLGSSKTTKNDTNDARSTAIAGLRHCGLRTVRRDGHTTVLRLLVGRYDDLVAARTQAACRLHAVLRELVAGGAPRRLSADHATKLLRTVRPVEAVEIERKRLAVELLGDVRRLDRDLVAIKVRIADAVGESNTTLLEVHGVGPIVAGLILAHVGDPARFTTRARFAAYNGTAPIEASSGPRVRHRLNPRGNRKLNHAMHLIAVTQIAHDTPGRVYYDRKIAEGKTKKEALRALKRRISDAVWRQLQLDLAANT

SEQ ID NO: 297253 - protein, 435 aa, unidentified
MIAAIIERCAGIDVGKKFIAVCVMTGPADGEARSETRIFGTTVAELKQARSWITEEQCTHVMLESTGSYWKPIFNILEGQVKVALANPQEVKARKGHKTDQKDAWWLAHLLRHGMVTPSFIPPQPQRELRDLTRRRRKLIQTASAEKNRISKVLEDANIKLGNVLSDVFGVSGQLMLEALLQGKTPEMTELADFARGSAKKKIPALVAALQEHQMREHHRQMIRFSVEHMRFIEEQLVDLDQLIRAKIAEAGYTKQWELLRTLPAVRENAAVVLAEMGPDPAQFPDEKHLGSWSGLCPGNNRSAGRNKSSHTNKGNRWLREALMESAWAVSMMKTGHLRDKFWRIAAKGPPQRSRPIAVVAVAHDLLKLAYFVMQRGTPYEERRGQPMTEEQKQRLIRHHIRRLGKLGVPVRSSRPSAAPTHSKSKTSPQTASQH

SEQ ID NO: 297254 - protein, 397 aa, unidentified
MIAVGIDVSKSKSTVAILNGDGSIRAKPFDVHHVADELQALVDYIKRTSEPPTILMEPTSHYHYPLLKAFTEAELPVCLINPYQMKKYGDTELRKAKTDKRDSLRIAQYALEKSYSLIPYTPQDQKYEDLRFLSRQYSQRISTLTVAKVQLLSLLDETMPGITTILPLKSRDPDNCVLLRFIKRFKSFDVIRKMGKTRFLDSYQVLVKKTKDRFAGSKGLAIYELVLNSVTTRGENPLSAMTQDQCVDLVSTSQKAADEINLQMRIIAETMPEYKVLRSMAGVGDRLGPIILGEIGDIRRFHSGKALNAYAGNDAPPYQSGQFESRNRHISKRGNPTLRKACFEVMQALKLTKPQDDPVYLFLLKKEQEGKPYNVAKMAAVNKFLRIYYARAMELYK

SEQ ID NO: 297255 - protein, 324 aa, unidentified
MNCTPTLGADMALRTFTVALFFDAQRVLKKEFSNSPSGFKALLCWLRQHFVGQLRVGIECTNVYGEALAEALHAAGCQVHLLNPERVACYARCRGRRNKTDPADAVTIAAFVAAHDDLMVWQPPTPEQKSLRSLTRARYQLVQTCIALGNQLRTASGPGRAHLEQAQRALRLQLAKIEKDIAVFIRSLPALREAARRLMTCKGVGLVTAAALLAELPPIGKDTDPRTICSWVGLTPRRRQSGTVELPARIGRAGNTYLRDALYMPALVAKRWNPCLAAFAARLKANGKTNPAILGAISHKMLRILVGMLRSNTNFDPNWSYQKT

SEQ ID NO: 297256 - protein, 393 aa, unidentified
MSLIEDCAGLAGAEPQTWGTDLMSNMVFVGLDVHKATIAVAVAEGARGGEIRELGNFLNHPDHIKKLVERLAKGGRTLSFCYEAGPCGYGLYRQLIGLGHECVVVAPSLIPMKPGDRVKTDRRDAVMLAKLHRAGELTAVWVPDDAHEAMRDLIRARSTAVRVLVKARQHLQGFLLRHGRIYAAGKKGWTLAYRRWLATVRFDHSAQQVVLQDYINAVTNGEERVERLTQQIADLAQTWSQAPVVAALQAMRGVAFIVAVTVVAEVGDFTRFANPRQLMAYLGLVPSEHSSGSTVRRAGITKAGNALARRALIEGAWTYRMQPRVSRKLHDRIEGLPQTVRDIAWKAQVRLCTRYRRLAAKGKPKVVCTTAIAREMLGFIWAIAQTVQAPRAI

SEQ ID NO: 297257 - protein, 340 aa, unidentified
MPLYGGIDLHANNSVVVLLNAQDQVIYQKRLPNDLPTILEALAPHPGEIEGLVVESTYNWYWLVDGLLEAGYQVHLANPAAIQQYSGLKYSDDHSDARWLAHLLRLGVLPKGYIYPKAERAVRDLLRKRAHLVRQHTANVLSVQNIMVRNTGMRLSVKRIRELTKQELEGLLSEVDQVLAVTSSLAVLDCLSQQIKTLEQTVHKRLKHTPAYEQLLTVDGIGTILAQTITLESGDMGRFPTVGNYASYCRCVNSTKISNGKRKGQGNVKNGNPYLGWAYMEAAQFALRFNARAQRFYQRKLAKSNNNTILARKTVAHKLARACYYIMRDLVPFDAMKAFG

SEQ ID NO: 297258 - protein, 410 aa, unidentified
MQTLVERGCGLDVHQATVVACLLIILKNGKAQKQIRTFGTTTRELISLREWLLSEGCTHVAMESTGVYWKPIYAILEGAFEIVVANAQHVKKVPGRKTDVKDAEWIADLLCHGLLRSSFVPPKPIRELRDLTRYRRKLVESRSAERNRLLKLLETANIKLASVATDVFGVSGQLMLHALVRGSAPPQQMAELAKGLLRKKIPELELALEGKVEEHHRFLLSVQLRRLQAVEEDLRVLEQRIQEKLKPYTAELTLLDEIPGVDGTLAAGIIAEMGVDMSVFGSVSQLASWAGICPGNNESGGKRKSSRIPKGNVYLKTALVEAANAAAKAKGTYLRDKFYRLKARRGYKRAAVAVAHKILVAIYHMFSHRVCYNELGDLYLDKLNKHHLTRNLVHRLQRLGYIVTLEQKAA

SEQ ID NO: 297259 - protein, 381 aa, unidentified
MTTTATHNAHDTTPGRALFVAFELSEKTWKLGFTTGHGQKPRERSIAARNQTRVLQEVAQAKRRFGRPETAPVFSCYEAGREGFWLHRFLEAQGIPNHGVDSSSIEVNRRKRRAKSDALDVRKLLSMLMRYAHGERDVWRVVRVPSVEAEDQRHLHRDLETLKQERASTTTRIKGLLSSQGVRLTSVNKLPEQLEALRLWDGSPLPSGLRRRVLRVYAHHQFLSEQIAALEAERRARLQSAHDASIEKVHQLMHLRGIGINGAWLLVMEFFGWRALKPRREVGGLAGLTPTPYQSGESARAQGITKSGNRHVRWMTTELAWSWLRYQPESALSCWFRERFGGGGKRMRRIGIVAVARKLLIALWRFLETGVIPQGAELKAA

SEQ ID NO: 297260 - protein, 428 aa, unidentified
MLMSLFALFERRYHMDFEVKHLICAGLDVHKKTVVAAVCITDPVTLEATYKVKSFSTNNSQIAAMRDWLLSYNCLHVCMESTGKYWIPVFNILEKSCFVTLAHPKYTKPQKGNKTDRKDAKWICDLFMCDMIKPRFIPSPEIRQLRDLIRYRVKLTNMLTGEKNRAQNCLTVSNLKLDDVFSDVFGKSARSITNYILEHPGEPFDVSPFVDPRCKTPVSEIQAAVNGAISPEQAVKLRQCLAHIDELEAHRKEIESEIFQIAEPFSAVLDLLYTLPGLDKNPMTAIAILSEIGPDMSVFPSSKHLVSWAGCCPRNDQSCQKVKSRRISRAGSYLKPLLVQVANALIKSKKHPEFKERYHRIKSRRGHKKAIIAVCKMLLTAIWNMLSKLEPYNPEGFLEHRPVKQEKILTVSQALELLRLRGYTITNQ

SEQ ID NO: 297261 - protein, 314 aa, unidentified
MVVERFVGIDVSTETLDVAVVPDGLTMTVMNNEKGHEELIKELRSVPPTLVVMEATGGLEAPVAACLAEDGIGVAIVNPRQVRDFAKAAGRLAKTDRIDAVVLAEYGLKMRPEARPLADEQSKSLSALLRRRQQLMKMLVAERNRMTRAHSDVKPRLQVHIDWLREEIRDLDKDLRREVRSSPMWHDKGDILESVPGVGPLLTATLLADMPELGTLNRKEIAALVGVAPLNRDSGHRRGRRSCWGGRAGVRRMLYMATLSATRHNPVIRSFYNRLLEAGKPFKVAQTACMRKLITILNAMARDMQPWHHVEATS

SEQ ID NO: 297262 - protein, 482 aa, unidentified
MKKKNIYVNQSQELLTLFEEAGNSAKIMCVPIDYAKKDHVVMFCNGHGDILRKPFSVKNNPEGVKYITEQVSRSCRHHKINQNHVFFGGEDVGYYAENFASTLRSGGWLVAGVNAHDAKKQRANLQASTDRLDLMGIATMLLNRRANCSPAQSGIYRNLRTLVRHRRRLVVMTTEVRNRIHAIADRLFPGFLDERKSGITPFSKSSLYLMENRFSASQIRRRRRSTLIEALRGLGTPKPDCAVAKLEEYAQQVLKTPDEYVSTLQLSMAQHVKHYRCLQENIEQLERETALWLAQTQGAFLTSVRGIGIVLAAGVTAEIGDPFEQKPLNNLVSYSGIIPRVIQTGGPEGEIYTGKVAKRSNRILKDYVVQSASHLGLHGPEDLMIDHKRRDAAGQHADFGIARRYLRMAMCLMRTSQVYLPPRLRKPGIKPEERAGYYLMTWPYLRDKWQKLGALEAAFSEDRPLGRWRNMVQEFYKIKLTL

SEQ ID NO: 297263 - protein, 350 aa, unidentified
MNYAQINQRYLCGIDLHANSMYLKILDREGRVIYKRNMPNNFAQFKQILTPFLPDIAVGVESTFNYYWLYDGCVEAGVPFYLGHAAYMKAIAGNKQKNDPLDAETIAHLMRSNLFPEAYPYPQEMRAVRDLLRRRHRLVRHRSEAYTHVQLLLRQQGICNFRGKDVKSVSGKQQILKSITDPDVYYLVNSDMLLIDQLDNLLGEIEKQIKGRAYHHNGMDYNLLKSVTGVGDMLALSILYETHDINRFPRTQNYSSYCRVIRVQRTSAGKNKYGKNQKMGNPYLKWAYGQIITHARQSSDQINAYYQKLEAKRCAKLARGIMSHKFAVAVYHMLKKKVAFDENRFLKVAS

SEQ ID NO: 297264 - protein, 375 aa, unidentified
MNNNNTLYVGLDVHKESITVAYAINSEPVELMGKIGTSPTDIQNLCKRLRSKSSQVSIVYEAGPCGYGLYRRLVKSGFDCMVCAPSLIPKKPGERVKTDRRDAIRLVRSLRAGELSAVYVPGIEDEAFRDLARAWASARDDLRHARQRLKSFLLVHGVHYVGRADWGPAHRRWLSKYSFESPWRQLAFDEHRRTIEDRQAQCERLESALKEAVTEWRLYPVVEALQAMRGIQFITAVGLISELGDLTRFEHPRQLMSWFGITPSEYSSGGSRHQGSITKAGNSYARKLLVEAAWSYRHPARISPAIQKRQENLPRPVIDRAWDAQLRLCKRYRKLQAKGKNVNITIVAVARELAGFIWDMGRIAMSVAQQPQCHK

SEQ ID NO: 297265 - protein, 410 aa, unidentified
MDTLIERCAGLDVHKDTVVACVRVPARGGGREQSIQTFGTTTAQLLALRDWLVAQGVTRVGMESTGVYWKPVYYVLEDALECLLLNARHLRNVPGRKTDVADAAWICQLVEHGLVRPSFVPPKPIRELRNLTRYRKAQIEERTREAQRLDKVLQDAGIKLSSVASDVLGVSGRAMLRALIAGTRDPETLAELARGTLRRKIPALRQALHGRFGPHHALLVGTILAKLEFLDEALGHLSAEIEQVIAPFAAEAALLRTIPGVDRRTAEAVVAEIGVDMSRFRAAGRLASWAGWCPGNNESAGRHGSGKTRKGSKWLHTYLTEAAKAAARTKGTYLGAQYARLRGRRGSARATVAVGHSILVAAYHILDRHEPYRELGPDYFRRRHSREHQTRRLVRQIEALGYHIRLEEVA

SEQ ID NO: 297266 - protein, 376 aa, unidentified
MEKYNVYVGMDVHARSVTAQALNTDTGEIRKKRFGGGYGAAEIASWVNSLGRRVYCAYESGCTGVWLARDLRDLGIDCDVIAVSTLARSTKDKQEKCDKLDARALLREIANPLTTHSCVYIPTAKAEGRRDLCRIYTQTKDNAKRAKQELASFLCRHGYVWNEKTKTGKLRKPSGRTYEAWLSSIAFDDALTQEAFCILRCKKDVAQNELDQMRSVMDRLAKEEENAPFVDALCEIKGIDALNAMVVVSEFCDFERFASGRKVSSWLGTVPKNNSSGEKDAHGSITKAGNKYLRRTLTEGVCAISAWKRVPEKKRSDPPLATTHLARRANKRMMDRYHHLADGLGKNPNKAKTAIVNELVRWCWVIGRAVQEEMTR

SEQ ID NO: 297267 - protein, 361 aa, unidentified
MTKHIFIGIDLGDKNSVTRMAVDREKSERFTFINSRQGRARLFREAKRRSEQAGGAKIVMAYEASSCGFVLSDEAKAAGIECWVLAPTKMEKSVEQRKHKNDDRDADDVVEKLRGHVLAGNRLPTVWVPDQQTRDDRELIRMRLELVEKQTQIKSQVQMLLKRQGLEKPAGLGSGWTIGYRRWLQALSESESLGWGSRQALSSLLRQLTFMEAEIERMQKPLEQLANEPRHKPIIEELTQECGVGLVTAMVYRTEIGYAGRFRRGRQVGKFAGLTPTSHESGQQDDRKGHISRQGPPRLRKILCQASWVHIRHDPQGRRSYQKLVLRNPKKKKIALVAVMRRLAVRLWHRMRKVELQLAQG

SEQ ID NO: 297268 - protein, 278 aa, unidentified
MSEKEAILGIDISKDKFSAALLKGEKKSQVKEFSNNLEGFEQLKQWLEQNQLEKVHACLEATSTYGHSVATYLHGLGHVVSIVNPARIKGFAQSRLSRTKNDQADATTIARFCAALKPQAWTPPSPEMAQLQSYSRRLRALEQMATQEKNRLKTTVDESLIEDIEAHLVFLETQIDNVKKRQKELLNEYSSLKSQADLLTSIVGIGEPTAMTILAEIGDINQFSSARQLAAFAGLTPQEHQSGTSVKGKTRLCNPHSVHKKRTKKIRKVIMTKDNTDK

SEQ ID NO: 297269 - protein, 391 aa, unidentified
MTILVGIDVAKDKHDCFFMNSEGEVLAKPFTIFNNKEGFDFLYEKIQSVSSSDNIKVGLEATGHYSYNIIGFLLNKGLATFILNPLHTNLYRKSLSLRKTKTDKIDSKTIAMMLLSDVSLKSYSDISYHNEDLKSLTRYRFSKVEERAKLKTSLSRLAQILFPELEKLVPTLHMTSIYQLLEEFPSASAIASVHLTRLTNLLSKASKGHYDRETAIKIRDAAKNSIGSNMPAKSLELKHTIKLIRALTIDIGEIEAEISKMMDKIASPITTIPGIGRNIGAMIISEIGDFSRFSSPDKILAYAGFSPSIYQSGKLDNCYAHMEKRASRYLRYALFHAAKLVCHWDKTFADYLAKKRAEGKHYYVAISHAVKKLVRVIFHLEKTKQAFLKAS

SEQ ID NO: 297270 - protein, 318 aa, unidentified
MSHGYDKFVGIDVSKDALDVHGLPDGSPSRFDNTAAGRAKLLSLLPPAGACLSVVEATGGYERDLVAEAVTAGHHIAVVNPRQVRDFAKALGLLAKTDRIDASVIARFAETTRPVPKGYDERQEQLRELIVRRRQLLDHRTAEKNRSEMAHSSLVRKSVLKLIETLNKDIQRIEKAILQLVESNDDWRERFEKLKGVPGVGGQTAATLMAELPELGHLNRQQVAALVGVAPFNRDSGQFRGRRAIWGGRQSVRNALYMAALSAKKHNPVIREFAARLMAKGKPPKLVLTACMRKLLIILNAMLQSGDSWSPRVATLTP

SEQ ID NO: 297271 - protein, 360 aa, unidentified
MITTEDGHMLTTVGLDLGDKTIQACFLDHHGDIVEESRLKATDASLRRRFSGEPHYRVVLEAGLHSPWISRLLLDLGHEVYVANPRRLRAIYENENKSDRVDAQYLARIGRLDTALLYPLRHRSLETQADLAVLRSRAALVRARASLVNHLRGTVKSIGGRLPRCETKYVAERAALHLPPEVVPALTPILEAVAELTAHIAAYDKQIEQMAKERYPETELLRQVPGVGAITATTFVLTVEDPGRFPRARAVGSYLGLRPRRAESGAQNPQMHITKAGDKHLRSLLVECAHHILGRLGPDCDLKRWGLALAERGGKAAKKRAVIAVARKLSVLLLRLWVTGEVYEPLRYPGRRGDAAALVT

SEQ ID NO: 297272 - protein, 373 aa, unidentified
MNRIYIGVDFHARQQTICYLTTETGELVTTALKHEPKTAVRTFYEQFSGQVIVGLEASGYSPWFERLLEELGHEVWLGHATEIRRRARWRQQNDRRDAELILDLMLHNEFPRLHRPTLQSREVMRMLRYRQKLIKMRTMSKNSLQSLALQSGIARRAHLFTRAGKAELDAAVMSAAMEWQRAHWWQLLESLNQQVLEAMTWLKAASQNDVSIARLRTHPGIGLLTALCLVHTLQPVARFRTTRKVAAYAGFDPLERSSAERKQFLGISKAGSRVLRYLLVEAANIAVRKDEDLKHFYQRLAHRRGRPKAKVAAARKLLIRAYIMMRDEIDYAEFRRRAVAARLARLRQGPPIPAALIGQPASTARQEPLPRAK

SEQ ID NO: 297273 - protein, 312 aa, unidentified
MDAIVVGIDVAKDRLDVCVRPSGESFVTARNGAGIEDLAERLKKLAPGVVAIEATGGFETIVAAGLAAAALPVVVVNPAQVRAFAVALGRRAKTDPIDAAVIAHFVEATKAAPRPLPDETTRLLADLIARRRQIVEMMAAEGQREQRLTNKRLRRSIARLRKALEKELAELDGEIDDHVRGSPVWAAKEDLLASVPGVGPVVARTLIAELPELGSLDRRKVAALVGLAPWTRQSGQWRGKSFIGGGRKSVRNVLFMAAMVAARHNPVLKRFRDRLIDAGKPKLVAIIAVARKLLIILNAILRDKRPWQPKNA

SEQ ID NO: 297274 - protein, 403 aa, unidentified
MGQVFAGLDWASRTHAVCVIDERGAVCKQWEVAHDADGLRALLRQLRELAVQHIAIERPSGLLVDALVEAGLEVVPIHPNAVKASRPRYRSHGGKSDASDAYLLADLLRTDGHRFKPMAAQSDAIRALRALVRGRDDLVATRVQLANQLRSLLQSYWAGAAEVFADVDSPIALAFIQRYPTPESAARLGPKRLAAFCAQHAYCGRRSAEELLQRLRSAPTAGLGELESDAKGELTASLARTLSTLVEQIKLLSARIEHHVADSEDGRLLMSFPRAGRICAAQLLAEIGSVRERFDSDEHLAAEAGVAPVTYASGKHKSVVFRWACNHRLRRALTCLADNSRHASQWAAQLYAKARDRGCDHPHAVRILARAWLRVIWRAWIDRKPYDPALHGGLQTLLKTAGG

SEQ ID NO: 297275 - protein, 347 aa, unidentified
MRSFIMNIKIVGIDLAKNVFQICVLLKDNTIQRNYKVSRAKFLHSIRQLPVGTLIAMEACGTSHHWARLFQELGHKVKLIPAQHVKPFVTNQKNDANDALAICEAAFRPGIHYVPVKSIEQQDIKALRCVRTRLVQNRTATVNQIRSLAAEYGVTFPLGRVKLYGKLQDVLEDATNGFSFVLRELLNRLGDDLKFLDMSVDSIDCEIKALCKLHPRYKALLSIPGFGPIVAASFMSEVGSGEQLKNGRQVSAWCGLVPTQSSSGGKIRMGNITKNGCSELRVLLIHGARAVSRFAAKRDDTLGKWFNSLSLRRGKNKAIVALANKLARIAWHILTGKNEFIASKAFA

SEQ ID NO: 297276 - protein, 361 aa, unidentified
MAKVRSWAGLDVHARSVLAVTLDAESGELRSARLSGETAKVVEFLAKLPGPTRAAYEAGPTGYGLARALIAAGIGCVVAAPGKIERPAQDKLKTDQRDAERVLRLLMIDALHPVRVPTVEEEALRDLIRAREDVRGDLMRARQRLSKLLLRHDILYEDSASTWTQRHRSWLRAQQLGGGAQATLLDYLGAIDTLELRRGTLEKTIGELVPASSYAQAVARLRCLRGIDTLSAAGLCAEIGDFTRFERPGKLMSYVGLVPSENSSGESRRQGPITKTGSRHARRLLVEASWHYRKTPSRGITLQRRQDGQPANIIAISWQAQQRLHRVWQRLAEQRGKRRTIVAVAVARELTGFCWALARAD

SEQ ID NO: 297277 - protein, 346 aa, unidentified
MEQIIRIGIDTSKHVFQLHGVNAAEEPVLRKKLRRKEVAALFEKLSPTVVAIEACGGSHHWARLLQSFGHEVKLIPPQYVKPYVKRGKNDAADAEALCEAMSRPTMRFVPVKTADNQAALMLVGLRDRLIRNRAQLANAIRGYAAEYGLIAAKGMCKIEPLLERIAADKMLPDLARELFALHAKEYAQLQTHLKDVDAKLMAWHRADECSCRLAQIPGVGPIGASLLVMKTPAPGTFRSARHFAAWLGLTPKDHSTAGRVRLGVITRAGDETLRSVLVAGATAVIRHIRRGRGAVSPWLVGLLKRKPPKLAAVALANKIARIAWKLMTSGEIYRAKPMPQALARAA

SEQ ID NO: 297278 - protein, 349 aa, unidentified
MIMLGIDAHKRTHTVVAVDHHGRQLGTKTTNATTTADHLAIIRWADKFGDDRSWAVEDCRHLSRRLERDMLAAGERIVRVPPKLMAHSRDSARTYGKSDPIDALAVARAALREPDLPTAHLDDTARELRLLVDHREDLVAERTRHINRLRWHLHEIDPTWDPDLRALTTFKHLDVAAGRLATLDSVIARIAADLVERIRQLTVDINELRVELEARTEMSAPSLRNIHGVGPLASAKLVGEVAGISRFRSRHAFARHNGTAPTPVWSGNTDRHRLSRAGNRQLNAAIHRIALTQARSHPDAIALLRRRTEAGATGKEALRSLKRRLSDVVYRAMLADAELIQNQRVERAA

SEQ ID NO: 297279 - protein, 394 aa, unidentified
MNDRQAHIWVGIDAGKAHHWVTAIDDQGAMLWSRKVSNDESAILDPLAEVLTLGENFTWAVDIVGTTSALLLALLASHGQSALYVPGRIVKRMAGAYRGEAKTDARDAYVIAETARHRHDLTPIRLPVEIIADLKLLIAHRGDLVADRVRMLNRLRDVLTGIFPRLDRAFDYAKHKGALTLLTGYQTPTALRRMGQVRLTKWLARRGVQGAPAVAEAALEAASGQQTQIGNETIAAQIIALDKRLRTLENQITTMFHAHPQAEIIESMPGMGPILGAEFLAAAGPLDNYADDGHLAAAAGLIPVPRDSGRRTGNMHRPKRYNRHLRRSLYLSAQTSVIREGPNRDLYLKKRSEGYKHTQALLALSRRRVSVLWALLRDNRTFTPAPPIRSAQMS

SEQ ID NO: 297280 - protein, 330 aa, unidentified
MKKWNVILGVDVSKLTLDIGCSERRLHIKIDNNSKGFGEFKKWCKTNGIDLQETLVVMEYTGGYEYRFIQYCDSKAIPYCRVPGLEIKQSMGMVRGKNDKVDSFRIGRYGEEKSDKLVPSKPLDKNILSLKQLLSFRKRLVREKAGLQSTLKERGHMYEVNKTDTIIHIAQAKIKADEKHINEVEQEIRELIKSKEELFQNYRIITSIKGIGEINAWMTIAYTENFTSFKDARSYGVYVGVIPFGHDSGTSIKGRKRVSHLAQKELKSELNQAAKAAITYDPELHAYAEGKLKNKDYPIVLNNVKFKLILRMFSLVKRGEKHVENYKKAA

SEQ ID NO: 297281 - protein, 359 aa, unidentified
MRMASRSMAQPDHGVIVGVDTHGDGHVAAAFTSDLGRPLGHLTIATTPAGYRRLLEWARDFGREPRFGVEGTGSYGAGLARFLAAAGCTVIEVNRPNRQTRYARGKSDPVDAEAAARAVLSGEAAGLAKVDTDQVGMIRALRVARRSAMKMRTQTFQQMKALLVTAPAELREQLRSLSHDRLVDTAGCLRPGPVTTPVAAVKLALRCLAQRHQLLTAELATLDRDLDRLVATAAPTLCALKGVGTDVAGAVLVAAGDNPERLRSEGAFANLCGVAPLPASSGKTSGRHRLNRGGDRHANCALWRVVIVRLATDAPTKHYMARRTQEGMSKPEIIRCLKRYVAREIYRELVPRTALAAAA

SEQ ID NO: 297282 - protein, 429 aa, unidentified
MNYTQNEKIEQVTDTTMVVGVDIGSQTHYARAFDNRGRELTKRVFSFQNDIEGFNSFNLWAETLKKENGKTDVLIGCEPTGHYWFAFAKYVKDHRKTLVMVNPFSVKKIKELDDNSPKKTDSKDPKTIAKLVVDGRYSIPYMPEGIYAEIRDLVYSRDRIMKQHNISANRIQRWLAIHFPEYLGLYTKFDTTSGLAVLERAPLPKDIIALGIDGIRKIWHDKKIRGRGVTEDRAKTLVEAAHNSVGLDGGIGSKSELYMLLEEHRLWSSQLEAINKVLEEVILKVRNVEKLLAIKGVGSITIAGFIAEVGDIRRFSSPKQIQKYAGLELVENSSGKHKGRSRISKRGRRKLRKILYQVMIPLLARNEEFRKIYDYYVTRVQNPLKRRQAMVAVSCKLIRVFYAVLTKGVDYDRIKMMSDIHHESDVIAA

SEQ ID NO: 297283 - protein, 338 aa, unidentified
MTLYCGIDLHSTNNYLGVYDQDDRVVFSKRLPNELGVVLQSLEPYKAELAGIAVESTYNWYWLVDGLMEQGYRVSLANPAANVQYSGLKYTDDRYDSRWLARMLGLGILKTGYIYPKEERPVRDLLRKRMRLVQHRTAHIVSVLNTITRNTGSSLSWSKLEAMTDDQVSHLLGDGLIGMAPRASLEVIKSLSQEISKIEKTVKARAKLRSEFKLLKTVWGVGTILGLTIMYETGEISRFSQVGDYCSYARCVGSVRISNGKKKGENNTKNGNRYLSWAFVEAANFASRFYPRAHTFIQRKRAKGNHTLAVKALGHKLARASYYVMRDQVEFDPARLFG

SEQ ID NO: 297284 - protein, 370 aa, unidentified
MPKTTPVFVGLDVHKETISVAYAAGGSADPPHFVGQIGTRQCDVDKLVRRLQARSSRLIFAYEAGPSGYVLHRHLTGQGLDCRVVAPSLIPKKPGDRVKNDRRDAVELARLLRSGDLTGVYVPSVEDEAIRDVCRARDATRVTLKAAKLRLKSFLLRLGFNYVGRADWNDAHRRYLAQVVCPTPAQQIVFQESLRAVDEQVERLARLEDQLLELAPSWRMYPVVEALQALRGVQWLVALTVVAELGDLTRFDNPRQLAAFVGLTPSEYSSGASRRQGGVTKAGNPRARRVLVEGAWAYRYPAKISAHIQRRIDKLPKVAQDIGWKAQLRLCKRYRRLIARGKHANIVTTAIARELLAFMWAIAKEVKITA

SEQ ID NO: 297285 - protein, 479 aa, unidentified
MAKPKKPSETPTQRKPQAGKGKRGSKRKGMCLDDRPILEPNAAGIDIGAREIFVAVPSDRDENPVRVFSTFTEDLQEMARWLVSCGITTVAMESTGVYWIPLYDVLEQHGVRPCLVNARNMKNVPGRRTDWHECQWLQFLHSVGLLRSAFRPEAEVCAVRSLTRHRDDLVQMASQHIQHMHKALTQMNVQIQHVISDITGVTGLAIVDAILGGLRDPVELAKLREPNIKASEETIRKSLVGNWRAEHLFTLKQSRQMYGFYGQQISACDQQIEKLLVAFQPRVDPTVRPLPPDRKKKRSRKRKINPKTGFDVRTESYKLFGVDLTQIPGLMGMILVLFTELGRDMSRWPTAAHFASWLGLCPDNDISGGRVLWRGTRKVHNRAGHLFRLAAHSLHHDQTPMGYYLRRMKSKVGPAAATTATAHKIAIIFYTMVKKQVEYDETLWAQRDAEREKRFEAKLKRQAQQMGYKLVPIEEKPAA

SEQ ID NO: 297286 - protein, 354 aa, unidentified
MLIIGCDFHTRYQQIAMAREETGELLVERRLDHASGEAHAFYRSLQSSQEPVRVGIEATGPIHWFERLLADLGHELWIGDSAKIRASEVRKQKTDERDAALILDLLLAKRFPRIWVPTPAQRDLRQLLWHRHKLVSMRTMLGNQLHALAMSQGLCRKKKLFTKKGRVELVSLGLAPWASRRREELLKLLDQLEPPIAELDRAVLEEAKRHADAVRLMTHPGIGPVTALAFELAIGPITRFRCSKKIASYLGLNPSEESSGGRRRLGAISKQGNTMVRWLLIETVHHAVRQDPELRQDYQRLKFRRGHAVAKVAIARKLAVRMYWMLRSGADYARLVRRQGSPGGTLVGASPSLA

SEQ ID NO: 297287 - protein, 413 aa, unidentified
MTDKDNDSTNKVFIAIDIAKQSHDAFITWQNGKTKACKFPNTLIGYQSLLDLVAIEPCDIQAAFEPTADYHRNIAYWLQSQGVECFFVSSLACARTRELMFNSWDKHDRKDARVIMYLMQQGMMQPFHDPLRAGLMDLQELSNTYYQISLARTRCQHSLLNHYLTLYFPEMQRYFHSSRAEWFCRTMLKFPTPGSITRYRKATFVKRAWDLVGRKVAKQRYLEELYDTAVTSIGLPVDDESLAVSTFKLQLKRYQELTQQRQTLEQTAEKFLAGTDDYHYLRSLPGVGPVIAMIIMAESGDLRRFRHYRQYLNFCGFNLSALQSGQTKGQYHLSKRGNARLRYAYWLAAVNAIRQTENSFRYKYERYIRHDPQNNDLKRKARVAVATKLARVAHSLVKNATQYQGYYKVGHGT

SEQ ID NO: 297288 - protein, 331 aa, unidentified
MEKYKIFVGIDISKSWIDVAVLNDSLTAHRNYGNNKKDFKLMLSWLKTFASSEQMLLCMENTGVYTMRLWEYLAAHKIPFVVENPLQIKLSMGIRRGKSDKADAQLIARYIRLHHTECRLYKVPAQIVTRLKVLFGYRERLLKIKHQLWVANKEIREFMSAELCKEMSHDSDVLVKSIGNKIDKAEKLILSIIMSDDEAKRIYQLITSVPGIGLITGAYLIIVTQRFTIIENSRKLSRYGGMSPEKNESGILKRKAKVSGIGNKKLKSLLSNCVGTNLKYDPETKEYYNRKILEGKPEGVILNNLKNKILHRVYAVVNRGTNYVNIRKYAA

SEQ ID NO: 297289 - protein, 482 aa, unidentified
MKAKQKEPTEKSTGQSSQLHWRQMNRKQRRDLERKIQSADLTLQLVHPDAAGIDIGNESHYVAVPPDRDSQPVQHFGCTTAELRAMADWLKQCRIRTVAMQSTSVYWIAVYDVLEQAGLEVYLVNARETKNLPGRKSDVQESQWLMKLHTYGLLRNSFRPPQEIRTMRTYWRQRNDLVRSAARHIQRIQKTLTQMNMQLANVLSDVSGVTGQAIIKAILAGERDPQKLAAFRDPRVKASEKDIARSLEGNWQEDLLFVLKQEQAAFEFCRKQMAECDRQLEQYLQKMEDRSQGATLTEEKRKDRLQKKKGNQPQFDLQQQLFRMTGTDLTQIDGIDVMTATTILSEAGWDMIKWKDEHHFVSWLRLAPDNRISGDRIIGKGRLPTSNRVTVALKLAASNLRTSQSYLGAQFRRLRARLDTPVAIKAMAAKLARLIYRMLRYGTKYVDNGSRYYELQQRTREIRRLKLKAATLGFHLVQSTAA

SEQ ID NO: 297290 - protein, 394 aa, unidentified
MLYQAATGRSTAEWNADETLTVVVEMSLSSWLIAGLLPGVERRPLKKLAPDEGALMALIERWRQEAVKAGRTITRVVVAYESGRDGFWLARWLRARGIEAHVIHAGSVAVSRDRRRAKTDRLDTALLMRVLLGWLRGEPGHCTMAIVPRIEDEDAKRPTRERENLVGERTRLINRMKAALARVGIRGFNPALRKAAKHLDDLRMPEGGCMPARALAEMRRNMARLRLIEEQIAEVEGERLRRLEDTRPEYRPTDCMVRQLARVVGLGIETADMLVHEIFTRDLRDRRAVARYAGLTGSPDESGSRRRERGLSRAGNARVRRGMVQLAWRFLLFQKDSALVRWYRERTADGRGRTRMAMIVALARKLLIALWRMVKTGEIPDGVRLREAVPTAAR

SEQ ID NO: 297291 - protein, 346 aa, unidentified
MEHYAGIDVSLELSSVCVVDAQGKIVKEAKVASEPEAVVAFFEALGFAVKRIGLEAGPLSQWLHAGLKEAGFETVLLETRHVKAALSAMTVKTDRKDARGLAQLLRMGWFQQVHAKSMASREVRALLVGRKQLLGRLIDVELSIRGILRGFGLKVGAVTRKGFEARIRELVTGQATLERIAEAMLSARAALKAEYEKLHQAVLAIVREDAVCRRLMTVPSVGPLVAITYKSALDDPSRIAKSKAAGALFGLTPKKYQSGEKDVTGGITRTGDEMVRTALYEAANVLLSRITRFSKLKRWGMDVAKRRGSKRAKVALARKIAVILHRMWIDGTTYRWAEAKPIAAQA

SEQ ID NO: 297292 - protein, 350 aa, unidentified
MVVVGADVHKHTHTFVAVDEVGRKLGEKTVKALTSGHAEAVMWARERFGAQVVWAIEDCRHLSARLERDLLTAGQQVVRVPPKLMAQARASARTRGKSDPIDALAVARGFLREPDLPVASHDKVSRELKLLVDRREVLVAQRTAMINRLRWRVHELDPERAPGPASLDRGKHRHLLGASLATVPGLVAELARDELADITRLTEAINALAKRIGSRVRAVAPALLAMPGCAELTAAKLVGETAGVTRFKSEAAFARHAGVAPVPVWSGNTAGRVRMTRSGNRQLNAALHRIAITQIRLEGLGQTYYRHRLAAGDSNPEALRCLKRRLARIVFGHLHTDHQHRTQPCQTAAA

SEQ ID NO: 297293 - protein, 343 aa, unidentified
MQIAVLGIDLGKNSCSLAGLDNTGRVVMRRRLRRESVIKFAASLPPCIVAMEACCGAHHLGRILRSQGHEVRLMSPEYVRPYVKAQKNDDRDAEAIAEAATRPTMRFVELKSEEQLDMQTLHRARDRLVGERTALINQLRAVLLERGIVVPQGRRKLEQHLAAMLDEGEDVPLSPRVRALVVDMRAEWRELDRRIGAFDDEFAARARSDEAARRLATIPGIGVLNATALVAAIGTGEAFRRGRDLAAWLGLVPRQASTGGRAKLLGISKRGNKYLRKLLIHGARSVLRPLSRSATPLGAWLRGLLARAHVNTAVVALANKLARIAWAVLSRARTFNGGAVTGA

SEQ ID NO: 297294 - protein, 392 aa, unidentified
MYIVGIDIGKNHHEASIVSPEGKQIGRSLRFATTHKGADSLMSFIFKNIGNSPCVFGMEATGHYWYPIYSFLKAKGYTIYVINPIQSDSLRKMYIRQTKNDSIDSFLIAEVIRFGQFGTTSMADENILAMRQLCRYRDSVISSRTEIKLRIGTIMEQIFPEYEKQFSSLWVSTSMGILEKYLTPENIENTPIDELFEIIKDKSHNRLTKAKAISIKEAAADTFGIKIAQDAFSFQLKQLIDRMNFLDKQIEALDIEIMKYYEQFDCYLHTIPGIGIIGAATILAEIGDISRFKNSSSLIAFAGIDPTVRQSGEFNSTHNHMSKRGSPYLRHAIFLAATTCSFHNSPLNAYYKKKRDQGKHHLTATGAVARKLTTIIYAVLRDSKPYEPKKFC

SEQ ID NO: 297295 - protein, 388 aa, unidentified
MTTQIDDLSRSLVALEQDTTLIAAVELSQSSWLVSAIVPGLERQPQKKLEPDPSALLKRLERWRDEGVKAGRTIRRIVLAFEAGRDGFWLVRWLRKRGIETHVIHSTSVAVSREHRRAKTDRLDLAMLMRVFLGWLRGERKHCSMVAIPTLEQEDAKRPSRERESLTSEKTRVVNRMKSALARLGIRGFKPELRKAPQKLAALSTPEGVGLPPNTRAEIERDMARLVVVRGQIEAIERTRLERLQQAPADDPNAIVLLLARVIGVGVETADMLVQEVISRKLRDRRAVARYAGLTGAPDESGSKRREKGLAKAGNARVRRGLMQLAWRFLRFQRDSALAQWYRARTDGATGARKTTMIVALARKLLIALWRMVTTGEIPAGVALRPAA

SEQ ID NO: 297296 - protein, 346 aa, unidentified
MLIVGCDFHPSWQQVAWLDSETGETGEQKLLHAADEAKQFYAQLGVPALIGMEATGNSQWFIELVEDLGHEIWIGDAAAIRASYVRKQKTDKRDAAHILKLVVEGRFPRLWTPDREQRDLRQLVLHRHKLVIIRSRVKNELQHLSLNKGMQKKRRLWSQAGLQLLRELPLKPWAACRRQDLLGLLAMLEQQIGKLDQAVQQAADQHPQAKLLMTQPGVGPNTALAFVLTIGDVSRFARGKQVASYLGLIPREESSGGRQKLGAISKQGNRLLRSLLVEAAQIAVRCDPGLRKQYLHRCHQKPKGVAKVAAARKLAVRLYWMLRTQTGYPEIVRIESSPRVALVGAS

SEQ ID NO: 297297 - protein, 457 aa, unidentified
MSIAHKKKEHIASFHALHQSAIGIDVHANLIVATYQNGDFEKGSLESHTWSSGATKEELVKFAKWCKQYNPEVLIMESTGVYWQSLYESLENEGFTSSQIVVVNARDVKNKRGSKTDLADAIHLAEIARQGSYKASFVPSKNFRQLRCLWRSLHSLKNVRKKLLNILHKQLCQVGCRASSVFSDIRGKIATKILACLIRGERDEVLLKSIKEIVSTSRGRLKAKPQQIYEALQADMDSMVWFSIREHVEHIKYLDQQIAQSEQNIREKLTPYNHLIKLLTGIPAIKEITAMGLLCELGDDLSQFASIRKFCKWIGLAPGNNESAGKRYSGRTTPGNKYLKVLLVEAASGIGLMKKGFLHEVHQRFKERRGTKRANVAIAHKLCRIIFRVLKSLTEYQEQYKPLLKEHRYSKAVEAVAGLKDVGYICSDLEVKDGITGSVAVISGANKRKITAITNCC

SEQ ID NO: 297298 - protein, 431 aa, unidentified
MKKSSKGKPVLPRGRAVVGIDIGKRKHAATALSPQGEVIAQLASFPNTRQGVDQLEKEVLRRAGGPGKVLVGMEATGHYWMCLYHELIRRGYACVVLNPLQTNARSSARIRKTRNDKIDSQTIARLILSGEAKATRVTDPKITELRLLVRHRHRLLQATGNMERYAHTLVDRIFPEYADVFCKPFLPSAQKLIRQIGLAPDKLVENAEHVREILRSAGRGRIAAETIEQLLESAKKSIGTRQAEDVTEAQLCSIFDYLKTVRQQIADIKKQLDQRAKKLNSPLYSLGLTSTLVAAIHAESDPIDDFDSPEQYVAYVGLDPSLHDSGDTIKRRGKISKRGSPLLRHTLYLAAFVVYRRHDYFRRIYLKHRGRGKKHISALVIVAHRLARVIWRLLTDGREFTKRAPKPVSPSDKPRKSAKFTTTRNPASASA

SEQ ID NO: 297299 - protein, 346 aa, unidentified
MEKKVVKQVAGIDVAQKELVVTLGRKLDDFSIELFAYKVFKNTEKGILALVEWTEKLSNKEKSIRYVMEATGVYHQKFAYYLDKNKHDVSIVLPNKISNYMRTLELKTITDKSCSQAIAQFGLERKLDNWVRPNDVYKELQQLTRERDQIVQERSIIKNQMHAENSEAGPNEKSLARMRSRIKYLNSQEKEIKEDIAVIVNKNPDLHQIINRITTIPGVGALTAVIVLAETNGFELIRNKSQLASYAGLDVSEKQSGTSVKGKPRISKKGNRNLRKSMHLPSLTAVKWDENFKEIYARLVSKHGIKMKALVAIQRKLLELIYVLFKNETNYDKQYVIKNSVQTHMV

SEQ ID NO: 297300 - protein, 417 aa, unidentified
MDEEVYYERCAGIDVHKNFLVVCLRIGSKPEIRRFGTLTHEIREIVAWLKTNGCQMAAMESTGSYWKPIYNIFEQEGLPAMVCNAYHLKNVPGRKTDANDAQWTAKCLSQGLLNPSFIKNREQRELTDMTRFRKSQIEERSRNINRLQKFFEGANVKLSSWVSDIEGKSATELLELIIGKPDFTVDDAAARMHGKMNSTAEELFLSLENSITPAQREFFAHVMAVIREQTAQIEKTGVMIQHSLNEDYKAAVKALDDIPGIGRISAEQIIAETGTDMSRFRNQHSLSKWAGVCPGNNESAGKRKSGKTTPGNKTLKSTLTQCAKAAKKNKNSFFSAQYSRLVTHRGKNRATMAVAHSLLIAIFFVLSGYQFKDLGADYYMQFNREKKINSHIKQLSKLGVILPDDVLRAAIQHPPGG

SEQ ID NO: 297301 - protein, 323 aa, unidentified
MTKDIKYFGINISKDVFDVCDNNAKYYQFKNSISGFKKLVKLLDLNSVCVMEATGYYHSRLAYFLLESGFGVSVVNPLKIKRYIQMDLSKIKTDKSDAKMIQLYGKDREPKLWTGQSKTQQESLQLSRTLSIYSKQSTQLKNKIHGEDVLGNPSKIVVRSLKRSLKYLKKEMDALEKALDKNVKKEYQESLTLLKSIPGIGDKTALMLLVFTDGFQRFESSKELCSYAGITPIIRQSGSSVKGRPRISKMGNPKLRNLLFMCSFNACKYNRACKALFDRIVAKGKSKKLALIAVCNKLLKQAFSIVKNGVPYNDEYRSTLVKN

SEQ ID NO: 297302 - protein, 422 aa, unidentified
MNSDGLKIDYAAYIGLDWGSEKHSVAIKAHGSSEIERCVLKQTPEELHSWVIKLRDRFAGRPVAVAIEQTKGAVIHALLGYDFLHVFRINPKSLADYRKAFSPGGAKDDPTDAEYLLEWVELHRERIKPWVPDDPQTRALQKLVEFRRQLVNQRVALTNQLTQLLKEYFPQALDWGGEIGRVMMCDFLSKWPTLEKVKKARPDTIRTFYRQHGCRSGERMEERLEAICGARALTGDPAVIKTSVCMVQAIVGTLYPVIENIPRLDKEIEELFNAHPDMAIFDSFPGAGPVLAPRLLAAMGSDRSRFGSAGEIQNYSGIAPVTERSGKHEWIHRRFACPKFLRQTFHEFAGQSIKLCAWARTYYDMKRRDGVGHHAAVRALAYKWIRIIFRCWHDRVCYNDAIYIRALHNKGSAIVAFMGQAA

SEQ ID NO: 297303 - protein, 436 aa, unidentified
MALWSLRTGACEGFVVRLGEDVVELLHERCAGLDIGKKDLKACVRTPNPSGRRSRRQEIRTFATTTNALLELRDWLVAEKVTLVVLEATGDYWRGAFYLLEDCLNVILVNAAHAKGLPGRKTDVSDAAWLCQMGECGLLKASFVPPEPIRQLRDLTRYRTTLAAERTREAQRLEKELEDAGIKLSTVATDILGVSGRAMLSALIEGERDVHVLAEMAKARMRPKIPQLVEALTGNFEAHHAFLCRLHLRRIDQLSAAILELSTRIEEQMLPFARQLEQLATIPGVGQATAEVIIAETGADMSRFRTAGHLASWAGVCPGHHESAGKRKSGKIRHGNRWLGGALGTAAMAAARTKDTTYLGARYQRLTPRLGKKKAIVALEHSILTAVWHMLTHDVDYHDLGGDYFTRLDPDRALRRIIRQANALGFTVRFDPIPAA

SEQ ID NO: 297304 - protein, 421 aa, unidentified
MNRVAEGPFTAYVGIDWADKKHDVCVQAAGGEERELGRFAHRVAAIEAWARSMYERFGGPIAVALELSEGPIVYALQKYDFLVLFPINPTTLAQYRKAFKPSGSKDDPTDAELALDLLVRHPERFKPLKPQSVGMRKLMHLVEQRRRVVEDKRRFTNRLCHALKQYYPQALEWFEQRDTVVFCDFLDRWPTLKQVKRARRATLERFFRDHNVRFARVIERRVAGIRAAEPLTEDAAVIEAYRLQVEVLVAQLRATLGAIARYDEVIAVTSAALPDYSLLFSPLPGAGPTNGPRLLAAMGEDRERFDDAAQLQRCSGLAPVTERSGDKTWVHWRWKCPKFLRQTFVEWAGQTINKSAWAGAYYRQQRARGASHQAAVRALAFKWTRILYRCWKDRVPYDESKYLEALRRRGSPLLQYLVDPA

SEQ ID NO: 297305 - protein, 372 aa, unidentified
MAGKKRGRVKACKMNSIVAGIDLGDRESLTTVLSPIGDVTDRFTFPMNEEGYAYFANRVPKEARVAFESTIMAYPIMRALREHGYTDVTVAHPKTLAWIVKSKKKNDRVDSLKIAKLHMAGMLPESHLLDRDQQTVRDLLVQRAKLGVEIGRLKNSVIGYLKREGIYDSLPKTSDSFSVKRRQTIHSLRFNDDRDLVLSTMLDRLEFLEKQCAPLEDRVKENARLSDDVRLLMTIAGVDFYLASLISSFIGDVNRFPSDDHLASFFGIVPTSRDSANVKRRGKMTKDGSSTARWALSVMVDTVTQHNQPIKDYYLSVKKRTGSGKLAHVATMRKLTRMLYHMLKTREHWKWEGPLLTERKLARLQSDGGGVP

SEQ ID NO: 297306 - protein, 409 aa, unidentified
MKLFVGLDVSSFDIKVCFLNGEGEQLASFTVSNDLPGATQLRDEILKTAKDLDVHTLYIGLGSTSVYSFHPSMFLHNDESIQALGGQVLVMNPKQIANFKKSYSDMDKTDEIDAFVIADYLRFRRLPMSVVKEEQYVALQQLTRARYQIIRQITQEKQRFLQYLSYKCNTFTEEVESSVFGKAMMDLFLENYSLDELSSMPLEDLADYLRKQGRNRFPDAEYVAKSIQKAVRSSYRLDKVMEDSIDTILGTSITLIRTFERQIKELDKSIERIMKGLPQTLQSIPGIGPVLAAGIQAEIGQIERFEDETKIAKYAGLYWRKHQSGRFTADDTSLSRNGNQYLRYYLVEAANSVRRHVPEYKEYYAKKYDEVPKHQHKRALVLTARKLVRLVDALLRKNQIYTPERSVHT

SEQ ID NO: 297307 - protein, 368 aa, unidentified
MKQQTSAATETKIKGRNIIDFTGKTIYVGIDVHEKDYQVAKVFDGICLGNHRMAASHQMLIDHLNSRYPGATFKCVYESCAWGFTLQRALSRAGIECIVVHAADVSSSDKEKKRKTDKVDALKLARNLASGDLTGIHVPDEDLQKERNLIRFRKKLVGDLNRSKNRLKSLLKYQGIKIPEHLGKKNNWSYNFMNWVEQEANKDVLLKDTLLLMLEEIKLLRQLLLKTERALRKLMKERHNEKATLLMTAPGIGRTIAMQFVLEVGDIKRFHSFDALNDLIGFCPDTDSSGDMQRDRGITSRRHKQLRSALIEAAWTAIRIDPALMDAYQKLTKRMQGKYAIIRIARKLLRRMRTMLLTGQPYQIGVAA

SEQ ID NO: 297308 - protein, 343 aa, unidentified
MTKISTIGLDLAKNVFQLHGVDASGAVVLRRQLRRNAVEKFFAKLPPCLVGVEACGSAHHWARVIGRYGHEVRLMPPAYVKPYVKRNKNDGRDAEAICEAVTRPTMRFVAVKSVEQQAMLSVHTTRALLVKQRTMVANALRAQLSELGLVAAQGHEGLHELMARLEVPSEEIPEMMRSALLMLVEQWQALDGKERVLEKQIVKAVRCDQEARRLMAVPGVGPIIASAVLAKVPDARLFRSGRDFAAWVGLTGRDHGTGGKHRPGRISKQGDRALRTLLINGASAHLRQQKRHGVSDPWLRELLARRPYKVTMVAFAAKTARIIWAMLAKGEDYRDRTSAPAAA

SEQ ID NO: 297309 - protein, 350 aa, unidentified
MIIIGCDYHPGFQQIAFVDTETGDYGEQRLEHSEGAEKFYRELAAQGKKVRVGMEASGHARWFERLLGELNFELWIGDATEIARKRERKQKTDRQDAQHILQLLMENRFPKIWVPSGENRDLRQLLWHRHRMVQMRTRIMNQLQAVALNEGLRCKKRLWRLHGREQLESFRLAPWASRRREDLLQLLDRLNPTISDLTQAIEQEVEKCPEARGLRTHPGVGALTALAFVLIIGRPERFQCGKQIAAYLGLVPLEDSSGNRRRLGHITKQGSSMLRFLLVEAAQVSARSIPEWRNKYFHLAMRRGRKIAKVAMARRLAIALYWMWRKGWNYEQSRKFGSHAGQLGTGHGVQ

SEQ ID NO: 297310 - protein, 328 aa, unidentified
MFEHYIGIDLHQAFFQACAVTVTGDRAWEERFPRTDVGIAALLARCNRRTAVAVEASTPTWHFADAVGGSVGDLRIVDPVKTKLKAGYAAKTDRLDARRLADALRRDSVVGIYVPPVAIRELRELCRFRLAVVHVRTALIQRLRAVLLRQGLVDRRRLARTPTDAWLETLTLPPRAGASVAGLRRILTAVRAEATIVDAEVQAAAAADPIATALQQIPGIGPVLSLMIRAEVGDIRRFPTAGHVASYAGLVPRVDASAGHVRHGRITRRGSPWLRWALVEAAMHGTRRTDRIGRWGRRLVIRKGALKARVAMARILCDEVFTRWSMIG

SEQ ID NO: 297311 - protein, 411 aa, unidentified
MDTPYCVGIDVALHDHRVAILGPDGEARGNSFSILASQEGFADLVRTLHAREAAPGHTLVGLEATGHFWENLEAFLSRAGYRVMVLNPLQTRRYRDVLRRKAKTDDIDAYVIAGLLRSEAAAACYVPDEQIQSLRELVRLRARLMRERQDYLRQLVAQLDVVFPEHRTGLGEATTARARGLLTAFPTARHLAHATPATLRRTAAAAGARGFSLQDATALRDGARQSTYSGKAAAARGHVVRTLIAQFERLTASIDDLDQTLQALLPPADPEGGPSDATLLQTLPGVGPHTAGTLLGELGSLTRFTDARALVAYVGFFPVIKESGEHAATPFLSPTGSRIARHTLYLAAVNAVRRSTEWRRLYQHKLAHGKKPKQALIAIAVKWLHTAYAMLKHRAPYDPSRLVATPATMSP

SEQ ID NO: 297312 - protein, 314 aa, unidentified
MSSPSCYLGVDVSKDTLVVSCQRRRWEFANTKEGHRKFIAQIQKLPGSGHVVCESTGPYHFTMCLALQEAGLSVTIAHAARIHYFGRSEGIIAKNDPIDAELIERFANAKQPPADPPLCREQLALSENVTHRQQLVEMIKVLRTHRQQVLQAALVTEIDRSITALEKRLEAFERKLRAQIDAHPLWKKKLALLTATKGIGFITALILLAKMPELGTLNRGQCAALGGLATYDDDSGKHQGKRTIRGGRKEVRSALYMAALTAAHFNPILKTFYQRLIDQKKAFKVALTAVMRKLLIHLNAVLKNAANPPLTTTS

SEQ ID NO: 297313 - protein, 343 aa, unidentified
MEYYIGLDVSLKQTSICVVNQTGSIVQEGVVDSDPEAIASFVRSRTPGTVRIGIETGPTTTWLWTELKRLGLPVICIDARHAKAVLKMQINKSDRNDAAGIARIMQTGWFKEVRVKDLDSHSVRALLASRALLVKIKRDLENQVRGLLKNLGLVIGRAKFNVFAARAEGLIENRPELVAAVRPLLEARKAIEQQIDDLDCKVLKLARHDVEVCRFMTVPGVGPITALCFKATIDDPRRFRRSRSVGAYIGLTTRRHASGEIDWSGRISKCGDAMLRMYLFEAAGVLLTRVPKWSALKAWGTRLAKRNGLRKAKVAVARKLAVILHRMWVDRTNFNWSTKKAAA

SEQ ID NO: 297314 - protein, 342 aa, unidentified
MEHFAGLDVSVKETSICIVDDTGRMVREVRVASEPEALLKVLGNPAYHFKRIGLEAGPLSQWLFSALAEAELPVVCVETRHMQAVLKAQINKTDRNDARGIAQMIRAGLYHPVHVKTLRSQKLRMLLTHRKLLQSKAIAIENDLRGTLRNFGLKVGMVGKLRFEARIQELVENFPDLAMLVEPLLIVRRALREQIVILHRRLLAIVRDDEVCRRLMTTPGVGPVVALTYRATVDVPARFRKSKSVGAVFGLTCSKYQSGEIDWSGRISRCGDEMMRVMLYEAAQSMLRSKKWSWLKAWAMQIARRRGMKKAIVALARRLAVILHRIWVDGTEFRWTRETAAA

SEQ ID NO: 297315 - protein, 435 aa, unidentified
MEIAVGQQAREFIPRNYDIFAGLDVDKTSISVSILTHEHAVKSMKIPNDANNLIGYMRRNFPDQKVAFAYEAGPTGWGLYDQLAKQGHTCLVVTPSMVPTAPGARVKTNRIDSKKIAESLRGGQLKSIHVPSPLYRQLRHLIHLRDAAVRQATQAKLRIKAMLLFEGIAFPEAPQGGAQWSHQVTVKLKGLPCQGAVRFKLDELLGNLEFVQGQTLRTMKEIRRYCTQEQELKRYIGFLTTIPGIGWITASHLLARIGDPKNIQNVRQLGCFLGLTQREDSTGDNVNRGSITRYGDSRLRNKLIQAAWAAIRKDLELQEFHQRIYQRQPKEKAAKIAIVAVARKMTTRIYAVLHQERNYEIRHQISSDPLTQEETIRPRERLEHRQNQENLDSPDGSTERQRSRGILSQANSGRLAQQKLTKSGDTLEGTHLKIV

SEQ ID NO: 297316 - protein, 342 aa, unidentified
MNQYKRIAIDTSKAVFTLHGIDQADRPILRINLSRAQMIAFFTKLPAIEIAMEACGGSHYWARELAALGHRVVLIPPQYIKPYVKRGKNDRNDAEAICEAAGRPGMHFVPVKSADQQAQGMVLKVRETLVDQRTALVNTLRGHAAEFGVIAGKGVSNIIPLLEKIAAETAIPLEARETMALLGEEIARLDARLKQMETKLNQAHKANPVSVRLASIPGVGPITALTLATEIDPTAFESGRHLAAWAGLTPREHSTGGKQRLGGISRAGNERLRALFVLGATSVIKVAERPGNKLANEWLLKLLRRRPRKVAAVALANKMVRIAWAMMMSGETYRRAPAAGVS

SEQ ID NO: 297317 - protein, 341 aa, unidentified
MHRTKVGVDLAKNIIQVCTLHGKKVTSNVEMSTDEFSLWLAQTKPVTVAFEACSTSNYWYQQAIKAGHDARLISAKLVKAVRQNQKTDKNDALAIAQTLFLPEVSFINGKSIEQQQLQSIQRLRELAIKSQNASQKQIVSLLLELNIRLPNTQAGLLNGLEGVLEDGENNLSDTFRATLLVAKVQLENMISAIREYDKYLEQSIQSLPDCKKLLKLEGVGPVNAVNLYIALGANQSQPFKSGKNASACIGLTPIQHSSGGKEVMGTIGKYCKNGSLRSQLITGAMSVVIKVIKYGAKTKKELWLQGLMQRRGNRCAAVALANKTVRTAYSMLQNNTEYHAA

SEQ ID NO: 297318 - protein, 386 aa, unidentified
MPQPKDDLSRSLVALEQDKTLIAVVELSSATWLVGGMVPGIQREPLKKLAPDEEALLALLHRWRDEAIAAGQAITRLVVAFEAGRDGFWLARWLRSRGVEAYVIHPTSIPVSRERRRAKTDRLDIGLLKRSLLGWLRGEKKHASMAAIPTPEEEDAKRPTREREQLVGKRTGIVNRMKAALVRLGIRGFNPKLRKAPERLATLRTPEGCPIPPNTLAELTREMAHLRFINDQIKQIEDERLQQLKHAPQQGSNAKVLQLQQVNGIGVETADMLTHEVLSRDLRDQRAVARYSGLTGSPDESGSRRREKGLSKMGNARVRRGMIQLAWRFLFHQRDSALAQWYQASVAAGKKRKTMIVALARKLLIALWRFLTTGEVPEGVVLRPIP

SEQ ID NO: 297319 - protein, 360 aa, unidentified
MSDGSKGRPKITAGLDLGDKYSYLCLIDQESGEVVEEGRLRTTPEALRRRFGSEQPMRIAIEAGTHSPWVSRVLEECGHEVLVANARKLRLIYANKRKTDEVDAENLARLAHLDPKLLYPLKHRGEDSQAHMAIIRSRQALVGARTQLVNHVRGAVKSFGARLPKCPARSFHKRASEHIPEALLPALGPILEQIGSLTERIRDYERQLEAISKEHYPETELLRQVEGVGGLTALTFVLTLEDPYRFERSRSVGAYLGLVPATERSGERDPQRRISKEGDQMLRKLLVGSAHYILGPFGSDSDLRRHGEKIASRGSKNSKKRAAVAVARKLAVLLHRLRVTAEVYDPLYNAHRSQEREEAA

SEQ ID NO: 297320 - protein, 353 aa, unidentified
MNATTVAVDLAKNVFELALTDAQWKIIERARLTRAQFERWFDNRKVDRVVMEACGSAHHWGRMFKARGIEVRLLPAQYVRAYVKRNKTDAADCLALLEAVRTQDIKPVAVKSVEQQALQALHRTRSGWMSTRTRRINTLRGFCREFGLVVPEGAATGLAQIARYLADERSGLPEMLRPSMRLVLEEIRLMEARIGQLEQQLAALAKLSPACQVLLSVPGIGLLTSTAMVAAVADPRSFDSGRRYSSFLGLTPREYSSGSTRYRGRISKRGDRYIRMLLTHGARSILRAAIVAKRAGRQLDRLKSWALAVQARTNHNKAACALANKLARIAWAVWVKHERYRAEPAPTTASFSA

SEQ ID NO: 297321 - protein, 314 aa, unidentified
MYHYIGIDVSKKVLNIFDGKKDLIFDNKENLSSFKKYLKKRHSDLSSLVILFEATGIYSYHLKTFCADYHIKAYIINPQVSHNFAKSLGTRSKTDTRDARTIWAYHRLLKDKDIRIPKVDPVLITLASYLTSYRLTLKQRLALTNHLEGVKDKILYRLLKKELERLCKLEQELLVRMDAYIKEYPKLKEDYQRLLSISGIGQKTAINLLVLFHTYPATNRKQITALIGLDPVQRQSGTSVHGRSRISKHGNQMMRKCLYMPTLVSIRYNQKIKVFYDRLVSKHKPKKVAIIACMRKLLLIAHAIYKNKTVYVPG

SEQ ID NO: 297322 - protein, 315 aa, unidentified
MSDMPCFVGIDVAKAQLDIALRPSGERWSVPNDTNGVTTLVERMQALQPTLIVLEATGGLERLVTSALATAGLPVVVVNPRQARDFARATGQLAKTDALDARALAHFADVMRPTPRPLPDAQTQELRGLLGRRQQLIVMRTAEQNRLAGASGRLTQDIEAHIAWLNARIATLDDDLETMLRASPLWRENDDLLQSVPGIGPVCARTFLLELPELGTLTRQQIAALVGVAPLNCDSGTLRGRRTIWGGRAHVRTVLYMGTLVATRFNPRIKAFYQRLLAAGKLKKVALTACMHKLVTILNAMLKHRTSWQAQEVQN

SEQ ID NO: 297323 - protein, 354 aa, unidentified
MQYIAFDSHKRYTYAVVEEKERGRVMEKRIEHRRGEIGAFLSQCEVGSPVALETIGSWYWIVDEIEAAGMLPRLVNARKAKMMIASSKKTDRLDAKGLNTLQRTGTLPTVWIPSSELRDIRELYRTRMVLTQMVIRLKNRILSCFSKYGISFDETSDAFNIKGRASLEAALEILPTQTCFAVKELLRQLDLLQEAVKEFEARMLQVQSNDPEIKLLQTIPGVGAILSYVIAYETGDIHRFPSASCFASYAGTTPSVHASGGKVRYGHTASDVNHYLHWAFIEAANVISMRHEVLRFRHTARLYERLRQAKGHGIAVGAVARHLAEATYWILTTKTAYREPNQNKQVVVVSSKEG

SEQ ID NO: 297324 - protein, 408 aa, unidentified
MNKIQNLITNTITIGIDISKEFFDIYVYESGNTMRFDNNSKGIKKFIKYITPLNPTLVAMEYTGGLERQLFFALQDYNIPCCCIKPINIKNFAKTIDAKAKTDLISAKLIAHYAFLYKPAPQPKPDEKSLLLKDLASRLQSLTDFLISEKNRLASSTFAKIKSQIKKSIKSVEKLIEDGKKQLKELVYSDPNLKAKVELLDTMPGVGEYSAMMLAVLLPELGTISGKQIASLCGVAPFINQSGKSNAKAFIKGGRDKARRVLFLITLAAIVHNPLIREYYNRLIQKGKPPKVAIVACMRKIIRILNAMIRDNRPFIPDYYETYVREQDNGYKIILTKNNEIKQQELNYNEATYNSVLSDVNFFKENDRKTDMKNITWQHTCFIKGGYSGILICFILSSRKTYESKRKY

SEQ ID NO: 297325 - protein, 426 aa, unidentified
MIQGFVFFVGIDWGTENHAVCVLDKEGQKVAECQARQSGTGLQQLLDWLRQQTTVAPDQVAFGIETPAGAVIDMFLEHNYQGFHINPKQLDRFRDRHTVAGVKDDRLDAYVIADSLRTDRHCFRPIQPDDPQIHRLRTLSRLEDDLGHDWSRLTNQLREQLQRYFPQMVQFSPAADDPWVWELLQTAPLPAMARKLRRSQVQKILTRYRIRRLTAEQVREQLQTPALPVAPGIAEAASEACLLLILRLRLLAQQRKHVAQSIQAILVDLAADSDGKQHRDVQVLSSLPGVGRIIAATMLVEAAQPLANRDYHALRAYGGVAPVTRQSGKRKLVSMRYACNQRLRNAFYHWARVSLQNDDRSRAHYHRLREKGHSHGRALRGVADRLLAMLVSMLRSGSSYDPQHRSPTHPHASLRPYSSAQRPGAK

SEQ ID NO: 297326 - protein, 355 aa, unidentified
MTDKPIAGIDIAKDGLDICVDDDARVERIANRAEAVGAWLDRMGPRLVGFEPTGGHERMLIAALRERSIPFLRVHPNDVIAFRQSRGVKAKSDPIDARLIHDFVTQELSRRGWHGSVIADERLRALAARRRQLLDALQAERCRLALAAVAAVRDSLAQVIAALADSLEAVEAELAAALADNPETAALARLLQTIHGIGPVTATALLAQLPELGWLTGKPIAALLGLAPHTRRSGKTRSRETTSQGRAGPRQALFNAARAAIRHPSPFQEFYHRLVTQNRRPGKVALTAVMRKLLITANAVARDRQAWRGRQTAPAPRAGGTQCRPHGEPIARRAGRVKAAAAPRAVALSASLDAV

SEQ ID NO: 297327 - protein, 445 aa, unidentified
MRKRKSALRLTYPNAAGIDVGSESHFVAVPPDRDDEPVREFRSFTEDLHHMAEWLSSCGVDTVAMESTGVYWIPLFELLESKGFTVYLVNARHVKNVSGRKSDVLDCQWLQQLMSYGLLSGAFRPADEICALRAVSRQREMLITYQSRHVQHMQKALTQMNIQLANVIADIVGETGQKIVRAIIAGERDPQKLARMKNYRIKASEEEIVKSLQGTWRQEHLFALKQAVALFDAYSEQLLQCDLQLEQMLGELKKYDSEPIKGRSPRKNDPQFDLRTYLVRMCGVDLTRIDGIEVSTALKVISEVGPNLSRFPSVKHFTSWLCLCPGTKISGGKKLSGKSRSGANRAAQALRLAAAALRKSKSALGAYYRRLCSRLDKAKAITAVAHKLARLIYTMLTRGTEYVDKGQHYYEERYKQRVVLNLSKKAATMGFVLMPVQENTMEMQS

SEQ ID NO: 297328 - protein, 357 aa, unidentified
MDGSKEQPHTTAGLDLGDKYSHVCLIDSQSGEVIEEGRLRTSPEAFRRRFASEQPLRIAIEAGTHSPWASRVLEGCGHEVLVANPRKLRLIYANKQKTDQIDAENLARLARVDPKLLYPLKHRGEESQAHMALIRSREALVGCRTQLVNHVRGTVKSFGARLPKCPARSFHKNAVEHIPEALMPALGPVLEQIASLTERIKEYDRKLERISKERYPETALLRQVEGIGPLTALTFVLTLEDPYRFEKSRSVGAYLGLVPASDRSGERDPQKRISKEGDEMLRKLLVGSAHYILGPFGSDSDLRRHGEQIASRGGKNAKKRAAVAVARKLAVLLHSLWVSGELYEPLRNAHRSGVRAA

SEQ ID NO: 297329 - protein, 413 aa, unidentified
MEILHTQCAGLDVHKKVVVATILVSDEHGQLTKETRSFETMTASLLALSDWLTGFGITHAAMESTGEYWKPIFNILEENFEILLVNAQHIKAVPGRKTDVKDSEWIADLLRYGLLKASFVPPKGQRELRDLTRFRTTFIKERATLINRVQKALEGANIKLASVVTNIEGVSGRAILDAIIEGKATPEAMAELAKGRLRTKREALEQALAGRVQAHHRFILQELLCQIDSLDETIERFDTEIQDYCRPFDVAIEHLDTIPGVARETAEVIVSEIGVDMSRFPTANHLASWAGVAPGNYESAGKRLSGRTTKGNQALATALTQAAWAASHTKNTYLSAQYHRIASRRGRKKAIVAVAHSILIIAYHLIMDKQTYQDLGGNYFDRRNSEATAKRLVQRLEKLGYKINLERPIAVAA

SEQ ID NO: 297330 - protein, 355 aa, unidentified
MSGEKYIGLDVHQATISVAVVDCQGKLIMESILETKASTILEFLAGLRGSLFVTFEEGTWAAWLYDLLKPHVTEVLVCNPRKNAMLKHGNKSDKIDARKLAERLRLKDLKPVYHGETGVRLLRELARSYLTVVKDLSRVMNRLKALYRSWGIACAGRDVYYRRHRSQWLEKIPEAGTRRRAEQLYQQLDMLQHLRQQARRELLAESRKHAITAKLRQIPSLGPIRSALAVALIQTPHRFRSKRQLWTYSGLGLETRDSGEYHYVRGQVRRRKKQATIRGLNKDYNHDLKGLFKGAATRASVKPGPFQEFYQRSLAKGIKPTMVRLTLARKIAAITLTLWKKGEDFDIDKLNSQAA

SEQ ID NO: 297331 - protein, 430 aa, unidentified
MGLIVPTTLHPAREDQPLPYEWFVGIDWGSQRHQVCVLDRDRRQVGERVVDHDGASLARLADWLWTLSGGQPQRVAVAIEVPRGAIVEGLVERGFHVFAINPKQLDRFRDRHSVAGAKDDRRDAFVLADSIRTDQPSFRRLQLDDPQLLRLRELSRAEETLLEDFRRSANRLQDQLHRYYPQMLKLCSAADESWLWELIDLAPTPAHAALLSEEQVQRVLKAHRIRRVKAQEVLTCLQAPALPVAPGAAEAAQAHCAFLLPCLRVLAEQLQACSQQVSALLRALAQEPGEGEGPSDVAIVLSLPGVGRKITAWLFAEAAQPLAERDYQVLRTHGGVAPVTKQSGKRRLVVMRHGCNPRVRHALYHMARVAMQHDAHFSSVYAALRAKGQRHGQALRNLGDRLLRILMAMLRERTCYDATRIRREPVVQMG

SEQ ID NO: 297332 - protein, 366 aa, unidentified
MTSMTDQALEVTGGVDTHGETHHAAVVDRLGRHLADQEFEATGPGYRKLLVWLLAQGTVTAVGVEGTGAYGAELARVLRTAGLKVVEVDRPDRKTRRLKGKSDPIDAYAAAVAVAAGRASGTPKTRTGVVEAVRALRVPRRSAVKSRTQAVNQARQLLVTAPESLRAPLRGLTAAQLAKACARLRPGHDLADPLHAVKAALWRLGRRILALTEEIDELEAELKTLTAQAAPELLALQGVGVDVAGQLLATAGDNPDRLRSEAAFAHLCGVAPIPASSGRRDRHRLNRGGDRAANHALHTIVLCRLRWDDRTRTYMERRTQQGLSKKDIMRCLKRHVAREIYRVLLRSLDHRTTTRQTTQRALTEAA

SEQ ID NO: 297333 - protein, 309 aa, unidentified
MKERKVYVGVDVAKAHLDVAWGQESWRVTNDVLGRSALVQRLNQIAGSVQVICEASGGYERGLLKSLQCADIKVSLVQASRVRQYARASGILAKTDSIDAHLLYRFGEAIRPPATPPPKPQQDKLRELETQRRHLSRLLVAEQNRRAQLTHQALLSLSRRLLQQIQKQIAQIDLLIKQLIEHSEELSSKAQKLTAITGVGPRTAALLLAQMPELGELNRREAAALAGLAPFNRDSGKARGKRSIFGGRRAVRSGLNMAALVAARHNPILANFYQRLRAAGKPPKLALTATMRKLLIVLNSALKTDPLLA

SEQ ID NO: 297334 - protein, 322 aa, unidentified
MNKYNETFGIDISKDVFDCYGSTQGHLQFKNTESGFKKFQKLLRKDSLVVMEATGYYHYRFAQFLYHQGFLVSVVNPLSVKRFIQMKLAKVKTDKSDAKAICNYGLSQEVPLYNALTEVQSECLQLFRWMDSLLKKRTATKNKIHGEKVLGIPSKYVYHSLSRTLKHLDRELQGIDKKLLSLVKQDQQKQLSLLKSIPGIGVKTALFLIVITDGFKKFETASQLCSYAGITPTIRASGSSVRGRSRISKVGNRKLRNLLFLCAFSAYKHNKGCRELYERIVNKGKSKKLAMLAVSNKLLKQAFAIAKSGIPYDETHVSLLPK

SEQ ID NO: 297335 - protein, 393 aa, unidentified
MNAVSIDVSKGKSMVTILRPFGEIVSSPFEIKHTSSDILSLIKLIHSIEGESRIVMEHTGHYYEVLAQQFSAAGLFVSAVNPKLVKNFNNDSLRKVKSDKADSIKIARYALDKWQNLKPYSIVDELRTQLKAMNRQFHFYVKQKTAMKNNLINLIDQTYPNANTYFNSPPRSDGSQKWVDFVYTYWHVDCVRKMSLNSFVKHYQNWCKQKKYIFNKSKAEEIYTKATELVPVFPKNEITKRIIRQAIAQLNSTSATVETIRILMNETASKLPEYPIVMQFKGIGPSLGPQLMAEIGDITRFTHKGALTAFAVVDPGVNESGSYAQKSVPTSKRGSSNLRKTLFQVMDVLIKTMPQDDPVYQFMDRKRAQGKPYYVYMTAGANKFLRIYYERVM

SEQ ID NO: 297336 - protein, 410 aa, unidentified
MDVLHPRCCGLDVHKSSISACILLREAGRVQKHQRRFGAMTQELQALAEWLRQFGVTQVAMESSGVYWKPVWNILEGQFTVVLANAQHIKNVPGRKTDQKDAEWIAQLLQYGLLRASYVPCEIIRDLRDLTRMRASLSQEASRISSRIQKVLEDANVKLASVATNVLGKSGRAMLEDIITGEDNPEHLASLALGHLRVKIPQLRLALDGKIRSHHRFLLRRLLDQIQFVEHEIALLDERLEDVGRRRPDLAQAVARWDTIPGIDRVAAWALLAEIGDNMGQFPTAEHLASWAALCPGNHESAGKRLRGTTRQGSPWLCRMACQCAWAAARTKNTYLSSQFRRLAARRGKKRAIIAVAHTLIVIGYHLQKNQSNYDDLGGNYFDRIHSDGLKRYLVKRLEQLGHKVTLAGC

SEQ ID NO: 297337 - protein, 418 aa, unidentified
MSDQVRWFVGVDWASAQHRVCLLDAEGKCVAERNVTHGGAELSEMCTWLVEKTAARPAEIAVAIETPHGPVVEALLERGFKVFAINPRQLDRFRDRFSVAGAKDDSRDAQVLACSLRTDQHAFRCLSVDDPLVIELREWSRIYDELKQEQNRLTNRMRGQLWRYYPQAGELSDDLAAEWFLDVWQQVPTPARAARVSEKTIARILKNYRIRRLDAAEILRILRRPPLVVAPGTTEAATAHIRTIAARLRLINQQIKEAERRLDELCAAIAAAAESAPGQICEQRDVAILRSCPGLGRINIATLLAEACEPLRRRDYHVLRVLSGVAPVTRRSGKSCIVVRRHGCDTRLQNAVYHWARVAIQHDAISRQRYAELRRRGHSHARALRGVADRLLYVLCTLLQRQVLFDPDYKSSQMAAAA

SEQ ID NO: 297338 - protein, 343 aa, unidentified
MDYFAGLDVSVKDTSVCIVDEIGKIIREVKVASEPDALLQVLRNAGYHFKRIGLEAGPLSQWLFSALGEANLPVICVETRHMRAVLEAQINKTDRNDARGIAQMMRVGLYRPVHVKTLRSQKLRMLLTHRKLLQSKAIAIENDLRSTLRNFGLKVGMVGTAKFETRIKELIENLPDLILLVEPLLVVRRVLREQLDLLHRRLLAVVRDDAICRRLMTVPGVGPVVALTYRATVDVPARFRKSKSVGAVFGLTCSRDQSGERDRPGAISRCGDEMMRAMLYEAAQAMLLRSAKWSWLKAWAMQIARRRGMKRAIVALARRLAVILHRIWVDGTEFRWTREAAAA

SEQ ID NO: 297339 - protein, 353 aa, unidentified
MSKHGVRAGDVAGLLARFSELRRKGLARTGENYPIVVIQEAGLDAFWIHRVLEQEGIESHVVDAASIAVSRRRRRAKTDRIDGEALLRALLAFKRGEPRVCSMVRAPTPEEEDRRRICRERKVLIAERVRHVNRIKGLLFSQGTGDYQPLGRDRRRALETLRTGDGRELAPHLKRQIGRELDRLELLMEQIAAVEGERDAMLSAAIEAEAAPALQNAPAPVRMLANVKSIGPEFAAVLWTEGFCRSFANRRQVAAYAGLAPTPWQSGSIDREQGVSKAGNPRLRTTMIQLAWLWLRHQPDSELTRWFHERQARQGARKTTIVALARKLLVALWKYVTAGVVIEGAVMKAAAAF

SEQ ID NO: 297340 - protein, 412 aa, unidentified
MKDLLEISCGLDIHKEKIVACILTGPLGKPTHSEIREFTTLIPDMLALRDWIISENCHHVAMESTGIYWIPIYEILEDAFSGDITLLVVNARHMKNVPGKKTDIRDSEWISTLLRAGLLNASFIPEKRIREFRDLNRYRKSIIRDITSQKNRVEKFLQSSGFRLSSFISDIFGASGRNIILHLMEHGRIDKISLDSYLKTKTRKRIDEILMSVNGTLSEHQKSFLKILMCHYDSMKEHLIEIETHLQEDMLPFALQIEQLNTIYGISTTAPCAIIAEIGTDMKPFKTAEHICSWAGLCPGNNESAGKRKSTSITKGNPYIKSMLCEIAWVIAGKRNTYLSAWYWRIKQKKGARKAIVALARKLLVIIYTMLKQGTNFDENCFEVRRKNCEQKQLSRYIRELEKHGYTVEAQV

SEQ ID NO: 297341 - protein, 450 aa, unidentified
MGNASGVSRGDRNRNARLARLRSLVPVTNAIVGIDLADAKQMVVVTDHDSKVLARKTFRCRAWDLGAALGWAAERAAAKGFSGVTVACEPTGHRWRVLGQLAADRSMPFVCVQPMLSSWARRSEDLTSDKTDEKDAVLIARLTAQLRCYVPEPVDETWGRLRHLGARREQVIVEMVSQIQQMRALVECVWPAALDTAKQPFRSKTWVAAMSAICERDGGDLDRTRRLGPARFEQAVRREILKRGGQKPSLRIARRLFAALTDPTGVIAHRPGALERVAFLLVDWHTAGDKLTDTEARMISVLGELKLTALATSIPGLSPVGAAAILAETGDPNRFASGRALVKHAGLAPREKLSGTFVGRTKLTGAGRPGLRLAAWRAVWGTQRGNTVYAARYRHLTSREQNKLTATQAQTVIAAAILRQLHAVITTGQAWDPDIATHGTGHRKQMPIAA

SEQ ID NO: 297342 - protein, 404 aa, unidentified
MYNAVGIDVSKGKSTVAVLQPGGTVIRKPFDVSHTSQSLIELARYLGSLEGSTKIVMECTGRYHEPMLKALYEAGLFVSVVNPHLIKNFGNNSLRKVKSDPADARRIARYTLDNWAELRQYSGMDNTRTQLKTLNSQFSFFMKQKVAAKANLIALLDNTYPGVNKLFDSPPREDGSEKWVDYAYSFWHVDCVRRIGLKTFTERYKAFCKKHHYIFQQDKPEKLFHASKELVAVFPKEKTYKLLIQQSIQQLNLASGHVERLRQEMNALASTLPEYSTVMGIYGVGKTYGPQLIAEIGDVSRFTHREALTAFAGVDPGVDESGQHKSKSNRASKVGSARLRKTLFQIMTTLLQNAPEDDPVYRFLDKKRAQGKPYYVYMTAGANKFLRIYYGKVKECLRNLEQAE

SEQ ID NO: 297343 - protein, 338 aa, unidentified
MKITTIGVDIAKSVFHLFAVNQAGRLVKKKQLKRKQVLNYLANIESCLVVMEACGGANYWAREIIALGHEVKLIAPQYVKPYVKGNKNDYNDAEAIAEAAQRPTMRFVPIKSIEQQDVQNFHRQRELIKKERTALVNQTRGLLAEYGVVIHQGISVVRCQLPLIIEDAENGLTSLSRELFSELLDELHLLDERLKQCEQRIKRMNQNNEVCQRLDDILGIGPIIASATYAAAGDGKEFNNGRHFSAWMGLVPGQHSTGGKSKLLGISKRGDAYLRTLYIHGARAVLRHSATKQDRFSRWAQSVLARRGHNKACVAVANKMARMAWVIMAKGETYRIPV

SEQ ID NO: 297344 - protein, 359 aa, unidentified
MGVMEGRERRIVGGVDTHKDLHVAAVVDEQDQVIETRCFATTRQGYRQMLTWMRSFGELQRIGIESTGSYGAGLLRFMQQAKVPVLEVTTPDRQDRRRRGKNDDLDAQNAAHAAFAGQRTVTPRSRDGMIESLRVLMACRKTAVSARRVALQMIHNTIVCAPDDLRDQLRRLTRMQLVRTLAAWRPDLTAYRDLDSAYRISLKSLARRYLELHDEIADLDTMITAIVDELAPNLVARNSIGHIGAAQLLLTAGDNPERLQSEASFASLCGVSPVPASSGKIVRHRLNRGGDRAANSALHIIAIGRLRTDQRTRDYIARRMAEGHSKLDAIRALKRYLAREVFTLITQRRREINATRIAA

SEQ ID NO: 297345 - protein, 404 aa, unidentified
MLFIGLDWARTKHDLIAINQKGNILLKLRLQHDPAELASTAQKIAALEPNPANIRVTIELHDGALLAWLFTQGYTIYGLNPKSADRAREQYRPSGGKDDTTDAFVLADLTRVHSDKWRPLQHNAEATQALHDWVRLRANLTQEKTALCQRLRAILDEWCPALSRLCNDFNRQWQQALLIDFPLQQDLAAEHGNRINGWVKTHRLRSTTAENMRMLRTVAVLPIPAGRISALRFEIRHLAGRISELTRQLDAIDTELTERVEAHPDAAIFQSLPVKGTFTVAALLAGFGQNRESAPSWRELASRWGAAPITVQSGKSRHVKRRRACDHTMSQVFVFFCFKTAFTAGCWAEEYYRNKRAQGGDHYATLRCLAQRWIKILHRMWLNQCPYDEAFHQKNRLEHGASAT

SEQ ID NO: 297346 - protein, 413 aa, unidentified
MDRLIERCAGLDVHRDTVAACIRVPAEGGERHQEVRTFSTTTAGLLTLRDWLASYGVTVVGMESTGVYWRPVYYLLEDDFECWLLNAQHLRNVPGRKTDVADAAWIAQLVEHGLVRPSFVPPREIRELRDLTRYRKAQIQERGREAQRLEKILQDAGIKLSSVASQVLGVSGRAMLGALVQGTHDPGILAELAKGVLRQKIPALQEALQGRFGPHHALMVGEILAHIDYLDEAIGRMSEEIARVIDPFSEQVARLDTIPGVDRRTAECLIAEIGPDMSRFPTHRHLASWAGVCPGNNESAGKHHTGKTRKGSKWLRTALVESAKAAARSKGTYFHAQYGRLKGRRGPSKATVAVAHSLLVVAYHVLLDERPYQDLGADYFLNRESPDHHAKRLVRQLEHLGYDVDLRPLAQTA

SEQ ID NO: 297347 - protein, 348 aa, unidentified
MERYIGLDAHATSCTFAVLSERGRRLDSAVVETNGRALVKFLRSVPGNKHLCLEEGTQSAWLYEVLQGHVRELVVTHAHERNRGPKDDQRDAFHLANSLRLGAVSPVYKDAGQMGELRAHADVYAKLVTDVVRAQNRLKALFRSRGVQVVGGAVYTQRDRHAYLDKLARPYRGSAELLYSELDALRAIKKEAEKQLIAQSHTHSISAVLQSCPGMGPIRVAETIPIIVSPYRFRTARQLWAYSGLAIVMRSSSDWVKTPHGWERAQTVRTRGLNRNYNRRLKNIFKGAATTVITQRLEPMVSDYQRALAQGTKPPMAKLTLARKISATVLAMWKNKEAYHPERYRPTP

SEQ ID NO: 297348 - protein, 393 aa, unidentified
MHSVGIDIGKRQHVAAICRQGQRTADKPVLRFGADRAGLAELERWLARNGPIDRVVMESSGHYWIPLAAALHRQSVPVAVVNPVSAKAFGKRRLQRVKSDPADARTLAALGMADQPRTREPLAGAELREAARFAMHLVEEQSRIDNKITRLIELGFPELERAYDDPTCTSALAVLRLAPTAQAVARKRVATLADANRGPGHRAVGPTKAEQIQALAKDTMAPPELAAQIGFEMELLIAQHDLLEQQIAQAEERVAGMLDGELARRLQTIPGVGPAICATLIAEIGDIQRFSDFDQLVAYAGVHPAEKSSGQKGGPETSWRMAKTGNAYVRAALYRMSVVGLTHNPTIAGHYARKRAQGKSKMNALGHCMKKSLAIVWGIWRGGHDFTPEPPIA

SEQ ID NO: 297349 - protein, 358 aa, unidentified
MEAPMKREYFIGLDSHGGFCQMVATNSNGKRAYEGRCPTTITAVREMIDKIPKPRHLVFEEGPLANRLYRNLADHVDSLKVAEPRRNRLIACDGDKDDPVDAEKLANLLRGGFIKGVHQTKTLEETLFKQLVAQYHRHVRRRVAAGLQVTAILKQHGVMARAKQFDHAEDRAELLKRLPGQPLLHEMVTALWKEYDALQTHEDGWRKQLLREAKKDNAIERFTELPGISWIRAATLRAYLDTPWRFRSVKALWKYLGIGLDRRHSGNGPEFLCVPKQVNRLLKSTILGAARSAIAQGENPFADQQEAWKSRGLSAKMAKRNVARSLSATLWGLWKNGMVYHTEWVGVNLAKAQRISTV

SEQ ID NO: 297350 - protein, 437 aa, unidentified
MRTESAPGARGPVFCGVDTHADSHWLCVLDWRGRKVLSRQFPADAAGYEALAGAIAAAGEPACVAMEGTSSYGAGLTRHLASLGMPVREALSPARMQRRRPGQGKCDEADAERAARAAMSGSKLGTPKSQDGWVDGVRCMLAARSGAVKARTSAINTARSLLTTAPEGLRSRFRGMGGPRLMEELPSVRAEGALGAALGALADLWAAARDTALDMERAIEASLEENCPALLAMYGCGPVSAAKLAVAAGDNPGRLRSEASFAAICGACPIPASSGKTVRHRLNRGGDRQANSALHEIARQRVMRDPETAEYAERARGRGKSDREVMRCLKRYVAREAYRALMHPHEIRRPEDASELVAARRAAKVSQVRAASILGTSEKYISMLERGQRELKPIRRAYEAWVEAGLPLDWDRRASCARTFSKPSPVPAGGTTDATGS

SEQ ID NO: 297351 - protein, 351 aa, unidentified
MHYIGVDYHKKYSYVVVKDEQGRREQKGMVNNTREELQEFLKPYQPGRAVLEATRNWGLIYDWLEEILDDVALAHPLKVRAIAEARIKTDKISADILCDLLRSNLLPEAYVSSKETREAKSTLRQRMFFVRVQTMVKNRIYDILDRHPEIACQAPDVSDLFGASGMAWLRQTVLPGQDNRLLASELELLEVLKRKISESNGMVKELARGDKRIKLLRSIPGLGPFFSVLVAKEIDDISRFRDEKKLCAYAGLVPSTYASGGKVFHGRITRTGNKWLRWAFIEAVQPAISCDADLFAYYQRLKMKKGANAAKVATARRLLIIVYRVLRQERPYERRNRRAIRRLAPAALITS

SEQ ID NO: 297352 - protein, 470 aa, unidentified
MTPRRTKNLRMPVSYDPLVQVHPHAAGIDVHASAHWVAVPPGSAPPPATDHPPNLPPHIRKFGTCTADLEMLADWLMACNITTIAMESTGIYWIPLFELLERRGFEVKLVDPRRTKHVPGRPKSDVLDCQWIQRLHSYGLLEASFRPADDVVVLRSYVRQRLMLISYAGQHIQHMQKALEQMNVKLAEVVSDVSGVTGMAIIKAILRGERDPRALAGLRDERCKSSQAEIARALEGNWREDHLFELQQAVSLFEAYQTHLRACDRRLEAYLKTFADQSGGKKLPPKASKRRTRSNAPRFDSRTLLHRFCGVDLTVIEGIEASTALVILSEIGGDMSKWPNEKHFVSWLNLCPIKDESNGKNRKRRRRRRSNRAARAFRLAAQACHHAKTALGAFYRRIQARCGGSKAVLATARKIAQRVYRLLKYGEDYVRLDMAAYEEAYRARTLKGLARKAEQLGYRLVPQVETVAVS

SEQ ID NO: 297353 - protein, 343 aa, unidentified
MSEYDGRQFVGIDLHRRRTVIVRQGESGEQLGSSRIVNDPLALAAEIGKAGPSPEVVLEATYGWYWAADVLAEAGARVHLAHPLGIKGFAARRVKNDLRDAADLADLLRMNRLPEAWIAPPEVRELRELVRHRAKLVAVRSGFKAGVHAVLAKQGLHIAVSDLFGPRGRAELAQAPLDTAYRARVNAYCRLIDTLDQEIELAAGWIAARLATHSGYRAIQQIPGVGPTWAAVFVAEIGDVTRFASARHLCSWAGLTPRHRESDTTVHRGPITKQGATLVRWAAVEAVQKLPPSAGWLVSTRDQIAARRGRNIATVAVARKLLILVYYGLRDGHIRALQQASAA

SEQ ID NO: 297354 - protein, 357 aa, unidentified
MRKSTSGKNGLVASIGIDLADMWSDWVSIDRTGEVIERGRVRTTAVKLRERFGSIPATVVAIEVGTHSAWVSRELRSYGHRVVVANARKVSLIHQNRRKNNRIDAEFLARLVRVDEKLLFPIEHRGESAQRDLSILRSRDILVRTRTTLINHVRGVCKAFGKPLPSCSAESFALKYQSAKPELLTEVLDVIAEQIQRLTDLIRTYDRQIEKMVSRYEAARRLRQITGVGPLTALAYVLTIEDPRRIARSRSAGAFFGLVPGSDDSGEDHAQKRITKEGDRFCRRLLVSAGQYILGPFGPDCDLRRHGLAISARGGKNAKKRAVVAVARKLAVLMHRLWISQADYVPLYNATTRSIAA

SEQ ID NO: 297355 - protein, 342 aa, unidentified
MIYSGLDLHAKSSTFCLVTARGRRLGEGEVTSSRRGFAEMIELCEGQKLRVVVEASTRSRWAAEVLEGLGAEVVIVDPRKIRVIAETKHKTDRMDARILADLLRTRALPQALWRAPRETRELRDQVRLRWGLVRERANLMLRARSMLGSIGINLGKRALASETTWEKLLKRKEIPEYMKQLLEIMRHSIIQLGDAIEKVEEQAAPRLQDPSVIRMQQIPGVGPVVALTTVASLGDPSRFKDSRVAAAYTGLIPTEHSSGERVRRGHISKRGPSELRRVWIQAAHAALRMREHPLKAWTNRLIYRRGRAVAVVALARRMFRWAFAIWRDDSYFNPRLANQASR

SEQ ID NO: 297356 - protein, 315 aa, unidentified
MPLQPCFVGIDVSQASLDIAVRPTAETWQVSNDEAGITTLVTQLQALAPTLIVLEATGGYHGPVTAALATASLPVVVVNPRQVRAFAQAVGILAKTDRIDARVIAHFADAVRPTPRPLPDAETQELRALVLRREVIAMLTAERNRLGTAPARIQPAIQQHIAWLEGQLAALNDDLTATIERSAVWQAKADVLRSIPGVGPVLSRTMLAQVPELGTVGHKQVAALIGVAPFNRDSGTLRGRRTVYGGRGEVRAVLYMGTLVATKHNPVIKAFYTRLLAAGKCKKAALTACMHKLLTIMNAMVRDLTPWQPREVAIA

SEQ ID NO: 297357 - protein, 372 aa, unidentified
MNNAVINNPEVADRLIHGRSRPRVSEGRHLPQRRARTVARATQARITQGRARQGGRMSQSECTIGIDVSKAQVDLAVRPSGERWSGPNDEPGIRATVARVLELRPTLVVLEATGGLEVPLVGALAAEGLPVVVVNPRQVRDFAKATGQLAKTDALDAAILARFGEAVRPTPRPLPDAATQALAALLARRRQLLEMLVAEQNRLGTAPRPIRTEIQTHIRWLERRVAQVDTDLTHTIRTSPVWREKDRLLQSVPGVGPVLSTTLLAALPELGTLTQRQLAALVGVAPLNRDSGTLRGKRTIWGGRAVVRQALYMGALVAARYNPVIRAFYQRLCATGKPKKVALVACMHKLLTILNAMLKHRTPWSTHHVQPS

SEQ ID NO: 297358 - protein, 331 aa, unidentified
MKSKELIGIDVSKNVLDVFLLSASHHFTVENNPAGFARLLETCCLKLACKKDQLFFCFEHTGRYSWLLSIFLSESSIVYAKVPAMDIKQSRGMTRGKSDKKDAQMIAQYASRKRDELIPTELHAPEVGQLRQLLSLRNKLLRHRTAYKNSIKDLQDCFMEGETEFIKVTQERLIKNMNVEIDNVENQIDTIINSMPEWKRNFKLMQTVKGIGPVVSRYIIIYTENFTRFTDPKKFACYAGIAPFEYSSGTSIKGRTRLHPCANKQLKSLLNIAAMGAVRLKGEYKTYFERRTAEGKNKMSTLNIIRNKLLFRIFAVVKRQTPYVDLTMFAA

SEQ ID NO: 297359 - protein, 402 aa, unidentified
MAEGPSRFFGLDIHKEYFVAVGVNAQREVVFCPQRVSNYQLDEWVARVLTTQDSVVLEMTTNTYLFYDSLVPHVHSIIAVHPPNVALVTNVKVQTDKKAALALAQLHAAGMLEGVWIPPQEVRDLRALIARREKMVRLSTIAKNRLHSIMHRNHLILPEKPFAPEQRSWWESLSLSATEQFLVRSDLDTLTFAQNQVEQAEECLQKASAQDERIPLLVQLPGVAMLTAITILAAIGDVTRFPNAKKLVGYAGLGTRVHDSGMTHNSGRITKTGRKDLRRSMVNAANHAIEHHPHWKKEFERLEPHLGRSKAVVAIARKLLVAVWHVLSEQVVDRFADPTNVACSFFAHAYRVGVRNLPERQSALAFTREQLDRLGIGQDLQEIRWGSTRRKLPPSKLLTEKE

SEQ ID NO: 297360 - protein, 405 aa, unidentified
MDIIIERGAGLDVHKESVVACIMGTGIKKEIRTYLTMTNDLFRLKAWLQENRITHVAMESTGVYWKPVFNVLEDSFEVILVNARHVKHVPGRKTDVQDSEWLCKLLRSGLLRGSFIPPKEVRELRDLTRYKRKLIHTITSEKQRVEKILEDANIKLSSIASDTFGVSGRGIIQELLKGELHPEEMAELSRGRLRNRKEELKEALVGNMGEHHKQMIRTSLKHINAMEQMLTSVEQKIQKKINCHFKEAYELLKTIPPVKDNASVLIAEMGVDMEMFPTEMHLSSWAGISPGNNESAGKKKPGTTTHGNNYLKTILTEFAWIASKMKGTYLQAKYQSLVGRRGKKKALVAVGHKILISCYHILKYKVAYKELGANYLDQRKKDKITKSYIKRLNSLGYTVTLHEAA

SEQ ID NO: 297361 - protein, 349 aa, unidentified
MSNPMRWVGVDLHRRRSQIAIIDEHGELALSRRIVNDPGTFRELLGDPNGTHVALEATYGWEWLAELLGEAGYDVHLAHPLRTRAIAAARVKTDAVDAKTLAHLLRTGLLPEAYIAPPELRDLRELLRHRAVLTRMRTAVKNRVHALLARQGILPEHSDLFGKSGREFLAGLELPDGSRRRLDSLMALIGDFDREITATTREIDARAKADERVKVLCQIRGVGRYTAMLVIAEVGDVSRFPTARHLCAWAGLAPSVRSSDGKARLGHISRQGSPALRWALTEAAQKIPTGGGPLRAMFERIAKRRGRNIAKVAVARQILTLCYYGLRDGEIRCLTHQPTNDNEELAEAA

SEQ ID NO: 297362 - protein, 337 aa, unidentified
MSVYVGIDVHRKRSQVAVVTEDGTVELNKNVVNGSEPMLRLIGDLPAGTPVAFEAAFGWGWLAGLLEDYGFEAHLVHPLRCKAIASARLKNDKVDAAILAQLLRADLLPEAWIAPPAVRQLRALLRHRTGLVRLRTQQQNRIHAVVADFGYDRSGSYLSGPGRGWLAGLELPAASREIVTDCLAVIDGLAPLTDRIDGELRQHAKADPRVKVLTTLPGVGQFTALVILAEIGDITRFGSARKLASWAGLTPTVRGSDLTVRHGHISKQGSAWLRWVLNQAAQTAKRSPEFAGTYATIAQRRGKKIATIAISRKLLTRAWHLLSQLEPADASTPPRRP

SEQ ID NO: 297363 - protein, 332 aa, unidentified
MREYIGIDISKSSLQVYLGKFDEDIEIENSLKGLKQLHAKIKKRYGKINEIVWIYEPTGSYSMLIKRFCAEHAILCYIIKPSQSAAFAKTIKNRNKSDIVDARMLYQMHKIAPKEEIVIPCYDAKLESIQNYLRYYKTVMKERVMKTNQLEAALHREDELFIIKKLRSKIKALKAEEKEIITTMLERIKENKAYEEHFSTITSLKGIGNISGLVLFDLFMRYGDASSKEIVALCGLDPVEAISGSSLKRKSRISKQGSRLVRSTLFMPTLIAINHNPHMQMVYNRLKEKGKQSTVAQIAVMRKMIVIAFSLFKSKQMYDMNRFIQHDEQKVA

SEQ ID NO: 297364 - protein, 372 aa, unidentified
MHGFEGPYDVYVGLDVGKRAHHACAVLADGSVAFSTGVDNSEAAIDRVIADAAELGTPLVVVDQRRNIGMLAIRRARAAGVEVAYLPGISANRASALFPGDAKTDERDSEVIARTAMGVPQSLRPVPEEDDLEGARRLEAQRADLIKDRTHQINRLRSLLLESNPDFEGALEPEATWCIAILEKLGGPWNILDSGRRRFLRAASQAPRERAEAVWRSLGMATRPTERQVEAEMVLVPMLARRIREDTEQIEALEELIDDQVAEDETYRCLLTIPGVARRTATQLVLNVRLADFADHDHLASYCGLSPRNRQSGTSLNSVSSSRQGNKQLKNVLIFSCNSLLRSKGYFREYYDSCRFRGKTHKREELLRRQTQ

SEQ ID NO: 297365 - protein, 365 aa, unidentified
MQKISTMQTTGKNILEGRLTIGLDLGDRSSAYCVLNEAGEIVLEHKLATTPEAMEQVFGSMPRCRIAMETGTHSPWVSRLLTALGYEVIVGHAQKVRLITKSRRKDDRLDARTLARLARIDPELLSPVKHRSAQAQLHLTEIRARAGLVSARTALVNAARGLVKSYGERLRKCGTQQFDRETTSALNAGLRQALEPLVQEIESLNERIQEYDRRIAKMAKEEYPETALLKQVKGVGDLIATAYVLTVEDPQRFRKSRDAGCFVGLQPGRRNSGESEPQMRISKEGDEYLRTLLVQGAHYILGPFGEDSDLRRWGQKLSARGGKNAKKRAVVAVARKLAVLLHRLWVSGEVYEPLRNSQKAMSAAA

SEQ ID NO: 297366 - protein, 350 aa, unidentified
MNQITTVAADLAKELIVVCAADGSGRTLFFKQFGFRGFAEWAANLPPCTIAMEACSSAHFWARTLAALGHCPKLLAPDFVNPFRKSKGAKNDRNDAQAILIAALQPDMRFVSVKTLEQQSILACHRMREGWKVERTALINRVRGVLAEFGIWLGRSPQNLARSLPRLIQDEELPARIRALLSHAQEHLGQLQALMERCELEICQHARQSEPAQRLCAVNGIGPITASAFVASVGNARDFRNGRQMSAWTGLVPKQSSSGGKDRLGKITKRGDTYLRGLLTQGARSALNAALARAPDKRSHLEHWIVALRHRIGYHKSLVAIANKHARICWALLARNESYDPNGWQRHAPA

SEQ ID NO: 297367 - protein, 321 aa, unidentified
MHSNNTVVYAGVDVAKATLQLHLQGQQSEFNNTPKGLHQLCAQLQKVPGVHVVCEATGGYERALVKVLHQGQIPVSVTNPARVRAAAQAQGQRAKTDQIDARGLTDYGQRYQPQPTPPTSATQEQLVALTQWLKQLIHGRALAKTQAEHHQDPFVRRQHAKLMTHLQSQIEAVEKQIQALLEQDAALQQRVNRLDEIAGVGPRTAWMVLAHMPELGRLNRHEVAALAGLAPWTRESGTMKGMRCIGGGRPEVRLALYMAALSAARCNPVLRSLYKRLRAKGKVAKVALTAVMRRLLTYMNHCIKALPSEPATASAKELKIA

SEQ ID NO: 297368 - protein, 477 aa, unidentified
MQEDKYLKKRSKNNGKTSASVESSPMIHPDAAGVDIHPTAIFIAVPPGRDSNVVRRFSTFTRDLVEAVGWLKRCRIHTVAMESTGVYWIPLYQMLNDHGFQVCLVNARHVKNVPGRKTDVSDAQWLQYLHSVGLLRGSFRPPQEICALRSISRHRESLLEMGAVHIQHMQKALDQMNLHLHHVIDDIVGVTGLAIIEAILAGERDLRRLAKLRHYRIQCSEETIMKALEGDYRQEHLFVLRQSLHSWRHCQQQIAECDAELESLTRQLEAKSNHAPVPLAPCPRKKVSKNQPKGEWQQLLAQAFGVDLTAIPGVKTATAQAVFMELGTDWSCFPSSGHFSSWLNLCPDVELSNGKVVHRHRRRTQKRLRCALRMASLSLHRDQSPLGNEFRRRRSQLGPAGAITAMAHKLARIMWHMVTYKVSYDEAVFSTAEKKHQQRQQKNLIKRIESMGYRVVEAQKPDPGAMPLVPQVLAQVP

SEQ ID NO: 297369 - protein, 382 aa, unidentified
MQPNDTGNPTILLAIELSASTWLVAARVPGSDKPHLHRIDGGDTAALLALVSSLRDRVARRLGAATAVVCCFEAGRDGFWLHRLLTAHGVAIHVLEPTSILVNRRARRAKTDRLDAEGMLRVLAAYLRGDRQACSMVRVPTPEEEDAKRMHRERESLVQERLRIENRIEALLFTQGIRKRPSLRSWERDLAVLRTGDGREMPSHLRVELDRLRRRLVMTLELIREVEAERDEAAETKPQDETCRKIAALCRVRGIGENFAAVLTREVFYRSFDNRRQIASYVGITPMPHQSGGMDRDRRISRAGNPRARTTMIQLAWLWLRYQPGSELAEWFRKRVGTLAGRTRRIAIVAMARKLLIALWRYAETGVVPAGAEIRAAATVAA

SEQ ID NO: 297370 - protein, 343 aa, unidentified
MEAYAGKQFVGIDLHRRRSVIVRTTEAGEVLEAVRIVNDVQRLASVMARAGQCPEVVLEATYGWYWAVDALQAGGANVHLAHPLGVKAFEYRRVKNDVRDAQDLADLLRMGRLPEAWIAPPPTRELRELVRHRAKLVGLRSHCKAEVHAVLAKCGVQVLMSDLFGLAGTELLDGLELPVPYAARIASLRRVMDDLDVEITLFAGVIRGRMAHEPGYTAVQKIPGIGPTLGAVLVAEIGDVSRFASASKLTCWAGLTPKHHESDTHVHRGRITKQGSRLVRWAAIESVKTVSKTSEVGVRRERVGDRRGRNIGSVAAARRQLELVFYALRDGHVRALEHLPRVA

SEQ ID NO: 297371 - protein, 342 aa, unidentified
MKDTMIGIDLAKNAFQVHVASMAGHVKCRKKLSRGQFFRFITEQPPALVILEACGSAHYWARELAKAGHDVKLIAPQYVRPFVKRQKNDAADAEAIVIAARQPEMRFVQPKTSEQQARAALFRARERVVRQRTELVNALRSMLYEYGQVIPLGIGRIKQIKAMIEGDEIDLPELVREECHDLLAQIGEQTARIEKKTKRLTELSRHSESARRLQTMPGLGPVTALAIEAFAPAMENFRCGRDFAAWLGLVPRQFSSGGRERLGRVSKAGQADIRRLLIIGAMACVNWASRKPLKSESWLARILSRKPRMLVAVALANKMARTIWAMLTKNEDYRDPALAAAM

SEQ ID NO: 297372 - protein, 374 aa, unidentified
MEGITKFVGLDVSKASIQVAVADAGRTPARRWGVVPNSPEAVRKLMAKLGTPEELMVCYEAGPTGYGLYRQLKKMGIACSVVAPSLTPRRPGDRVKTDRRDAVRLAQLLRAGELVSVWVPGEGDEALRDLVRAREDAKEDLLRAKHRLTKFLLRHGRSAPQGVRAWTAAYRRWLDTVQWEEPALNMVWGEYLHAIDELQERVKRLEAEIHVQATTSTRAPVIQALQTMRGVAEVTATTLVAEVGEFRRFAHPRQLMAYAGLVPSEHSTGGSRRQGGITKTGNRHLRRILVEAAWSYRHRPAVKTTVRGRQAGQPARVRDIAWKAQDRLHRKYTRLLARGKPVGAAVTAVARELLGFVWAIACLVETGWLAERAA

SEQ ID NO: 297373 - protein, 391 aa, unidentified
MMPSQHIDTPAAGAEDGTLYVAFELSKSKWLIGTVVSGESKLSRHPVSGGDTAAVWQVISKKRASAENKLGRPVRVVSCYEAGYDGFWLDRWLAAQGIANRVLDPSSIEMPRRARQAKTDRLDLERLMRVLIRHDGGEPRVCSVVHPPSPEQEDARRLSRERDRLIGERTGHVNRIKGLLHGQGVRELQPRRRDFLEQLAEARTGDGRAVPARLVTEIRREHARLALLGEQLAEVEGQMEAERIAAAPGSRASRVNHLIGLRSLGPIGGEKLVSEVFWRDFQNRRQVGSYFGLTGTPFDSGQSSREQGISKSGNGRARTLAIELSWLWLRYQPDSALSLWFKQRVGDQKGRVRRIAIVAMARKLMVALWRFLALGLVPDGAIVRAAAPAGR

SEQ ID NO: 297374 - protein, 352 aa, unidentified
MSIIAFDSHKHYTFARVEGENGENPKEFRIEHKRGNIADFLSRQQTGSSVAVETIGNWYWIIDEIEQAGMEPHLVHARKAKMMFGCINKTDKLDAKGLNTSQRTGTLPTVWIPPGDIRDKRELPRTRMVFSGQRTRLKNRIHSVIDKYGLQDQFEDISDIFGTKGMKVICSVLGRLPPHTHYTTELLLEQLAQSERTIKAIEAKMNKLFNETDQHKLLKTMPGIGFILSVVILQEIGDIGRFGSAERLASYSGVTPRVHASGGKVRYGRLRPDTNHYLKWAFSEAGNSVAVNRNRYPARHVSQLYNRIRARKNHAKAVGAVARHLAEATYWILTKNEQYKDRGLLKVSPTGA

SEQ ID NO: 297375 - protein, 358 aa, unidentified
MQAKDTKISFKGQNVYLGIDTHLKSWKVTVLFENSVFKTFSQDPCAEVLKKFLRKNFPEATYYSAYEASFCGYSVHRELEKAGIKNIVVNPADIPTTDKERKQREDKRDSRKIAKSLRNGDLQGIYIPTIITMEFRTMVRYRKTLVKEVNRNKNRVKSFLYFNGIKIPPELDTTSKHWSARYTKWLKGLSFSSKFGNKTLDMLIKTTTYYRRKLLEVTRELRNIQEENGYGKKIKLLISIPGIGIITALTLLSEIEDINRFKNLDALCSYIGLVPSTNSSGEKELIGDITPRANKPLRNAIIEAAWIAVRNDPSLALKYNQLRQKMKSNKAIVRIAKKLLNRIRYVLNNEQEYVLSVN

SEQ ID NO: 297376 - protein, 349 aa, unidentified
MKKSERAKLAVQHFAGIDVSAHELEVAMWRSIDAQLTMATFSNNAAGHKALLRFLLHGKAPVRVCVEASGNYTLDLALTLQAHRQVEISVVNPRRARRFAESLGKRNKTDRVDAQVLCEYAWRMPWVCWQPPSGVALHLRAITRAIADLSSIHTQQNNRAHAAAASQALPALVVKEMQHHQRYLQQRMTRLRRQALRLITKDPELHRRFRLMVTVTGIGETSALQILGELAVLPNTLDARQWVAFSGLDPRLFKSGKSVEKRPRISRGGSRHLRRALYMPALVALRRDPYLGRFYQNLVLRGKARLQAIVAVMRKLLHALFAMFRTNRPYDGSKLCALNPIDKAVAVCA

SEQ ID NO: 297377 - protein, 347 aa, unidentified
MVTLGVDAHKRTHTIVAVDANGRQLASKTISTTTKDHLGVLTLAQQLADADGLLWAIEDCRHLSRRLERDLLAAGQSIVRVPPKLMAHVRDSARTYGKSDPIDALAVARAAQRETDLPVARLDGPDRDVRLLSDHREALVAERTRVICRLRWHLHELDPSWEPKARSLDRISVLDQVATHIEELQGTVARLARGLVKRCRELTLEITTLTAEITAFISAMAPSLIAIPGCGAITAAKIVGETAGVDRFRSKDAYARHTGTAPMPVWSSNRARHRLSRTGNRQLNAALHRMALTQAHWHPPAKAMMDRRKAGGDSGMEALRVLKRRLSDVVYAALHADLAQAAETVAA

SEQ ID NO: 297378 - protein, 344 aa, unidentified
MQPNITVGLDIAKHVFQVHAVDARGAIVIRRKLRRSELLRFFEGLEPSLVGIEACATAHHWARSIMALGHQVKLMPPAYVKPYVKRQKNDAADAAAICEAVGRPSMRFVPVKEVDQQGVLVLHRTRDLLIRQRTMLINALRAHLAEFGIIMRQGRAGVAALVASVEEGKAEHLPELARTALMSLIAQLRDAHARANEVEREILTWHRNDELSRRLETIPGVGPITASAVVATVTDPSMFASGRELAAWIGLVPRQSSSGGKERLGRISKKGDPYIRRLLVVGAHSVLRIAHSKKPGSSNLTNWGAELAARKPYKLAAVALANKMARIVWALMAKNEVYRRQMPA

SEQ ID NO: 297379 - protein, 339 aa, unidentified
MNNIKYYIGLDVHKERTTHVVRDKIGNILIEGETATIYQELFPRLKTYLKSSIIGLEASTSYYTLYQQFLKHGYTIKVANTIQLRQLIAKNDKLDARRLSEMLRLGTFPSSYIPDEKIQRIRSLIQTRHSLMEEKVRCNNRIQAFLDRNGVLMPSYKAFSKKWRYVLMQHMGSGRVSIELRHEYDHYVFLEKKQEQVEQEIQGYAQKNWTAEYNLLQSITGIGPTVACYAIAHILPIERFSSCKKLRRYAGVVPTCKESGNTRSHGHIPKTSSRRQLRWALIQAANTIGKTNTNLGRYYRRKKQQKKNAGIAKVAVASSLIDILYKVLTTKQPYKPNTC

SEQ ID NO: 297380 - protein, 457 aa, unidentified
MRIVYQRCCGMDVHKDSVTACVMLIDESGEWRSETRKFRTMTRDLREMASWLASLRVEAIAMEATGVYWKPVWNILEAEKKFHLLLVNAHHIKQVPGRKTDQKDSEWIADLLQHGLLKASFVPPQTIRRLRDLTRMRVKIRQMLATFANRIQKVLEDANIKLGSVASDVLGVSGRHMLDGLVEGRQDPKQLAALAQGRLREKRAELQSALEGHVTDHHRFQLKFLLEFVQFGEKQLSQLEAEIRCLLAQVEPASVPPEDTVTAELAAPGAGAEAPATAQKSPLQTVVELWDTIPGVDELTATTLVAEMGANMDQFPSAGHAAKWAGLCPGNKESAGKRLSGKTPKGSVWLRRALCQAAWSASRTKNTYLAAQYHRLIVRKGKKRTIVAVAHTMLVIAYYMAKRQCPYQELGGDYFDRRNADTMQHRLVKKLKALGYEVTLTPITAPPTAQEPTAQCC

SEQ ID NO: 297381 - protein, 354 aa, unidentified
MLVIGCDYHPSFQQIAFVDTETGELREERLEHREGAEKFYRGLAVAGQRVRVGMEASGHAGWFERLLAELQFELRIGDAAEIRRKRGRKQKTDRQDAQHILSLLLKDDFPPIWVPNGENRDLRQLLWHRHRMVQARTRIMNQLQAMAMNEGLLWRKKLWRERGRKQLEGFQLAPWASRRRRDLLELLDRLNPTIAELSQEIEREVEKCPAAQRLMTHPGVGSLTALAFVLIIGDADRFQCGKQVASYLGLVPLEDSSGNRRRLGHITKQGSSILRFLLVEAAQVTAGSLPEWRSKYHHLMLRRGRKTAKVAMARRLAVRLYWMIRQGWDYQQWSRFGSHAGQPGNRDGVRSNIE

SEQ ID NO: 297382 - protein, 360 aa, unidentified
MKKGSRKEVGEVAGLDLGDKYSQLCVLDEDGEVAEESRLRTTEEAIRRRFAHVPRMRIALEAGTHSPWVSRLLKELGHEVLVANPRKLRLVYENRRKDDKVDAMYLARLARMDPRLLHPLQHRGKGAQADLALLRSREVLIQSRTRLVNHMRGAVKSLGGRLPKGSAQSFGSRYAEAIPEPLRPALEPILQTLEEVTKRIREYDKRIEGIARHGYPEMARLTQVRGVGTLTALAFLLTLEDPDRFSKSRTVGAYLGMVPGRDSSGESDPQRHITKAGDVFVRKLLVQCAHYILGPFGKECDLRRYGERIAQRGGKNAKKRASVAVGRKLAVLLHHLWVTGEKYEPLYSVPRKAKLASVAR

SEQ ID NO: 297383 - protein, 422 aa, unidentified
MRLAYPICCGLDVHKNVIVATIVTTNKNGISEYIQKSFSTINSDIQRFHDWLIENDCYHACMESTGKYWIPIFNYLECDIDVCLTHPKYVKAIKGKKTDKKDSKWIADLYKFDLVRCSFIPPKDFRQLREIARYRFKLVCMKSSEKNRIQNCMTVSNVGIASVLSDPFCKTATDIMSYLLEHTAETIDDKAVRKLIRKNTKASSDDIIEAIKGYNIETDQAKKLELARSHLEYLDDMITQTEVELYVRIKPYYEFVELVSSLVGITQLSATIILAEIGVNMDVFENEKHLCSWCGLAPANHESAGKKRSVRIAKAGAYLKPLMVQCSLAAIKSKKQPYFAIKYGRIKKRRGHKKAIIAIARMMMVCLYHMISEKKPFNPTDYTQVTNPQYEFTKVILNERNVFAYLETQGYDTSLLVKCNDN

SEQ ID NO: 297384 - protein, 409 aa, unidentified
MTPSLFVGVDVSHKHNVVCGLDDQGQQVGKMASFANNLPGAEQLEQWIVEKMHTAGAEHLMVGTEATSFYDFHVMEHLAQSPLLAHLPPSLYRFNAKLIRDFKKALRSQAKNDYRDAFAIAMRLRMGDLPAAFRPQLEHLPLQRLTRFRAHTAKSLAREKNYFLSQLFLKFSAYTQIKPFSNPFGATSQAILAEYLSTDELMAMPLEDLLEFIIKKGKNRFPDPRKVVGKLKQVARESYRIRPALAQSVHLVLSLSYKNIRTLTSTIKELDEAIVKELDGFTTTLKTIPGIGPVYTAGILSEIGDIAYFRGHPQLAKYAGLTWTEHQSGDFRAEETRIIKTANAYLRYYLVEAANLVRLHDPTFRAFYQRKHQETLKHKHKRALVLTARKLVRVIFAMEKNGTIYRPQA

SEQ ID NO: 297385 - protein, 345 aa, unidentified
MTEAYDGRQVVGIDLHRQRSVIVRMTEDGRKLETVRITNSPAALRRVIAKAGEHPRVVVEATYGWYWAADVLEAAGAEVHLAHPLGVRAYGCRRVKNDQRDAADLADLLRMGRLPEAWIAPPEIRELRELTRYRHKLVQARTSVKDQVHAVLAKLGIPVSHADIFGVHGQAWLDELKLSQPYAGKVASLRQLAGELTAEITLLEQVLGDLLAGHEGYAAIQQLPGIGPVLAAVIVAEIGDIRRFRKPGQLGCWAGLTPRHRESDAKVTRGHISKQGPRILRWALCEAIQHQPAGTRPRQVKDAIIARRGPQARNIAKTAAARDLLTLIFYAWRDGRVRRAASPAA

SEQ ID NO: 297386 - protein, 359 aa, unidentified
MDVRDAARRHVVGGVDTHKDLHVAAVVDERDRVLGSQSFATTRQGYRQMLAWMGSFGEVQRIGIESTGSYGAGLLRFIQTVGIEVLEVTTPDRQDRRRRGKNDDLDAQNAAHAAFAGQRTVTPRRRDGMVESLRVLSACRKTAVAARRVALQLIQNTIVCAPDGLRDVLRSMTRMQLIRTLAAWRPDLTAYRDVEAAYRISFKSLARRYLELHDEIADLDIMIGAIVDELAPDLVSRNSIGHIGAAQLLLAAGDNPDRLQSEASFAALCGTSPVPASSGKTIRHRLNRGGDRHANSALHIIAIGRLRTDPRTKTYVAKRIAEGHSKLEAIRALKRYIAREVFTLIMRRHKQINQTQIAG

SEQ ID NO: 297387 - protein, 354 aa, unidentified
MKRTTKYVFLDVHAATTTVSVRVESGAVIARSVLPTEESALVEYFRGMRGAIHVGLEEGTQAQWLHDLLAPQVHRVIVCDRRGKGQEGNKADKLDADRGSELLRRRALRAVYHGSADRAPLKELARTYQNVVEDGTRVMLRLKALFRARAIRTPGRRVYGVRERAQWLAKLPDRGVRFRAQVLYAELDVLRALREKAKVSLVREARRDPAWRLLCTIPMLGPVRVSLLLAVLQTPWRFRSKRNLWAYAGLAVVTASSADYELMGGRVVKRTRAPMTRGLNRNHNRIVKSVFKSAATSAVGHRGPLQDFYYALLERGMRPELARVTLARKLSAVFLNMWKKGECFDPAKLTLQAR

SEQ ID NO: 297388 - protein, 360 aa, unidentified
MSECSLKPVWEVKLKVRYVGLDIGKWKCRAAFMNQEGEILDEFWFTNNHEGIEALTAKLTIQDRVVMESTGSVWTNLYDRLDDRHIHVSLANPLKTKAIASAKIKSDKVDARILAHLLRTNLIAESYVPTKPLREIRALIRHRVAIVKIRTMVKNQIHAITDKHGLRCEYSDMFGKSGTKWLKTLELPSLDKLILDNHLTHLESLNQQIDRVDEEVHIKACEDVRLLLSLTGIDVYSALLIRSEIGSIDRFPDYKKLVSWAGLAPSLHQSGSVEYHGSITKQGSKMLRWIMVEAATVAVNHDPRMRDFYERVKHRRGSQKAIIAVANKMLKITWFMLTRREPYESRNEKRYQQKLNSVEP

SEQ ID NO: 297389 - protein, 410 aa, unidentified
MQVVYERCCGLDVHKKTVVACVLVTETGGQMQRHIRTFSTMTAGLLALADWLESMSVTVVALESTGVYWRPVFNLLEEGRTIILVNAQHMKAVPGRKTDVKDAEWLADLLRHGLLKASFIPPAPIRELRDLTRYRKTLVQERAQDVNRIQKVLEMANVKLSSVATDVLGKSGRDMLQAIIEGTTDAQVLANLARGLLRKKLPQLQEALDGRVQTHHRILLQHLLAHVAFLEQALEQLQQEIEQRLLPFQEGIRLLMSIPGIAELSAAGILAEIGTDMSRFPSAKHLASWAGVCPGNKQSGGKRLSGKMRKGNVTLRALLAEVVWVISHTKDNYLSAQYHRLARRIGKNKAAMAVAHSVLVIIYHVLRTGEPYSDLGADYFQKQDAKRLAQRSLRQLEALGYEVTLTPKVA

SEQ ID NO: 297390 - protein, 414 aa, unidentified
MDVLHERCAALDIGKKDLKACVRTPSPKSRRSRRQEVRTFATTTNALLELRDWLLAEQVSLVVMEATGDYWRGAFYLLEDCLNVILVNAAHAKGLPGRKTDVSDAAWLCQMGECGLLKASFVPPEPIRHLRDLTRYRATLATERTREAQRLEKELEDAGIKLSTVATDILGKSGRAMLAALIDGERDVHTLAELARGKMRPKIPALVEALTGDFGAHHAFLCRLHLERIDQLSASILELSERIEAEMRPFAAQLERLATIPGVGQSTAQVIIAETGGDMTRFRTAAHLASWAGVCPGQHESAGKRRSGKTRHGNRWLAGALGTAAMAAARTKDTTYLGARYQRLVPRLGKQKALVAVGHSILTAVWHVLSADVDYHDLGGDYFIRLDPERATRRAVKQLNALGYTVRLDPIQAA

SEQ ID NO: 297391 - protein, 366 aa, unidentified
MKKTSTVRVNGNMIFKGHRLTIGLDLGDRWSFYCVLDEAGQSILEQKLPTTPEAMKQTFGKIPRSLIALETGTHSPWVSRLLSELGHEVIVAHAQKVQLITKSNRKDDRHDARTLARLARIDPALLGPVRHRSAQAQLHLTVIRARAELVSARTALVNAARGLVKSYGQRLPKCGTYQVSRELAAALSTELRDVLEPLFKEIESLNERVKEYDERMEKLAKDVYPEVSLLKQVKGVGTQIALTYVLTIENPHRFAKSREVGCFLGLRPGRRNSGESEPQKGISKEGDRYLRTMMVQGAHYILGPFGEDSDLRRWGQKLAERGGKNAKKRAVVAVARKLAVLLHRLWVGGEVYEPLRNSQKALREVA

SEQ ID NO: 297392 - protein, 330 aa, unidentified
MGFRYFLGVDVAKAKLDCLLLDSVEQRRRSKVVANTPEGFEQLVKWLTKQGVGCQQVHAVLEPTGVYHERALFALSQAGIAVSLVNPAQLRRFAQGLGIHTKTDACDSAVLARFGEMIKPAHWQPAPSKARALRALLARRDVVAQDLQRERNRCEALVIEDTPERVRQSLTDTITFLEQELQALQKSIDEHIDDDPDLKRIWDLLQSIPGVGQRVADHFTALLAGRDFKSAEQLAAYLGLVPTEWQSGTSIKGRPRMSKAGPASLRQLLYMPAVVATRHNPHVKALYQRLLAKGKAKMSALGAAMHKLAQLCFGVVHTGQPYRADWPGRA

SEQ ID NO: 297393 - protein, 400 aa, unidentified
MRAVFGIDVSKASSEVAILVNGEKVHGYTMSNDAIGFARLLGDLRTVHKPEIIFEATGVYSRRLQAFLDEHGYAYTRLNPLEAKKQLDSLRVRKTDKIDAEKLAQSQFVLNRKTTYVQEEVYQELRDLSRFYQNLTEDIVRAKNRLHKVLQVTFPEIETVLSKPTGEQYWNLVTAFPCKDFVLELSKDELLESIRQSTSKRISDKRVAYLAEKLTALANQSYCAVKKTSPIMEEVRYYAKELLRLSEQRQTVLDQMVELAQPLPEYDILLSIPGIAETTATSIIGELGDIRRFQSTNQINAFIGIDLRHYESGNFLAKEHITKRGNPYARKILFKCIHNIASASHTNPCHIADFYEKRKRQSQTTSTKPHTIASIHRLIRTMYYLITHNKLYDYTSTQNR

SEQ ID NO: 297394 - protein, 449 aa, unidentified
MSKKRAKAVSLPILEPDAAGVDIGATQVFVAVPPERDQDTVRCFNTFTADLEKLADWLEQCRIRTVAMESTGVYWIPLFQILERRKIEVRLVNAHHVKNVPGKKTDVEDCQWIQHLHACGLLRGSFRPVDEICAIRSLWRHRDNLIELATIHLQHMQKALDQMNLQLHHVISDLAGTTGLAIVDAILTGERDPRKLAQLRDWRIRASEETIMKSLVGDYREEHLFTLRQSLLSYRHYQDMIQKVDSQVKEMMQRVPSKVADGEKPPKEKNPRKTPWRNEPPQLRDDLYRAFGVDLTQVPGINTLTAQMLFTEVGPDLSRFATAAAFCSWLRLCPDPKISGGQVLSSRTRPTKNRAALALRLGAQGLHRSQSFLGDYFRRMKARMGTPKAMTAAAHKLARIVYHMVTTQQEYDTTVFQEQERRTQDRKRAKLLSQAKAMGFQLVSVESVP

SEQ ID NO: 297395 - protein, 346 aa, unidentified
MGKSITDLSSVTTVGLDLAKHVFQVHGVNASGRVMVAKAIRRNKLLEFFASLAPCLVGLEASGSAHHWARELIRLGHVARMMPPAYVKPYIRRQKNDASDAAAICEAVTRPSMRFVGVRSVMNQAALMRHKAREMLVTQRTQLLNGLRGHLTEVGVIAPQGLRCARELAELIEACDETIPFEVCEALAPLVVQLRNLDEAIARLDRIIAKLAQKDETARRLMSIPGFGPITASAMAATVQDASSFAGPREFAAFLGLTPKQNSSGGKPKLGRISKMGNRYLRKLLVVGAHAVLFHRMPHTDPLRMWAKKLIDKKPFKLVAVALANKMARIAFAIMRGTTVYREIPA

SEQ ID NO: 297396 - protein, 379 aa, unidentified
MPSENVVHIAIELSASSWLIGARLSDSDKVRLHRVDGGDTRALLALIDELRTRAASKSNAKPEVICCFEAGRDGFWLHRVLTAQGITTHVLEPTSILVNRRARRAKTDRLDAEAMIRVLIAWLAGDRRVCSMVHVPTPEEEDAKRPHRERQQLVQEKLRIENRIEALLFTQGIRKRPSLRSWDRDMAALRTGDGRAVPPSLRAELDRLRRRLVLTLQLIGELECDRTKAVEEASATDVMVGKIIALQRIRGIGENFAPVLVREVFYRSFVNRRHLASYVGITPMPYQSGGMDRDRGISRAGNPRARTTMIQLAWLWLRYQPGSALAIWFRERVGELQGRTRRIAIVAMARKLLIALWRYVETGVVPDGTELKTEIAATA

SEQ ID NO: 297397 - protein, 351 aa, unidentified
MKYYTTTTEYNCGIDLHARQMYACLMDRQGKVLLHTNIQGNDFGYFLQRVQPYRHDLTVVSECTFNWYWLADACEAAGIKFVLAHALYAAHIHGGKNKNDRIDSEKLAHLLRSNLIPPAYIYPSERRPIRALLRQRMSYVWHRAELMTHLSMNQTAQNCVPALKGGHNRDVWQERIIAQTPNPYHQLAVRCDMDAVRTYDTLIAKLDGTITLYARQHQSREYTLLQTVPGIGDVLAMTILYEIDTIARFPTVKDFTSYCRLVKGSVASAGKLKGLTGGKMGNAYLRWAFGEAAVICKRSHRLLSPYADRLVAKHGTFKGNAILANQLARAVYFMLQSGQAFDPERVIKASI

SEQ ID NO: 297398 - protein, 356 aa, unidentified
MQTQITKKIDFTGKNLFIGLDVHKKSWSVTIVVDGMEHRTFTQPPDPEALQKYLQRSFPGGSYHSAYEAGYCGYGIHRRLNDLGIKNMVINAADIPTTQKEKLHKRDPVDSRKIARGLEKNSLHGIHVFDRDLEELRSLNRTRFYLMRDLRRSKNRIKSFLLYYDIPLPSEFDNNQWTLKFIAWLKQVKMQTSGGQDAFSHLIASYEHHRQQLLILSRMVRFRISQHDKELYDLLKTTSGIGPLTSSALITEIGDINRFPHLDDLGSYVGLVPRVRESGETTHTGGITFRCNNFLRVLLVEASWQAIRRDPALMQYYHHHLVNSKGHKVIIKVARKLLNRIRYVMKNRKPYMTGVA

SEQ ID NO: 297399 - protein, 399 aa, unidentified
MDVHKETVVVCVLTPGPGADPHKEIRQFGTTTGELRKLVEWLKQEGVTHAAMESTGVYWKPVFNILESSCELILVNARHIRQVPGRKTDQADSAWLANLLRHGLLEASFVPPLEVRELRDLCRMRTTLVRECVQVGNRIRKVLEDANVKLDSVVSDTLGVSGRLMIQALMEGEQDPAVLAELARGRLRSKLAELTAALEGQVRPHHRFLLRQWTRLLSSLEQHIVEVEQEIERHMPPFEWAAALLVQMPGLDRTAACALIGEIGVDMSRFASARHLASWAGLCPGNNTSAGQSRSGKSHRGNPWIKGLMTEIAWAASRTKESYPAALYKRIAVHRGKKRALVAVANSSLQVVWHLLAHHQPYRDLGPDHFDRNNRQHLTQSLVRRLQKLGHTVTLTPAA

SEQ ID NO: 297400 - protein, 398 aa, unidentified
MVLTKQSEAPEQVTERGRVAVGIDPSRSVLQVALLFPDGESPRNHRLPLEPASVNRLEELLEGREATFAIEGAASVGQLFLLELLSKGHDIREVHPKVSKNVREVFTEDHTDIKDSSGLAYAVRFVPSLPSIGLSSEQAAAKRLSRLRERLVRDRTRHINRLHACLTETYGYVYHEFFRELSSKKALRFFMQYPALNDALAHPKEVRREIGEQAWQALKSVGDWTDGVYMRILRQEVAVSVDMILELKRQVDEVEREMKASPWGRNIEVLTSMPGVGAIIASTILGNTGDMSRFKSQNTYAAYCGLAPASWQSGASETRNRRRNRYNRHLKRVFLSLALTQIRVSSEAREYYDRKRKEGKNHWRALRALARQLCRIVFLMLRKEQPYSFVNHHYKTIA

SEQ ID NO: 297401 - protein, 340 aa, unidentified
MRQLYAGCDLHGNSNLIGIVDGEGKRVFKKKLSNDFSLVRDTLKLFQEELVGIAVESTYNWYWLVDALMEEGYKVHLANPAAIQQYSGLKHADDKHDAFWLAEMLRLGILPEGYIYPKEERPVRDLLRKRGHLVRLRTSLILSLENIISRNFGSKLPVNHVKGLRNDRVTPLFEGNEDLALAGRVSKETIDFLTHQIRQIEGVVEKRIQLKEAYRYLLTLHGVGKILGLTIMLETGPIGRFETVGDYTSYCRKVPSQWISNGKRKGSGNRKNGNKYLSWAYAEASDFARRLHPESRAYYNRKMQQSNPAVAHSALSHKLARAAYYIMRDQVAFRPEKLFG

SEQ ID NO: 297402 - protein, 347 aa, unidentified
MNFYNIMHPYYCGIDLHAKTLYVCIIDQEGNVCLHKEIPASPKKLQELLEPYIEGVVVGVECMHCWYWVSDFCEDLGVDFILGHALYMKAIHGGKAKNDRIDSFKIATLMRGGNFPLAYVYPKAMRATRDLLRRRMKIVRHGANLKAHVGNTTSQYNLPPNKVNLKNISAREQLRSIFPDPVVQRNIDLDMAVIECYAKELSKIEWFLEQQAKQHNPVHLHILRSVSGIGRILALTIIYEVGDIHRFDSVQQFASYARLVKCKAESAGKCYGTQGNKIGNAHLKWAFSEATVLYLRGNKKAQWYLQTLQKRMTKAKAISVLAHKLGRCVYFMMKHEKVFDESQFLKG

SEQ ID NO: 297403 - protein, 350 aa, unidentified
MIIIGCDYHPGFQQIAWLDSDDGELQERRLAHREEAEQFYGKLKQPGKPVRVGMEASGHARWFERLLAELQFELWIGDAAAVRAKRVRKQKTDRQDAQLLLQLLLENRFPRIWVADAENRDLRQLLWHRHRLVQMRTRVINQLHVVALNQGLRRKKALWRPAGRAELAGLSLAPWASRRREDLLDLLDRLTPKIQELTGKLEQIVQRRPVTRQLSTHPGVGPLTALAYELVIGMPERFQCAKQVASYVGLVPAEESSGDRRRLGHISKQGNVLLRFLLVEAAQVTVRSDARWRSQCFHLALRRGRKIAKVAMARKLAVELYWMWRRGWNYAEMQKLGSHAGEPGNPHGVH

SEQ ID NO: 297404 - protein, 405 aa, unidentified
MDIEDIDVFIGIDVGKAEHWATALSQEGRKVLDRTLPNDEERLRALYKKLADHGNLLVVVDQPATIGALTVAVAQDMGITVGYLPGLSMRRIADLTPGSAKTDAKDAAVIAQAARTMPHTLHAISTSDEETAALSMLTGFDLDLARQVNQTANRIRGQSFTQTPPSPRDRGGALAGARLRPGGPSPPGTAPADLKRAGKARIDAKLKKHGCRRHTTWAAQIVSALEHQTVVVAGTDAAGTVLPHLARQLISLHAQRADVAAQVETLVQAHPHVPGPDHPCPGSGVPAAAVFLAETLGKTFDTGAHLASYAGLAPVTRRSGSSIRGEHVSHGGNKRLKRAMFLSAFASLRSDPVSQAYYQRKRQQGKRHNQAVLALAHRRILTLHAMIRNHTLYTPQPATKLPTAA

SEQ ID NO: 297405 - protein, 429 aa, unidentified
MPYRIAGIDVHKKMLAVVVSDVEIESEYQFERRMFGSSPEQLRTLAAWLLEQEAEEVVMESTAQYWKPIWEALEGYWKPIREKREGARRRSGALHLAQAESNRGRRGRKRDFVDAERLVKRLVARELTLSFVPDAEQRLWRTVTRRKHQLRCDRIRLQNQLESLLEEAHIKLSSFVSDLLGLSARRMLKALADGETNPAALAALADQKLRATPEQLCDALGACTELNAVYRHLLKMALEELQLIDEQIGQLDQEVASLLSQHQDAVERLAEVPGLGVDSAQQIIAEVGPTAATFPSEKCLSSWVGACPGDKESAGVNYSHRSPKGNRHMRRLLNQAANAAARTKGSIFEIVYRRSVPRLGHNQAIGAIAHRQCRLIWLLLHQGVRYEERGPAVTKRSKQLKTWKMLRQLRSLGYRIEPPNPQPSQTEVQ

SEQ ID NO: 297406 - protein, 318 aa, unidentified
MKSLSFVGVDVSKATLDIAIEDQDGTVQIANTHAAIRHWLKQLSVGSYVGVESTGSYHQLFVRQVIAAGHTVYLLNTRDLSHYARAVGRRAKTDRLDARLIARYLAREHTHLHPYRLPTELQAELDALMQRRHIAVTTQTSLRQSFAALASKPRAFARTLRAFDALITELDQRMQTLVMKDPTLAPIARNLHTMVGFGPLLSHSMANALTRHPFKHADAFIAYVGYDPRVRDSGQLRGRRFLSKRGPAELRRLLYVAAMSASKTKLWRPFYERYRARGLSSTATLVILARKLARIAFSIVKHGTVFRPELIESACAKP

SEQ ID NO: 297407 - protein, 350 aa, unidentified
MQYLGIDWGTRRAAWCALTAAGELTEGVISADEDGLTRLVARLGPDVRGCIEMMSGAVWVRDRLAECGWTIEVADARKVKAIAPLACKTDRVDARVLADLVCRDLVPTVWVPPLDDRAIRERLRRRSHLIRLRTSSINRTFGLLTQWGLRRNLTALRQPGALDELAEHGVPDVWRTSLPTLLGVIDDLDRQLAPLERELRPLARSDERARLLMSIPGVAELLGLTIASEIGDISRFPSARKLVGYSGLAPRIKQSGQSSRTGRLSKAGPDTLRWAAVEASQQAWRPNNPWHELYTDIKRRHGKANPAKAAVARKVLIAAWHVLALQQPFKPNAPRATDPVPASSSIRLAT

SEQ ID NO: 297408 - protein, 373 aa, unidentified
MKEFSKYVGLDVHKETIAVSIAEAGGGEVRYFGEIANTSEAVAKLARQLKKGDARLSFCYEAGACGYGVYRQLRELKHECLVVAPSLIPRKAGDRVKTDRRDSLSLARLHRAHELTAVWVPDGAQEALRDLTRAREDMKHLQRQSRQRLLGFLLRHGQRYSGKSHWTQAHARWLETVKLEQPVQQIVFQEYVDTVRALTQRVGAFDQHIERASNESVFWPVIQALMALRGVSLLSATTVVAEIGDLRRFAGAPQLMAYLGVVPSEHSSGGKRSRGGITKTGNGHVRRVLVEAAWTYRHPARKTAVLQRRAERAPEAIQDIAWKAQTRLCGRYRRLEGKGKLKVQVCTAIARELAGFIWAIGQAVPPVTAQASI

SEQ ID NO: 297409 - protein, 358 aa, unidentified
MQSNKINFKGQNIFIGIDVHLNSWSVTTITPSGYKRQTSHRADALELYAYLTKNFPGGIYHAVYESGFCGYSCCYELRELGIDCVIVHAADVPSTQKSRLSKTDSNDSMRLAMSLSNGELNTIYIPPKEVLGDRDILRYRTIVQKGMSRTRSRIKHLLHTNGVSYPLEFREPYKHWTRRFIKWLREDVKLLSGKRLELDFLLEDLEHQRSQLLKATGKVRELSRTSRYAEDYSNLISIPGIGLITAMTMLTEVTDIHRFSSQKKFMSYVGLIPVMKDSGETIRQNEITPRGNQRIRRMLIESAWSAVRYDAQMAAAFGTFCRRMKKNRAIVRIARILASRTYHILKTRTKYDTALCTA

SEQ ID NO: 297410 - protein, 405 aa, unidentified
MFYVGIDVAKEKHYVCILDNDAEFAIKPFWIYADILGLQELEKRLASVSLNRDDFIIGIESTGAFSENFYGHFTDSGYKVILLNSYQTAKYRDFSTMKKIKNDAIDAYVIAELLSTGKYKSSHISNDDYHSLKVLGRLKSSLYKKIKTIKREISTVMATVNPEITKVFPNLFSKTALEIIKAYPTATQLQKATPKKLTKLFRHIKGNNFSEEKAKLLIELAKSSVYTGRACEARALMIQTNITILELLSQEKSKVESQINELISNQIDNSPCSIIENLKTIDGVAIKTIAVLLGECGDISRFKSSKSFIGYLGLYPTQYQSGNSLSVGRLAKRGIPIAKHALFMAAVASVRHNMQLNKLFHDKVSAGKSKKEALIIVAKKLATIIYSICKYNKPYEPSRVFLPRK

SEQ ID NO: 297411 - protein, 369 aa, unidentified
MKTKTKTPSVVSTSPAAVVSGFTLGLDLGDRAHHVGVLDASGQIVREASLPNTRPALSQLLTDFPHATVALEAGTHSPWISRYLTGLGATVFVANPRKLHAISRNERKCDRRDAQMLARLARADVALLHPIKHGTAQAQHDLLGLKLRDALVRTRVNLINPVRFTLKSLGHSVGNPSSESFHKTVLADIPAECLPVVQPLLTVLTQVTEQIKGMERDLVQRSKKDYPVTQRLQQISGVGPLTALCFVLKIGDPERFSRGRDVGAYLGLCPRRDQSGGTDKQLRISKCGDGLLRRLLVSAAHYVLGPFGPPCALREHGQRLTGTGSAREKKRAVVAVARKLAVLLLSLWKHGTDYEPRATAAPALVLTPA

SEQ ID NO: 297412 - protein, 415 aa, unidentified
MFGWFVGIDLGSEEHEFCVVDAAGQIRGQRTVAHTTTAVHAALDWIRQCTGAAPHEIAMGLETPRGVLVHTLVEQGYGVFALNPKQLDRFRDRFTAGGAKDDRRDAHVVADSLRTDRRAFRAVRADDPLIVQLRELSSMLDDLTIDEGRLANRLREQLYRVHAPWLTLSPAADDSWLWTVLRDAPHPATWPQLPRRRIQPVLRAHRIRRLTAEDVVAAVRQPTLAVAPGVTDAVGLRIASLVPQLLLVHDQRATVERQIDRLLETLGQSEDVEGEPREHRDVEILQSLPGVGRVVTATMLTEATGPLADRDYATLRTYTGAAPVTKRSGRRAFFVHMRYACKRRLRHALYHWSRTSIQKDMAARAYYDRLRGRGHSHARAPRSVGDRWLRILIAMLKTRTLYDPSRYTQIAMATA

SEQ ID NO: 297413 - protein, 341 aa, unidentified
MSESALIGIDLGKHTFHLHGQDKSGREVFRKKCSRAQMMQFFGNVPSCVVVMEACAGSHFVARQLMAMGHTAKLISPQFVKPFVKGNKNDFVDAEAICEAASRPSMRFVTPKTESQQTLSVLHRMRESLVHDRTKTANQMHGFLLEFGINLPKGLAIMKRLASVLAEHDLPVRLTVLLQRLHDHFVYLDEQIKALDKELAGQLANDDLGSRLLSMPCVGPITASLLAVEMGDGKQYRCGRDFAASVGLVPRQYSTGGKANLLGISKRGDKHLRQLLVQCSRVYMQRLDHQKGALADWVKTLLSRRHSNVVACALANKLARIAWAIAARHTQYEAGPDALNA

SEQ ID NO: 297414 - protein, 438 aa, unidentified
MCVSTGPLGRWVFLFLLPKDAGRRLFGGHVLFVGDDWAEDHHDVEVQDHTGRRLGRARLPEGVAGVARLHALIGEQLPEDADPGSVIIGIETDRGPWVQALVAAGYTVFAVNPRQLARYRERHSNSGAKSDTFDAQTLADLVRTDRHRLRPVAGDSEQAQAVKVVTRAHQTLIWDRQRHMLRLRNALLDYFPAAVEAYPDLTAPDTLDLLARAADPAQAARLSRTQIVAALKRAHRRNVEDKAVAIQAALRSEQLGQPAAVTAAYAATVRSLVSVITSLNTEISALEGHVADHFGRARDAEIHLSQPGMGEILGARALGEFGDDPGRYASAKNRKNYAGTSPVTRASGKKKVVLARFVHNDRLVDALHQQAFCALRASAGARAYYDQLRGRGISHHAALRQLSNRLVGILHGCLKTGTLYDEHTAWGHHNQDQHPAAA

SEQ ID NO: 297415 - protein, 356 aa, unidentified
MNEGSWVGLDVHARSVVGGVIDAGSGEVRSLRVPPGSEGTVAWLKTLPAPVRVVYEAGPTGYRLARACAEAGISCVVAAPSKIRPAADRVKTDRRDAERLARLLRLGEITPVRVPAPEEEAARDLVRAREDTRGDLMRARHRLSKLLLRHGAVYDATAWTRAHDVWLRKQRFQGGPLATVFDECYSRMIDAKSGRDALDKAIAELAATPPYIDVVERLVCLRGVSTLTAFALTVELGDWNRFRPESLAPFLGLTPSENSSGERRRQGAITKTGNTHARRLLIEAAWHQRSAPRLSVTLERRRTGKSLAVRAQADSSARRLHGRWNALEARGKPRLIVVVAVARELAGHCWALATME

SEQ ID NO: 297416 - protein, 337 aa, unidentified
MEQSTQYVGIDLHRRRSVIVRRNHAGETLETVRIDNDSRALAAELAKAGERPEVILEATYGWYWAADVLQECGANVHLAHPLGNNWGNRRVKNDERDATDLVDLLRLGRLAEAWIAPPPLRELRELVRYRAKLVHLGTSLKAQVHSVLAKEGVAVPMTDLFGSKGQRLLDGLALGDAYRIRVTSLRDLIEVVGREITMVEAEIAPGLAGDLGYQAIQAIPGVGPILAAVFVAEIGDVSRFKSARHLCSWAGLTPTHHESDEKVRRGHITKQGSRLVRRAAIEAVVRQHGWTAVSKHHRAVAERRGNKIGRVAAARKLLILVYYGLRDGEVRCLAEPG

SEQ ID NO: 297417 - protein, 351 aa, unidentified
MTEAYDGRQVVGMDLHRHRSVLVRMTEDGRKLETARIDNSPPALRAVLARAGTNPRVVVEATYGWYWAADTLQAAGAEAHLAHPLGVKAFSYRRVKNDERDCADLADLLRLGRLPEAWIAPPPVRELRELTRYRVKLVRLRSSAKDQVHAVLAKLGICVPCSDLFGAYGSAWLDGLRLPQPYAGKVGSLRQLIGWLNGEIRLFDEVIGDFLGDYPPYQAVLRLPGLGPVLGAVAVAEIGDVGRFPGPGQLCSWAGLTPRHRESDVKVARGHITKQGSPVLRWAMVEAVQHQPAGSPPRELRDRITDRRGGEAKNIAKIAAARKLLTCVFYAMRDGEVRSLTAAGRALAEAG

SEQ ID NO: 297418 - protein, 404 aa, unidentified
MNAVGIDVSKGKSTVAVLRPYGEVVVSPFDVAHTGSDLRALADLIKKLPGETKVVMEATGNYFESIARYLHEQNIFVFVVNPVLISDFGGNTLRKPKTDKKDSVKIASYALTYWLDLKEYTPQEDLRKSLKLMNRQYQQSIKLKTMMNNNLISLLDLTFPGINKLFTSPSRESDGHEKWVDFVLEFSHCDMISKLTIKAFAKKYKKWSDKNSYHFTESSCEKIYAFAKDCVSSVSSDKAIVFSVVQAAKMLISATENCHAIQSEMNRVASKLPEYDTVMNMYGVGKAVGPQLMAEIGDPRRFHSRKAITAYFGYDSENNDSGQKTTRSNPMTKKGSGALRRTLFIIMQVLLQTKPQDNPVYDFLIKKKSEGKHYYSYINAAANKFLRIYYARVKEVLNVSEQMT

SEQ ID NO: 297419 - protein, 350 aa, unidentified
MLIIGCDYHPSFQQIAFVETETGELSERRLVHREEAEQFYSELKEQNAKVRVGMEASGHARWFESLLRDLRFELWIGNAAEIRTKRVRKQKTDRQDAQLLLRLLLEERFPRIWVPDSENRDLRQLLWHRHRLVQMRTRVMNQLHVVALNEGLQRKKALWRPAGRKELESFELAPWASRRRQDLLEILDQLTPKIQELSKALEDEVEKRPVTRRLMTHPGVGPLTALAYELVIGTPERFHCGKQIASYVGLVPTEESSGSRRRLGHISKQGNVLLRFLLVEAAQVTVRSQPEWRSKFFHLAMRRGRKIAKVAMARKLAVHLYWMWREGCDYSQWKKFGSHAGELGNRDGVQ

SEQ ID NO: 297420 - protein, 374 aa, unidentified
MLHQQLLGHWSPSRDVRACPSTKKGVAVTIVDSARHVVGGVDTHRDVNVAAVVDMNGGVLGVESFPTTANGHRRLSSWMAGLGMIERVGIEGTGAYGAGLARHFVAAGVVVIEVDRPDRQKRRRLGKSDQLDAVEAARGALSGRCRGRAKSGDGHAEALRALLVAKRSARSTRIRTIVQLRHLMFTAPDGLRARLGGLTATQLVNEAAKLRPRLGGDVALQGTKTAAVILARRVHALDAELAAIDEQVGPLVKAAAPELLNIYGVGVDTAAVLLVTAGDNAARISSEGAWAMLCGIAPIPATSGKIDNRFRLNNAGDRHANNAIWRIVITRLGQHEPRTVAYMNRRLAEGKSKRYIIRCLKRYVAREIFRALPR

SEQ ID NO: 297421 - protein, 412 aa, unidentified
MEVLYPHCAGLDVHKDTVVVCVRHMVNGTVSREVRTFKTTTKELLALSEWLATEGCTHIAMEATGVYWKPVWHILSDGDFALVLANAAHVKNVPGRKTDVNDATWLADLLAHGLIRGSFVPDQQTQEMRDLLRTRKQLVREASRHIQRLQKTLEDANIKLDSVISDVMGLSGRRMIEALIAGQSDPEELAQLAHRRIKASPEELREALRGRVTRHHRFLLSLHLQQIDAVDAAIGAIDQEVDAQIEPFRTTVHLLTTIPGVDELSACVILAEIGRDMSRFPTAGHLISWAGLCPRNDESAGKRRSTRMRKGAAWLKTTLVQCAAAAARKKASYLQALFHRLRARRGAQKALGGVAASILTAAYEMLKSGALYEDLGCDHFEKRGKARQINRLVSRLQNLGFAVQITPVPAAA

SEQ ID NO: 297422 - protein, 357 aa, unidentified
MTSSNHLPAARVVVGVDTHRDEHVAVAVDQLGARLGQHRLHTTADGYEGLHRWVTSLGEIVAFGIEGTGSYGAGLTRYLASRDHTVIEVNRPDRSTRRRLGRSDPLDAEMAARAVLAGVAKDSPKSGLDKVEMIRMFKIAKDSAIKARTQAMNQMKAIIVTAPAELREELTRLDACRLMDRCAGFRPGSLATPTAAVKHVLRLLARRHRWLTSEIEGINNELFRLTTETAPALVDAFGIGPDTAATLLVTAGSNPERLRSESAFAALCGVSPIPASSGKTNRHRLNRGGDRQANAALYRVVLVRLRYDKRTREYMQRRTGEGMTKLEVIRCLKRYVARQIYAILRDPGRKNLALAAA

SEQ ID NO: 297423 - protein, 392 aa, unidentified
MVYVGIDVAKDKHDCFIVNSDGEVLYDVFTIQNNMDGFEDLLFKIKTVSKNPDKIRVGLEATGHYNCNLLGFLKNKGLATIVINPLYTSLSRKSTSLRKTKTDKVDARTIASIIMSDASLKPYSDTLYHNEDLKSLSRYRFDKVSDRAKLKQSVSRLVCILFPELEKLVSTIHAKAVYELLSEFPGAYQIASANLKHLTSLLETASKGHFGRDKANEIREAARQSISSYLPSKSLELKHTINLIRELSSEIDEIEAEIKKIMDAIDSPILSVPGISYAIGSMIVSEIGDFSRFDSPDKILAYAGCSPTTYQSGQLYSSHAKMEKRGSKYLRWALINAARYVCNWEPTFAAYLEKKRSEGKHYYVALSHAAKKLVRLLYHLEITGEKYKPVSV

SEQ ID NO: 297424 - protein, 469 aa, unidentified
MALTLGIDVAVRTAHQATLSRDGKTLWRGRKFLTRPEELERVWADVGVEDPAELTVVLEPTRNAWIVIAEWFRRRGARVVMVPTTQSADLRKYYSKHAKNDRIDSELLARLPLLHPEGLRFYTGQGPADPLRRLTKQRSTMVKRRTAVYARLDALIELLGPAWYAVLGSNYGNAALEFLARYADPRTVIRLGQGRLARFLIARSRGHWRDEHAASLIAAARETLALWDVDGAEGMDFAELAADIAHEAEQALFLTRQIKEIDERLANLYADADPQGIVASAPGVGATVSAVIAGRIGDPHRFTSLSAIRAYTGLVPKVSQSGVIKTESSITKAGDPLLREMLYTAADQARKVDPQFAAKYQRLMAGDRHHDSAICHLATMLITRIATCMRAGQTYQLRDVDGTAITESEGRAIVKQRYQLDPGAAITSATNSCASGAKRRARSHRSRQALQHPGPPTTTLRASTSLDIP

SEQ ID NO: 297425 - protein, 413 aa, unidentified
MGHKTAEVELHYERCCGLDVHKDIIVACFRDGSKNTIRDFGATSKELQKLAEWLISADCEMTVMESTGSYWKPVYNILELLGLEVMVSNARDVKNLPGRKTDVKDAEWMARLLAQGLLKPSFIPDREQRELREVTRYRKSLTEERAREVNRLGKMLEGANIKITSVVDDVLGKSSRKLLEAALAGKPITDITIEGMLYRKMKGKAALLVDAMDGVLSKTQRRLIAAVLDHIDDMTKRIADIDDIIRGEMDKYDEAIRRLAKIPGVGISSAQTILAEIGLDMDRFPTAGQLAVWAGVCPGNNISAGKSKSGKIRKGNQTLRSVLVQCAQSATLTKNTFFRAQYDRLVVRRGKNRAKVAVAHSIIIAIWHMLKHDTDYYELGRNYYNSFNPEKKINMYLKKLAELGWVPPIPVVA

SEQ ID NO: 297426 - protein, 348 aa, unidentified
MKQVTTIGLDIAKSVFLVHGVDAAGHVVLRQKLSRSRVLEFFAKLPRCLVGIEACASSHYWARELIALGHEVKLMPAQYVKPYVKRGKNDAADAEAICEAVTRPTMRFVGVKTVEQQSIMMLHRVRLILMRQRTQLSNALRSHLAEFGIVSPIGREGLDRLLTIVADTDDGRVPAEARASLEMLAVQLEGVKAQILENDRRIIASARATEAGRRLLEVPGIGPVLASAFVASVADPAIFKSGRDLAAWIGLVPRQNSSGGKERLGGITKAGNGYLRQMLMVGAMAVIRYAQRNSARRPWLVQLMCRRPTKVAAIALANKTARTVWALMISGERYRDPQAMQAAVSATL

SEQ ID NO: 297427 - protein, 443 aa, unidentified
MKALPLLDSKAAAIDVGSEKLHVSIAGDSPKVFGTFTSDLEVLREWFKGHQVRTVAMEATGVYWLYLYEVLEAAGLEVVVVNGRHVQNVPGRKTDMADCQWLATLHAHGLLRGGFVPSADIRQLQDYQRLRTDHLVGAASQVQKMQQALERMNIKFHDVISDLAGVSGLKVVRAILKGERRPGELLALCDPQIQKKKSAAVKESLRGCWKKEQLFALRQALELWEAYQQKIADCDREIQELLQQLAGGSGPGGNALIGPVRLAPPKDPGKNAPVIERCQELLVRICGGQDATQIPGLSQALVLQLISEVGTDMSRWRTEKHFVSWLGLAGGRKQSGKRKGTVKAHRNRAGRMFCAASRALAQSVDKALGGFYRRLRGRVGGLAANVALARKIAQLFYRLLRYGMDYVEKGLKAYEAKVLATEAYLLRKLAKKQGFVLISAPKN

SEQ ID NO: 297428 - protein, 403 aa, unidentified
MNGPIVSVDVSKGKSDYQAFKDLNVKFTDVRSIKHTKEGFDEIVNLVKDMERKLETEVCVVYEATGVYHRVLKKVLEDNNIKQFIINPLLSAKTRKNDSLRSPKTDKLDPKSIAKTYYNQSLHSSYKPQTTYHELRELSRYYEDILVHIRKDKVAFRAQLDIVFPGYDTLFDDLYGAVSLTVIEKYPHPELLQKKSINTVSKIIQKKTHHRQAVSNKMASKAIEYSKTIYSGCGKDDIDVLILERLIKKLNEDLNEAERTINEMIRLVQELPDFIIIKSIPGIGDNLAARIIAELGDMIRFKKKNELVAYAGLDPRIYESGQKDGAHMHITKKGNKRLRCLLYLAVTCSIRLKRDDNSIKDFYIKKMQQSNPMCSKAAKTACASKLVRIIYSMCKTGELYQYE

SEQ ID NO: 297429 - protein, 339 aa, unidentified
MKLYAAIDLHANNSVLVVLDEKDRIVLEVRQPNDLALILAQLAPHKKKIQAIAVESTFNWYWLVDGLMEDGYEVKLVNTVAVKTYDGIKYTADEHDARHLAHLLRLGILPTGYIYPKEDRAVRDLLRKRSQLVRLRTTQILSIESLVSRNTGERINVAEVRKLDESAIARYSCGDAARGLAIKSNLAMLRCLDVQIDEIEAVVLKQAKLKPEFKKLLTVDGVWNIVGMTIMYEAGDMSRFESVGHFASYARCVGSSRWSNGKKKGEGNRKNGNKYLAWAFMEAAHFAVRYNERIRKFHQRKAAKTHKIVAAKAVAHKLARACYHVLKEQTVFDEERAFA

SEQ ID NO: 297430 - protein, 355 aa, unidentified
MGAKRIIARDVEVAMGIDMAKESLAVTVLTRDGELKGAVISSTRPALESFVSRFPGCRIHAVYEAGCFGFWLYDTLRELGVDVIVTPPSKLPRAPGERVKTDRRDSQTLASQLLAGQLKAVHVPRPKDRALRQLVRTAKQLQRTRVRTMNQIGSLLLFHHSEKPAGLGKNWTRAFLTWLESLSFAEVPGGEYLRASLDALLELYRQLTRQVSELKKAIRKLARLPEYERAVHVLTSTRGVGTYSAMVVLSELGDVSDLAERFEHSDQFTGFLGLVPGEHSTGGVRHGGHITKTGNRFIRGVLVECCWRWIGGDAQAKTTYRRIARRREKKRAIVAMARRLAAKMYWQLRQLPKSA

SEQ ID NO: 297431 - protein, 358 aa, unidentified
MAVTEGTRRIVGGVDTHKDLHVAAVVDEQDRVMETRSFATTRQGYRQMLAWMRAFGELQRIGIESTGSYGAGLLRFMQQAKVTVLEVTTPDKQDRRRRGKNDDLDAQNAAHAAFAGQRTVTPRSRDGMIESLRILTACRKTAVSARRVALQMIHNTIVCAPDGLRDQLRSLTRMQLVRTLASWRPDLTAYRDLDSAYRIGLKSLARRYLELHDEIADLDAMIAAIVDELAPNLVARNSIGHTGAAQLLLTAGDNPERLRSEASFASLCGVSPVPASSGRTVRHRLNRGGDRAANSALHIIAIGRLRTDQRTKDYVARRLAEGHSKLDAIRALKRYLAREVFTLITQRRKEINATRIAA

SEQ ID NO: 297432 - protein, 358 aa, unidentified
MRGSRELFPKITVGLDLGDRVSEVCEVDWRGREVRRGRVVTTRAGLRQYFGGRERCRVVLEAGTHSPWVSRELEALGHEVVVGDPSRLYGGRRKKKSDRLDARYLARQGRADVELVYPIRHRGEQAQRDLAVIRARDQVVRTRTKLINHVRGAVKSVGGRIGRCSAEAFAKRAVRELPEGVGEALLPLLELIEELTARIRAYDRQIERLVERYPEAVRLRQIKGVGPVTAVAYVLLVEDARRFLRSRQVGAFFGLVPRLAESGGSEPQLRISKAGDELGRRLLISAAHYILGPHGPECDLRRYGERICARGGKNAKKRAVVAVARKLAVLMHRLWVSGSVYDPDYQRRRRERRRLQLA

SEQ ID NO: 297433 - protein, 359 aa, unidentified
MKSKGKAIDFSGQNIYVGLDVHLKSWKVTIMIEERFHKTFSQDADASILRAYLCKHFPGATYHSVYEAGFCGFSVHRQLMSEGLRNLVVNPADVPTTDKEKTQKEDKRDSRKLARSLKSGELSGIYVPEKGMEELRSLVRYRKTLVKEITRHKCRIKSYLYFQGIKIPAEMSNAGKHWSSKFSKWLKEEVRLETIHGKMVLDELVDTAELLRQKLLKVNRLLRRLGIEGEYCHRLQLLQSIPGIGLVGSMTLLSELDDIFRFKKLDYLCSYVGLVPSTNSSGEKEKTGKITRRSNRFLREIIVEAAWTASRLDPDLAQSFAILSKRMSSNEAIIRIAKKLLNRIRYVLKNEVAYVHSIR

SEQ ID NO: 297434 - protein, 342 aa, unidentified
MDQISIIGLDLAKGVFQVAGRNAAGEKVLERRLRRAQVEPFFARLEACVVAMEACASAHFWARRLQALGHDVRLIPPIYVKPYVVRNKNDARDADGLSLAVQRPDIPTVPIKSPEQQAQASLHRVRDLLIRQRTQCANQIRGLAAEYGLVDGPGREGLKELTARIASADLPEAAREALLLQADHHGELGEKIDQLTQQICAQARACQEARRLMTIPGIAEIGAHALIARLPDARTFRSGRDLAAWLGLTRLDHSTGGKPKTQGPISKRGDRALRRLLVLGATSVIAHQRRTKRLDPWIAGLLQRRPFKVVATALAAKMARIVWALLVRGETYQSGHQPKLAA

SEQ ID NO: 297435 - protein, 337 aa, unidentified
MAIVCVGVDLAKNVFAIHGVDEVGKAVWVQPRVPRAQLLAAFSNLPPCLISMEACSGAHHWARQLLSMGHKVRLIAPKFVTPYRLGGKRGKNDAADAAAICEAVQRPHLRFVPIKSVEQQARLAVHRMRQGFVEQRTALINRLRGLLSEFGIVMAQKAATVRRLASDQVDSLPGWMRVATRDALDELAQLDERISDYDAHLRHIARDDPRCQQLQQLPGIGDTTATALVSQIGNGQDFHCGRQLAAWLGLVPGQHSSGGKARLGRITKAGDAYLRSLLVMGARAVLASAKGKNDAVSRWILALEARRGYWRAVVAMAAKNARMAWAMLRHGEAFVMP

SEQ ID NO: 297436 - protein, 363 aa, unidentified
MTIVAHARPFVVGVDTHARNHPLAILVAATGELLAAEQFPATNTGMDRAIAWVGRRTGGDLATLWVIEGIGTYGARLAHTATGAGYQVVEAPRMNARANHGVGKSDPLDARRIATAVLSLDSDELRHPRQDDGVRAALRVLVTARDHMTLERTANVNALIALLRVVDLGIDARKPLTSKQVREVSRWRTREEDLGAATARAETVRLAQRVVDVGEDLKSNATSMTVLLRQSRAAVLAEKTGIGPVTAAIALTAWSHPGRVRSEAAFACLAGVNPIPASSGNTTRHRLNRGGDRRLNRALHMATIVRMTHDPETRAYVEKRRAEGRTTKEIRRILKRYLARQIYRTLTRNPAATNHPPAPLDTT

SEQ ID NO: 297437 - protein, 411 aa, unidentified
MIEPLVKCCAGLDVHRASVVGTVIREDDTGEIHRETQEYSCYRQGLLELGRWLCVHEVELAVMESTSIYWKPVYEVLEGLLPRLYLVNSRYVKQVPGRKTDVRDSEWLAELARCGLLKSSFIPPKDLRGIRFLTRYLMKLSGYIASEKNRLHKTLDDAGIKIGCVVSNMGGLTATSIVEALIEGKMTPEQMAELARGHLKKKKEELRMSLHQDLSDRHRYLLRCIQKHLKWLENQRAEIVCQVVAAMEPYREQWQLLQTIPGFDELSAAVLLAEIGIDMSRFGKSDRLTSWAGVCPGSHESAGKNKTGRTRKGNRYLRQMLCEASNSARKTESQFKYIYQGLAIRRGHNRAILAIGRKLLEVAFAILSKKEPYRDPRVNYEELLVMRNAPRWIAKLRKYGYLPVYPKQKAA

SEQ ID NO: 297438 - protein, 347 aa, unidentified
MNQIIRIGMDTSKHFFQLHGVDTAEQPVLRRKLRRKEMVGFFAKLPPTEIGMEACGAAHYWGRVLRELGHTVKLIAPQHVKPYIKRNKNDGRDAEGLCEAMSRPTMQFVPVKTEEQQAALMLVGMRERLVARRTQLSNAIRGYAAEFGLTAAKGLDKIEPLLAGIAADEALPVLARDLFAMHGREYVQLQAELKKIEARLMAWHRANTDSRRLAQIPGIGPVVATTLVMKAPDPRLFPSGRHFAAWIGLTPKDHSTAGKTRLGTITRAGDEMLRSVLVAGATAVIQQAKQGRGHPSPWLLALLARKSSPKLAAIALANKIARIAWKLLVTGESYHAGGKPIASAHAA

SEQ ID NO: 297439 - protein, 326 aa, unidentified
MSMLADKTGEVSPPTPTAVVADAYRFVVGVDTHARFHCYAIVEAGTGRVLDEATFPNSQPGLARAADWIGRRTAGEVETVLVSCEGTGSYGARLSSTLLELGYRVVDAPSPKRERGGNKNDTIDAIKAARSPLPKRADRLADVRSGELQEALKVLLAARERMSKESTRSINALTALLSTHDLGLDARRKPTGPQIRQISRWRTRTEAPAIAIARTEAVRLATRIGQLHDELDANKTHLRQIVASQAPVLLEIYGAGPINAAIVLSVWSHAGRIHHEAALARIAGVSPIQIASGGSTEHRLNRGGDRQLNRALHSIAKTRMERDPET

SEQ ID NO: 297440 - protein, 429 aa, unidentified
MHYTQNQKLEQVTEKTLVIGVDIGSENHYARAFNYRGIEYSQKAFKFANNTKGFEVFQGWMQGYVRTNGAKKVIVGFEPTGHYWYNLADYLKAQGIMFVMVAPQHVKHSKELDDNTQRKDDHKDPKVIAKLVTEGRYIIPYVPEGIYAELRTAYVRYCELTETKVRLENRITRWFDIYFPEYREVYRNPGAKTGMMVLRIAPLPADVIKLGAKGINQLWRSAKVKAAGMKRAETLVAAAKKSTGRAGGDAVRRDLWQMLEEYELVTRHLAEIQVMLEELVAQINGAERLLRIKGIGFTTVAGFFAEVGDLSRFTDPKQIQKLAGLSVVTPDSSGKHNGQSEISRRGRKRLRMILFRAAMSMVKSNKEMKSLHEYYTTREQNPLKKMQSLMAIAGKIIRVFYGMMKNGTDYDPVRLLTDIRRPGSGKNAA

SEQ ID NO: 297441 - protein, 349 aa, unidentified
MTARIGDVVVGVDTHADTHTAVALNGAGETVGSCEIPTTTVGYCELVHWARGLGEFRRAGVEGTGAYGAGLARYLRAEGITVIEVDRPNRQRRRRNGKSDPADAEAAARAVLSGEATGIAKDSTGHVEMVRILHLTRRSAVKARTQAGNQIKDLVLTAPDELRAQLRRLTTAQRVRASAAFERGPVTDPASATRRALQLLAQRWVQLTAEIKDLERTLLELLRQLVPSVLAQPGAGIDVAAKLVIAAGEQPERLRTGASFAALCGVSPIEASSGKQQRHRLNRGGNRQANNALHTVVLYRWNHCPETRLYVKRRRQEGKTDPEIRRCLKRHLARRLHRLLCNDLHKNLT

SEQ ID NO: 297442 - protein, 412 aa, unidentified
MNKRKEDLIYVGIDLHKDSHTAVILDCWNTKLGEITFANTPAEFPKLVRKVQKYCTENKEPVYGLENAYGYGRGLAVWLIAKGLMVKDVNTSLAHRQAKCRAMYKKSDSDDAEAIALATINMLDSLPDACPNDAYWSLSQMVNRRDNIMTQRIRLKNQLHEQLCIAYPSYKQFFEDISRKTALFFWEHYPSENYLRGKTPESLAEEMKDAGHNSFSVRRCKIILDAVKRDHTKAKEYQNYRDVITKGLVKDLQHYDEQLKAVDKELEQLYHDLGCTLATMPGMNITTAVKIMPEIGDVNRFPNPAKLAQFAGIAPIKLSSAGKGKDKASKQGNRRLQATLYFLAIQMIQVSTKGKPRNPIFRDYYDRKLAEGKNAKLVLVSIARRLVNIIYGMLKNKTEYRLPCLETGEVTE

SEQ ID NO: 297443 - protein, 387 aa, unidentified
MLQTVAALFPAAVDYERTLVLAIEVSNKSWVLAAQVPGLPHTKAKRTVNPEAEALLAAIAGYRTRAAATGRSIERVIAVYEAGWSGFWLARWLIRRGVEVYVIQPSSVPVDRRMRRAKSDGIDAELLLRTLLAWLRGEPRVCSMVPVPDAADEDARRCVRERTELISERVGLTNRIGAVLATLGVSDYNPLLRSRNRRLAELRTGLGEPLPRNAHAKIERLLARLELVLTQIAELEHERDAVVETEASDKASKMIQQLTSLRGIGVQSATVLVREAFVRRFANGKTLGSYAGLASSPFSSGGVDREQGIGKAGNRRVRTVMVELAWLWIRYQPAAAQVCWFRERVGSTGRRVRKIMVVALARKLLIALWRFVVDGVVPEGAVLKSAA

SEQ ID NO: 297444 - protein, 402 aa, unidentified
MNAVGIDVSKGKSMVAIMRPFGEIVSTPFEIKHTTSDIRSLVELINSVEGESRIVMEHTGRYYEVLAHQLSEANLFVSAINPKLIKDFDNDSLRKVKSDKADAVKIARYALDKWQNLKQYNVMDELRNQLKTMNRQFGFYMKHKTAMKNNLIGILDQTYPGVNTYFDSPARSDGSQKWVDFASTYWHVDCVRKMSLNAFIDHYQNWCKRKKYNFSLSKAEEIYGKAKELVPVLPKNAITKLIIKQAVDQLNSASTTVESLRTLMNETASKLPEYPVVMAMKGVGISLGPQLMAEIGDVSRFTHKSAITAFAGVDPGVNESGSYEQKSVPTSKRGSSDLRKTLFQVMDVLIKTHPQDDPVYQFLDKKRAQGKPYYVYMTAGANKFLRIYYGRVKEYLSSLPES

SEQ ID NO: 297445 - protein, 370 aa, unidentified
MTFLGIDLHTNCFTCCYLDAKSGTKRIETFMLDDKGLPLFYKTLNHRTHVLVEATINTFAFVELFQHLVAEVVIANTYKLKIISETTKKTDKVDAEKLARTLKTQVLSGEQQVSPVLIPPKLVQDLRALFSTYTLIRKQITATKNRIHSLLKQNLFPFTKEYIFGKKTRPDIKAISSDPILTIQLGLLFDLLENLEHKAEEFVDQILLTAAPFMKEIDILTSMKGVSVFTAAAIMSDIVTVDRFPNAKHFTAYLRSAPRVESSNEKTIIKSTNKAGRRMSITLLSQSLNHFRDANPKLSAWHDRLVTYKKKGIVRMGLCRRVFAEMYQMLKKQEYHYYCDSKNHEKKMTEYKAFLSSHSIYVDRIFKKAS

SEQ ID NO: 297446 - protein, 377 aa, unidentified
MKTVRFLGLDVHADTIAVAVAEMSGEVRSVGIIPNRPEALRKLVKKLGPPESLRACYEAGPTGYVVYWQLTALNVRCDVVAPSLVPMKAGERVKTDRRDAERLARSYRAGDLTAVWVPDAAHEALRDLVRAREAAAQDHLRARHRLGKFLLRLGRRPPVPMRAWTQRHLAWVKTVRFDEPAQNATLLDYLHEVEHAVTRLARLGRAIDEAVTAAPAAMRAVIEALQALRGVALVSAVTIVAEVGQLSRFPQARQLMGYSGLGAREHSSGARIRRGGITKTGNAHLRRIIVEAAWAYRHRPMVGGVLKKRQAAVHPNVIALAWKAQHRLHGRYYRLLGRGKCPQQVVTAVARELLGFVWAIGVLVETQHRPTPVSVAA

SEQ ID NO: 297447 - protein, 359 aa, unidentified
MPTKFGVVALFPGRQIVDQYVALDVSLQKTAVCVLNASGSVVIEAELPSEPAALTAFIQTHAPRAARVGLESGPTSPWLWHSLKAAGLPVVCMDARHAHAALSVRPSKSDRNDARGLAEMVRMGWYREVQVKSLAAHERMALLGVRRQLIDMRVEIDGQIRGILKTFGMVVGSGNKGAFAQRARMLVQDHPVLSALVDKLIEVRAVAVAKVAALDKEIRRFVRDDPTLRRFMTVPGVGPVTALAFRSTIDEPDRFKRARDVGPYLGLTPRRYQSGETDRQGRISKCGDRFTRTCLYEAANVLLTKVQRWSPLKAWGTRLARRIGSKKARVAIARKIAVILQCIWTDGTEFWWTKEPATA

SEQ ID NO: 297448 - protein, 403 aa, unidentified
MKHVIAFDISMGKSYMVIYNEQKQCVFESEIKHSKPEFEKLHEKIHELTDETGESPEIVFEATGIYSRQLERFMQNNQYTYCLLNPLEAKLQCDSLRIHKTDRSDAHRLALTHFTVTRRVSTGTDNLFYQLKSLSRLYSELDSELSMIRGRMHKVIQLTFPELEKMFTSKSDLFLNFVQLFPHPDCVLGLSKTIIKNRIRANTNKKISTITAEKKALQVLEIAKTSYPAVSQNDVLCDQLKLYARRYQELLHQKECCINKMVHIAGQRAEYNIILSLPGVGLNTAIRLMAEIGDITRFTSNKQLNAFAGIDIRRFQSGKTCFKDRINKRGNKHLRKLLFLIIQNMIKQRRYGQNHIVEYYDKLKTQPYNKCHKVASIVCVNKLLKLLFYLITHNIYYDYRLTT

SEQ ID NO: 297449 - protein, 350 aa, unidentified
MIIIGCDYHPGFQQIAFVDTDTGELNERKLGHREEAEQFYRQLKVRGKKVRVGMEASGHARWFERLLTELQFELWIGDAAEIRTKRVRKQKTDRQDAELLLRLLIEDRFPRIWVADGENRDLRQLLWHRHRLVQMRTRIMNQLHVLALNEGVRRKKALWRPAGRAQLQSLVLARWASRRRQDLLELLDQLTPKIQELTRALEQEVEKRPVARRLMTHPGVGPLTALAFELVIGTPERFGCGKQIASYVGLVPSEESSGDRRRLGHISKQGNSLLRFLLVEAAQVTVRTDPDWRRRFLHLAMRRERRIAKVAMARKLAVRLYWMWRKEWDYEQMRKFGSHVGEPGNRQGAS

SEQ ID NO: 297450 - protein, 345 aa, unidentified
MHIASIGIDLGKTTFHLVALGERSQVLVRKKFSRAQLLAYTANLPSSRIGLEACAGAHFMGAALREQGHEVRLIPAQFVKPYRKSNKNDFIDGEAIAEAVTKQNMRFVPIKTQEQLDVQAMHRVRDRLVQRRTALINEIRGFLLERGITFPAQAIHLRKNLPTVVEDAEHNLTPRLRWLLDRLWQEWKQAEVDIETVTDEIERISNEDERCQRLRQIPGFGPLVSTAMVAAIGNGAAFGRGRDFAAWVGLVPRQYSTGGKAKLFGISKRGNIYLRRMLIHGARAVLFRIKYDTAGLGQWVHRLGQRAPRNKVIVAIANKLARIAWAVLSSGKDYRHQPLPQRAAA

SEQ ID NO: 297451 - protein, 347 aa, unidentified
MERFCVGIDVSAKTLDVAHRGVKGRVEWQEFGNDATGHRALVRYLKKRWKSIRVVMESTGVYGLDLALSLDKAGIEVMIANPRAAANFAKATLQRSKTDRLDAEMLLLFAERMPFIRWQAPSSKQLELRSISRRVQALLETVRAEKNRMHAAMHVEGTSVVRKSISATLKALAKQIAGLRVAAVKIIASDPLLARRNELLLTIKGVGQVSAISILAELSVLPADMTDRQWVAHAGLDPREFESGTSIRSLPRISKRGNRYLRAVLYLPARVASRFEPSAAAFGVRLKSNGKKPLQIHVAVMRKLLHGIHAMFCNDQAFDGTRLFPAAGAVGTSGIASSAISEVSIAL

SEQ ID NO: 297452 - protein, 388 aa, unidentified
MIYVGIDIAKLNHFAAAISSDGEILIEPFKFTNDYDGFYLLLSKLAPLDQNSIIIGLESTAHYGDNLVRFLISKDFKVCVLNPIQTSSMRKNNVRKTKTDKVDTFVIAKTLMMQDSLRFMTIDDLDYIELKELGRFRQKLVKQRTRLKIQLTSYVDQVFPELQYFFKSGLHQNSVYALLKEAPTPTAIASMHMTHLAHLLEVASHGHFGKEKARELRVLAQKSVGVNDSSLSIQITHTIEQIELLDSQLFHTELEMANLVTCLHSVIMTIPGIGFINGGMILGEIGDIHHFSEPKKLLAFAGLDPSVHQSGNFQAQRTRMSKRGSRVLRYALINAAHNVVKNNATFKAYYDAKRAEGRTHYNALGHCAGKLVRVIWKMLTDEVEFNLE

SEQ ID NO: 297453 - protein, 342 aa, unidentified
MTFVGCDLHTRMQQVAVLDTETGEVSERRLPHDGLAVEEFYAALPGPVTVGIESTGYAVWFHALMQQLGHTLLVGDAAKIRAMVVRKTKTDRRDALHILDLLRHDRFPAIWIPDPATRDLRTLLMHRLRLVRIRTMVKNGLHAIALNSRLTCGSTLLRQAGLIQLQALALPPHTAQRRDQSLELLAGLTSQIRELDEAITTAALAHPDAPRLITHPGVGALTALATVVVLGPVARFHDSKHVVSYVGLAPAVHASADKAHLGRITKQGSPLLRFVLGQAAAHAARMDPDLKRTYGALVHRRGRPKAKVAVARKLLVRLFIMLRDQIDYDEFCRRGRAARAAA

SEQ ID NO: 297454 - protein, 402 aa, unidentified
MTYDYVIGMDVGKYFHHACVLDIDGTQVLSKRINQNEKSLRALFSTFSAHDHKVLVVVDQPNNIGRLTVAVAQDLGIDVRYLPGLAMRQLSRIHAGNAKTDIRDAYIIAHAAKNLPESLRSVDRAEEAFLQLKVLNGIDEDLARSYTRLINQIRSALVGCYPQFEQALRGQIIHRKWVLHLLARYGGPTKIKRLGKAKATAFARRYKARNPEPVLDAIFAAISEQTVAIAGAHYAEMGVAMSAKDALLKLEHRTQIEQEVIELINDIPHTQILLSMPGIGPKTAAQILMTAGDMSDFPSVGHLASYAGLSPRTNQSGTSIMSNSLNRAGNKKLKNALWQSSFASIRFHERSRQFYERKRREGKRHNAAVVALARRRLNVLYAMMRNHEHYHDPAPSQEDLAA

SEQ ID NO: 297455 - protein, 335 aa, unidentified
MEQERNPRAASEQARQGVVGIDVAKAKVDVALKQPKGKWKTKVVDNTPSGFEQLRLWLAKHGVTCAHVCMEATGVYWEKIAEDLVDHGFAVSVMNPAQIKDFGGAIGVRTKTDAVDAKLIAEFCDSRNPPLWQAPSKSIRRLRALVGRREALMDLRTQEKCRLEVASTEEVRRSIERVIDHLDQQIAEIERRIKKDVDDDPTLREQRELLKSIPGIGDGTAALFLSHYGGELRFDKTRQAVAFAGLDTAKHESGTSVRGKPRMSKKGHSAIRKGVYMPAVTAMSRTPWGKAFATRLLAAGKPKKLVLGALMRKLVAIAYGVLKSGIPFNPALHPA

SEQ ID NO: 297456 - protein, 373 aa, unidentified
MPKYSTAFGMDVHLRSTTVCALDADTGEAVTRRFPGNPWGEIAGWMDGFPGPSLAAYESGYLGFAPQRELAGLGVECVVAAVSKIPRSAADSASKNDRNDAARMAKAILAHDISPVWIPSPEVEGIRDLAGAYDGATARLATAKQRPLAFLAKRGFVYGGTTPAGNPRKYWTHDFLRWLDKVRPEDDGGVRTLAALRNEVEAAAEARADLLSEYRAAVDASPIAAEVAALQSIKGCAFALAAAFSAEVGDFTRFRSGRQVTAYFGLAPSQRSSGDSVRLGGISGAGNALVRKLAVEGSWCYAAARHQPKLMPRDTGVPLEIRMHGRKGSERLLRRRKEMLARGVPAAKANAATAAELVRWLWALGMMCREGAE

SEQ ID NO: 297457 - protein, 346 aa, unidentified
MRMIGCDYHPAWQQICWLETSTGETGERRLEHASGEAEKFYRQLVEPAVIGMESTGNCQWFVDLLTTLGHDVWIGDAAKIRASDVRQQKHDRRDAALLLKLLLEGRFPRIWVPSSAEKDLRQLLIHRCKLVRIRVQVKNELQHLAMNQGVTRKGTLWSKAGEKMLRALPLRPWAGRRREDLLQVREMLTGQIAQLDRAVMEAAQQNEQARLLMTQPGVGPITSLAFVLTMGDVSRFPRGKQVASYLGLIPREYSSGGHQRLGSISKQGNRFMRMLLVEAAQSAVRYDPQMRSEYLHRCHRKAKGVAKVAAARKLAIRLYWMLRTGIGYPEVVRAESSPRVPLVSAR

SEQ ID NO: 297458 - protein, 336 aa, unidentified
MTHYCGIDLHTNNHVVVVIDDEDKRVLAKRLSNDLSATLAVLAPYRETLQSIAVESTFNWYWLVDGLQDHGFGVQLVNTAAVKQYDGLKYSGDHQDAFHLAHLMRLGILPTGYIYPKEQRAIRDLLRRRLSLVRTASAQLISVQSQIWRTTGIRIGSGQLRKPEFVAPPLDQYTLQAVHAGLAVYQAVQQEINGLEQSAHQAVKLTPAFKILQTMTGIGKILGLTIMLETGDIHRFAGAGNFASYCRCVDSTRISNGKKKGAGNAKAGNKYLSWAYSEAAHFAVRFEPLAQRFYARKKAKTNGIIAIRAVARKLARATWMMLKHQVPYDAKLMFPN

SEQ ID NO: 297459 - protein, 433 aa, unidentified
MRSRAYRATMVKRVNWEALGSGHDGQAVQLGMDIGKEEVLAVLRWDDGHFERPWLVKNPEETAELIDLLKRVEMGRVLRLAMEPTGTYGDVLRQAIADAGWRLDRVSTKASHDYAEVFDGVPSQHDGKDAAVVAELAALGKSREWPYESPSATDQEMAYWVDWMDAQQRQYVMWLGRLEGLIARHWPESRKWLTLSSGTLLRALHHYGSPAALGADREAAARLSRWGGPYLKAATIRGLIESARSTVGVRQGEIDLHRMQQYAGQALAARSEIARSKRRLEKLAHGNAVIQAQAEAAGMATACVLWVCLGPASAYHCGEAYRKAMGLNLAERSSGMYQGKLKISKRGFGQVRRWLYFAALRLTAHSPVSRWYRRKKAKDGERAKRAVIGVMRKLALALYAVGAEGATFQAGRLFPGRQLGQCRQRIQASVSRR

SEQ ID NO: 297460 - protein, 347 aa, unidentified
MTIVEDTRAITGGVDTHAGMHVAAALDPIGGLLGVQELPVTAAGYASLLSWLRSFGALAVAGVEGTGSYGAGLARYLAAAGVRVVEVDRPDRQDRARQGKSDPLDAVSAARAAQSGRASGAPRGRDGAVEAIRALMVAKRSARQERTQAINQARALIVTGPEELRARFGQRSPAQLIAAIAALRPRPGEVPGYATRVALRELGRRAQFLDAQLERLDELITPLVTARAPGLLALHGVGPDTAATLLVAAGDHPERLRSESSWAHLCGVAPIPASSGKTAGRYRLNRGGDRQANSALWRIVLVRMRSHPATRAYADRRSKEGLSKKEIIRCLKRYVAREVYRQLRAES

SEQ ID NO: 297461 - protein, 372 aa, unidentified
MEKFCGLDVHKDSVFMCILSENNEKYEEVFKTLTPDLERLRDTLVDHGVGLVAMESTSIYWYPLWNILESDFDVKLVNPLFIKQVPGRKSDVKDAEWIATVLMKDLIKGSFVPPSIIQQLRLYNRKITKLNKQLRRSEQEMDEMLQRCNIRLSNYVSDIGCKSMKKVVQAIAKNHLNPDYLLSLVHARIVRKSGAETIRASLTGTFTSVDIEILRMIVEDINFHHDQLEFCKKELLKLCYQHFNLQMELLVTIPGVKEHAAACIISEIGTDMKFFTSATALVGWTGLRPRNDQSAGKIKGRKTLHGNKYLRLMLVQCAWGASRTKGSAFMARYQRFRKRMHHNKALIANARKLLVIIWNILAKKEPYFAQAI

SEQ ID NO: 297462 - protein, 433 aa, unidentified
MESEFAAFVAIDWADQKHAWALEVNPSSDRECGNIDHTPESVDVWAAELALRFPGRPIAVALEQSRGPLVFMLTKYDHLVIFPIHPSTLANYRKSFRPSGAKDDPNDAGLLLDILGRHRDKLRRLDPDTPETRTLQFMVEERRKLVHEKTRYSNRLAAHLKLYFPQVIGWFDEIGSHIVAEFLERWPHLEKLQKARPATIERFFIEHNSRNAERIAERLEQIRKAVPATNDSAVVHSCSVAVIAWGGLLRQLLDAIKDYDEQIDTLARQHPDYALMKSFPGAGPALTPRLIAALGSQRDRYQTAHEVQCYSGIAPVVASSGKQRWVHWRWSCPKFLRQTFHEWALHSIGYSDWARTYYAEQRAKGKRRNTAIRALAFKWIRILFRCWKDHIPYDERAYQQALARRQKKPTAGQPVEVKWQNVAGFMKITASGA

SEQ ID NO: 297463 - protein, 380 aa, unidentified
MTESSDYESIQVFIGVDVGKDTHHAVAINRSGKRLFDKALPNDENKLRSLISDLKQHGQILLVVDQPATIGALPVAVARSEGVLVGYLPGLAMRRIADLHAGEAKTDTRDAAIIAEAARTLPHALRTLKLADEQIAGLSMLCGFDDDLAAQTTQASNRIRGLLTQIHPALERVLGPRLDHLAVLDLLQRYPSPEKLASLGEKKLAARLCKLAPRLGKRLAADIAQALAEQTVVVPGTNAAAVVLPRLALQLITLRKQRDEVALEVEQRVLAHPLYPVLTSMPGVGVRTAARLLTEVACRAFASAAHLAAYAGLAPVTRRSGSSIRGKHPSRRGNKALKRALFLSAFAALRDPLSRAYYTRKMIDEYVYGAVSENLSVPAM

SEQ ID NO: 297464 - protein, 312 aa, unidentified
MAEQVVVGIDVSKDQLDLACWPEGLSECYPNSEAGLDQMLAHLQPLTIDLIVLEATGGYQRLAVSTLAANGLPVVMVNPRQARDFAKSTGQLAKTDKLDARGLAHFGHATRPQLRELPDDDQRQLQSLVTRRRQLIEMRTAELNRLQQASCAAMSEDITDHLRELDDRIAAIERQINEMIEGSELWQERIKLLCTAKGVGPVLAFSLVSDLPELGRINRKKIGKLVGLAPLNCDSGKSRGKRKTWGGRAPVREALYMPTLSAIRHNPAIRQMYERLIANGKARMVAVVACMHKLLTILNAMVRDKQPWQPNY

SEQ ID NO: 297465 - protein, 384 aa, unidentified
MDANHVTEPHAEDVILAVSLELAVGKWKVALHDGRRERPAVHTVAQPQAAARLQAVLDVIEQQKLKWSLPAGVRIVVSYEAGQDAFWICRALQAHGIECYVIDPASIPVERHRRRAKTDRLDAIKLVINLRAWLRGERDRMHVVHVPSPQDEASRQLMRDRGQLQKEVLQHRDRMRKLLVTLGCWDEVDHRAFASRLARDEVRCHDGAPLPPELRERLLRECERLALAQHQLAALEKTRQASLPAPARQRSDDLARLKGIGEVGASRLALELFWREFSNRRQVGACVGLVPQPYDSGESQVDQGISKQGNRRVRALLIEMAWTWLRYQPDSALTQWFNQRTQGTGPNRRARRIAIVAVARRLVIALWRYLKDGVIPEGAQMKPV

SEQ ID NO: 297466 - protein, 360 aa, unidentified
MFIESVDRIIPQEFDVFVGLDVDARSYSVTTLNWAGNVHQFTMSAQAKGLVSWRQQNLPQARVAWVYEAGPTGYGVYDALSQAGDVCLVTPPALLPRVPGRRVKTNRLDSLELAIRLRGGELTGLRVPAPQIRSLRHLTHQWLSLAKRVRGVKCQIKALLLMEGLPFPEEGRGWSRAMGTALAALACDAEVQFVLQQRWRQLTALHEEQLRLGRRIRAYCRADPDLAESITYLMSLPGIGWVTGAHILARVGEWRRLKRPQELAKFAGLNPWEHSTGLRIVRGGISRSGDRHLRNLLIEAAWRAIQVDPELRAFYERLRRRNPREQGARKAIVAVARKLTERIGRVLMDRRCYRPVSAAC

SEQ ID NO: 297467 - protein, 320 aa, unidentified
MPQQGRIVGIDVSKLKAEACIRSLQQRLSEPSTPQGEAALIAWLRANAVRLAVMEASGGYERSWAEALRKAGIAVRVVDPKRVRYFAKSAGRLAKNDPIDAEMIAWFGETFTPEAEPTHDPERAALDQLVTARRRLVGLATQVAQLAEHRQPRVVAQAQQAIGKIIKSQLGKLEIAIDAKIAANAAFRARAAIIRSVPGLGPHFTAGAIAWLPELGRISSKAAAALVGVAPYDDDSGEHQGERRINGGRREIRDLLYMATLAAASRHNPVVKAYYQRLRAKGKKAKVALVACMRKLIVILNTMLARGQNWNPPAAAGVLA

SEQ ID NO: 297468 - protein, 293 aa, unidentified
MCTCVPPEVFSLTHDETGVGQLVARLRELGPRLIVLEATGGYEVTVAVALAAAGLPLVVANPRQIRDFARATGQLAKTDRLDARATALFAEAVRPAVRPLADEQARALGELVTRRRQVLEMLGAELNRRRLVRDRQLQRRIAAHIKWLERALQELEQDLHTTIRATPVWRDTEDLLRSVPGIGPVTAFTLIADLPELGRLTRREIAALVGVAPMNRDSGTLRGRRMITGGRSAVRRVLYMATLVAIRRNPALTAFYQRLRGSRPAKVALIAAMRKLLTILNAILRDHRPWQPA

SEQ ID NO: 297469 - protein, 392 aa, unidentified
MISVGIDVSKDKHDCFIVNSEGEVLADVFTIHNTMDGFNFLLQRIRECTMPQDKIKVGLEATGHYSYNLLGFLLDNGLPTYVLNPLRTNLYRKSLSLRKTKTDRVDARTIATMLLSDAGLKPYTDTAYHNEELKSLTRYRFDKVKERTKLKSSISRLVCILFPELEKLVPTLHMASIYALLEEFPDAKQIAAAHLTRLKALLETASKGHYKRDMALRIRDAARNSIGAFMPAKSLELQHTIRLIRELDAEIAEIEERIQSIMNDLHSPITTIPGMGVRMAAMILAEVGDFTRFVSPDKLLAYAGMSPSTYQSGQLKNCYPHMEKRGSRYLRYALYNATKCVCHWNPNFASYLAKKRAEGKHYNVALSHATKKLVRLIFAMEKSKQPYSQLAA

SEQ ID NO: 297470 - protein, 360 aa, unidentified
MRIIGCDLQARQQTLAMLDTTTGEVVNQTLLHEGKQVREFYSQLPRPVLVGIETIGPMQWFLNLLEELGIACQIGDATKIRAAEPRKQKHDRRDAELILKLLAEKRFPAIWRPSQELLDLRALLLHRHQWVRLRTQVQNALQAIALANGLRRGPGLWSYDGQAKIAFLPLPPHTSLRRSDLQALYRHMDEEIEKLTVQVAEQAEHRPGAQLLLTHPGVGPVTALATDVFLGDPQRFGDGKSLASYVGLIPQERSSGRRRRLGKITKQGNPLLRFLWNEAGAHAARRDPELKRFYSRKLVQKGMGKARVAVARKLGIRLWIMLRDQIDYPEFCRRGQKPSSAACAGMPETGFGAHRHRTVD

SEQ ID NO: 297471 - protein, 416 aa, unidentified
MNAAGIDVSSRKSTVAVLRPFGEVVKLPFDVRHSAEDLAALAAQLKSIDGETRVVMEHTGRYYESIAKVLHEAGLYVSAVNPLLIKEYGNNSLRKVKTDKADAMKIAKYALDNWTELRDYTPMDTIRYELKTLNRQFQLASKQKTATANNLIALQEQSFPGIRKLFDSPVRSDGTQKWVDFTHDFWHVDCVRSGSQNAFAERYRKWCKRNRYQFSMEKATEVYAVAKSAVVLVQKTSVTKTLVQEAANQLTAISRSVETYRSEMNKLASQLPEYPVVMEMYGVGESLGPQLMAEIGDVRRFERKQSLVAFAGIDPAPSESGDYCSRSNRTTKRGSPYLRKTLFNIMKVHLQRAPADEPVFQFLDKKRAEGKPYYVYMTAAGNKFLRRYYGKVMAYFSTLEGLPPVDMDSTGLHHAE

SEQ ID NO: 297472 - protein, 384 aa, unidentified
MLQTTDHLDRETAAAQGDPARYLVSLELSRSTWLVTTLAPDSEKLSRHQVEGGDADALLALLDRLKARTEQRLGRPVQIVTIQEAGLDGFWLHRRLERHGIESQIVEPASIAVPRRHRRAKTDRIDGEVLIRTLAAWLRGEPRVCSMGQPPSPEEEDRKRLTREREELLAERVRLVNRIKGLLFGQGIRDYQPLRRDRWQRLEALATGGDGRPLPARLEAELRRTLKRVDVVCGQIEEVERARDTMAATAAPTAALLQLKGIGPEIAARLWVEALYRSFANRRQVAAYAGLTPTPWQSGNSDREQGIGKSGNPRLRTTMVELAWLWLRYQPGSAPSRWFRERVGDRRGRVRMIAIVAVARKLLIALWRCVTQGLLPEGAELKAA

SEQ ID NO: 297473 - protein, 346 aa, unidentified
MDQQQHYVGLDVSLETTSICVIDEKGTAVWRGKCASTPEAITEAVHTYAPAVVRVGLETGQLSNWLTLNLRRRGLPVVCLDARHAKAALSLQINKTDANDAFGLAQIVRTGWYREVAVKSMDAHTLRMLLVARAQLVSQRQTIANTIRGLLKTFGLVIVRGSGGLFAVRVREQIAGNDVLVAIVEPLLVVWHAIREQVEMLDRQILARARADAAARRLMTIPGVGVVVALAYTAVIDDPARFRRSASVGAYLGLTPRRYQSGEADTSGHISKCGDGLLRAYLFEAATVLLQRHSRASTLKTWGLALAKRIGMRRAKVAVARKLAVIMHRVWSDRSEYRWGDVPVAA

SEQ ID NO: 297474 - protein, 423 aa, unidentified
MKTDWTEQTYFAALDWAKAHHDVVVVDRFGGIAAGFQFPHTAEGWKEFDQQMQPFGKCPMAIETSSGPAVDQLLQRDYPVFPINPKAAQRYRERKCPSGNKTDRIDAWSLADALRTDGQGWVQLIAQDDATMTLRLICRDENVLIEQRTALVNQLQAALTEYYPLALQSFEDWTKPFAWAFLRSFPTPQALSKAGKRRWEKFLHTQKLWRPGTASTRLEAWQKGQQLNASAAVASAKALLALSLVNVLQSLQKQIDEYRQRIRAAFEQHPDHDIFGSLPGAKDKLAPRLLGEMGSQRQAFPDAQSLSCRAGTSPVSFQSGQLRKARIRWACNDFLRHTVHLWADLSRRTCLWAQVYYAAKRESGHSHASALRCLGKRWLKVLWRMWQDRTTYDESIHLKSLQEHGSFVAKLLTPPPTQSASSL

SEQ ID NO: 297475 - protein, 430 aa, unidentified
MTELNPTPAPSTLVAIDIAKHRHEVLIEAPGHARRRRLTILSTKADYDRLVATLMAYGGPVLIGFEATGDYHRGLAYCLLSAGFELRLVSSVALARTREALHNGWDKNDPKDAQVILHMLRIGATQRYVDPLAAGINDLQELSKTHEAISKAKTETWHRILTHYLPLYFPEIERFAGNSRSDWFLALLERFPTPSSIVALDRDSFVQEAWPVIGRKVSKARLLNDIYETARSSTALPVAEGSAAITMFRMVLAEARSLIRQRDQIEKLAHAMLTDHADYQRLCTIPGIGPIHALTILAEAGDLRRFGHHRQFLKFCGLDLATCKSGTFRGRTKLSKYGNARLRRALWMAAHVAMRQRDNSFRDKLGRYTERDRHDADLRRKAVTALTAKMARVVHAVIKGGTEYRPFFERPVPGGRTSLCQCREGARATL

SEQ ID NO: 297476 - protein, 430 aa, unidentified
MHNKNYISVGIDVGSAFSFMTILAPDETVILKPFKITHNNKDSLERAVSEIKKAEELYSLESRTFLEFTGIYHFPLFCYLVDCGFNASIINPIITHSTKNGNIRKVKNDKIDSKGIAKLGLSKDIPVSQFPAKLVLELRSLTRKYYDLTDERSAHINKLKGDLHTVFPQYLDIFCDVTGKTSTMILRQYGTPDKILRGHKKTMIEKISKASRKGLAKASERYEKLCAAANAAKTFGCQIDSIYFNIFLTLDLVEKLDSALDSILNRIRQLITFNKNEKFIRQIKLLNTIPGVGFLTAVTIMCEIGDFSAFRNPKQLFAYFGLDPEVNESGKFVGTQLHMSKRGSRIARRAIFAVALASIRTKRNGEGINPYLRKYYELKSVQKPKMVAIGAVMHKVCNVVFAVLRDEKAFELRSPEEHCKQYQRPALAAA

SEQ ID NO: 297477 - protein, 347 aa, unidentified
MRFYNHQHQYYCGIDLHVKTMYVCILDAAGQVRVHRNVPSTPAAFLETIAPYRDDLVVAAECMFTWYWLADVCATEGITFVLGHALAMKAIHGGKAKNDKIDSHKIAVLLRGGMLPQAYVYPAAMRSTRDLLRRRLHLVRKRGQLLAHIQNTRAQYNLPAFEKRLAYPGNRDGVVDHFSDPSVRKSIEVDVVLIDQYDALVNDLELTIVREAKRHDGDAFHRLRSVPGIGKVLALTILYEIHDITRFDRVQEFASYARLIKCTKESAGKKLGTGGAKMGNVHLKWAFSEAAVLFLRHTTDGKKILARLEKKHGKGKALSILAHKIGRAVYYMLSRGTVFSMEKFLAA

SEQ ID NO: 297478 - protein, 308 aa, unidentified
MPTEICYVGVDIAKSEFVVDLAGHSSSFPQSAEGHNALLASLPSGAHVICEATGGYERKLVAALHLKGTPVSVVLPRRVRSFAVAQGMLAKTDRIDAVLLSAYGRACQPRLHIEIPANLQELSALVRARQATVERISLEDNYAEHLVGALLVRQANQRKKLVRKQLDELDRAIQVLIATDAQLAKKCARLEQVDGVGKVTAWTMLSEMPELGTLAKGEAGALVGVAPHPHESGQRRGPRHIAGGRAAARRVLYMAAISASQHNAVLKVFYERLRANGKGGKVALVAVMRKLVELFNHILKDDAFLLAG

SEQ ID NO: 297479 - protein, 421 aa, unidentified
MPNIEIGVDSMVKENFIYVGIDLHKETHTAVMIDCYNQKLGEITFPNRPADFPKLVAKVKKCNTDGKTIVFGLENAYGYGRPLAVWLIDKGYFVKDVNTAISHRQAKHRGAMYRKSDSDDAEAIALATLNMLDKLPDACPNDAYWSLGQLVHRRDNIMKQRTRLVNQLHEQLHIAYPSYKSFFNDISRPTALYFWENYPSRKYLKGKSVEDLREELVPVSHNRCSTKNCEKILDAVASDKVKNNAHQDARDMVTLSIVSDLQHYDSQLAEVDKMLEQMYKMLGCTLTTIPGVNVITAVKILAEIGDIKRFSNANKLAQFAGIAPLHLSSSGKGKDLATKQGNRRLQATIYFLAIQMVQVSSKGTPRNSVVRAYYEKRKAEGKTSQQALICISRRLISVIYGMLKNGTEYRMPVVENAGENR

SEQ ID NO: 297480 - protein, 320 aa, unidentified
MYYLAFDVSKDELDAVLTNLRTKTFSFKIKNSEQDILNWLDNTELPQKIIAGCESTGGYHFLLQKIFVMKNIPFKLLNPILTKQFIRTTIRKRKTDKSDSLIIAKLLAQGEGNLINESKLDIVAKVKQRMLKNLTVEIHKFNLMRKSLVFSNLGGSDIDTYLKEIQQSLKLAARNYFKDLSSAYADNQTIKLLTTIPGIGFRLALTIWTEIGDIHNFSHAKQLIAFAGLDPKIRQSGHCLNSQGKLTKRGSPYLRHALFLAANVARMYDPELKTYYARKRSEGKRHTIAVCSVARKLINRIFAVWHRQTPFVKSLSIDSR

SEQ ID NO: 297481 - protein, 419 aa, unidentified
MSFKILKNNCCGLDVHKTWIYACIGITDSFKRTEYKQARFSSFTKGLQELCLWLAKYNCIDVCMESTGKYWIPVFNVLEKNNIFVTLSHPKYTKPQKGNKTDRKDAKWICDLYMCGMVKPSFIPPADIRQLRDLVRYRFKLTCMITGEKNRAHNCLTVSNLKLDDVFSDIFGKSSRSITEQILQHPGEVFDVAPFVDSRCKTPIEEIQAAVDGAISHEQAVKLRQCLKHIDELEMHKAEIEREIFRLSQKYESVLDLIRTIPGFDKNPLTAIQVLSEIGADMSVFPTAKNLVSWAGCCPRNDQSSRKIKSTRISRAGSYFKPVLVQIANALIKSKKHPEFTTRYRRIKARRGHKKAIIAICRMILTAIWHILTDLKPYTSDGFLESRPVKKEKVLTTSQALNLLRQRGYLIKDEPSPVS

SEQ ID NO: 297482 - protein, 347 aa, unidentified
MHSVGIDIGKHQHVAAICRDGQRTADKPVLRFGADRAGLADLQRWLARNGPVERVVMESSGHYWLPLAAALHRASVPVAIVNPVSAKAFGTRRLQRVKSDPADARTLAALGMADQPRIREPLAGAELREAARFAMHLVEDQSRIDNKICRLIELGFPELGQAYDDPTCTSALAVLRLAPTAQAVARKRVTTLADANRGAGHRAVGTTQAERISALAKDTIAPPELAAQIGFEMGLLIAQHDLLEQHIAQAEARVASLLDGALARRLQTIPGVGPAICATLIAEIGDIQRFADFDKLVAYVGVHPAEKSSGQKGGPETSWRMAKSSACSTTRRSRRTTHASARKGSRR

SEQ ID NO: 297483 - protein, 341 aa, unidentified
MQITTIGLDIAKNVFQVHGIDATEKVVVRKQLRRGQLIKFFEALAPCLIGMEACATAHYWARELTKLGHDVRLMPAKDVKAYVKRNKNDAADAEAICEAVRRPTMRFVMVKSAEQQGRLMQHRVRDLLMRQRTQLINALRAHLAELGIAAAQGREGIKELLAIVAQDGGSRLPVDAHASLIVLAAQLQAMQTMIGSIEKRVVGQHRSNEESKRLETIPGIGVIGATAIAATVPDPKVFRSGRDFAAWIGLVPREDSTGGKQKLGPISKQGDRYLRRILVVGACAVLKQARQQPEKYPWLTQLLARRPFKVVAVALANKMARVAWALLAKGGTYRAPRLKAA

SEQ ID NO: 297484 - protein, 388 aa, unidentified
MTQTSVSLPHPVALDHNETLVLAIELSNKSWVLAAQVPGLTRVKAKQTIEPTAEALLAALQGYRERAKVAGRQVERVVATYEAGWSGFWLARLLTTHGIETHVVQPSSVLVDRRARRAKSDGIDAELLLRTLLAWLRGEPRVCSMVPIPAEGDEDARRCVRERTELIAERVGLVNRIGAVLATMGCGDYDPLLRNRRQRLDELRTALGTSLPPHAYAKISRMLDRLDLVRKQIAELEQDRDAVLEEEVPDKAGEMIQQLTKLRGIGVQSATVLVREAFVREFANGKALGSYAGLCATPYNSGGTDREQGIGKAGNRRLRTVMIELAWLWQRYQPGSAVVNWFRARVSGTGARMRKVMVVALARKLLIALWRFATQGVIPEGAVMKPAP

SEQ ID NO: 297485 - protein, 373 aa, unidentified
MNYSTVYVGMDVHKESFSLCCYTNEKEKGEYPQKVDAHYSKIINYVEAMRFHYGDDATFICGYEAGCLGFTLYHQLTDHGIKCIILAPTTMPQPQGKKKVKTDKRDAERIARCLAHHDYSSVHVPTEKDEQTKEYIRMRCDHKLALKKVKQQILAFCLRHNYRYEDGSNYWTEKHLKWLRSLKPDGLYGEILQEYLLTYDMLSDKLERLDKRIEELADDDVYKENVHKLTCFLGIKTQTALSVITETGDFKRFATAQHYASYLGLVPGEDSSGDDQNRLGITKAGNRHLRMLLTEASQSYSRGQVGYKSKVLKQRQAGNDPAVITYADKANERLRRRYYKLVLGKCKKHNVAKTAIARELACYIWGVMTGNIA

SEQ ID NO: 297486 - protein, 307 aa, unidentified
MAAVGIDVGKTNLDVAVEGRQGVTRYANTRSGIAKLVKWLRGLEAPRIVVEATGGYEEPVLEACCDAGLWICRVNPRQARNFARATGELAKTDAIDARLLALMARLLSDRLRPYAAPLAWQRELRDWLRRRGQIVMTLQAQKQQAAMAPPAVRTLTLRTIAALARELKAVEQAISGLIKQHATPAVCSSKGLGPVFQASMLALLPELGELSRREIAKLVGVAPMNRDSGQGQGKRRIHGGRAPVRVALYMATLSAVRWDPLMKAHYQQLRARGKLGKVALVACMRKLLGIVNARRRDELRADGRLLA

SEQ ID NO: 297487 - protein, 348 aa, unidentified
MVAELEYVVGVDTHRDEHVLAVVEAPSGALLAGRAVAADARGYAQALRFARRHAPVARGWALEGAGHYGAGLARYLSKRGETVLEVGRSPRRQRRLQGKDDELDALRAARAALADEPLASPRLGERREALRLLLVARRSAVDVRKEALVQLRSVIVTAPDRLRDELRRLPLRRLLDRCSRLRPASGAASDEAACRLVLRSLARRAEAATLEAAELEREILGHVRVLAPRLLAEPGVGPIVAAQLLVAWSHRGRVRSEAAFARLAGVAPIPASSGQTSRQRLSRGGDRQLNRALHTVVLHRRQHDPATRDYIARRIAEGKSRREATRLLKRYVARSLYRLLQAQEPLMA

SEQ ID NO: 297488 - protein, 346 aa, unidentified
MTHSTTVGVDLAKNVIQISVVSSRGKELANRALTRTKFAEFLCKQKPSLVAFEACATAHYWARAAKRHGHVARIIPAKFVAEFRRGHKTDRNDALAVAEAVHRPNMKEAPMKTVEQQGLQAIHRSRELLIQESTALSNHLRGLLMEFGVVIPQGFASLLRTVPEVLEDGENELPDMYRPTLRRMYTRLLELREHIEAMTKEVEVLVKQHPICSRLTALEGIGPIGALLLYATLGAGNVFSSSREFAAYLGLAPRQYSSGGKTNIVGLSKKVGNSRLRSILILGARAYTYRLKEPKSAKDRWLKDAIDRNGHSRAAIALANKNVRTAWAMVTQGTEYQRHGQLKVAA

SEQ ID NO: 297489 - protein, 346 aa, unidentified
MMIIGCDFHPSWQQVSWLDTETGETGEQKLVHAEGQAQQFYQALSGAALIGMEATGNSQWFVELIEDLGHAIWIGDAAQIRASYVRKQKTDKRDAAHILKLLVEGRFPRLWAPDREQRDLRQLVLHRHKLVLIRSRVKNELQHLSLNKGMQKKRRLWSQAGLELLRQLPLKPWAGCRREDLLGLLTMLNQQISKLDRAVQQAAEENPQSKLLMTQPGVGPNTALAFVLTIGDVGRFRRGKQVASYLGLIPREASSGGRQKLGAISKQGNRMLRSLLVEAAQVAVVHDPGLRKQYHHRCHQKPKAVAKVAVARKLAVRLYWMLRTQTKYPEIVRIESSSGLPLVGAS

SEQ ID NO: 297490 - protein, 389 aa, unidentified
MIYVGIDVANDKHDCCILGSEADNLYPVFTIPNNKTGFDELYEKIFSVTDDRTEIKVGLEATGHYSLNLLGSLTDKGLPTCVINPLHTNLYRKGLSLRKTKTDKVDAGSIAMMLMTDKTLKPYSNTSYHSEELKSLTRYRFDKVQERAKLKSSVARLINILFPELEKLVPNLHMASVYALLSEFPGASYIAESHLTHLRNVLETASKGRYGRDMAVTIRDAAKDSIGSVMPAKSMELKHTIHLIKVMTDEIDEIEASIKSIMDTCNSPIMTIPGISYRMGAMILAEIGDFNRFSNADQILAFAGLSPSTYQSGQLDSSYSHMEKRGSRYLRYALFNATKFVCKWDENFGAYLSKKISEGKHYNVAVGHATKKLIRTIYRMELTGEAYRK

SEQ ID NO: 297491 - protein, 423 aa, unidentified
MDVLIERCGGLDVHKDVVVAHVRFPGSDGERLSVTASFATFTEDLLALRDWLVAHGVTRVGMEATGVYWKPVFYVLEEAVDCWLLNARHMRNVPGRKTDMADAEWICRLTEHGLVRPSFVPPRPIRELRELTRFRKTRIEERTREAQRLDKVLQDAGVKLSSVASDVLGRSSRAMLDALVGGSRDAEALAELARGRLRRKLPELRAALTARFAAHHAVLIGEILAHLDYLEESIERLSAEIDRVISPFARQRDLLTTIPGVDKRVAEAIIAEIGVDMSRFPTAAHLASWAGMCPGQHESAGKSRKGTARRGNSWLQRHLALAAMAAARTKDTYLAAQYQRLLLGRRKTGKKRARKAVGHSILVAVWHILANDVAWNDLGEDYFSRRQSPEHQARRKLADLRTLGWDLHHNDDGTTTLIPPAAA

SEQ ID NO: 297492 - protein, 349 aa, unidentified
MERFCIGIDVSAKKFDVAVRVGKGRVDSQTFANDGLGHRAFVKSIKKRCKSIRVVMESTGIYGLDLALALHEAKVEVMVVNPRAAANFAKAVLQRSKTDRLDAATLLLFAERMPFIAWQRPTAQQLELRAISRRVQALLETQRAEKNRLHAAMHVTATGVVRKSIRASLKSLSKHIGELRAAALQVIKSDTLLARRNELLLTCKGIGQISAISILAELSVLPNDMTDRQWVAHAGLDPRCFESGTSVHAAPRISKRGNRHLRAVLYLPARVASRFESNAARYAARLRAHGKTPLQIHVAVMRKLLHGIHAMFRDDRPFNGASLFPAIDAVGTSGIAMFAISEVSTAFSS

SEQ ID NO: 297493 - protein, 429 aa, unidentified
MNNRKIIRLEQFRQLKKEIRGSKEHLIIGIDVAKQKHNAFLGTATGKTLLKRLVFENNKEGFEKLLMHVESISASNGYKKVAFGIEPTANYHKPLAEFLINKKHDLVLVSGVAVKRNRELLDGRWDKNDMKDSANVADLISQGKCLFYEYPIHVLRDLRGLLSLKKKFKKIEHGFRVRIRNHLLAQYFPELDRYYGHSESENLAIVRWCLSPSKIAEMKYEDFFQLVTTRDRGFKQHQRLKAIWDHAHCSIGCSTGIAAEFEAEVLVEALKRARETIGSINEKAREICVLFPEYKYLLSIPGFGPVVSAIVLAAIGDPFRFESGNQVLKTAGWDLNANRSGKRSDSVIPVISKRGKSDLRYALYQAALVASTKNKHFTSWFIEKLKGREKEQGIKTKMRVKLAAKLLIIAWTLMKKKEPFNPELLNIKK

SEQ ID NO: 297494 - protein, 421 aa, unidentified
MALCPHHWKIGETICNDPQVCRIVDLPVYYELETNNCNRDYRIQIGGHYMNYNTVYVGMDVHKESFTLCSCKYEDEKASHYQRTPASYKNVLRYLAFLRTIYGEDTRFVCGYEAGCLGYSLYHQLENFNVECVILAPTTMLEQRSKRRIKTDKRDAEIIARSLAQHNYSPVHIPTETDNQTKEFIRMRDDHKAELKKIKQQILSFCLRQGYQYDGSGNWTAKHVKWLRSLKPAGLYKEILDEYLLTYTILTDKLNRLDQRIEELASKEEYKESVSKLTCFLGIKTHTALSVIVEVGDFQRFVSARKFAGYLGLVPGQHSSGDDRNGLGITKAGNTHVRRLLVESAQSYTRGKIGYKSRVLRSRQAGNSPQVINYADRANERLRRRYYKMVLKDGKKYNIAKTAIARELACFIWGMMTDNVY

SEQ ID NO: 297495 - protein, 344 aa, unidentified
MNKNWFIGIDVSKKTLDASIFVAGEVVNKFPHVQMRNDRQGFKDLLRWAKEQGVKTKDTLFGLEFTGYYSDALEQFLTKKQICYTMLPTTVVKHYQRGPHDKNDKIDSAKIADYLFRFNGTECIKLRVLPSKAMQELKALKSERKFLVQQRVACENRQKVAKFKGEEKHLQKLIDLYKTEIEQVEQQIADVIVLDEEIYTTYRLLNSIPGIGFVNAVNTIANTQNFTAFETARQYAKYVGVAPSEHSSGTSVRWRRRPSPHADLQAKADLSMAALHAIELSAEIRQLYERKLGNRTKDKDMQKKALNAVKFKLIREMFSVVKQAKNFELRGLDNAQTEAHSTEE

SEQ ID NO: 297496 - protein, 355 aa, unidentified
MGVGYERTSIITYERSTLVNSEKYIGLDVHQATISVAVMDSMGKLIMESILETKAATILEFVAGLRGTLSVTFEEGTWAAWLYDLLKPHVDELVVCNPRKNALLKDGNKSDRIDARKLADRLRLNDLKPVYHGETGVRMLRELARSYLNLVKDQTRVMNRLKAMYRSWAIPCAGRDVYYARHRAEWLGKIREAGVRRRAEHLYQQLDMLQHLRQQARRELLAESRQHPITAKLRQIPSLGPIRSALAVALIRTPHRFRTRRQLWAYSGLALETRTSGEYRCVEGQIRRSKKQISIRGLNKDHNHDLKGLFKGAATRASVQPGPFQDFYQRSLAKGIKPTMVRLTLARKIAAITRN

SEQ ID NO: 297497 - protein, 331 aa, unidentified
MDDTIYNHYIAIDWAASNMAIARMTKKSNKITVIDVPSDIEELKLYLDRLKGTKVLTLEETTTSQWLYTELKEKVDKIVVCDPHRNKLLNDGPKNDKIDASKLVQLLRAGLLKEIFHTNDNFLLLRRLVSGYEDLVKAGVRLKNQRYSLLKACGNQEVVGENAFVLGCLNRQIGLYEEEKSAYEKEFLRLAKKYPAIRHQKSLPGIGDINAVKVVARVVSPFRFADKGHYCSYAGLIKHEKISGKKSYGKRTPRYCRQLKDVYKTGVSAAIGGNNPINDYYEYLVAGGEPEYDARHKACRRLATLSLGVFKSGEKYQPYKRSRQTDNVTVK

SEQ ID NO: 297498 - protein, 347 aa, unidentified
MGKSITDLSSVTTVGLDLAKHVFQVHGVDASGRVIVAKALRRKDVLAFFAQLPECLVGMEACGSAHHWARELIKLGHDARMMPPAYVKPYVRRQKNDAADAAGICEAVTRPSMRFVGVRTLENQAALMHHKLREMLVAQRTQLINALRGHLAEIGIIAAQGLKNARDLAWVIKAEGDETIPACVRAALAPLVRQLHALDQEIARSDQTIAAMARDDEMARRLMTIPGLGPVTASAMATSVQDVSVFSGPREFAAFLGLTPRQNSSGGKERLGRVSKMGNRYLRKLLVVGAHAVLYHRKPHDDALRSWAKKLMQTKPFKLVAVALANKMARIAFAIMLGKTSYSAAPA

SEQ ID NO: 297499 - protein, 359 aa, unidentified
MSVYLGVDFHTRTQTVCWCDTADGLIRQRILDHQQDDVRGFYAQFAVPAVVGLEATGYARWFHRLLESLEHRLLIGDPYVIRKCALRRQKNDRRDAELLLDLLLRGDFPAVHIPPVASQEVLRLLRYRQRLVGMQTKLRNGIQALALNYQLRLGPKLWSQRGQQQLLALSLDGIDVLQREMSLELLAHMRTHIRAIEKELALRADQDARVRLLRTHPGVGLLTSLAVAHTLEPVTRFDRARRVAAYCGLDPCESSSADRIRLGHISKQGNRLLRHLLVEAAHRVVHTNKTDAELRNFYFRLIARKKRAAVAVTAVARKLVLRLYRMLRENIDYTEFRRRGREARCARKSASPQVGLGDC

SEQ ID NO: 297500 - protein, 423 aa, unidentified
MNETPSQLGDQPALFIGIDWADQKHDCHVIDRHGKEFHQELKHSAESIDTWVGEMLKLAGGQPIAIMLEQSRGALVYALMFRQNVLLYPVNPKKLARYRESYPGDGKNDPTDAKYLARMLCERITTLTAWQPDDENTRLLANLSRQRRKIVDGQTKLRLQLTSLLKSYFPLLLELFGKDHQLPLLLTVLGRWADPRKLRRADRRLIRRVLREHSNGSQEQHDQIIARIRSAQLLCDDEALITPSAMAAKFLGSQIQQSQKTIREFDAKIDEVMKQHPDAHLFTSLRGAGKVLAPRLLCAFGSQRDRWENAESVASFSGIAPVTKKSGKRCHVHRRFACPKYLRQTFHEFADSARIHCPWSKARYRMLRDRGMKHHAALRKIARSWIRILFRVWKTRTPFDCDRYIANLKQRCPEINQYLAQES

SEQ ID NO: 297501 - protein, 397 aa, unidentified
MDSLESIRLEQFRQFQKEIRGSERYLIVGLDIAKDSHHAFFGTATGRTLWKRWLFDNSKEGFQELLLQTEALQVRHGLPQVVFGLEPTANYHKPLGEHLIRHGHQLVLVSGVAVKRNRELLDGRWDKHDTKDAANVADLISQGKCLYYEHPDPRIRDLRLLLSLKKRLKRQEQGIRVRIRNGLVAQYFPELDRTFPRLIASKKERDLLSAMQQPSSIGCAAHPEVAFAAKVMVQELQQARESLKAVQERIQKLCFQFPEYAYLLSIPGFGPEVSSQVLAAIGDPFRFGKGSQVLKMAGLDLSADRSGKASERARPVISKKGKADLRYALYQAAFIASIRNAAFTAYYTLRLKARSQEPGIQAKRRVKLAAKLLLIAWTLMKRKEVFDPERLVPSALL

SEQ ID NO: 297502 - protein, 359 aa, unidentified
MEQKRFVGIDLGKRTYEIKFIASNGSVTGTNGKTCPSGRKELYKKLLSTDRIAIEVCSLGMVMAKEIIQQVGAEVVLLNPSQIALIYRSVKKNDKEDALKLARLVQKFTNEELPKIELPTEHEENLRQILTELRQLKNDRTKEINRVHAIFVECGITEIKKSNLATHENRIECIKILKGIFLSQAERSLKKLELIEDQILEVEELLDKEIDGDKNIATLITVPGVGKQLASSFVAFLGDGSRYPNVSSIGAATGLVPRLDMSSTSLRLGHITKTGNSNLRSLLILAAWSHVRAKNGGALKDKYLYMTKVQSKSKKIAIVAIARKLAELMYSLLKNNTKYEKRAPVPVEKLATEALAIAS

SEQ ID NO: 297503 - protein, 418 aa, unidentified
MKKQKFELAAFVGIDWADREHAVCWRAADEVGMHQETLKQEPAALAAWAAGLQQRFGGRSVGVCLEQSRGPLIYALSAYPWLVLYPVNPKSLARYREALAPSRAKDDPSDAALLCQFLALHRHALRPWQADDPVTRQLRLLLENREKLVDQRTALTHQLRALLKGYFPQALDWAGDLLRPMAWAFLLKWPSLEALQTASKKRLLNFYYAHGVRRGDLIAQVPDQVRTAIPLIQDHALIETSILLAQALCRQLQALQPFIDRHNAQIKALFDQHPDRELFRGIPGAGPVMAPRLLAAFGSDRTRYSDASDVQQLAGIAPVTERSGKSCWVHWRWAASSFLRQSFHEHALHSLAHSAWAKAYYDQLRSRGKAHHAAVRALAFKWIRVLYACWRDYRPYDEAAYLDALRRRSSPLARLCAT

SEQ ID NO: 297504 - protein, 347 aa, unidentified
MGVAIGVDSHKSSLAVGALNEVGRLEEVREFANDRRGHESVLTWIQQRGPERVIGIEGSGSYGAGLVRRLLEAGEEVREVPAFLTHRERKKNPSLGKSDVGDALAIARVVARGEGLSSPQRTQALQDLKLLTDHRDQLVRARTRLINRTHRDLVVSHPGYEGLVPKLGSNKNRKAATTLLRGDRSIRAGLIRDRIAEIRRLDHKVAAVEKQIAARVRDSGTSLTRLRGIGFIVAAKILGEVGDISRLRSKGSFAMLTGTAPIEASSGKTKRHRLNRGGNRQLNYALHVMALARCRGDADTKTYIARLRMEGKSDKEAMRCLKRQLSNVVFRHIVDDARGLQKGSLTT

SEQ ID NO: 297505 - protein, 469 aa, unidentified
MKRKSHRNKGQKMSPFSGDLQLIEPDAAAVDVGSRSHWVAVNPERDPNPVREFGTFTADLMSLADWFAQCEVKSVVMEATGVYWVSLYELLERRGFKVYVVDAHTVRHLPGRSKSDVKDCQWLRRLHSYGLLRGSFRPPAQIRQLRNYQRSRTKIIEAAAQQQLRMQKALTLMNIHLHHVISDLSGLTGMAIVRTIVGGERDPIRLARLRDPRIRVSRETIQKSLEGNWQEELLFDLKIALESYDHFEGQIAAYDEQIRQELKEVESKVDLANEPLPATRLRACRKRPGMSQQNQLDLREELYRISGVDLTRIDGISLQTAQKVFFEIGTDVSPWSDEKKFSSWLGLSPNHRISGGKVLKRSSRKVVNPLSVALRLAARTLRNSHSALGANFRRLIAKIGMPKAITAMARKLAVLVYRMLKYGTQYVDKGMQHYESKYQETKLQYLRGQAAKFGMILLPRQAASTSVAS

SEQ ID NO: 297506 - protein, 439 aa, unidentified
MSNLNKQKEATPFAAHIGLDWADQKHFWAMRTADGTQHCGPLINTPEAIQVWAGELAQRFGGQLIAVALEQSRGAVIAMLSKYAHLVLFPIHSTTVANYRKAFCPSGAKSDPGDGRLILELLWTHPDKFRGLYPDTVETRKLQFLTEERRQLVNQHTSEVQRLISWLKQIFPQIVQWFEKPSCEMVGDLLKRWPTLEALQKASPKVLRKFFHQHNCRSEERIEERIDQIGHAVVATTDEGLLQTGLLCIRHSVAMLEILRASIETFDQQIAEVYQNHPDRFIMESFPGAGPALEPRLIAAVGTMRDRFHSANTLASFSGIAPVTESSGKSVWIHWRWACSKFIRQTFHEWAGCSIRSCDWARAFYEKQRGKGKGHHAAIRSLAFKWIRIFFRCWRDRVPYSEELYLKALQRHAPKPTSAPVEITWKTAAGFAKLSALSS

SEQ ID NO: 297507 - protein, 461 aa, unidentified
MSKKRPAGKQKGSAQGQVDWKALDIVHPDAAGIDVGGSEHWVAISPDRDPEPVRRFGCFTADLREMARWLVEKGVRSVAMQSTGVYWMPVFEVLEQHGLEVYLVNAQHTKNVPGRKSDVQECQWLLKLHAFGLLNNSFQPTDEIRIARTLWRQRGNLVAEASSAIQRMQKALIEMNVQLSSVLSDISGVSGMSMIAAILDGERDPWTLAALVQSGVKATTEDIAKSLEGNWREELLFVLRQDVELYGIYQGKIDDCDLELRNHLESFGSVVDLKTQPIGPKPKGKRGSKNAPKFDLRTELYRISGIDWAQVNGIDVLTAQTVIAECGADLSAFASEKNFASWLGLCPTNEQSGGKILKRRTRKVVNRAATALRNAATTLLRSQSYLGAQYRRLRTRLGAPKAITAMARKLACLFYRLIKHGQQYVDKGNEYYEAKYREQQIRSLTKRAQKLGLQLFIPKPA

SEQ ID NO: 297508 - protein, 358 aa, unidentified
MESQDIKYVGIDCGKKSLEVVRIHSEGSLKERRQFSTTEIGINNLLKWLTQNDIVGLEAGSQSFRIAKSILNKGIQVIVLNPGDLATIYQSLKKTDKEDSLKIARLIQRFPIEELPTVPVPTDEEEDNRRLCSEQENWTRQLTQGKNRLHSLFTQAGLTEITKKHLRTKSSRETSVALLPSRYHKEAERILKVLDLVEQNLKLIEEEIKEALRKNQTYTQTIMSMPGIGMITSLAILSYMGDCKRFSSAKQAAYYVGLVPRVDISGDSAYYGRIVNRGCHSIRRVIVQAAWSLVRCQHGGKLKEFYERLYSKKGAKKSIIAVSRKMIEVLYSMIRTGALFDSMPEEVLHRKLAQYGLM

SEQ ID NO: 297509 - protein, 385 aa, unidentified
MIQPRQIANFIPRDYDIFGGLDVDKKSMAVTFTDHGTMRKSLKLPYSASQLLNYTRKHFPGQRVAFVYEAGPTGFGLHDELTAANHPCLVVSPAMVPTAPGQRVKTNRLDSNKLSEGLRGGQLRSIHVPAESYRELRHLVQLRDTQVAQLTASKLRIKSLLLYEGIAFPAANGKWSGQALRRLGSLPCNATVRFKLDQLIDTLQFHFLSAAKVQKQIRHFCQSDPELSQCLSFLTSLPGVGTITATHALARLGDWRQIKDVRQIAGFLGLVSSEHSTGDKQNRGEITHIGDKRLRSKLIQCAWTAIRKDPELRAFYRRIYERQPKKVAARKAIVAVARKLTTRMYAVLKEQRPFEIRAISSIAPLTAEETAGSRERLDAAQNDQP

SEQ ID NO: 297510 - protein, 407 aa, unidentified
MDLLKTVFGIDVSSRKSNVCIMVNGQKVNDYAISNDMVGFNRLLGDLKQVTKPQIIFEATGVYSRRLQAFLDMHELRYVMMNPLEAKRKTKDDLHQNKTDKLDALYLAKLQSEHPQRLAYVQNKEYQELMANNRIYEQASHDLITNKNRLHKAVQLTFPEIEHLLANPRGKNYWSIALRFPHPDIVLETKEADIIDFLKGLSGIGKKRANDITQNLIRLAKVACPAVKKNSAHIRGLKMAINNILSAEEECQTALQEMAKLAPKRDLEILTSIPGIGENTALRIISELGDIRRFNNPSQLNAFVGVDPQVYESGNLTAHLSISKRGTAIGRKVLYLAINQIQSAKKAGNPCHIADYYEKRKRSSETASHKKAAIASIHKLLRTIFALIKNDQLYSYDVAKHNQRLLS

SEQ ID NO: 297511 - protein, 337 aa, unidentified
MKVTLIGIDLAKSIFQVCGVNQAGKRIFNRQVRRARLMELLMQYPDATIAMEACSGSNYWGRALQQHGFKVMLIPPQHVKPFVKGNKNDRNDAFAITEAARRPNLKCVEPRTLAQTDLIQVHRVLDRMVRQRTALINQIRGFLSEYGIVVAQGKENLLAAMPDLLEDAENGLTPSSRALFQEMYEQWRQANEAIDRIEKGLKCQANSDEAAQRLMKMRGVAAKISTATIAHAGNGHGYKSGRHFSANLGLVPKEHSSGGKQKLGGITKRGNRYLRRLLIQGAWSVVRNAHRNDDRMSRWATQLVERRGKHKAVVAVANKMARIMWSMLYHQTEYRAN

SEQ ID NO: 297512 - protein, 358 aa, unidentified
MRIIGVDLHIRQQTIAMLDTETGELVEKTLEHDGDEVRKFYSALTGPVQVGLEASGSMHWFLELLEELGIDCRVGHPSEIRKAEARKQKHDRRDAALLLKLQVEKRFPSIWMPSSELRDLRTLLRHRHQWVRMRTRVQNTLQAMALSHGLRRGKKLWSQAGQHAIASLPLPPHTAYRRSELQDLYDQLQGQIEELDKRVSAQAWQRPGAQLLMTHPGVGPVTALATDVFLGDPARFADGKAVASYVGMIPRECSSGGRQRLGGLSKQGNPLLRFLWCEAAIHAVRRDPELQRFYRRKLAPKGLGKARVAAARKLAIRLWIMLRDQIDYPEFCRRGQMRQKSGATCAGMPEVGHSPAIS

SEQ ID NO: 297513 - protein, 388 aa, unidentified
MIYVGIDIAKLNHYASAIDSDGVVLIEPFEFLNDNAGFYTLLSKLNSFELDDIIIGLESTAHYGNNLVSFLVTKGLHVCVINPIQTATLRKNNIRKTKTDKVDTLVIAKAIALMDHPRFVTLYDIALMQLKNLGRFRMNLVKQRSRTKIQLTAYLDQVFPELQYFFKSGIHQKTVYAILKEAPSAIQIASMHLTHLKNLLVSNSHGHFKNETALELRVLAQKSVGTADRSLSIQITQSIAQIELLDSQIDAVESEMKDIVTSLDSVIMTIPGIGPINGGMILGEIGDINRFSKSRKLLAFAGLDPSVYQSGNFTAKKTKMSKRGSSALRYALMNAAHNIVKYNQTFKEYYDSKRAEGRGHYNALGHCAGKLVRIIYKMLKDDVEFNLD

SEQ ID NO: 297514 - protein, 391 aa, unidentified
MVCVGIDVAKDKHDCCILDSDGMVRADCFTIPNNMDGFKQLLQTIRNCTKKSDKIKVGLEATGHYSYNILGFLLDNDLAVYVMNPLHTNLYRKSLSLRKTKTDRVDARTIATMLLSDVDLKSYTDTAYHNEELKSLTRYRFEKVQERAKLKQSVSRLVTILFPELEQLVPTLHIASVYSLLGEYPGAKQVSEVHLTKLTNLLVTASKGRYGKDKAIQIRDAAKTSIGSVMPAKSLELKHTIKLIRELTSEIDEIEDSIQQIMDELHPPLLSIPGMGIHSAAMILGEIGDFSNFESPDKILAYAGCSPSTYQSGKLTNCYAHMEKRGSRYLRYALYNATKYVCYWNPVFAKYLAKKRAEGKHYNVALSHAMKKLVRLIYALQKSGKAYLTAA

SEQ ID NO: 297515 - protein, 387 aa, unidentified
MSQVSDLSRSLVPFDQNITLTVVVELSEASWLVAGLIPGVDRQPVKKQEPEPVALLRLLERWRVEAVRAGRTIGRIALAFEAGRDGFWLARWLQARDIEVHVVHSTSVAVSREHRRAKTDRLDTAMLMRVFLGWLRGERGHCRMVAIPTLEQEDAKRPSRERESLVGERTRIVNRMKAALARLGIRGFKPTLRKAPQRLDALRTPEEVSIPPNTLDEIRRDMVRLAVVREQIDVIERARLARLEQAPAAGPHAMVRLLARVIGVGLETADMLVQEVLSRNLRDRRAVARYVGLTGSPDESGRRRREKGLAKAGNARVRRGLIQLAWRFLRFQRDSTLAQWYRARTGGPKGARKTTMIVALARKLLIALWRMVTIGEIPAGVALRQVI

SEQ ID NO: 297516 - protein, 354 aa, unidentified
MNDIKYIGIDVHQATSVFAVMNHRGKLESEAIIETQSEPIIDFLKGQRGTLWVTFEEGTYADWLYDVLEPQVAKVVVCDPRKNKLDANKTDKNDARRLAELLRLNALKAVYHGQHSMRTLKELGRSYVSLQQDAVRVMNRLKAIFRGRGIRCRGTSIYRPKNRDQWLEKLDNNGARDRAKRLLKQLESLLPLCLEAQKDLVRESRKHQSCKILMGIPGLGPIRVALILAFVVTPHRFHNKRQFWTYTGFAVVHRGSAEYEITEGELKRAKKKPLPKGLNKNCNRVLKNVFKGAAITAAYRGQFKMLFEHQVANGMEPNHALLTLARKISSITLALWKKGERFDIERHRLSEQTT

SEQ ID NO: 297517 - protein, 341 aa, unidentified
MKQAIRIGLDIAKHVFQAHGADAAGHVLFRKRLTRAKLLGFLAAQAPCVVAMEACAGSHYWGREISKLGHTVRLIPPAYVKPFVKRQKNDAADAEAICEAAQRPSMRFVPVKDEEQQANGVVFRARDLLVRQRTQCINALRGHLSEYGYVFRQGITHAATLIAHVEDPNSFLPESARVILRLLVDTFSALEAQIKELDAEINRRSRADPVAQRLMTIPGVGPIAATAITALVPAAGSFRAGRDFAAWLGLTPLQKSTGGKQKLGAISKRGERTIRRLLILGASAVIRQACRRGAPAGSWLAQMLPRKPKMLVTVALANKMARVVWALLVKGGVYRAPAAAA

SEQ ID NO: 297518 - protein, 342 aa, unidentified
MKAITTIGIDLAKNSFSVYGVDAKGKPVLQRTLSRSGVVRFFANLPACLVGMEACASSEYWAREIESLGHTVRRIHPRYVKAYLLGAKNDANDAAAICEAVQRPNMRFVPHKSPEQVDIQCVHRVRQGYVHSRTALINQARGLLAENGIVIRQGTAQIRAHLPAIIADESNTLSGLMRRNLASLYDSLCFLDRQITEQEDILKTIAKENEACRRLMQIPGIGFITATILLTVAGVASNFKNGREFAAFLGLVPRQNSTGGKTKLFGISKRGDKYIRTLLIHGARAVLRSLTVGRMAEGRHSKWLADLVARRGTKRACVGLANKTARIAWSLLAQGTQYKLAA

SEQ ID NO: 297519 - protein, 355 aa, unidentified
MNSIKYIGLDVHTATISVAVLDAAGKFILESVVETKASTILQFMQGLRGDLHVTLEEGTWAAWLYDLLKPHVTNIVVCDPHRNALLKEGSKSDRIDARKLAELLRAGLLRPVYHGNQGLRMLQELARAYVTIGKDLNRVMNRVKAIYRSWAIPCHGQSVYAPRYREEWLNKIAHHGVRCRAELYYQQLDGLVLLRKQVRKELLVEGKRHKAWKLLRSIPTLGPMRVAVLMAIIQTPHRFRTKRMLWKYSGFGVVTHTSADHRYVQGRMERSNKPVFVRGLDTNHNHQLKDLFKSAATQASTSTGPFREFYEALLAQGMREEMARLTLARKIAVITLTIWKKGVAFDANYLKSQTA

SEQ ID NO: 297520 - protein, 328 aa, unidentified
MEQELHFIGIDVSKAKLDVDVLRPDGRHRSKKFTNTPKGHEELLRWLRSHNVAPAHICMEATSTYMEDAAASLSDAGFTVSIINPALGKAFAQSEGLRSKTDAVDARMLAEFCRQKRPAAWEAPHPVERALRALVLRHQSLTDMHTQELNRRETAREVQMPSIDAHLLWLEAELKRLEKQIKDLTDDDPDLKHRRKLLDSIPGIGEKTSAVLLAYVGLKDRFGQARQFAAFAGLTPRQHESGSSVNRASRMSKAGHVSLRRALYMPAMVALYKTEWGKGFRARLEKNGKGAKLIIGAMMRKLAQVAYGVLKSGRPFDATLHQENACVA

SEQ ID NO: 297521 - protein, 409 aa, unidentified
MFCGIDWSDDHHDVAVVDDNGAVIAQLRIGNDAEGFGQLLETLAELGSGSAREVPVAIETAKGLLVASLIAGGWTVFPINPLATSRYRDRHRSGRGKSDTSDALVLANILRTDMHAHRPLPVDSELVRGLRVLTRAQQDAVGDRMRMTNRIRAVLKQFFPAAIDAFERGGKHRLDSAACRTILSAASTPAAARRLTLTQLRSLLRRAGRSRGIDAEAANLQKILRSTRLQQPSRIEEAMGSQLRCLLDQLDAICSAVDQLTAAVEELFAEHRQAPIFVSFPGAGALTAARLLAEIGDDSSRFDNARALRAYAGAAPITSASGKSHWVGARRAKNDRLAATGYVWAMAAIRHDSDARAHYQRRRDHGDHHVAALRNLFNKLIGKLHHCLIADVVYDANQAFPASVTAAAA

SEQ ID NO: 297522 - protein, 326 aa, unidentified
MTKLTIFTGIDVSKDVFDVCVLNGQEGRTQSKQFSNNEAGFAALSQWLPSEAHCVMEATGPYYLRLAFYLHEKGVWVSVVNPLVIKHFSKMKMCRAKTDRKDAALLALFAKEQAPLRWTPPKSYVATLQQLGSVLVQLTKQHTALTNQLKAFECSGMLEKDTKTLLQRLLRQVEKQSCEVEKKMERLISCYHQELLKRLTTIPGLGQKTALVLIVVSGGFTRFSTYKQLCSYLGLSPRIHDSGKLKGKTPICKMGMSRLRALLYMCSWSALKYNQACKALYERLIEKGKAGKVALIAVCCKLIKQAFAIVKHNSSYQADYQKNICF

SEQ ID NO: 297523 - protein, 355 aa, unidentified
MLYTGLDLHKSFSYITTMNDKGEILGQKKLPSNGEIVEFLREFDETMEVGMEATPSWYWLYDCLEDEGFKVKLSHPLKTKAIAYAKVKTDKVDSATLAHLLRSNLLPLSYVPEKLVRLNRELLRYRASLVKVQTGIKNKIHTILAKNNISHGYSDLFGKEGMAFLYSLSLPENCRIALEGYLSVLETLRHEIQKASKRVQELAEENQDAVLLMTIPGVGYYSALMIKSEIGDVKRFPSAKQLCSYAGLVPSTYASGNTCYHGHITKQGSRWLRWILIEAAIHTVKRPGPLRRFYFKVERKKGGKVAKVATARKLLEWIYHMMRDDKSFQEVERLAELQGKGEPVKKPGLYFRPSI

SEQ ID NO: 297524 - protein, 365 aa, unidentified
MAVGQTNQTKKGVRKMTAKKGYIGIDAHARNSVMGWRDGRGKYQGAQRFETSESNLLKHLQDIPAQEKHLTIEEGPLAGWIARTLMPHAKRILICDPKKNTSIQRDSNKNDLADTEELSRLLWLNQLTEVYHPADDERAIFKAAVQQYLDLRNEQVRMKHKIKAKYRMWGVSAVDGMKVYGPKNRRSFLEQVQQPSIRHQLQRLYVVMDTAEEQMEKSFEEVRALGRKYPEIQEFLKIPGVGPVGSHVFDAFIQTPRRFANKQQVWRYSQLAIRDRSSDNKPLGFRRLDYNGNPELKAMSYWAWMGALAREEDNEVKRLYQASLERTHNHVHARLNTQRKIIAVMWTLWRKQEAYKPELFFLSPT

SEQ ID NO: 297525 - protein, 414 aa, unidentified
MSYKIAGIDVHKKVLMVVVIDASTPEGKPERRRFATMASDLRRLSTWLREQGVQEAVMESTAQYWRSVWLELEPCMRLHLAQAFSNRAPRGRKHDFKDAERLVRRLIADELILSFVPDGEQRTWRNMTRMKTQLTRDRVRLQNQMECLLEEMRIKLSIVVSDLLGGSGLRMLRALADGETDPKKLAALGDDRLKCSEEQLVDALTGRPEPMHRAMLALQLERLQLIDRQISQLNGMIAQAMKPQQDAVIRLAEVPGLGVDSAQQVISEVGPQASTFASAAELTSWVGTCPGKEESAEENHSSRSAKGNKYLRRVLNQSAHAAVRKNGSHFQAVFRRLLPRLGYQSAIWAIAHRLCRVIWKILHEGVRFIEQGSESDPKIRKQRARILARALRKLGYDVAITPRNPATTEMGIQM

SEQ ID NO: 297526 - protein, 401 aa, unidentified
MKRLSGGIDVGSESHHIIILDEEDNFLYNQKVAHKLNEFTENIKQFKKIEKKEGGKISFALEGKNGYSAPFDRILLNQGFTLYNVDNLKLKRFREAFAGEWRDDERDSLMLSKMLKLKDYINSERERVFIKIEKPSLVTESLKLLSRHQQTLIDEKVRLVNRLGKKLLEVCPQILELGKLKNKKIIAILAKYPDFSKYKRITLKSLLKIKGIGKIQAPFLLKRLNNIEYMSGLTDIYKTIISSYAKRIMQLQREIKDIDKSLDEIGGKNKEVNHLKTIPGVATKLASRFIGEIGDINRFPSEKQLAVYCGIACVDNNSGKITKARVVYKANKICKQTLITMAGCSIRFSPQCKAYYLKKRTEGKNHNHTLRCLARQLIKVIYRMLTEDREYIVRKELKKVA

SEQ ID NO: 297527 - protein, 454 aa, unidentified
MSKKESKRKRKVTDLDALEQINLNAAGIDIGAEEIFVAVPKGRDAESVRSFPTFTVDLHRMADWLEVCGIETVAMESTGVYWIPLYEILEEQGFDVNLVNARHIKNVSGRKSDVLDCQWIQQLHTYGLLQPSFRPPEQICAIRSLVRHRDMLIRYRSSHIQHMQKALVLMNIQLTNVLSDITGMTGMKIIRDIVAGKRDPEVLARHRDRRCRKSESEITKSLEGNYKREHVFALKQALELYDFYDRQLRACDVELEAMYNEFEPPDGPGTEPPAPRTTKRRKNQPYFDLARSLYRLTGVDLTQVDGLDTMTVQTILSEIGTDMSPWPTVKHFTSWLRLAPNNKVTGGRVRSRRTQPTQNRASTAFRIAAQSLARSDSALGAFYRRMRARHGAPKAITATAHKLARIVYFMLKRREPYRDSGADYYEEQHRVRVIRSLQRRAAKLGMRLEPVAAT

SEQ ID NO: 297528 - protein, 345 aa, unidentified
MDKISTVGLDIAKHVFQVHCETAAGQVVVRRQLRRAAVLTFFGKLPACVVGIEACSSAYYWAREIGALGHEVRLMPPVRVKAYVAWGRKNDAADAAAICEAVRRPSMRFVPVKTVEQQAVLMLHQARRLLVAQRTRLSNAVRGHLAELGITAAKGAAGFTALLRLVAAPADERLPAIARAALGTLAHQWHSAGEQIDGLDAQILAWHKSDADSLRVATIPQIGPIIASALVARTGDAARFRNGRQFAAWIGLVPRQNSSGGKERLGRITKTGDRYLRQLLVIGATGMIRRVRANPALSPWLAGLLRRMPAKKAAIALANKLARVAWAILAHGGVYQARQHEPAAG

SEQ ID NO: 297529 - protein, 424 aa, unidentified
MYSKAGRGEVIKPEVLVIGIEVAKRCHVATIRLPDGTKKKAFSFSNDRSGFDKLLARAESVRASWGLRAMLFAIESSGHYGHALKHFLTWGGYSVVGINPAHTKRVKEIEDNSPEKNDSKDSRIISDLAAQGRGREVMIPRGVYADLRRLGKFRERLSVERTRIMNRYKGLVDLVFPELNSIVRDVASSSIRRLMREYPSALDVARLELHRLYRQLWRWSMGHLSHEQCRRLHTAAKESVGIKEGLDAARLEMKQILEALKIIEGRIGEVEAAQEQALPRIPYTEHLLSIPQVGSVTVATILGETGDLRQYRNAEAVIKLAGLNLYTISSGTLKGKTRITKRGRPLLRRYLYLAALRLSKRGQPLTDFHDRLLPTKAKPQIAVAVCRKFVRLMVAVVRDGINYEVGRLAVEPCLRKTVSAGGRT

SEQ ID NO: 297530 - protein, 397 aa, unidentified
MIAVGIDVSKSKSTVAILNGDGSIRAKPFDVHHTTDELQALVSYIIGTSEAPTILMEPTSHYHYPLLKAFQEANLPVCLINPYQMKKYGDTELRKAKTDKRDSLRIAQYALEKSYSLVPYTPATQKYEDLRFLSRQYSQRISTLTVAKVQLLSLLDETMPGITTILPLKSRDPDNCVLLRFIKRFKSFDMIRKMGKTRFLDSYQVLVKKTKDRFAGAKGLAIYELVLNSITTRGENPLSAMVQDQCVDLVSTSQKAADEINLQMRIIAETIPEYKVLLSMAGVGERLGPIILGEIGDIRRFHSGKALNAYAGNDAPPYQSGQFESRNRHISKRGNPALRKACFEVMQALKLTKPQDDPVYLFLLKKEQEGKPYNVAKMAAVNKFLRIYYARAMELYK

SEQ ID NO: 297531 - protein, 316 aa, unidentified
MNTSTNQNINVGVDTGKSQLDIYIRPLDIFFSVSNDDKGIKQAIKTIKQHSPQRVVIEATGRLEMPFILACADANLPFVIANPVHVKRFAGAIGQRAKTDKLDAKLIAHYAEAIKPALTRLKPESMRLMADLVSRRNQLLSMQTMEKNRLQIMPKQLAMTIKPILTAFKNQIEKTEKKIVALIESCPEYQAKNDILQSMPGIGKIAAASIISNLPELGYITNKQAAALVGVAPMNRESGRYKGLRKIQGGRAQVRTVLYMAMMSAMQCNPVFKSTYQRLLTEGKPKKVAIIACVRKMVIILNSMLRDGVLWDTKTA

SEQ ID NO: 297532 - protein, 356 aa, unidentified
MTSNIKYIGMDVHKESISIAVMNSVGKVVMESVIETKASMILQSIDGLRGDLQVTFEEGTSAAWLYDLLKPHVTKLVVCDPRKNKSMREGNQNDKIDARRLAELLRLDHLTPVYHGEHGLRTLKELVRSYLTITKDLGRVMTRVKAIYRSWAIPCTGKQVYARRHRVEWLGKINEPGVRRRAEFYYQQLDALRVLRQEARRDLLAESKKHKAWKRLCGIPSIGPIRAAVLLGILQTPHRFRSKRPLWNYGGLAIEMHSSADHRSVDGQLQRSRKNVLVRGLNRNCNHDLKNLFKGAAAVASSKPGPFQEFYTALVAKGMRPEMARLTLARKIATIVLIVWKKGVCFDANHLKPQTA

SEQ ID NO: 297533 - protein, 412 aa, unidentified
MELLHRRCCGLDVHKETVVACLRLVSDGKVTTEVRTFQTTTADLLRLSEWLAANECTHVAMEATGVYWKPVWRILDDGEFALVLANAAHVKNVPGRKTDVNDAMWLAELLAHGLIRASFVPDAQTQEMRNLLRTRKQLVREQSSHVLRVQKTLEDANIKLDSVLTDLMGKSGRAIIEALIAGETNPVKLAGLADRRVKASFEEFREALRGRVTKHHRFLLRLHLNQIDALDAAMATLDAQVEANLGPFRTAVELIGSIPGIKNLGAHVIVSEIGIDMSRFPSAAHLISWACICPRNDESAGKRRSNRVRKGGTWLKTTLVQCAWAAVKKKDSYLQAQFYRIKARRGPKKAIMAVVASILTAIYHMLKDGTMYKDLGRNHFDRRSSDQQKNRLVKRLAELGYAVEIKPLAATA

SEQ ID NO: 297534 - protein, 355 aa, unidentified
MKATPSDFSSLQLYIGIDVHKKQWSVSIYTNSAHHRTFSQPSTPQALKSYLDHHFPGARVVCAYEACKIGYWIHRALTSYGYTCLVVNPADIPTSNQEKANKTDPIDSRKIGKSLRAGLLTSIHVPDEATEGDRHLFRYRRKLLGDLTRVKNRIKDKFLFTGTSVPTEFDNSNWSKAFLRWLKQAQLPDAHTRLCVDMLLEQYHFLYRHFLKTSIEVRKLQRESRYKQRAKLLRTIPGIGPLTTVELLTEIADIHRFPTFKKFNSFIGLKPSSHSSGERDWKGRMSYRQHKGLRSSLVECAWTTISKDPVMLQRYDELTKRLTGKRAIVKIARKLASRIYYVLKNEKPYELGLVN

SEQ ID NO: 297535 - protein, 403 aa, unidentified
MFFLGIDIGKQHHEVGLIDQHGKSIGKTIRISNTKFGSEQLLAFFNKHALLPENTMVGMEATGHYWLSIYTFVHKLGFHTTVFNPIQSDVLRDFYIRKTKTDTIDALLIAQVIRLDLPDKTELPAEDIFRLKQLERFRYGLVDRCSDLKRKILACLDQVFPEYDQIFSDVFGCSSTQVLLNSPIPEDLLEIDAERLIETINTASEKRLGIARSEEKVMKLKEAAAHSFGISIASDVFKLEIQIMLEQIQLLDSQIKIIEAEIQEIVSKQENYLTTITGIGDITAAVLMAEAGDIKRFERPNQLLAFFAGLDASVHQSGDFTGTKNRLSKRGSPYLRRAIWQAAFVAAFKDPALSLYYQKLRKRGKSHGTAIGAVARKLVNIIFAVWTQNKPYEVHFPEDISEK

SEQ ID NO: 297536 - protein, 340 aa, unidentified
MRELYVGCDLHSNGIFIGIIDEQGKRVFKKRLSNDLREVRETLVALQEKIVGIVVESTYNWYWLVDGLMEGGYRVYLANPSAIQQYAGLKHADDKHDAFWLAEMLRLGVLPEGYIYPKQERPIRDLLRKRGHLMRLRTSLVVSLQNILSRNLGWRVNVNDVKVLREDRITPLLAENGDLAMAGRISKETIDFLTHQIDQIERRVDKEVRLKEAYRFLQTLPGVGKILALTIMLETGPISRFATVGDYVSYCRKVPSRWMSNGKWKRSGNTKNGNRYLSWAYAEASDYARRLHPEPRAYYQRKKQKTNAVVAHSALAHKLARAAYYVMRDQVPFDPEKLFR

SEQ ID NO: 297537 - protein, 352 aa, unidentified
MTVYIGVDFHARQQTVSYLKTEDGEIHQCKLDHQKDDIAEFYRQFEGEVIVGMEASGYIEWFEEMLLKIGHQVWVGDSAEIRLRARRRQKNDKRDSLLILELMVKGEFPKVHRQTTESRQVLKQLRYRHRLVKIRTIAKNNVQALALSGGLLAKRQYTSKWRQELRRLEREPMLGEQAKQLVKIIEDVTLEIKRVEQWLRKQAEADHRALLLQTHPGIGLLTSLVLVHTLWPVERFRNGRKVTAYLGMDPVEDSSADRVRIGSISKQGSRLARYLVIEAANTAAKSDKGLKSFYRRLMSRQGKPKAKVAVGRKLLVRCFIMLRDQIDYDEFLRRGVEVRSSRLATGPLCLNP

SEQ ID NO: 297538 - protein, 400 aa, unidentified
MMTPDDIDVWVGLDVGKSAHHAHALDHDGNTLYDKPLKQDEKAIRTMLGKLSKHGRVLLVVDQPNTIGSLPLTVARNMGIAVAYLPGTAMRRTAQLLPGDAKTDRRDAHVIAWAALKLPETLRDAGPDDETLAALKLLAGHDEDLAHESTRHVNRLRSLLLQTHPAFERALKGERITRDATLALLERYGGPMGVKRAGIEDVKDWAKSNGLHAGRIIDDMFKAIGEQTVTVPGTLMAETIIPSIAHDIKTIRDRRREVGRQVEKLLEDHPLLTVLTSMPGIGVRTASNILLGIGGDIANFKSSAHLAAYAGISPVTGQSGTSIKGERPSRRGNKRLKNALWQTAFVASTKHPPSVAYYKRKREQGKHHNAAIICLARRRCDVIYSMLKNGTLYQEPALVA

SEQ ID NO: 297539 - protein, 442 aa, unidentified
MSELAVLDPRAAFVDVGSEKMHVSIGGGPPRVFGTVTSQLEALRDYLIEQQVRSVAMEATGVYWLPLYSVVEAAGLDVRMVDGRQTRHLPGRKSDMQDCQWGSTLHAHGLLRAGFVPPAHIRRLQDYLRLRGEHVAAAAGHVQHMQKALERMNIKLHDAIASLTGVSGLAMVRAILAGERDPAALLELCDVRIRRAKAERVVESLRGNWADEHLFALGQAVGSWDHYQAQIVDCDRRIAEVLAGMPGGDAPAAGAEQPAKRRTQPGVNAPQIDNLRELLERMCDGKDATTLPAHSEYTVLQLVAEVGTDLTRWPTEKHFASWTGLAPGSAQSGKRRAAVRRRRNRAGKIFCVMARALARSKYIALGAYYRRMAARRGGLVANKALAHKLAILFWRVMVKGMDYVEKGLAHYEAQVLETRQRLLRKLAKQFGQQLVPIQANTP

SEQ ID NO: 297540 - protein, 320 aa, unidentified
MQTPAVVLDIGADVAKDEIVAACSEGSFPVRKVANQRAAVLAFLKGLPAGSRIGVESTGSYHELFAEVAHQLGFLVFLLNPKDTRHYAKAVGLRGKTDRVDAELIARMIAHEHTKLHAWIPPTPQQRELDRLIKRRATLISLREAVEMSLHGLGGFDADLKALRTRFNQLIARLDLRVKALVDASPERKQNYTRLCTITGIGPVVGAALGNTLERVPLKGADAFVAFTGLDPGPDDSGQHRGKRRLSKRGPAELRRLLYIAAMSAIKTKTWRPLYDHYRAKGLSSTATLVILARRIARTAWSIYTHQTQFEPGRLTNPLT

SEQ ID NO: 297541 - protein, 452 aa, unidentified
MERSKSGALSMVNPRAAAIDIGSTMHMAAINPNADDNPVRAFGTFTGDLHDMARWFKTYGVTTVAMESTGVYWIPAYEVLEGHGFEVILVNARYAKNVPGRKTDVSDAAWLQRLHSYGLLRGSFRPEAGVATMRAYLRQRERLIEYAASHIQHMQKALMEMNVQLHHVVTDITGVTGMRIIRAIVSGERTPSTLAQMRDVRCHATIETICAALSGNWRDEHIFALGQSLALFDFYQTKVLECDRKLEIALKALEINEGHDVRQLPKVRTKRRQVNTPDFEVRSALYRVLGVDLTQIHGIGPSLALKLVGECGTDLAAWPSSKHFTSWLCLAPGNKISGGKLLSSKTRRSSSRAAALLRLAATTIGRSDTALGAFYRRLSARAGKAKAVTATARKIAVLFYNSLRHGMAYHDPGASQYEERYRSRVIGNLQRRAKAFGFILHEMPGEPDMAVS

SEQ ID NO: 297542 - protein, 339 aa, unidentified
MEPSSLVHPVGIDVSKNTLDVAIATTSRPVTSRFANHRHEFPVLLEWLHTRASGPLHVCLEATSTYHDELVAFLLSHDIRLSVLPSARLKPFRESEGIRSKTDKLDAILLARYCQQKHPAAFVPVPEELAHMRVLLSRLSELADLRQQEGNRLENGRLDATIRAQITDHLRLLKTWHTQMLKQIRAWIKTHPELQQAVKLLQTIPGIGERSSWQLVAILGADASRFASAHQLVVYVGLDVAKKDSGKQIKAGHITKQGSSQVRACLGMGALVSKRWDPDMKQWASELTGRGKKSRQVRVAIMRKLLHIAYGVLKHQKPYDPSHAWPTHAQGAKEEKQAA

SEQ ID NO: 297543 - protein, 330 aa, unidentified
MKKLFCGVDISKNFLDYAICNGEDKSIIASDKIPNDRIGIKSLIRILKKESDGGSIWVCFEHTGNYGLMLASVLSEFNIDYSMVPSLEIIKSSGMVRGKTDSVDAKRIALYLAVNNYKLKPTKLPCDAIMKIKTLLTLRQQYVKIRTQFKNSVKSLKISAKIIPLKNEIKQQEEEINRYDSKIKEIEEQIKEIIKTNEQLEKNYKKIIEILGIGLITASLFLVSTNNFTDFENPRKFNCYCGLAPFEYSSGTSVKGRTKTSHYRNKELKAALFKAAITAITHDKEISLYFTRKISEGKHKMSVINAIACKLVYRVFAVVKRDEPYYRVAV

SEQ ID NO: 297544 - protein, 416 aa, unidentified
MNAVGIDVSSRKSTVAVLRPLGEVVCLPFDVTHDIAGLASLAEKLKALDGETRVVMEHTGRYYEAVEKALHEAGLFVCAVNPLLIKEYGANSLRRVKTDKADAVKIARYALDNWADLRDFTPMDAIRYDFKTLNRQFQLASKQRTASANNLIALLEQSFPGIRKCFDSPVRSDGTQKWVDFAHSFWHVDCVRKQPFAAFCERYRKWCKRHAYLFKLSNAEEVYALAKRAVVLTPKSKVVKVLVQEAANQLISISRSVEVYRAEMDRLAAMLPEYPVVMAMYGVGKSYGPQLMAEIGDVRRFERKQALVAFAGIDPMPNQSGDKNVRSNKSSKRGSPYLRKTLFNVIRTYLQCAPQDEPVFQFLNRKRAEGKPFYVYMLAAANKFLRRYYAKLRDYFASLDTLQSVAPIPTILKATL

SEQ ID NO: 297545 - protein, 343 aa, unidentified
MTNANNRTAPAWAGIDVAKETFEAALHPAWVPGEELALSDLPRANFPRTADGVASFLGWLDGAKATDGIRAVMETTGRYSVELAELLLAARSSLVPAIVDAKSASHFGRSLRLRNKTDRVDAGMLARFGAERCPPPWRPLAPEYAELREMSRQRTFLVESLVTARNRLAEIESVRSVARVQKQVIASLEKAIERIEELMHKHVAKHASLARAVRRLDTTPGVAFVTATTVLGELGDLARFLSSRSLSAFAGVSPRLFDSGATVHGRPRMCKQGSPRVRQVLYLASLAAVRNPRNRFGRSYAAMVDAGKPRMVALGAIMRKMLVTMRAMIVGETDYQDELVPGR

SEQ ID NO: 297546 - protein, 390 aa, unidentified
MLHDHSLDEPAAIRTQFGAIFVSLELSRSTWLVTSLSPGNGEKMSKHTVATGDIAGLLARFSELKRKAMTRTGKSYPIIVIQEAGLDGFWIHRALQGKGIESHVVDAASIATSRRRRRAKTDKIDGEALLRALLAYKRGEPRVCAMVIAPSPEAEDRRRVCRERKTLIGERVTHVNRIKGLLFSQGISGYVPLRRDRRARLEELRTGDGRAMPAHLKAQISRELDRLELLLEQIKAIEAERDALLATADKAVSVEVAAPQPVRMLLALRGLGPDFTSVLWSEGLSRHFSNRRQIASYAGLAPTPWRSGSIAHEQGVSKAGNPRLRTTMIQLAWLWERHQPQSALTLWFRKQSKRGRKTAIVALARKLLVALWKYVTAGVMIEGAVMKGAT

SEQ ID NO: 297547 - protein, 329 aa, unidentified
MKISSILGIDVSKKTLDCYLHVQQQSLPPVSNDIRGFKSLQRWLLKTLKSTEGLIVVMEYTGIYTYGIERFLEAQNIKFVKKPALDIKRSIGMVRGKSDKVDSKFISKYGWLRKDDLKPMAPQTDEQVELKQLMSHRDKLVVDRASYQSKLKELSLQMGTKMNSKIAGSMTYVMDVLKQEIKEIEKEIESLIKSNESLKTNYDLMCSVVGIGFATAAHILIATENFTRFTDVRKFICYCGVAPFEHSSGTSIKGKTRVSHLANKKIKSLLTMAATSAIQHDPELKAKYQQKVKEGKNKMSVINMIRAKLLQRVFAVIKNKKPYEVRLAA

SEQ ID NO: 297548 - protein, 399 aa, unidentified
MADLFAGIDAGKSHHHCVVIDTDGNRLLSQKITNDETVITNLIDEVNTLTDPSGSVTWATDLNRGGAALFIALMASHRQTLLYIPGRTVYNAARTYRGDGKTDAKDAGIIADKARMRRDLQPIRLGDDIATELRLLTAHRTDLACDKTRAINRMRASLGEFFPALEAAFDYSTSQAALLLLTGYQTPAAIRRMGVKRLTAWLKKRGARSAARVADIAVEVADKQHTTVPGQDAGAMIVARLAAEILRLADDITGIENRIEDRFREHADAEILLSMPGFGPLLGAEFTAATGGGIDQFDSANRLAGVAGLAPAPRDSGRISGNHHRPKRYDRRLLRACYLAAQVASRWCPVSKAFYDRQRAEGKNHKQAILALARRRINVLWAMLRDRTMFGQGISPIPG

SEQ ID NO: 297549 - protein, 484 aa, unidentified
MSKPKKHSKQLSEKKTVAGKGKRGLKRKGMCLEDRPILEANAAGIDIGAREIFLAVPPDRDEHPVRVFPTFTEDLEQMAQWLVSCGITTVAMESTGVYWIPLYDVLEKHGVRACLVDARGMKNVPGRRTDWHECQWLQFLHSVGLLRAAFRPEGAVCAVRSMMRHRTELVAMTSQHVQHMHKALTQMNVQIQHVISDLTGVTGLAIVDAIIAGQRDPMVLAKLRDPHIKADEETIRKSLVGNWQPEHLFTLKQSRQSYQHYREQIAACDEQIEKLLVAFQPRVNPEEKPLPPDRKKKQSGRRKKNVNPKTGFDLRTESYKLFGVDLTQIPGLMAIVLALFSEVGRDMSRWPTASHFICWLALCPDNDISGGRVLWRGMRRVQNRAGHLFRLAAHSLHHDQTPMGDYLRRMKSKLGPAGATTATAHKIAIIFYTMIKKQVEYDATIWAERDAEREKRFEAKLRRQAQQRGYKLVPIEENPARVSA

SEQ ID NO: 297550 - protein, 468 aa, unidentified
MSRSKLKAHTSAQGEIRSTEGLPVVNPHAAGADIGAQEIYVCIPGPDQTQIVRSFGTYTADLHAIADWLVENSIQTVAMESTGVYWIPLFEVLEGRGIHCCLISGNLARRLPARHKTDVLDCQWIQTLHSLGLLTESFRPDADLIALRSLLRHRAQLIEHRSPHILHMQKALIHMNIRLDQAVSDPTGDTGLRIIRAIVAGERDPHKLAALRHPHCKKSEAEIARALTGTWREEHLFVLKQSLELYDFYSRQIEACDAEIERTYSTIRPHWPDPDPNDQDPLPPNKRGSNSKNLPKDSPVQVRRHLRRITGIDLTSVDGLSLDLAQKIVAEIGTDMSRFPTVKHFTSWLKLCPNNQITGGKIIRSSTGKSHNRARQAFLQAAASVARSNCAFGAFYRRLKARVGPAQAQVATAHKIARVVYHLLKFKVEYCQMSAQEYEQQFRERETRHLQRKAARLGFTLTPTAAVS

SEQ ID NO: 297551 - protein, 404 aa, unidentified
MSATGRRLAAAALAILDAVTGRVRGHRDDRTDGPGYLRLLAWGRQHAPGRRVWALEGTGSFAAGLVMVLAEAGEDVLEITSGKRSRGAKNDRIDAVQAARTALANEQHAAPRERGLREALRQVLVSRQAVLVSRTKAINELKSLIVVAPEHLRAQLRGLSLDKQLDRVEQLHSPADATVEHRVTVLTLHSIAARIRFLLAQTAELDPELLALVKAHPAGPALLAEPGVGPVVAAQLLVSWSHRGRVRNEAAFAALAGAAPLEASSGQRTRHRLSRGGDRDLNRALHTVAITRLRCHPESRDYETKRTSQGKTHRDVRRSLKRALARRLYRRIQAATRPPNTPARGASNRLLRQYLHKNADLSVLTQDDVDAIAATLNHRPRRVLGWATPAEAFGLVEPTRRQLG

SEQ ID NO: 297552 - protein, 495 aa, unidentified
MPCSVAGARLMFRTRAADLLWPTADYVFGDLLGAAWLSGAVIPFGSIRFHLLAGLGVQPYTKSMTRKAAAIDVGSESMHVGIDGQQEVKIFECFTDSLHQLRDYLLEQQVTTVAMEATGVYWLPPFDILEAAGLEVVVVNGAHVKNVPGRKTDVQDCQWLAHLHGRGLLQSGFVPPAKVRKLRSYVRLRQEHVANGARHVLHMQKAMDLMNIKLHEVLSQTIGRSCLRMVRAIVEGQRHPELLLGLCEVDVQRRKRKEVLRALQGTWDPEHLFSLKQALQAWDFFQGQIAACDAEIAQVLAALAADQAPLPPTQTPTMKKRQGNSPEIPQLEQLMQQITGADLSALPCITAYSQMLLLAEVGTDMSRWPTHKHFVSWLGLSPGSRQSGKRRKNQKRHRGVAGKIFCVLVRTLGRSKYLAISGFYRRIKAKHGAQVANIACARKIAVLFYNALRYGLKYVEQGLEQYEKQYKERTLKGLRKAAARLGYALTDQAVA

SEQ ID NO: 297553 - protein, 415 aa, unidentified
MIPAVVERCAGIDVGKKFLAVCVMTGPASEPASEETRKFGTIRSELEKLRAWLKSSGCTHAVMESTGCYWKPVLNVLEDDAGFSLHIVLANPQQVKAVTGHKTDPHDARWLAHLLRHGMIRPSFIPPRAIRELRDFTRRRKQMIGLAAQERNRVQKILEDANVKIGDVLSDVFGLSGQLMLEALVEGNATAADIAQLAQRGARKKIAELTAALEGHQMRTAHRTLIRHAMRHMAFLAGEIEALDRDIEQMIESSGLKQPHQLLQSLPGIQATAAATILAESGPEMKQFPSAAHFSSWSGLAPGNNESAGIRKRAPSLKGNPHMKTALVEAAWSASRTKHSEFESRYRQLHSRLGHKRALVANAHTLVIRIYEVLSEARPYQPPASLPPGDIKRLIRHHTRRLNCLHRWLSQPHRT

SEQ ID NO: 297554 - protein, 346 aa, unidentified
MLYAGLDLSRQRLDVHVLDEEGRTVEALAVHPDADALRTLANRILCHGGEVSAVIESMTGSRFVHDQLELAGWDVAIADAVKAKGLAPLAAKTDKIDAHVPAELARRDLVPEIWLPDPKIRAERERARFRLHLVHHRSALKCRIHATLMTFGHPVPVADLFGTTGRQILAGLTLPEPWARTLATSLAMVDELDERIDECGRELARLGADHPYIPLLLTVPGVGPLLAYTIASEIGDIARFASPKKLTGYTGLCPLVRQSGNRDFRGPLAKNGPKYLRWALVEAATHAARDVRYRDRYERNKHRLGRQRGAKVARIDIARRLAEGIWHVLTKNEPFAPASPAILLVA

SEQ ID NO: 297555 - protein, 421 aa, unidentified
MTRLPMDEFAAFVGLDWADAKHDVCLQAAGSQKREFSVLEHQPDTIDAWVSTLRTRFKGQPIAICRERNKGPLVSALGKDDVLVLFPVNPLTLARYRDAFTPSHAKDDPSDAELQLALLLTHRDKRKPLAPQRTAIRALEQLVEHRRRLVGDKVRLTNRLTSALKNYFPHVLQWFDDKDSTIFCDFLTPWPPLKAVQLARRSTLERFFRTQHVRYADVIDQRIQAIKSATPLTTDAGVIAPTALLVQALVSQLRVTLQALDAFDEAIAQRAQSHPDFPLFNSLPGAGAVLAPRLLAAFGEHRDRYTSAAELPKYAGIAPVTERSGNKSWVPWRLQCPTFLRQTFVEWAAESIHHSVWARAYYQQQRNKGTSHQAAVRALAFKCIRILFRCWHNRTPYDESGYLNALERRGSPLIHNLVRDS

SEQ ID NO: 297556 - protein, 352 aa, unidentified
MQHFIGCDVHTRNQVVAWIEEETGEIRKRRLEHAGEEVGKFYAQFPRGTVVGIEATFPAYWFERLLGELGHELWVGDAARIRASEVRYQKTDPRDAEGILDLLRTGRFPRIWVPSLEERDLRQLLVHRMKQVRARTQVKNQLHALAISQGVCRGRKLWSAKGRAELEKLALLAWAARRRKELLESLDRLDEQVRELDRAVEEAGRERAEVALLRTHPGVGMVVALAFVLTVGPIERFPNSRRLVSYWGLNPRENSSAGRQRLGAISKQGNTMMRWLLIEAAQTAARLDPQLRRTYQRLKHQRNSGVAKVAVARRLVVRLFWMLRTRHNYAQLVHMSGSPSSAVVPPQGGPKL

SEQ ID NO: 297557 - protein, 343 aa, unidentified
MSKHTLVAVDLAKSVFEVAVSHHPGRVARQKRYSRQQFPLALAQLPEATVVMEACGSAHFWARRIQALGHEAVLLPPHAVRPYVRRNKTDRTDTKGMLEAYRNEEIRHVPVKTIAQQTLASLHRLRSGWLAERTARINTLRGLLREFGILIPLGAHHAVPSAWAQLEDAESEIPDPLRPALAEICLEIRELERRVKMIERQLAALAAQTPAVSQLMTIPGIGLIIATALVAFVGNIHRFPSARHFASYLGLTPRESSSGLRRRLGAISKRGDVYLRTLLIHGARSVLLAAKRRTPDRLQAWALSRQAARGHNKAATALANKLARIIWAVWKHDRPFRSVPNVA

SEQ ID NO: 297558 - protein, 343 aa, unidentified
MQAVTTIGLDIAKSVFQVHGIDATGSVIIRRQLKRRHVLAFFEKLPPCLIGLEACATSHHWSRELKALGHTVRLMPPAYVKPYVKRQKNDAADAEAICEAVTRANMRFVGTKTPEQQGCLMLHRTRHLFIRQQTAVINAIRAHLGEFGVVAPVGRRGVEELLDVVADSGDERVPEVARACVGALGVQLRMLKAQILAFDRQIMAWHRSNETSKRLDEIPGVGPALATALVASVADPGAFRSGRNFSAWVGLVPRQHSSGGKDRLGSISKQGDRYLRSLFTAGALAVIRYAKIHGTKHRPWLTALLARRPTKVAAIALANKIARMAWAMMARGERYKEPAALAA

SEQ ID NO: 297559 - protein, 365 aa, unidentified
MKSMTYVGLDVHKKTIAYCVKTRSGKLIEEGQIEATRTDLDAWSARLRRPWTGAMEATLFTGWIYDFLKPKAQTLKVAHPAMLKAIAASKKKNDRVDANKIADLLRCDLLPECYMARTEVRERRRVLRYRNLIVNEATRMKNKIAGLLMECGVEYAKKKLHGKRYFSDLLAGLDEEAPDSVKQLLHVSRANLELFDKLQQGLLTKLTEDRQLQERLARLKRIDGVGDILALTWILEVDDPHRFHSIAQAISYCGLCSAQDNSAGKDKRGPISKQRNKHLQHMLIEAAKLAPRWNPVLAEVHRRELARGGKNRATVAVARKLVAYLLAADKSQKPFEQSAPLPLIKAAQGPKKKRDSLGGDPKKRR

SEQ ID NO: 297560 - protein, 323 aa, unidentified
MTKGIKYFGIDISKLVFDVTDSDGDYHQFKNNALGFKKFVKLLNCNSHCVMEATGYYHYQLAYYLLEKSIKVSVENPLSVKRFIQMKLSKIKTDKSDSKLICAYAVQVALKLWKGHSKHQIECLQIIRLLSVYTKQSTMLKNKLHGEAVLGNPSKAVLGSLKRSLKHVQKELKIVEQKLLILVKEEHQDVLTRIETIPGIGRKTAIMLVVLTDGFERFASASELCSYSGLTPIIRQSGTSVTGRSRISKIGNQKLRNLLFMYSFNACKYNKGCKELYDRLVAKGKSKKLALIAVCNKLLKQAFAIAKSGLIYDQTYRSSLVKN

SEQ ID NO: 297561 - protein, 341 aa, unidentified
MKAPEKFVGIDVSSLSFTVAVGKTPWQLVIRPTDFANDYDSFPKFLHWLQQHNLQPENTVLCMEATGVYSEALAYFVHANGYLIAVEPPLKVKRSFDTSGHKSDAVDSRQIAEYACRYFDELAFWQPKADILVQIKVLLTTREQFSAQLTAHRNALKTLQRKVVVTPLAEQLHQDSITQLKNHIKSIEEEIRRLIDQDPIYRQMVSLLMSIPGVGLLLAAQMLVIVENSPEPVSAKTLAAYIGICPYEHLSGTSVFKRSSSRHYGPATVRKLLYLAAMSVCTHHGHFREYFLRKVAEGKSKKLVLNNIANKLLRIMCAVLRTQTPFIQNYQSVNPRFLITT

SEQ ID NO: 297562 - protein, 319 aa, unidentified
MVTSIGVDVSKDSLAVAFKKPDRNFQRYDFANSKKGISDFVKMMDRMNTTKEVPIVMESTGSFHLPLAMTLSDGHHYSAVKVINGILTKKYQQGKIRQTKTDTIDSEILANIGSIEELNTFKQSRKDVLQRKRISMLKKLTKIRQELKQMNNSHKESLNELEEECELIEGNEEILKSINKQISNIENEIMGNEQCEFLDKVSDIKGVSKRKAAILIAFLNGLNFSNINQLVAFLGLDLRIKDSGTSIRGRRRLSKRGNPFLRHVLFQTAWGLKQYNDKYKQYYHKKISEGHHYYSALLAVSRKFLREFFYMAKQNAFFS

SEQ ID NO: 297563 - protein, 343 aa, unidentified
MDDYIGLDVSMKETAISIRRAGERVWRGKCSSDPSRIAQIVRKHAPNVVRVVFETGPLSVWFYHALKEEGLPAICIDARHAKAALDMAANKTDANDADGLAQLAEVGFYREVRVKGFDSMLARSLVAARTKLVRITVELSNQLRGLMKTFGLIVPSGKGRNFEANVRRLLIDQIELSNILLPMLDAWHDIRMRAADLTKLLLAAARKSHACQLLMTIPGVGAITATSFTTAIEDPSNFKNSRAVGAWLGLTSRRYQSGEVDYSGRISRRGDRYLRGLLYEVALVILTRSSAESDLRIWGLKLRERLGFKRAAVAVARKLAVTMHAMLKTGTAFNQAIDAKITQ

SEQ ID NO: 297564 - protein, 343 aa, unidentified
MTIVESTRPITGGVDTHLDVHVAAALDRNGGLLGVESFPTTPAGYRELRDWLAGFGDLERIGVEGTGAYGAGLARFLQRAGVEVIEVDRPNRQERRRHGKSDELDAVEAARAALGGRCRAVAKTGDGAMEAMRALLVAKRSGRQARVRSLNQIRHLSFTAPDDLRARLQPVPTGQLAATTARLRPSGDVVASATKLALRTLGRRVLDLDAELAIIDDALGELIADTAPELLALHGVGVDTAAILLVAAGDNPERIRSEAAWAHLCGVAPIPASSGKVIRHRLNPGGNRQANHALWRIVMTRMSSEPRTRAYVERRVEEGLTKREIIRVLKRYVARETWRHLPT

SEQ ID NO: 297565 - protein, 408 aa, unidentified
MLEVKVERCAGIDVHKKFLAVCVLKGLAHQRPASEVRRFGTSVPELERLKAWLLEEGCTEVVMESTGSYWKPVFNILEGCVGVILANAEQVKALRGKKTDPKDCRWLAGLLRHGLVQPSFIPPRDIRELRDLTRRRRTLMQQGASERNRVQKILEDANVKIGNVLTNVFGMSGQAMLEALLENKLTAEEMADLAQGRLRSKIPQIIEALEGHSMKDHHRLLLRQILKHMVFIEDMVQELDNEIWEKLKPYEKQIQLACSVPGIGRDAAASILAETGPDMSEDGPFGSCHQLASWAGICPGNNESGGKRKSGRTRKGNRWLRATLAQTAMAGARKKNSSFRDRYERLKPRRGPQRAATAVAHAQLIALHWVLRNGKPYQENVREFDNQRRDLMIRYHLKRLTALGYTPA

SEQ ID NO: 297566 - protein, 363 aa, unidentified
MFESTTVSVGLDVHARSVRVAALRGDELLEERTLPYDEEAVGRLLGRWPGATCCYEAGPTGFGLYRYLVERGIDCRVVAPGLVPRRPGDRVKTDSRDARKLARLLAGGLLEPIHVPSRELEAARDLVRAREDARLDRMRDRHRLSKFCLRHGRTLPTSSWTIVRRRWLGEQRFEFAAEQYTFDTYVHTVDLVDARIEQLERAIRETAEQGPWCQLVGRLRCLRGVDTLTALALAAEIGDFSRFKSAEEFMAFVGLVPTEHSSGEQRRQGSITKVGNSHVRRLLVEAAWHARRHPKVGYELSRRQRGHDPAVIERAWRCQQRLYQRWQRMAGRGKPQQKIVVACARELAGFVWAIATEQPLRTI

SEQ ID NO: 297567 - protein, 402 aa, unidentified
MNCVGIDVSKGKSTIAVMRPFGEVVVSPFEVCHTVNELSELARQLKSLDGETRVVMESTGNYHAPVAWLLHDAGLYVSVVNAMLVHDYGNNSLRRAKTDKKDAVKLANYGLDHWLTLPRYVPEEDTRLMLKTCYRQYQQYSKVQTMLKNNLISLLDTAFPDANRLFTSPPRADGSEKWVDFVATFWHCECVCGLSEKAFAAKYQKWCKKHGYNFSKDKALDIYASSCGHFGVMPKTDTAKLLVEQAISQLRATSAALAALKQEMQSLAASLPEYPMVMEMFGVGPTLGPQLMAEIGDVRRFHSKKALVAFAGIDAPPYQSGQIDVRSRSISKRGSASLRRTLFLVMSVILQCAPIDEPVYQFMDKKRSEGKPYRVYMMASANKFLRIYYASVKAYLDSLEHD

SEQ ID NO: 297568 - protein, 531 aa, unidentified
MVKIGKTRTKKSRSRSQKFKKAVLGRPQGAIQKRVQAVGPEKFGIVAVDCAKARSKWMLTDFYGNILAPPTNVEHDRSSFQLAVLTLKQAIEKHNIKDTIVAVEMTGTYHKTPMRAFRKAGYETRLVHPFASSYYRQPEHGDDKTDDNDLDAIFRAAVNGFGLIEKPVDAIHHQLQILARHRRDLVKKRSKLQCQIRHHLEQGLPGFSALFGSDDLWTQATPVPLLQAIAKHGGTVDVVKQAGQKGVTNWLDDAKIRFHKATIERVVVWAANAAEPDPMAIFHTRVWTSQLEDWTEKTRQIDAIERDLAGILAKTPYVLLLSHPGINVITAAELAGEMGPIENYASAKAVCGRAGLFPSRYQSDEVDRTGKLTRFRNAKLRAAWLMIADNMCKCNRYWMVKAEKWKSEGHKSQDIRCRIANRMTRIVFKMVSGRQLYKHPSRLDRGYVMDKLLVFLREHNTPPAIIVRDLKHAADQLPKSDLIDEGTKLQEAALKARRSRRKEPQELGTLLVAVLAGLGIAAKDDNAIEST

SEQ ID NO: 297569 - protein, 349 aa, unidentified
MRHFQPPANTRFYGGVDLHARSLFLAILDHDGQERFARNLPAAPEPFLRAVQPFREGLVVGCECMHCWYWLADTCREHAIAFVLGHAWAMKAVHGSKTKCDRHDAQAIARLLRGGNFPLAYAYPKERRGLRDLLRARLRLVRQRAELYGHVHTARRQANLPPVSSDVKYKSKRAGLTTDITDPFVRRRVETHLALLEPLDVTIRRLEAEIEDAAREIFPTELAVLQSTPGVGPVLSLTILLEIDTIDRFETRQQFCSYARLCGAVQESAGQRTGAGNRKAGNAWLKWAFSEAAVLSAQKDERIGRLLERLASKLGKAKALSALAHKLGRAFYHVLHTKEVFDVNRFVRH

SEQ ID NO: 297570 - protein, 414 aa, unidentified
MEVVYERCAGLDVHKKSVTACRITPAAGRGWQKESRRFGTMTDELLKLADWLRGGQVTAVAMESTGVYWKPVFNILESEFEVLLVNARHIKYVPGRKSDISDAQWIGELLQHGLLKASYIPEVAQRDLRDLIRYRTSLVQERTREINRVQKVLEDANVKLASVATNVMGVSGRQMLEAIIAGEQDPEALAELAKGRLRAKMPELERALSGRIRASHRLLLGLHLEHIDDLNSKIENLNVEIDRLMRPFDKDEQQERLDAIPGVGHDVAQVILAELGVDMSRFPSAAHAASWAGLAPGKNESAGKNRSGKITPGNRHLKTALVQAAHAASRTQDNYLAAQFRRLAARRGKKRAAIAVAHSILVIAYHMLRNGTEYRELGGDYFDRRNQAQLQRNLVKRLEGLGLQVTLEPVAVVA

SEQ ID NO: 297571 - protein, 413 aa, unidentified
MVKTARNEGLMDFYVGIDVSKFKHTIAIIDQNGEIRKKSFDISNSREGFNLFLNELCLLGEKEQIKIGMEATGHYMNCLVRCLISNGYQVQIYNPSLISMFRDSESVNLAKTDNLDAMLIAKYVATHPFTSSPQISYLIGEIRKISRAKYFLFGDKTACYNHLLRYLDEMFPEFVPFFKKNEDGTIRNKGRNLFESPTIRWLLSEYTSPQKMARMRVETGETLRKMSKGSISFNRFNQLRELAKNSIGYSTKVDEQIIRNLVAQVRTIDEEIEMLNELLEPLMEELNSPVLTIPGIGVNLAAMIIGEIGDVHRFSNPEKLIKFAGLDVKVYQSGTINHKGHIRKRGSPILRYALALSVQKLRIHSPVFSEYYYSKLKQGKATNVAIIATTRKLIRVIWKMMTTNQVFNNLKRD

SEQ ID NO: 297572 - protein, 298 aa, unidentified
MRRYRENPATAKPAVDGIDGLVRRLLEEQPTLVVLEASGGYERPAAAALAARGLAVAVVNPRQARDFAKATGRLAKTDALDADSLARFAEAVRPEPRVLPDEETLLLGEIIDRRRQLIGMLVAENNRLSATACEPVKRRIQMHVRWLEKEISHTDSELEEAIEQSPTWRENEALLRSVPGVGPVLARTLLAELPELGILSHKRLSALVGVAPLNFDSGTLRGRRMVWGGRARVRSTLYMASLSASRHNPTIRAFYERLVAAGKPKKVALIACARKLLTILNAVMRDHVRWRSIHPSAP

SEQ ID NO: 297573 - protein, 344 aa, unidentified
MEHYAGLDVSLEQTSVCVVDAQGQVLREVKVASEPEALIHFLECQDLEIARVGLEAGPLSQWLHAGLVTAGYEAVLLETRHVKAALSAMTVKTDRRDARGIAQLLRLGWYRPVHAKSASAQEVRSLLTARKLIQGKLLDIESGIRGVLRGFGLKVGAISRGRFEARIRDLVEGQAMLETVIGSMLAARATLQAEFARLHRTLLALVRNDSVCQQLMSVPGVGAVVAITFRSGVDDPARFRRSRDVGPHFGLTPRKYQSGEIDITGSISKVGDRMVRTALYEAASVMLTRTVRMSPLKSWAMAVAKRRGVKKARVALARKLAVVLHRMWVDGTSFRWTSETAAMA

SEQ ID NO: 297574 - protein, 332 aa, unidentified
MQLLAIDLGKQSFHIHGVSSEGDVISKKVTRSKLEAVVQELASAIVAMEACASAHHWGRQFEALGYSVRLIHPRFVMPFVKGSKNDAVDAEAIHEAALRPTMRFVPVKTTEQQDLQMLHRTRDRLITQRTGLINHIRGLLGEYGVVIPVGAFRFRKDIRTAISEASLSTLAKQNFNALIAEFEALDKRIAEIDRKLVTICRTDERCKRLVTLPGVGPVIATALVATVDDGKHFSSGRALAAWIGLGPRQYTTGGKPRLGGIGKRGNQYLRRQLIHGARSVLIRISARSDRRDKWAQELLVRAGHNKTLVAIANKTARMAWAVLRSGESYKAA

SEQ ID NO: 297575 - protein, 380 aa, unidentified
MEYCTTIGADVSDRTTKICVMTKADGGERRIVVETTCATTEAGFEEAFSKFDRSWPVVFETGTHCRWMDRLFRKMGFRTIVGNPGKIPSITKSNTKNDRNDARELARLALADPAMLHPVFLRGETFQQMLRFHHARNMLISQRTQTINQIRGFAKSMGHRIERTSTERFHELGKAEWPEELEECAWPLMGSLKTINLKIKAYDKLIARLAERPEFKAMVERVRAVYGVGIIGSTVFIAAIGGRPDRFGHARDVGAYLGMIPKQDKSGDDDKQLHITHAGADIVRTALVECAGVVMMSNAKDTDLKLKGLRIAMRGGKIARRKAKVAVARGLAVAMLALLKDPEREYVPLSEEGRRGFERYRAEMEYLAMGKAAKREKKVA

SEQ ID NO: 297576 - protein, 353 aa, unidentified
MGHKYVGLDVHQSSTVAAVHDEQGKGVMESILATGAEAIRDFLKGLRGTIHVTFEEGTQAAWLYEIVKPLVAEVMVCNPRRNKLLAVGNKADRVDANKLAELLRCGQLKPVYHGTPGVRLLKELVHSYDSLVSDTTRVMNRVKAIYRGRAIGCAGRDVYYQRNREQWLEKLTEPGVRQRAVFLYQQLDAVRGLRREAKKGMLKESGRHPAYRILKEIPVLGPIRIAQILAKVASPHRFRTKRQFWAYCGLAVVTRSSAEYQFRGGKAEKRKRAPMTRGLNPNFNHRLKYVFKSAAVDGIHQAPFEGYYARLLVRGMRPEMARLTLARKIAAVTLTLWKRGERFDELRVSEQAA

SEQ ID NO: 297577 - protein, 427 aa, unidentified
MSYRIAAVDVHKRMLAVVVADVEGEGEYEFERRKFGATPNELHELAQWLVQQEVEEVVMESTAQYWRPVWETLEQYWKPLRQQREGAGKRSGTLHLCQAKSNHGPRGRKNDFLDGERMIKRLVADELVLSFVPDPEQRLLRTVTRRKHQLTRAKVGFRNQLEGLLEQGHIKLSSLVSDLLGVSARRMLKALAEGETDPAVLAALADLRLRATPEQLRDALGACAQLSGAHRRLLKMALEELQLIDTHIEQLDREAMGLLKEHQEAVQRLAEVPGFGPDSAVQMIAEVGPKAATFRTAKKLSSWVGVCPGNEESAGESQSTRSPKGNRHMRRLLNQAAQAAVKVKGSIFELTFHRLLPRLGYQKAIWAIAHRLCQLLWLILHKGVRYEERGPAVSAKSKRRREARMIRELKKLGYRVEGGPLPAVARA

SEQ ID NO: 297578 - protein, 356 aa, unidentified
MHDIIPEAVLIGVDTHKDVHVVVAISGLGTRLATASFPATGQGYQQLAAWATGHGSVHAFGIEGTGSYGAGLSRALTAQGLCVVEVGRVNRQLRRRHGKTDTVDAESAARSVLAGDAEGQPKSGDGAVEMIRHLKIARDTGVKARTQAMVTLKTLLVNAPQPLRERFIGITGKMTLIRAIAALRPGPATSTTASAKMALRALANRWLMLDTEIKEHEAVLETLARAQAPALMDAPGVSTGTVVDMLVVLGDNPQRIRSEAAFAKLCGVCPVPASSGKTSRHRLNRGGNRRANAALYRVALVRMRHHPPTKEYIQRRTAEGKSPREIRRCLKRYIAREIYQHLCTGTPPVTAAAKGA

SEQ ID NO: 297579 - protein, 324 aa, unidentified
MKYSGIDLHSNNSVLVVSDEVDRVLVRRRVPNDTAAILALLAVHREELVGVVVESTYNWYWLVDALQAAGYRVHLANTAAIKRYEGLKHSDDEDDAAYLAHLLRLGILPSGYICPPAARAVRDLARKRMQLVRSRTAQVLSVENMLSRETGAGMRSRVVQRLTAQAVEGFGFDQDVQRAMCANVAVIKTLNREIDKLEQRLHQCVRLRPEFRLLTSVPGIGPTLATLIMLEVGTIERFAAVGNSNGKKKGQGNVKNGNAYLAWAFVEAANFAHRYCAEARRFYERKKARTNGVVATKALAHKLARACYHMLKEQKPFDVKRCFA

SEQ ID NO: 297580 - protein, 431 aa, unidentified
MLKINPLSTLYVGIDVSSKSNFVCALDFYKNKYINSSFANNQPGAEELAKKILECLKEHPDLNTIIAALESTSVYSIHIANFLSSCEELMHFKPYVFVLNPKCTANYKKSYIGLGKSDPIDAFVIADYARAGNIETEPWRGSQFLALKRLTRHRLHLVECMTREKTYLVSNLYLKFSELQMLEGDDRPFCDIYGATSSSVLTEYLSPEEIIDSSEEDLISFLAEKSRNRIKDISKTAELLRKAARDSYRLDKALYEPLNVSIASSFNCIETFKKEIKLIDTAIEREIKGLNPNAFIILQSIDGIGPVFAGGIVAEIGDISAFHSSDALAKYAGLTWKSNQSGDFDGEDTPMMKAGNRYLRYYLGEAANSMRKHNATYGAYYRKKYNEVPKHQHKRALALTSRKFVRLVYGLLARNQLYSGVSLDTSIKESN

SEQ ID NO: 297581 - protein, 344 aa, unidentified
MPIITVGIDLAKAVFAVHGVDEAGKATLVKPKVARDQLVPLIAQLPPCLIGMEACSGAHHWARVFAEHGHTVKLMAPKLVAPYRMSGKRGKNDAADAAAICEAVTRPSMRFVPVKDEHQQATLCLHRTRQGFIEERTSTYNRLRGLLSEFGVVLPQSPERLRKEIGLCLDTLPGWARRCMSELLEHTSHIEDRLVELDRAINQIAREDDRSRRLLQLRGVGSTTASALVASIGDGHDFRNGRQVAAWLGLTPSQYSSGGKQRLGSITKAGDAYLRSLLVLGARSVMANLGNKQDPLSRWIRNLMERRGYWRAAVAIAAKNARMAWAVLHYGDTFKPEQAEPTGA

SEQ ID NO: 297582 - protein, 387 aa, unidentified
MIYVGIDIAKLNHFASALSSDGEIMLQPFKFTNDYDGFHLLAQKLDSFDSDELIIGLESTAHYGNNLVEFLVNHHYKVCVINPIQTSTMRKNNIRKTKTDKVDTFIIAKTLMMNPHRLYSQYDISLMHLKELGRFRMKIIKKRTQAKIQLTSYVDQAFPELQYFFKSGIHQKSVYAVLKEAPTPDAVASMHMTHLSHLLETTSHGHFKKDSATELRILAQKSVGSNDSSISTQITQTIDLIELLDSQVKDVESQMELIVTSLDSVIMTIPGIGFINGGMILGEIGDITRFSNPSKVLAFSGLDPTVYQSGNFNASHTKMSKRGSRPLRFALVNAAHNVVRNNKTFKDYYDQKISEGKSHYNALGHCAGKLVRIIYKMLTDNVEFKLD

SEQ ID NO: 297583 - protein, 346 aa, unidentified
MSILRVYVGLDYHTDSIRVCILDQEGEPLVNRDVENDPGAVRDLVTQYGYPLGVALEACCGAADFAAELHRQTGWSVRLAHAGYVQRLKQGPDKSDHDDAWVLADLLRVKYLPEVWLADETTRQLRRLVRYRQGLVAERKNIKLRILGLLREERRVCPDGKRAWTESWFAWVKSIEVGSESRWVLDQELRRLERIETDIREAESRMEESTAADETTRRLKSLPGIGLVTAVTFRAEIGRFDRFRSGKQLAKYCGLTPCNASSGKRQGDAGLIRTGNKALRALIIQAAQRLPRHEEKWGKLKQRLVKTKPACVATAAVGNRWLRWLYHQMQPSGWRQSERDPVPMAT

SEQ ID NO: 297584 - protein, 343 aa, unidentified
MKVTTIGVDLAQSVFHVHGVDDRGYVVVRKQLRRDQVAVFFANLPACLVGMEACGSAHHWARKLQGFGHCVRLISPQFVKPYVKGNKNDAADAEAICEAVARPNMRFVPIKTVEQQAVLSVHRVRQGFVKARTAQANQIRGLLTEFGLVLPQGITNVLRRVPQLIDGAADLPASMRQLIERLLENMKVLDRQVKELEAQIKAWHQGSELSRKLEKIPGIGPLAASALVASIADARSFKNGRQVAAWLGLVPKQDSSGGKPKLLGMSKRGDTYLRTLLIHGARSAIVAAQRKDKPNVWLSGLLARRHPNIAAVALANKNARTIWALLAHEREFRPDYVPRPVIA

SEQ ID NO: 297585 - protein, 400 aa, unidentified
MLSIGIDVSKGKSTVCGMKPGGEIVYAPFEVQHTREGMLELVSLLRSSGEEVRAVLESTGSYHCPVVTALLENGIFVSVVNSLRMKRFCSQSIRKVKTDRIDAMQIALYGLAYWQELQPARLPEDTYRELQLLARQYYQMTSLLIKAKVDFNAICDQVLPGMQELMSDHAGRHKLSDFVLRYCHTTHILEMGETRFRKDYCKWAEKKGYRNCERMAALIFATAQNGIPVLPNAPSTQIVITEAIRVLHTVEASRDAILTQMQALAKTLPEYSLVREMPCIGDTLAPRLIAEIGDVRRFHSKRALIAYAGIDAPPYQSGKFCANNRHISKRGNRYLRKTGYEVMQSYVMHKPANDPIFTFIEKKRGEGKSGKLAMVAGLNKFIRVYYGKVTELYRSLPAIE

SEQ ID NO: 297586 - protein, 351 aa, unidentified
MSKRTNAIAVSTIGIDTGKNTLHMIGLDEKGVIVLREKVFRSRIAARLVNVRPCLVGIEAGMATHYMARELVALGHVVKQVPPAFAKPFRQGHKNDFRDAYAIAEAVQRPSTRCVPIKTDDQLDLQALHRVRSRLVGDRTAVINQLRGFLLEHGITVRQGHRFLRQQLPQIMATRTDVLSPRMIRIIEDLIEDWAHLDERVERVTDEIEGLARTDVSCGRLMTVPGIGPIIASAMVAAIGDGGAFAKGRDFAAWLGLVPRQMSTGDRTILGRITKRGNRYLRMLFIQGARAIQLHPASWAKHSFGPWLSAAARRLHCNVLTVALANKLARIALTVLLQGRNYETRIKPVAA

SEQ ID NO: 297587 - protein, 402 aa, unidentified
MRRCIGLDVHREFAQVAIWEDGVVWQAGRIQTTPEALRLFADSLCVSDEVALEATGNTYAIARLLERQVGRVVVSNPQKTRAIAEAKVKTDKVDAAVLAGLLAANYLPSVWLPDDQTHALRRQVTRRAHIVRQRTRLKNQVQSILHRNLIGRCPAADLFGTKGRAWLATQDLPADEHQAVGALLRQLDFHGQELRIVDAELGRVGLERAEVRRLMTIPGVDATVALAIVAAVGDFQRFSSPQRLVSYLGLNPRVRQSGGQPAQHGRITKQGRAHARGMLVEAAWAAAKTPGPLRAFYERVRARRGMQVAVVATARKLATLCWHLVVGEQDYAFQRPSLTDKKLRALQLRAGMPPRRGRKGTAAAYSLKEVRRRERALTEQAEVAYRQLVAGWQPKRPATKPR

SEQ ID NO: 297588 - protein, 348 aa, unidentified
MNYCGIDLAGVSSYAYVTDEKGRKLWAGPVETERAAFGRLVKKFRHGALSIAIEAGNQTAWVYEELVKLGATVTVVNPTKVKLIAESRRKTDKIDAKILCELLRLDGLPCPVHMPGPEARELRGLLVARRQLVSARTKLCNVVRGMLRQTGVRLPPRELSTPSGWKRLLATGFEHDHILHIVAAYHDSFLALTKSIRELDEQLAKHEKNEPRAARLKTMPKVGRIASLTFLAAVDDVRRFPTSRKLVGYSGLAPTVRQSGERTEYGAISRQGRSELRAVWVQIAHMIATDKKKATQPLRTWFNRVAKKRGKKTALVALARRLLVIAYQLLKSERDYDVGRLKKKRRAA

SEQ ID NO: 297589 - protein, 324 aa, unidentified
MISIGIDVSKATIDCVFISNDKKYHRKISNDVKGFGVLIKWIKPYCTLDKTLFCMEATGVYHLALAKFLFNLETHIIVANPIKTHHFAKLNMSRNKTDKSDALLIAMYSDYLLHNDTWQQSLWQPKAPEFEDLQFLVTRLDQLNGQRFSEKNRLDIATNKMIIKSIKQVIKYLDKQIDALTKNIDDLVKSNETLNKNVELLKTINGIGAKTAWSILAYTGDMSNFNNANQITSFAGLNPQQKQSGTSVNSTSLSKMGHRKLRKTLFMPALVAIRFNPVLKAFYEQLLARGKAKMVAVVAVMRKLLVLCFGVLKSGLAFDVNYRK

SEQ ID NO: 297590 - protein, 352 aa, unidentified
MSIIAFDSHKYYTFARVEDENGQNVQECRIEHQRGNIVAFLRRQQPGSAVAVETIGNWYWIVDEIEKAGMRPVLVHAGKAKLMMGCINKTDKLDAKGLNMLQRVGRLPTVWIPPADIRDKRELPRVRMVFGVARTKLKNRIHSVLDKYGLQDEFEDISDIFGVKGMQRLNGVIEQLPEQTYCTTVLLLEHLEQTQQKIDCIEGRMKELFEETPQSILVETLPGVGFILAVVIIQEVGDIGRFSGAGCFASYCGATPRVHASGGKVRYGRLRPDTNHYLKWAFSEAGNSVALNSKRLPDRHVSQLYNRIRHRRNHGKAIGTVARHLAEATYWMLTKGEAYRERGLLEVSSTGA

SEQ ID NO: 297591 - protein, 341 aa, unidentified
MDHYAGIDVSMEQASVCVVDAGGKIVREAKVASEPEALIAWFGALGLKLTRIGLEAGPLSQWLYASMREVGLAVELLETRHAHAAFQVMPVKTDRKDARGIAQLMRLGWFRPVHCKSMSAQETRAILSTRRLLGAKLHDVEMSLRGILRGFGLKVGKTTSSGFAGRIRELVAGHPTLEVVADAMLAARATLLREFNGFEKRVRTMARSDARVRLLMSAPGVGPIVALTYVSAVDDPARFKSSKDVGAHFGLTPRKYQSGEIDVTGPISKIGDAGVRAVLYEAAHVILTRPIRGGALKSWAARIAKRAGMKTAKVALARKLAVILHRMWVDGTTFNFAAAAA

SEQ ID NO: 297592 - protein, 415 aa, unidentified
MALKIVYKICCGIDIHKNFVVACIAKTDMQGVTTYERHHFSTYTKGLKQLLKWLLDRNCKDVCMESTGKYWIPVYNVLEHDCSIVLAHPKYVKAIRGKKTDKKDAKWIADLFKHDLVAGSFMPPADIRQLRDLMRYRFKLPCFKSSEKNRYQNCLTVSNIQLASVVSDTFGKSSQKIIAKILENPDDTSFDIGSLIHGSMKDKLPELELAIDGYITPEQAAKLKIIKEHFDNLEARKAELEELILALANPYQQEISIILTAPGFKNTFTAIGIISEIGTNMEAFPSAKHLCSWAGLTPTNNESAGKKKSVRVSKAGCYIKPLLVQCANAVVKSSKHPEIRNRYLRLKKRRGHKKAIIAIARMLLTALYHMLKNGENYNAELYRKSDLPPVDREITVEQAILIARNQGYKIKSATT

SEQ ID NO: 297593 - protein, 316 aa, unidentified
MPLPCWIGLDIAKDTVVLAVAGEAHTATFPTSPEGLLALVTALRARHPTRIVLEATGGYERPCVAACVVAGLPVVVVNPRHVRAFAQALGRSAKTDAIDARVLCAFARAIRPAARPPKDADTRELADILARRRQLVDMRVQELQRQHTATSRAMRKSLAEHVAWLDKRIERLDEDMGQRLRESDVWRAKDDLMQSIPGVGPVLSRTMLGLCPELGELNRREIAKLIGVAPLANDSGKHRGRRRIWGGRADVRRVLYMATQAAIRHNPDITAFAQRLKAAGKLPKVVIAACMRKLLIIMNTILKTRQAWHALPPAQA

SEQ ID NO: 297594 - protein, 457 aa, unidentified
MNANNARLQSAAKIGISPLIIVQPYLLMKGGDLVKNFMSTLFVGIDVSSKTNVLCALDFQGNKLLNLRALNNQPGAEAILDSIIDCLNSNSLKYVVIALESTSFYSTHIANFLSSNEELLFFKPLVYCLNPKSVANYRKSFVDMDKTDPLDAFVIADFARCGRITSEPWRGAQFLALQRLSRHRLHLVECITREKAYMVSNIYLKFSELAVLDNNNQPFSNTYGATSAAVLTEFLSLDDITYSSIEDLVDFVSTKGKNRFSDPYETAKLLQKAARDSYRLDKVLYEPLNTSIASSFNVIKAFEDEIKTIDKAITKAIKGINNTEYQSLISIPGIGPVLASGILAEIGTITSFDSHDALAKYAGLTWRVNQSGNYSADDTRMTKTGNKYLRYYLIEAANSVKNNIPEYKEFYNKKYGEVTTHCHKRALALTSRKLVRLIFGLLTKNQIYSSDKVGEIQ

SEQ ID NO: 297595 - protein, 309 aa, unidentified
MEVKFYGVDVSKERLDVACDGRVVQIENEKKALRSFVKGMPAGSYVVMEATNSYHLEMADICHARGMRAFVVNPRITNYYRKANALRGKNDRMDALALSRYIEREHDGLREYLPKSADQRRLKTLLRRRWKLVGIRTQVRESLGSMKDLSREVAALIARIDALIAKLELLIDKQLEGNADRARIETIKGVGPVVSSILISDLACYEFARADAFVAFYGLDPMPDDSGKRKGRRKLSKQGDRLGRAMLYNAAMSAVTSKVWKPTYDGYLARGLTKVQALVVVARKIARTAWSIYTHQTVFDPARLFQVLT

SEQ ID NO: 297596 - protein, 374 aa, unidentified
MLKTTFIGLDVHAKTVTAAALNADTGEIDQATMPADNPTVISWIKAHGDDTAVTYEAGPTGYGLARDLTDQGITCTVAAPSKLLRAPGERVKTDQRDALGLARMLSLGEITEVRIPPISQEGLRDVSRARQRAVGDLTHARQRINAIILRHGLRYPKETRWTQAHHDWLARQRLEPAASQQALVAELETETLLMAHVKRLDATIADLVAEAEEAPIIDALMCFRGISITTGFGLAVEIGDWTRFTGATIGSYLGLTPSEHSSGQTRSQGSITKAGNTYARKLLIEAAWTHARPYSRPGARLLRQFDKVDTTTRARAIEGNQRLHRVWTNFDARKKRRVKANTAVARELAGWCWSVAAPLQLEMADPKGREARMG

SEQ ID NO: 297597 - protein, 359 aa, unidentified
MAQHEVEVTGGVDTHKDTHTAAAIDSAGRVLGSAQFPASALGYRKLLSWLRSFGILLMVGVERTGAYGAGLARYLREHDVRVVEIDRPDRKTRRWQGKSDPVDAEAAARAALAERRTGVPKSRDGRVEALRALRVARRSAVQQRADVTRQIKNLIVTAPEGVRTMLRHLKDKDLLAICAGFRPHPDQAGDPVTATKTALRSLARRHRDLGREIDELDELIAPLTQEINPALTELKGVGPEVAGQPLVTAGDNPDRLRSEAAFATLCGAAPLPASSGRTHRHRLNRGGDRAANAALYRIVLCRLRWDPRTRTYMERRTKEGLSKKEIIRCLKRFVAREIYHILTTTNASAAAPSHLTTAA

SEQ ID NO: 297598 - protein, 351 aa, unidentified
MPRKTDVAVVHTIGIDTGKNTLHMVGLDERGAIILREKVSRHRIAARLVNVQPCLVGIEAGMATHYLARELVALGHQVKQVPPAYAKPFRQGHKNDFRDAHAVAEAVQRPSTRCVPIKTEDQLDLQALHRVRSRLIGDRTAVINQLRGLLLEHGIAVRQGHRFLRQQLPQILATRADVLSPRMVRIAGDLVDDWGYLDKRIERVTDEIEGLAQTDVSCGQLMTVPGIGPIIASATVAAIGNGAAFAKGRDFAAWLGLVPKQMSTGDRTILGRITKRGNRYLRMLFIQGARAIQLRPASWAKHSFGPWLTAAVKRLHHNVLTVALANKLARIALTVLVEGRNYETRIAPAVA

SEQ ID NO: 297599 - protein, 427 aa, unidentified
MQEHPKQSVPSEPVFAALIGIDWADAEHHVVVFATDSAQTEHAVIKNTPETLEEWIKNLRVRFRNRPVAICMEHARGALLHMLMAHDFIVLYPINPAMAAAYRKTFTPSQAKDDPTDAHLLMDMLRCHRDRLTPWKPDDELTRKIARLCEERRHAVDLRTKLVQQLTAKLKSYYPQALDIVGDDLASVMACDFLLAWPSCQMLRRTKPHTLRAFFYRHNCRREDTINQRLQIVAAAVPVTDDQALLEPLIATIKMLATLIRDLTAAVERFNTMIKDAFNKHPDAYIFQSFPGAGDAIAPRLLSAFGSDRSRYQQVAQIQQYSGVAPITERSGKSLWIHRRWQCPKFLLQTFHEFAGHSITWSKWAKAYYNLYKGKGKTHHVIVRALAFKWLRIIFACWQNRTPYNEDLYIDSLKRSHSPLYQLITAS

SEQ ID NO: 297600 - protein, 323 aa, unidentified
MMAEPAEIQSVLGLDVSRNTVTLCDGRTRHTVTIANDADALRAALQPYQGTTTLAVCEATGGHEDTLLGVLLELAIPAHRADPAKVKAYIKSFGKRAKNDPIDARWLSRYGRDRAATLPRWQSADPTQQKLELLVARRLDLVAMRVQEQNRLKAPRSRLIADNIRDHLAELERHIEALNAEIGALIGESRDLALRAEQLRSVPGVGPVLAPLLLAVIPELGTLNRRQVASLAGVAPHPKDSGKASWHRSTTGGRRQIRPALFIAALAACRGDNPLATAYKALLKAAKPKRVALTAIMRKIITIANARVRDAVRHQNEIGQINA

SEQ ID NO: 297601 - protein, 365 aa, unidentified
MSEIITYVGIDAHKRDLHVAMLVEAARTPVTWVVENEPKAVERLHRKLEREAPGRVQVCYEAGPCGYALQRQLTKGPVTCVVIAPALMPRKPGDRVKTDRRDARRLAELLRAGLLTEVRPPTPAEEAVRDLCRARDDARDDVQRARHRLGKLLLRRGLHWAGKNWTKAHRQWITTIQWEHAAERAVVDDYLLAIAQVERRLEDLDAQLAATAQTEPYREPVAWLRCFRGIDTLTAMLILAELHDFRRFPSPRALMAYLGLVPSEDSSGDRHRRGRITKTGNTLVRRVLIEASWHYQHRPGVGVGLAARRKGQPAGVIAIADKAQHRLCRRFRRLAAKDKPAGKVVVAVARELTGFIWAALQPVAA

SEQ ID NO: 297602 - protein, 350 aa, unidentified
MDATTIGIDLAKDVFEVAMANDRWRVIKRERLTRPRFERLLKEHPAAHLIMEACGSAHYWARTAQQLGHQVTLLPSQYVRPYVRRQKTDRTDAEAMLEAVRSGGIPPVAVKTVTQQAVLELHRMRAQWMTTRTARLNAMRGLLLEHGIAIARGAHTLLRQVAARLANEDDPLPPRLRMVLRLTVDEVRDLEDRIDAIDQELATVAADDLVVQRLMRIPGIGLLTATAMVATVGHIHAFPRARRFASWLGLTPREHSSGGRRHLGAITKRGDVYLRCLLTHGARAVLRMAHRGARAPSPLPRLHEWVLAVERRCGHNKATIALANKLARISWVVWTREVEFTMAPPVVCAA

SEQ ID NO: 297603 - protein, 446 aa, unidentified
MLPYIRVTKQAESVMGIRRNRHKKEAGKMKSMEITAVGIDVSKRKSTVAIRRPGGVIVACPFDISHSSHDLEKLVSILKTTGGDIRVVMEHTSNYWKPIALTLKNAGFYVSVVNAMLIHDFSDNSIRKLKTDRADSLKIANYALTFWNQLPPFNDEDETRLVLKEQSRMYERLASTATSLRNGLIALADQTFPSIDQAFGHAIKNADGHEKWVDFFSIYWHRDCVLRLSIEKFTESYRKWCLRRNYKFRTNTAHKLYALAQDAVPTLPKNNGTKALVLQACKSLNAVCEAKQSTQEEMNRLASLLPEYEVVMQMEGTGPITGPALMAEIGDVRRFKNKKALVAFAGIDAPPFQSGNFESKSRHVSKRGSPHLRRTVFLVANIILTLSHKDNSVFCFMDKKRAEGKHYYVYTIAGSAKFLRIYYARVSEYLRTQEPPAAAICLDCKD

SEQ ID NO: 297604 - protein, 399 aa, unidentified
MTVVGIDVSKGKSMVAAMKPGGELVAAPYEVRHSDIELSRLALDVLCMEPDTRVVMEATGRYHEPVAALLHSEGIFVSILNPLLIKQSGAGSLRKVKSDPKDALKIAKYGLDNWSTLREYTPTEAIRQQLKLCERQCDLYSKNIVMLTNNLISLSDKTFPGVNELFSSPEKADGHLKWVDFYRTFWHCDCINRMSPDAFGERYKKWCKKKGYHFSADATDALYAASCGLYTTLPRDNNAKLLVTVAADQLIALRENQSKLEAEMLNLCKQLPEYETVMAMYGVGKSTGPHLMAELGDIRRFPHRSSIVAFAGVDPGVVGSGKMQLSSVATSKRGSPQLRKALFQVVSTYVKRKPENEAVYQFYAKKRDEGKAFLRLHYRCCEQVPAYLLCPCQGVSERC

SEQ ID NO: 297605 - protein, 343 aa, unidentified
MQTVTTIGFDIAKSVFQVHGVDAAGQVVIRRQLKRRYVVAFFQKLPPCLVGIEACASSHYWSRELQALGHSVRLMPPAYVKPYVKRQKNDMADAEAICEAVTRANMRFVPTKTPEQQSGLMLHRTRHLFIRQQTSVINAIRAHLAEFGVIAPIGRKGVEELLRVVADPNDKRVPEVVRACLAALGSQLLSLKKQILEFDRMILAWHRSNQTSKRLNCIPGVGPLLATALVASVGDPKSFRSGRNFSAWIGLVPKQHSSGGRERLGSISKQGDRYLRNLFVAGALAVIRYAKLHGTNHRPWLTTLLARRPTKVAAIALANKLARMAWALMARGERYNYPVALRP

SEQ ID NO: 297606 - protein, 264 aa, unidentified
MEFTYFIGTDVSKQKLDFAVMQDKNLLFHAEIENSPKHIAAFIREQIKLPNFDLNRAVFCMEHTGIYSNHLLLCLHKMGAKVCLEAATHIKNSLGNLSGKNDKIYAVRIADYAYRNSERLRLWTPKRDVVVKLAQLSATRSRLITVKKMLTVPIREVSSFLDKKNASANAKLCKISIGAIEKDLIRIEKAIDELIDVDAELKRLYRLVTSVVGIGKVTATEVLITTNEFRDIKEAKKFACYCGVAPFTKESGMFKGRARVSHTG

SEQ ID NO: 297607 - protein, 355 aa, unidentified
MTQHSYRLKDYETFIGLDVDKNSFAYTVGNKFQLNNSKKMPSNPEHLYNYINNQFDSKKVVCAYEAGPTGFHLYDYLSRKDILCLITSPASVPTARNERVKNNRIDSVKITDYLMSGKLKPIRVPQGLYRELRDLVKIYENYARDRKVARQRIKALILYHNLHTALKDPDAGWSSNYIKDLKNIECSFAVRHRLDMLIEDLEYARKKLLSVHHTLKSFCRENDQINQYIQYLQSIPGIGFTIATMLLGKIGDPKYLQNPRELAAFIGLNPGEKSTGDSENRGSITHLGDKTLRFFLVQAAWVAIRKDTQLDQFFCRIKNKNNPRIGSKIAITAVARKLTQIIYRVLKDERHYIQH

SEQ ID NO: 297608 - protein, 473 aa, unidentified
MECITFGLDVSKGRADIEIINQSGTRLAGSCGYDDTRTGHDRLSEVLRDLRQRYPAAKVIAGVEATGGYERNWVAFFRREQAQGRSVAIHRLNPLGLKRFLDADLHRKVDDQRAALGIARYLLERKRQAEPNAIPLDGRVVFYRNIRGLIHGRTALVQRYKTLLSSTNPELVQFSHDEVPRWLLLVSVRYPTAAHLARSHGQALADLPHVGSVRAEQLRAAAKTSVAALTDEGSAAAIRLLAEEIIHANERIDALKKQLIAMTEDDPRVKLLDSIPGVAPWTATALALEIGDITRFADVRQLVAWSGLDPREDTSGDGIIKRGISHRGNAHLRTLLVQMARSGKLHNPVITRFIGRKIAEGKKPLVAIVAGAAKVLRIAFAILVSGKPFDPDHETKRAKPAAEAQQKRRIATRAKVTETPEPDLTAPVSAVEARKRRRATTNNATASKRPKCEVKPQEGAPATVATAVLPTAP

SEQ ID NO: 297609 - protein, 342 aa, unidentified
MNDVAIIGIDLAKRVFHAHGARIDGAVVFRKKLSRSQVIPFLEKQPRCVVAMEACGGSHQWGRAILKLGHEVRLIPPIYVKPFVKRQKNDTADAEAIAEACSRPTMRYVEVKTEEQQARAMIFRTRDLLVRQRTQLINALRGHLAEHGLVAPQGPANVKVLASALEGSDCNLPAIVRELGTLFVTQIVQLDGKINEVEKALRREAQCGSETRRLQSMPGIGPITAMAVEAFAPPMTTFKRGRDFAAWLGLVPVQHSTGGKQRLGRTSKMGQRDIRRLLIIGAMSVVQWASRRGARDGSWLQRMMDRKPRMLVAMALANKMARSIWAMLTKQENYKDPVVAAA

SEQ ID NO: 297610 - protein, 407 aa, unidentified
MGIDIAKRTHYACIVDDRGRVLQKSFSVPQAGNGFELFYQRVLAAMKEHEKSEVIVGIEPTGHYWLNLAYFLEERGIPLVMVNPMHVKRSKELDDNLPTKHDRKDALVIARLVKDGRFSYPRILKGMEAELRVGSTFRSKLTEELGAVKNMIIRWLDRYFPEFVQVFPSFGKMALAALECTPFPSDLYQKQPDEVLSLFRKVEGLKSPQRPKAVRLIEVAAGSIGVTEGLEMARIEIATLVRRYHQLEQDIESITGQLIELVKTSVEYEWLSTVPGLGDTTIVDLLAEIGSFSHYQDPRQLIKLAGLTLRENSSGLHKGQKRISKRGRRKLRALLFRVMMPMIRHNEAFRKLHEYYTNRQVNPLRKKQSIVVLCGKLLKVLHGISTKHKPFDAQRMMRDIPGLAEAE

SEQ ID NO: 297611 - protein, 426 aa, unidentified
MQYALPLVLPDVPAGGVCAGIDWATADHVACVVDLAGRVTDRFSAAHDKAGIAAMIARLRRNKVTEVAIERGDGPLVDGLLTAGLTVVVITSRQVKNLRSRFGAAGAKDDRFDAFVLADTLRTDRARLRPLVPDTPATISLRMAVRARRDLVRHRVAVCNQLRAHLAVAFPAGITLFHDLDSPISLAFLARFGSQDAAAELDEQAIGAWLATIAVRGRPAPASVLHARLQAAPPGATGADGAAQAGVTAALTATLTALSVQIKALETQIAGQLAAHPDRHIFTSLPRPGTVRAARLLAEIGDCRSRFPDAESLAGLAGVAPVTRRSGTRIAHGFRWSVNRQLRDALCDFAADSRHASPWAAAIYDDARARGKDHPLAVRITARAWTYVIWRCWHDGTAYDPAKHNALQAVLARQAAQTAGARQQDQ

SEQ ID NO: 297612 - protein, 343 aa, unidentified
MQSITTIGLDIAKSVFQVHGIDAAGRVVMRRQLKRRYVLAFFQKLPPCLVGIEACASSHHWSRELQAFGHTVRLMPPAYVKPYVKRHKNDVTDAEAICEAVTRPNMRFVATKTPEQQSCLTLHRTRHLFIRQQTSVINVIRAHLAEFGIVAPAGRHGVEQLLSVAADSNDKRLPELARACVAALGAQLQALKAQILEFDRRIRAWHQSSEASRRLDDIPGVGPALATALVASIADAKAFRSGRNFSAWIGLVPKQNSSGGKDKFGNISKRGDRYLRSLFTTGALAIIRYAKIHGTMHRPWLTALLARRPTKVAAIALANKIARMAWAIMAKGERYKEPAALAA

SEQ ID NO: 297613 - protein, 356 aa, unidentified
MQKYKTSFKGQNIYVGIDVHLKTWHVTTLTESGYKYSFAQHADAKELFDRLNKKFPEACFKSAYEAGFCGFSAHYALSEQGFENIVVNAGDIPTTGKEKIMKTDAVDSEKIARALKRGQLTGIYIKDKSFMDDTNLVRLRQRFIKDLSRQKNRLKHLLYTQGVVYPKRFTKSGTHWSCSFMKWLREEVVLLSEEKRTLTLLCDHVDNTRKAILEVTREIRRLSKDDKYKVNFGLLTSVPGFGLITSMSLLTELDNNPTRFPSERKFVAILGLIPTCHDSGEKKVGGEKTFRGNKYLGPLIVEASWIAIQKDYQLGAYYTNCCQSMKPQMAIIKVARRLACRAYAVMKTKKFYVLQQ

SEQ ID NO: 297614 - protein, 350 aa, unidentified
MQNFIVKGKQIFIGLEDSKRTWKLCVRCEGMIIHETSMPAEYDNLQSYLKNRYPGCRIEVMYEAGFGGFWLHDRLESDGIACVVTPAHKVTREKVSSVKTDKIDVRRLARNLEYGDYTRCHVPDRERREDRQISRTLDQIQKDIVVTKNRIRRFLYFHGLNEGFPAGAWTEVAYELLKALQLPVSLQLSLDAYLQLLTELKRIRAALKAQLKALCRKDRYRALVASKAGCVGIGWLSAIRFTLEWGELSRFGSGKQFASFTGLTSREYLTGETIHRGHITGHGNGQVRGWLIQCAWRALSRDPVLLEKFNAVRNNSGSKKKAIVSVARKLAVSMRALELAEQPYCVGVIE

SEQ ID NO: 297615 - protein, 347 aa, unidentified
MEVTTVGIDLAKNVFRLHGCDARGRAVLRKQLGRRQLLAFVARLPRCVVAMEACASAHYWAREIDKLGHRVRLINPRFVRPYVKANKNDASDAEAICEAAGRPAMRFVAVKTAAQQDVQAVHRVRQQLVKNHTALMNQVRALLAEQGIVIAQGSAQVHRSLPRILADDDNRLSGMMRELLNEIGERLRYIEERLRQYELRIRRLFREDERCRRLAEVEGVGPVTATALVAAVGNAAEFKSGRELAAYLGLVPRHRASGGRTTMLGISKRGDRYLRMLLVHGARAALRVNQHQHTTRSAWIERLKSRRGSNIAAVALAHKNARVLWALLRTGECYRPTPFPARVPHVG

SEQ ID NO: 297616 - protein, 406 aa, unidentified
MSEQSFKWFAAVDWGSENHQVCVLDAQGGVAGEREFRHSGAGLTQLADWIQSMTGPPNTVAVTIEVPHGPVVDVLLDRGFGVHAINPKQLGRLRDRFSLAGAKDDRRDARAAADGLRTDRHLFRCLQIAGRHIIELREWSRLAEELQQERVRLGNRLHHQLWQYYPQMLELTDDVAAEWLLELWSKAPTPEQAKYLRPTTIERLLKQHRIRRINAETVLRTLRQPAIKVADGVAEAACAHIRSLIVRLRPVNDELRAAERQLDALCAALEGSAQNDVAILRSLPGIGRINLATLMAEASGPLSRRDYPALRTLTGVAPVTKRSGKSCIVIMRYGAHARLRNTVYHWARVAVQHDPKCRSRYAALRQRGCSHGRAIRGVADRLLNVTCVLLERQTPFDPAYGESIAA

SEQ ID NO: 297617 - protein, 350 aa, unidentified
MSRRNQPRDAAVFGIDIVKTVFHVVGLDAGHAPIQKATFRRETLLQFFERASPVLVGMEACPGSQWLARKLQAMGHTVRIVPAQFVKPFVKSNKNDIIDAEAIAEAVTRPTMRFVEIRTPEQIDLQALHRVRDRMIAHRTRLISQMRAFCLEYGIAIHQGAGKFKVELPRLLADESNELTPAMRRILTEIHGEMMELEQRIAAMNDEIEAIAARSDTARRLMTVPGIGPLASTALLAAAGSGRQFRTARDLAAWLGLVPREHSTGGKTKLLGISKRGNKYLRRMIVHGARSCVTHLDRSRDRLGPWLDGLERRMHKNKVTVALAAKIARIVWVILTKQGATYERRVPALG

SEQ ID NO: 297618 - protein, 408 aa, unidentified
MGDDWAEDHHDVEVMDAGGRRLAKARLPEGVAGIARLHAMVGGQLGEDAEEDGGQVAVGIETDRGPWVAALIAAGYTVYAINPLQASRYRERHGVSGAKSDAGDAHVLADMVRTDSHQLRTVAGDSAQAAAVKVVTRTHKTLIWERTRHTQRLRHALRDYFPAALEAFEDLDAPDTLELLARAPDPASAARLTTAQISAALKRARRRGIAAKAGQIQAVLRAAHLGQPEVVTAAYAASVRALIAVLGTLNEQVTSLQGQVEAYFGQHPDAEIITSQPGLGPVLGARVLAETGDDPARYASAKARKNYAATSPITRASGKKKAVLARHVHNDRLIDALMSQAFSALQTSPGARAYYDRQRTRGSGHNPALRQLANRLTGILHGCLKTRTLYNETTAWPQYAAKTEKTAA

SEQ ID NO: 297619 - protein, 408 aa, unidentified
MNENTTNEPAALVAIDWSDQKHDIALLSAGEERAEFLQVLHRPQDLAEWVRALRQRFGGKKVAVAIEQKRGALIHALMGYEFLQLYLVNPATLASLRKAFKQSGAKSDLLDRDLLLELLQKHRDRLTHWKPDDVQTRHLALLVQDRREAVNECTRLGEQLLDTLKNYFPAMIDLAGPNLTTELACQLILRWPDLAALQRAKVQTLRRFFYARNFRRPKILEKRLEALQAALPLCEDVAIIGAGRLKAIRLARAILALLPAIKQYDQQIAELFKAHRDAAIFASLPGAGPALAPRLLVAFGSRRDRWRHSLDVATYSGIAPVIEQSGKRSIVHWRWACPKFIRQSLHEFARCSLRSCPWAKGFYQTQRARGKNHHGALRALAFKWIRILFRCWQNRCPYDPAKYAPANL

SEQ ID NO: 297620 - protein, 309 aa, unidentified
MNTCVGVDVSKDELVVHVLPTEAARMFPNHAQGRADLLGWLLPQPQVRVVFEASGGYECDLLDTLHRAGLNAVRLPPRRPRELAKALGLKAKTDAIDARVLAVAAQLLPAAPTVPLTAATQTLREWLHVRTALVNERDSLRRRRIHLRQASVRAWVDAHIADLQGRIAEVNTQLEQALAACDLSLPAAPGLGPILRATLAARLPELGTLDRRRIAALVGLAPYNRDSGPWKGQRRISGGRPDVRTGAVHGHLGRHPGALTAGRNLPTAGGDWQTQKTRRHRLHAQVPDHAQRHAARQPALVPKRKLCMK

SEQ ID NO: 297621 - protein, 419 aa, unidentified
MMDIVHERAAGMDISKRDAKVCIRIPGARAGTSSRTVTTYGATTNEIVRLRRDLEAATVTVVVMEATGDYWKPFYFLLSESLNVQLVNAKAARNIPGRKSDVSDATWLAELAAHNLLRASFVPPEPIRQLRDLTRTRSNLTHERTREFSRLEKGLEDSNIKLSSVVSTLGTRSARSILDALISGERDPQTLASLAHVSMRRKSAALVEALTGRFTDHHGFMVQLHLDRIDQIEATLAALDARIDTVMGPFSLARELLMTVPGISKNVANVIIAEAGVDMNVFDTAGHLASWAGVCPGQNESAGRIKSTQTRPGDHYLKAALGIAALAVSRSKTTYLAVKYRRIQSHAGALRAVVALQHTLLVIVWNMLHDGVAYDELGVDHFDKTNPERARKRLQRRMVSLGFEPNLIPISAGGSPSFS

SEQ ID NO: 297622 - protein, 461 aa, unidentified
MLLDVNPVPPLAAPSPAGVPVRVQIGIDAAITANHHVAVRRVAADGTATTTRFMVAPTLAGLKTLSGRLADCPGALAVAEPTSMTWLPLALALSDAGGGLALLGSRHAARLRGAISGKNKSDVIDADVLARAGEVFELTRMRLPDPDQLALRRVVTRRGAAVIDANRYLRRLISLARWAFPDVWNAFGGSLSTAKAVLGRWPHLDALAAARRSSLTAVVAEHTRGVSDVPARVEAIRIAAGDWAAFWSGRLDLDALAFDVGEQLSDMAEAAARVERATAQATRYWERLYGDDELLASIPGMGPITAPTVRAFLGDGHAFPDAKAAASYVGITPSNWSSGTVHQPSRAISKEGPAVLRLAFYQAANAARRADPQLAAFYHRLMTGRGHCHTQATVAVARKLVERTWTVLDRGKAYQLRDPDGRPVTERAAKALIADRFTVGQDVRARARAHSAATHRAKLTR

SEQ ID NO: 297623 - protein, 365 aa, unidentified
MLSIGIDVSKGKSTVCGMKPGGEIVYTPFEVQHTREGMSELVSLLRGSGEEVRVVLESTGSYHCPVVAALLENGIFVSVVNSLRMKRFCSQSIRRVKTDQIDAMQIALYGLAYWQELQPTRLPENTYRELQLLARQYYQMTSLLIKAKVDFNALCDQVLPGMQELMNDHAGRHKLSDFVLRYRHTTHILEMGETRFRKDYCKWAEKKGYRNRERMAALIFATAQNGIPVLPNAPSTQIVITEAIRVLHTVEASRDAILTQMQALAKTLPEYSLVREMPCIGDTLAPRLIAEIGDVRRFHSKRALIAYAGIDAPPYQSGKFCANNRHISKRGNRYLRKTGYEVMQSYVMHKPANDPIFMFIEKKTR

SEQ ID NO: 297624 - protein, 383 aa, unidentified
MTEATVPSKTTVHCALELSKSSWLLAIQFPDRPQPSLYRIKGGDVEGLISQLLIARDRCAKSMGEVPSISLCYEIGYDAFWLARFLMARGVQCLVVDPASLKVDRRGRRAKTDRIDVGMLLRALIAWCRGEHHVWSLVRIPSVDEEDVRRSHRERGRLIHERTSHINRIKGLLFAQGIRDINIKAHYGKLKLEELVTGDGRPLPPRLRAEIAREIARLALVQEQIAAVNRERDESPTLCKAPEKKRILLTQLKGIGPAIAAVMSREVYYRQFNNRRQVASFLGLATSPYDSGDMERSQGISRTGRGQVRAIMIQAAWLWTRHQPKSTLTRWFLDRTIGQGGRVKRIMIVAVARKLAIALWRYVEHGLVPQGAILEVPTPKSAH

SEQ ID NO: 297625 - protein, 355 aa, unidentified
MNDTKYIGLDVHQATISVAVLDSAGKLVMEAILETKAETILQFIHGLRGSLHVTFEEGTCAAWLHDLLKPHVAQVLVCDPRKNALIKAGNKSDRIDARKLADLLYLNKLNPVFHGETGIRALKEVARSYLALTRDTTRVMNRLKALYRSRAIPCAGQRVYAPRYRSEWLAKITEAGVHRRAEIYYQQLDALRSLREQVRRDLLAEGRKHSAMNLLRQIPSIGPIRAALLIALMQTPHRFRTKRQLWAYCGLALKTSTSGEYRIVEGQLKRSKKFLAIRGLNTNHNHDLKNIFKGAATRAAAVPGPFQEFHAGLVARGMKPTMARLTLARKIAAITLIVWKKGVRFDAEHLKQQAA

SEQ ID NO: 297626 - protein, 349 aa, unidentified
MVADEVDYVVGVDTHRDQHVLAVVAAPTGAVVARREVAANARGYAQALRFADEHAAGARLWAVEGAGHYGAGLARYLSARSETVLEAGRSPRGERRLHGKDDGLDATRAARVALGQELASPRAGQRREALRLLLVARRSAVDVRREALVQLRSVIVTAPDRLRDELCRLPVQRLLDRCSRLRHSTTATADELAVRLVLRTLARRINAATVEADELEHEILAHVRALAPQLLDEPGVGPIVAAQLIVAWSHPGRIRSEAAFARLAGVAPLPASSGQTTRHRLSRGGDRQLNRALHTVILHRRQHDPATQEYIARRVAEGKSRRDATRLLKRYLARHLYRALNHQEAPLMT

SEQ ID NO: 297627 - protein, 362 aa, unidentified
MRIIGCDLHARQQTLAMLDTATGEVVEVTLKHEGDNVREFYSSLPRPVRVGIEATGSMQWFLNLMEELGIECQVGHPAQIRASAPRKQKNDRRDAELILKMLVEGRFPAIWLPSKELLDLRSLLRHRHQWVRMRTRIQNALQSIALANGLRRGTALWSHDGQSRIASLPLAPHTAYRRSELQAMYEKFEAEIEKLNQRVEEQACQRPGARLLMTHPGVGPITALATEVFLGDPARFADSKALASYVGMIPREYSSGGRQRLGGLSKQGNPLLRFLWGEAGAHAARKDPELQRFYRRKLVQKGLGKASVAVARKLGIRLWIMLRDQIEYNEFCRRGQKQQKSSDACAGMPETPYGANSHRPID

SEQ ID NO: 297628 - protein, 408 aa, unidentified
MNPLFVGIDVSSRSNVVYLMNPDGSKYSSFSVQNNLGGAKLLSEKIVSALSSMQLSDVVIGLEATSIYGDSLVYALREDGSLGRFQRKIHILNPKQVKKFKEAYPDLPKNDWVDAFVIADHLRFGRIAKEVYLDDYRYHALKTLTRARFDVIQNLSREKQRFANYLFLKCSGMAQDKDIPNTSATTIALMEHFESVDELANTDLNELTAFISETGHGRFADPAATAKAVRAAASGSYRLPKTVNDTVNQAMAISIASMRALEKQVKILDKAIDQQFEIIPNTLTSIPGIGRVYSAGIIAELGDIHRFDSQASVAKFAGLVWHKNQSGDFEAEHSRMIKSGNRYLRYYLLEAANSVRRCDSEFRRYYDLKFKEVNKYQHKRALAFTARKLVRLIFRLLKDNRLYIPPEG

SEQ ID NO: 297629 - protein, 410 aa, unidentified
MQVVHERCCGLDVHKKTVVACVLVTDESGGVHKQVRTFSTMTDDLLSLSDWLDSLGVTVVAMESTGVYWKPVFNILEEDREVMLVNAEHIKAVPGRKTDVKDSEWIADLLRHGLLRPSFIPPAPIRELRELTRYRKSLIGERAQEANRLHKVLETANIKLGMVATDVLGTSGRRMLEAILSGERDPEVLSEFAMGKLRRKLPELRRALEGRILPHHLILIEQILAHVEFLEASIERLGQEIEQRLAPFAEEVRLLQTIPGVSEAAAATIIAEIGTDMSRFSSDKHLASWAGVCPGNHESAGKRLSGKPTGGDTWLKGVLGEVAWAVAHTRDNYLSTQYHRIARRRGKLKAVVAVCHSVLVIVYHVLKDRQPYRDLGADYFDKLDTERIQRHHVNRLKALGYEVELKPKAA

SEQ ID NO: 297630 - protein, 340 aa, unidentified
MVHVGVDLDKRSSQIAVLSEDGEIVQHRLANDAARLEKFFADLPPHTPIAIEASGTWWWLVDLLEELGHQPVLSNPKQTKAIAAARLKNDRVDAERLALLLRGDLLPRVWIPPTALREARELIRHRIQLVWLRGVIRNRLQAMLARRNLQPTSGKSWLTQRGQRELQRLPLGETPSRIREDCGALLPTLDAQIRRLDADLVTRWGADARARRLTTIPGIGPFIAIVLVLELGDIERFASAKRVASYVGLTPRIRGSAGRVRAGHITKEGNRLLRWVLVLAATQAVRRPGPLRAWFHAVKKRRGKKVARVALARRLAEIVFHVWKQECDYFTVVRHGVVRG

SEQ ID NO: 297631 - protein, 427 aa, unidentified
MKELTKVCGIDVHKMFLQVCILSRSGEYSQHRFHNTPHGILALKDLVLAEGCEVVAMESTGIYWYRLFLELESDIRTIVANARQIKSIPGRKTDMNDARWIAELALHGLIRPSRIFPRQDREFRDLTRNRETLVRTRTTIKNRIHKILDSAGIRLNLALKDIFGKSGRHLLAGIAEQKDLEATLATIPSPLILRRADQLREILQDSPLSPTQLHLLTTQLHLLEAIEEKIAQLDALILASLEDSQMEALPICTSVPGISITAATTLLAELGDVRDFSSADRLVSWAGLAPSVYQSADTLVCGKITKQGSKSLRWILVQVAQAASRTTDTVFSRFFRRVAFRRGRNKAIVALARKILTILWHLLVNRELYVEPGVQRVRKLPARATLSKISIDDATEILLNAGYRIYSPESQKSAGKGVGAKRATHPL

SEQ ID NO: 297632 - protein, 323 aa, unidentified
MCKVIGIDISKGSFDVAFQKKDEKFVYFKFTNNIKGFKKLRRIVSVDDICVMEATGPYYLFLAYYLFEQGIRLSVVNPLQIKHFVRMRMVKAKTDKKDAKMIALYGEAEKPVEWQPNEDYIMQLQQIHTAIEGLNKHSTMINNQLEAFSQIPTNDKEVVKQLRALLKTIKKKISILEARMLDIVNQHCKETINALKTIPGIGIKTSIILIVITNNFKKFNDVKKLSAYVGLAPRIFESGTSVKGKGHITKMGNKYLRKLLYLCAWSAKRHNKQCIEMHERLSLKGKPERVIKIAIANKLLRQAFAIGSSLSAYDKKYEKSLAF

SEQ ID NO: 297633 - protein, 358 aa, unidentified
MSTTATAADTILALDLGKYKSVACVSYSALDHRFTRLATSRDELSRLIDKHRPAVVLIEACLLAGWVCDLCGQLGVVCRVANTASEAWKFKHLKRKTDRDDALRLAEIYRLGKFPAVTIPAKEVRERRALIETRQKLVGRRVALQNRIRAVFVGQGMAAPRGARAWTHLGLAGMAAHARPLADCGPDELWRGRLHLALAELAHVQGLLAQADHKLDELARSDAGTRLLQTIPGVGPRTAEAVTAFLPRPELFRTTKQVSAYGGFVPRQYQSTDTDHKGRITKRGPRTLRKLLVECAWVMLRYNAWARAVYGRRTHGGKTRKKQAIVALARKLLVRCWAMLRDGTVWRAEAIPAAAAAT

SEQ ID NO: 297634 - protein, 480 aa, unidentified
MTMRPGVERLGDELAAVVPAKVRLSCSAVLAYGDSAQEHLTKEQPSMTASDSTARSRNLVAIDIAKAKHEVLVELPTGKRRKMIVRNQLSDFRQLAGYLKRLEGALEIALEPTADYHRNLAYFLKVQGFAVKLVSSIAVARTREALHNSWDKNDPKDAQVILHLLRSGNTQYFYDPVIEQTNDLQELSKTHFQVSLRKTRVQHSLLNHYLPLYFPEAERFLSNSRSSWFARLLLEFPTPQAITQLTEKEFLEKASQLLWRKQSKAPILRALYAKAQESVALPVPLESQAIATFRLTLAQHLELCRIRAELEETAHELLQDQLDYQILRSVPGVGPIIALTVLAEAGDLRRFGHERQFLKFCGLDLATSQSGAYRGRTQLSKRGNSRLRSALWMAARRATHMQENTFRQKFSRYLRADPTNTDLRRKAYTACTAKMARTIYGLIKHEQFYRAYREDAIPEPGGRTRSHGPLRQAASGGLTS

SEQ ID NO: 297635 - protein, 391 aa, unidentified
MPMYFVGIDISKYKHDCCIISAADQQIISKFTITNDKDGFEQLLTALNSLSNPEDIKIGFESTAHYALNLELFLENAHHSFMEVNPVLIKEYKKSTTLRRTKTDSVDCESIARWLITVEYKPHSKGFYHAYSLKSLTRLRDRLIRQRSFYLVKITNVLDHTFPEFKPFFNERLSKTALYLLENYGSAEKMARMNSASYDKLRCISRGKFSIQQFLRLKELAANTVGVNNSIFDLELNTLLTLYKSLSDEINTLETEIIKLIEEVHPHYMSIPGIGPISSAVIYAEYGDISNFSNPGQMLAFAGIEPGINDSGTESHGGRMVKHGSSQLRYVLLNACLPLIRFDLTFATYYEKKRAEGKKHRVAITHVAKKLIIVIYALERQDVDFNAQKLR

SEQ ID NO: 297636 - protein, 411 aa, unidentified
MEPLYRCVAGIDVHKKMLAVVVRTPQGEYVQRKFGTTKTEIGHLEAWLQHHQVSEVVMESTAQYWRPVWYGLEGHFKLHLTHPLKTRAPRGRKSDFRDARRLADRWHSGDLEESFIPGAEQRSWRWLTRSRVHLKRTLGMIRNQVEGLLEQGGIKLSAVVSDLFGVSGWAMLERIAAGESDVDKLVEETRGTLRRKKPKLREALQGKLDPTYRLLLKQHLAQAQLICQQVEELNQALVEALKEHVAILCRLTKVPGINLYAAQELVAEIGPGAVAFPSPEQFASWVGVCPGSQETAGVNYSRRSAKGNRYLRRLLCQNAWGAIHTKNTFFAGLFARLKPKIKGKGAAWAVAHRIAKLVWLILHEGVEYVEKGTAPLNPRTLARKFRRLVREFGRQGIDVKSLLEQELAATS

SEQ ID NO: 297637 - protein, 284 aa, unidentified
MAMKTNAFAGLDQATSLGIDVSKKSLDIGWLTPEGESGCALDNRRSALLRLAEALVAADYRGKIIIESTGYYHWLAVVILSDAGLDVRLVNPLLAHKHHQGGIRKVKSDPVDAATLAGMGLTERRLPPRWDKGAAWVAQRHRIGLIHTLDRSLQQLKAALASHRDALALMGVKDDPVVVGVAAQIEQLKKTKRRAEAALARDLAAHSEAKRYASIPGISDYLAGVLGLMLRKDARQAKSWIAFVGLDISVRESGQWRGRTRITKRGMGYLRKKLFHAAWGAPVP

SEQ ID NO: 297638 - protein, 426 aa, unidentified
MKEKIDYLSTLFVGIDIASRIHVLSALDFNQDFFIKMKPVQNTQEGAALLEGMIVDVLKENHQFKYVVIAMESTGFYGVHLANYLSASDLLAPFSVRVYCLNPKEVKNYKKSFNDIGKNDGIDSFIIADFARVGRIRIQPWRGSQYLALQRLTRHRMHITECIAREKTYMLNNIFLKFSEYALLRDGEHPFSNKYGATAEAILTEFTTNEDIVNSSVEELVAFINSKSRGRITNPEETAKIIQAAARNSYRLDKCLYEPLTISIASSFNCISSFEKKLKAIDKAILQTVQGLNPEEYTVLNSIPGIGKVYSAGILAEIGSVRAFQNANALAKYCGIVWNDNDSGDFEAEDKRMSKAGNSYLRYYIIEATGSVIRHCPEYERFYQKKYAETRNHQHKRALALTSRKFIRLLYGLLDKSQLYSPEKSR

SEQ ID NO: 297639 - protein, 336 aa, unidentified
MNIKRIGLDLAKQVFQLHAVDHQERVVLRKTLHRARMLTFFTRLEPCLIGIEACGSSHYWARELTRLGHTVRIIPPQFVKPYLKGNKNDANDAEAICEAVSRPGMRYVAIKSEAQQSMQAEHRVRARLIHDRTALSNEIRGMLGEFGFVLPAGLSALRKALPEILSQQEKWDNRFIRLLSELTEELQALDERLNRYDRRLKQLAQEDERIRRLQEISGIGPVTASALVAAVGDAKQLKSGREMAAWLGLVPRQHSSGGKTKMGHISKRGDSYLRTLLIHGARAVLNACDHKEDRRSRWLQSVAERRNRNIATVAMANKNARIAWSVLSRGEEYRVM

SEQ ID NO: 297640 - protein, 345 aa, unidentified
MKTSKYLIGIDISSETFTATVYDTTTDVYGKTSDWANTPEGFMAFHEALTRQDIHTAETLACMESTGVYAEALCYFLAAKGYAVSVEAPRKTKRAFHPDGPKTDPIDSRQLAEYALRFFDQLPRWTPPETLLEQIRVLLTTREQFTRQLTATKNTIISINRKVVRTPVAENALQQTVEELKKKIKTLDVELKRIVTGHDKWGPAAAVAMSIPGVGLLLTAHCLLMSAGFVNPLDARHMASNFGICPRPHLSGTSLRGRPQSRRSGSPQMRKLLYLASMSLRTHQQSFRHYFLRKVAEGKSKRLVLNNIANKLLKVIVAVLKSGTPFVPNYRSVNPLYLKKPLTAS

SEQ ID NO: 297641 - protein, 326 aa, unidentified
MQGKEASEQETKAKCNVGIDVSKDWLDAHVLPAGAAMRVPNTREGIRRLKRWLTRFDLVLVLVEATGKWHRPLRRSLDAGAVPVAVIDPFRVRMFAKAQGILAKTDQLDARVLAQFAAVMAPPVRTAEPQMLEELRELVVARASAVEQQTALKNQRSTATVKFLQHQLDRRIERGDQDIAALDAAILKRIKVDDGLARRYAILTSIAGIGFVVAATLLASLPELGQSTVKQIAMLAGLAPIADQSGKRDGVRVVWGGRANVRRILYLAALAARRFNTDMKALYQRMTAAGKPPKLALIAVARKLAVLANTLISQDRTWLPQAPKHA

SEQ ID NO: 297642 - protein, 406 aa, unidentified
MELKPIHQSVAALDVHQAKLTVCILVQSEAGETQCEIKEFGGFKRDRRAMAEWVSSFNPEVVVMESTGIYWKSPYAALEKVGIDALVVNARHVKNVPGRKTDIADAHWLAILARAGLLRGGFVPPQDLRELRLISRQMQKFGSILRAEKNRMHKILTDGGIRLAAVVSDIHGKSARAMIKGLLEGQTPQQVLSYADKRLKASEEELLNALDGELSPAHYFAVSQLMEHIEYLERQIALFLDHLLSGLRDQQPLLQALQTIPGIDEPGAAMLLVEIGFDMDAFGRADKLASWAGLCPANNESAGKRKAGKKRKGNAYLRRILCEIAQAAAKTRSGLADKFKGINARRGRKRAIVALAHKILKIVFSMIKTGDYYRDAKVDYEALQVERNAPRWIKKLIKYGYIPKPA

SEQ ID NO: 297643 - protein, 417 aa, unidentified
MLSRRPGDALRRWVMSFNGAPVMAATVVAVDVGKNTAVLLVTDSARHRLLGAVGFAMTAAAVAAVVERVSAVLPAAPVKVGVEAAGHYHRPLLGSGVWPAGWEVLELSPVRVSEQRRVQGRRRVKTDAVDLEAITELVLAGYGVPVTARSGRITELSGWAMHRSRRIWTRTATKNQLLAQLDRCFPGLTLALPDVLGTQIGRLVAAEFADPHRLATLGVTRFVRFAANRGLRVRRSAAERLVAAARTALPASEAVVARQVLVDDLGLLGDLEVQIAGAEAKIAQLLPETPFAVLLTVPGWGMIRAGNYGAAVGDPRRWPGASQIYRACGLSPAQYESAGKRRDGSISREGSVQLRRALIDLGIGLWRSDPAARRYGQRLRARGKKSGVIGCAMAHRANKIAYALVRDQAGYDPDRWA

SEQ ID NO: 297644 - protein, 416 aa, unidentified
MELIHRRCAGIDISKKDAKVCVRIQGGTHRKTSSIVTTWGALTSQILALRDHLVEQKVTVVVMESTSNYWRPFYYLLEADFAVVLVNARDARNVPSRKTDVSDAAWLADLGAHGLVRASFVPRLQIRELRDLTRARTHITQERTREVQRLEKLLEDACIKLSSVATDIMGVSGRLMLQALIDQQTAADPAVLADLAKRRMRSKIPELTEALTGHFTAHHAVMTRMFLDRIDAQSKDIAVLSKRIENLMEPFLPVQDLLESVPGINQIVAEVFIAETGGDMTQFPTPEQLASWAGVSPVAHESAGKVKTSKTRPGNRYLKGALGIAALTALRSTTHTYFSGKYRRLAPTRGPMKALVAVEHAMLTAAWHMLQDGAHYRDLGADYYTRREPTKAKARAIKQLEDLGYQVIIEPQQRAS

SEQ ID NO: 297645 - protein, 321 aa, unidentified
MDNNVYGIDIAKKSFEVVSVNDSGKSWVKSYSNTASGHCKFIEVLSQGDLCVMEASGPYYLSLAFSLHQHGIKLSVLNPLVIRRYSQMQLRRTKTDQQDARLLAQYGRDHRSLMKLWQPPAAIFLRLQQLLTSINLFQKQLQMLRNQLEAMNQVPIVDPLVRSEQMYLIEQLQTSIKRLEQQMLSLSKAHCSQSYHSLMSIPGIGPKTACLLICITHDFSRFESAKQLVAYLGLCPRIFTSGSSVKGKERIVKMGQALARKYLYMGAFSAMKVNPLCQSMVESMKQKGKHHKVIRVAVAHKLLRQAFAVAKNRTQFNPNFI

SEQ ID NO: 297646 - protein, 334 aa, unidentified
MSKKVIGIDVGKKDLYLAHKYFTTTGKVKVKRKKFSNNLKGYKALIEWSKNIAKKEGSKSLHFIMEATGVYYEGIAYFLFDKGFAVSVINPSYIKSFANSSGVRTKTDQKDALVLVEYGEAMKPELWSPPAEEYRVLLNLCRAISSLKNRRDAVSNRIESLKSSRVIAQAVLEEEERLFNEINKSIKRLEKQIREHVNKYPSLKKETKLLMSVDGVGWNTAVLMVAIMEGGRRFKSAKETAAYLGLSVQEYTSGTSVKKRSKLSKKGAKDIRKALYFPAITAVRCNADVKALYDRLLKRGKLKMVAIGAAMRKLVHICFGVLKNKTAFQPQTIG

SEQ ID NO: 297647 - protein, 357 aa, unidentified
MGKSIQKLSSVTRLGLDLAKKVFQVHAVDANGEMVVARKLARGRLVGFFSQLPRCVVAMEACSSAHHWGRQLLALGFEVRLIPPAHVKPYVRRNKNDAVDAAAICEAAGRQGQRFVPVRSIENQAELMRHRARELLAGQRTAALNALRGHLAEIGVIAPQGVQHAYDLKRLAVDGFDEYGEVVVPDCVRVALRPLVSQIDALDAAIGAIDNEIAMSVKADETAKRLMTVPGVGPVTASAIVATIQDMGDFASGREFAAFLGLTPRQSSTGGKPRLGRVTKMGDRYLRKLLVVGACSTLSHRKGHNDALRRWASGMLERKTVRYKFKLTAVALANKVARIVFVLMTRGGQYDHRPVAA

SEQ ID NO: 297648 - protein, 401 aa, unidentified
MADSPEKVWAGIDIGKTHHWVCVIDSGGNVLLSTKAANRETDLTAIIAAVKAFAARVIWAVDIIGAPSALVLALLTQAQQPVRYASGRVVSTMSTAFAGEGKTDAKDAYVIAETARIRRDLTAVDQTTEVVRNLGILTARRADLIADRVRMINRLRDLMNSVFPALETEFDYSSCKGALVLLTGYSSPHQLRRIGEKRLSAWLHHRHVRGYAAVAATAIAAAATQQITLPGQDIAAEVIAEISASILALDQRVKALDTQIADMFASHEQGPIIESMPGFGPILAATLLVAAGDLRAFPTAGHLAAAAGLVPVPNDSGRRSGNLHKPRRYSRQLRHVFYLSAQTAMMREGANRDYYLKKRARGRTHIQAVISLARRRIDVLWALLRDGRTYSITPPNVTRAA

SEQ ID NO: 297649 - protein, 481 aa, unidentified
MASRKKSTFQRLNGERLNRKQRRELERRLGSEDPGLEIVHRNVAGIDVGNESHFVAVPPGRDSQPVQEFGSWTADLERMVEWLKACGIEMVVMQSTGVYWTALYDVLEARGFKICLANARHTKNLPGRKSDVQESQWLMKLHTYGLLCDSFHPPDEIRALRSLWRLRDRHVKEAARAVQHMQKALITMNVQLSNAISDITGVTGQAILREILIGERDPWKLAKLRDWRIKATEEEIARSLEGNWRDDMLFELRQAVEAYDFIQQQMAACDQRLKRLLEALPARPVAEREAEAGAAEANQRSQRRGSRQKNTPGFDLKEELKRICGVDLTRIDGIDVMTTQTFVAEVGTDMSRWATEHHFASWLTLTPNRDVSGGKVVRQEPRKSKSRVAAALRTAACTLLRSQSYLGARYRALRARLGAPKAIKAMARYLACLMYRMLKYGQAYVDRGTQHFEQKRAQRELSSLQRKAAALGYQLVQPASA

SEQ ID NO: 297650 - protein, 404 aa, unidentified
MNNVAGVDISKGKSMVSVLRPFGEVVAKPFSVRHTGSELKDLANYLKSLDGETRVVMEHTGRYYEPVARFLHEEGIFVSAVNPKLIKDYGNNTLRKVKTDKADARKIARYGLDNWVELRQHTPMDTIRMQLKTLNRQQSLYSKTKTMMKNNLIALLDQTYPGVNVLFESPVRENGSQKWVDFAATFWHVDCVRSMNLTAFTERYHKWCKRHGYNFSQSRAVEIHTDAQDLIAMLPKDALTKTMVRQAIDALNAVSASLERLKAEMRTLAAQLPEYPVVMAMRGVGDSLGPQLMAELGDVTRFTHRNAITAFAGVDPGADQSGTHEAKSNRTSKSGPPELRRALFLVMNCLLKTRPEDNPVYRFMDKKRAEGKPYLVYMTAGANKFLRIYYGRVKEYLASLESAD

SEQ ID NO: 297651 - protein, 343 aa, unidentified
MKYVGVDLHKQVISLCVVVQKGSQRAVVQRQRLACENSAAIGEFFRSLGPFQVVVEATASYEWFVQLVEPLAERVLLAHPRKLRVIAESTRKTDKLDAQVLAEFLALDMIPQAHRPTPRVRQHRALVRQRQFIQRRITSAKAKVRHILARYNADVKHLFTEEGQAHLAAQQLLPQDRFVVDQLLVDLTHYGQQRRAADRQLAEFAEAAPIAEQEARAVLASIPCVGTVTIDIVLAELGDLRRFRSQKQVAAYAGLAPKVRESADRRKDGGITKEGSGLLRWVLIQTAWRMVTKTRRWGLAYEKLKARKGARRAVVAIARRLLGLMFSLLRRGERYSQGTEILI

SEQ ID NO: 297652 - protein, 460 aa, unidentified
MRILGIDLATRAKHRAIIANERGHFISPIIKFRTRSSDLERLYIRSRDGMESDEKLVVVMEATDIVWYPVSIYFERRGATVHVVNPRLSADLDRFYNRHASSDRLAARTLARLPIVLPDKLYPWVFSGADYMALQRGCKELDRLTTEASASKNRLQSTDLLGWPDLKQRVFSTPFSPPARWFRDHFYEPQRVVEAGISGVRQGWRAAEDVYNGEEDWIEPLVVLAQEMIWLYGDDGVYLDYAALAAAVRREQRRLVGLEADAHDLRLNVTRPLYRKLHPSRNLETIKGVGQDGAAVYTGFIGLVDRFPNNRRFRGWHGIVPRSAQSGESESKGLHVTQAGPNLVKKYGFLDADTARQWDPQIAAIYHDQMVNKGKHHTQAVCTCATHLLDRVRAIMLEDRPYELQDVDGTPVTTREARAIVLERYTVPDEVRRRNNKRARRERAERRAERKYNRRRSRSR

SEQ ID NO: 297653 - protein, 312 aa, unidentified
MTETNSVVHAGLDIAKAQLQLHLQNQQHVLPNTVTGHQRLIRLLRVVAGVHVVCEATGGYERKVVSALHSANLPVSVVNPAQVRHFALAQGQRAKNDPIDAALLTAYGHALRPNATPVPQAVLAELRELVQWRDHLKEQLVRARQPAEHATLAFVHRQQSKEATHLEKQMAAVEKELAAALTRHPRWREQVQRLAELDGVGTLTAVSVLSQMPELGHLNRGQAAALAGLAPWTRQSGPWEGQRHIGGGRAVVRRALYMSAVALARQTGSTLGKFYARLRAAGKPAKVALTAVMRKLLLQMNQVLKYHVPDPA

SEQ ID NO: 297654 - protein, 342 aa, unidentified
MYYIGLDVHKKTISYCVKDAAGHVHREGKIGSTRRELDAWIGTLPQPRMIAMEATIFTGWIYDHLLPHASAIKVAHPLMLRAIALAKKLSDRIDASKIADCLRCDFLPEWHMASTEIRNRRRVLRYRHLLVRQMVQTKNRVSGLLLETGVEHNKSRLHKVGYFRRLLATNSDIDDSIRPLLRLSRETIERCQKTEYALVSSLERDPFLKERIKRLRTVPGVGPITALNWALEMGDISRFRTIKQAVSYCGLCGDERSSADKVMRMPLSKQRNKHIQHVLVEAAKLAPRQSAELALIHHKAMEKGNRNRATLAVARKIVAWLLAVDRENREFIPAQQRETRAA

SEQ ID NO: 297655 - protein, 339 aa, unidentified
MSLSIYGIDLAKHSFSIHGEDPTGKVLIHKTITRSNVLTTFANIPPAIIGMEACGASHYWARELTKLGHTPKIMAAKYVAPFRTGAKNDLNDAVAICVAVARPSTRCIKIKSADQQAILLLHRARENWVHERTGLLNQVRAMLAEFGVIAPVGRHALQRAIPEALEDADNQLPDLSRAIIADCYDHLLTLNQRIEDQENCFNMLVSRSHNAKKIMKVAGIGPITATAVIASIGKGEQFDKGRDFAAWLGLVPSQYSTGGKPRLGRITKRGDKYLRTLLIHGARAVIANLGDKTDRLSLWCKGLVERRGFKRATVALAAKNARIIWSLLRHDTDYEPIKN

SEQ ID NO: 297656 - protein, 400 aa, unidentified
MKYVLALDVAKGKSMFMLSSNAGEVLLEPIEYIHNKSNFELINSNITKLNIKDNLTVIMEATSIYHKAPERFFKENNYHVIVFNPLIGKEITNTIRKTKTDKQDCIKLTNLFWKGSIPDRNYTEDKIYTHLNELSRQYHHLDEGLTRHKNRYKELLHLCFPEFELCFKNGNIYEITALNFIKEFPHAYIIKNKRVDALAYNMANTNNRHLNYYKRKANIIKEFAQNSYPGVNENSKDVDNLKQLVEIIIELTEQKENIKNEMIELAKQTKNFDNISSIFGIGDFSAALIIAELKDITRFNNVKQINASCGLDPTIVQSGKSVNYHGPISKRGNKYARKVLFNCSRNIITVSARCDKENPIYVYYQKKKQEGKHYYACLTACSTKLIRIIYALCMNNSTQN

SEQ ID NO: 297657 - protein, 419 aa, unidentified
MRFIALDVHRDFCEIAIAEAGEVRLAGRVKTEPEALELFARSLAASDRVALEASGNGLAIARIIEPHVDRVLLANPKAVKGVTQTAKTDKIDARTLAQLLAGGFLPEVWIVDEPTRMLRRRVARRAQLVRQRTREKNQVHAILIRNLKERSPATDLFGAAGRRWLAAQELPADERETVAACLRNIDFLEGELALVDRSLAEHALASAEMQRLMTLPGVSFVTAAALMAAIGDIARFPTARHLVAYLGLNPRVRQSGSERARHGRISKQGPGEARHLLVEAAWHAARTTGPLRAFAERIKAKRGANVATVAVARKLVVIAWHMLSRGEDYAFTRPSLVREKIRRAELLTGADRRQGHRNPVRVFATAQQHRLEKELAARAETAYQRLVRDWQPTINKGAGVTRGRASSKPSKGKAARQTP

SEQ ID NO: 297658 - protein, 394 aa, unidentified
MGRHPREVVGGLLAFEDDALGARFTTFIGGTDVADGIRWVGLDVHARESTIAVFDQGTGEVVVSRVVGYPHELIGRLVEIPVPTRMVYEAGPTGYGLVRRARAVGIEMVVCAPGRTERPPADRVKTDKRDAIRLARLLAAGELTLVMVPTREHEQLRDLVRCREAIRVDLMRARHRLGKFLLRREIYYQGPAKAWSRAHRQWLAGLRFADRASQLTIADYLHAHDVLLARRERIEAELCELADGSPWRETIARLRCLRGIDTLSALGLCAETGPLDRFDHPDSLAAYLGIVPSEHTSGQRRRQGQITKAGSSHARRLLIEAAYHYQRHPGIGRQLERRQRGHPPEIINLAWRAQRRLNARWRQLKHARRKPNGVIAVAIARELAGFCWEIATLP

SEQ ID NO: 297659 - protein, 347 aa, unidentified
MRFVGIDIGKAKCRAAIMDPGGIILEEFTFMNNHEGIEGLAARLTLDDRVVMESTGSVWTNLYNHLDEKHIPVALANPLKTKAIASARIKSDKVDARILAHLLRSNLVAESYVPPQHLREIRALVRHRAGIVKIRTMVKNEIHAIVDKHGLKHEFSDLFGKRGLDWLRSLELPSLDRLILDNHLTHLKSLTQQTERVDEEIHSKACEDPDVRILLSMTGIDVYSALLIRSEIGSIDRFPNHKKLVSWAGLAPSLHQSGSIEYHGSITKQGSRTLRWIIVEAARVAVNHDAKMRSFHERVKHRRGDQKAIIAVANKMLKIIWFMLTRREPYESRNEKRYQKKLNSITA

SEQ ID NO: 297660 - protein, 356 aa, unidentified
MSKRSKLNFSGQVIYLGLDVHKKSWSVSIFTKYGEYKTFSQPPEAEVLIQYLQRHFPGAQYHSVYEAGYCGFWIHDQLREKGIDNIVANPADIPTRDKERRSKRDRIDCRKLARGLRGGEIEGIYTPARWKLEDRSLIRTRLSMGRKQARCKNQIKSMLLFYGVVIPEQREMGHWSRRFIQWIEGIRMERSSGDVALKLHLEELCHLRQILAKLNRSIVALARTEVYRSWISLLKTIPGISTLTAMIVLTELYEITRFRSLDQLCSYVGLIPDTQSSGEKEHVGGITGRHHSSLRWLLIEASWIAVRKDPAMMEAFNEYCKRMRKTKAIIKIARKLLNRIRYVLKNQAEYVTGVIE

SEQ ID NO: 297661 - protein, 351 aa, unidentified
MSDRSWFSQQKGSTMSDFSLRVGIDISAQQVSATWGITPDEHRPVVEVEQSTKGYQQLIHQLHQTGNDPAHCQVVMEATGTYWMRLAYTLHDAGFSVSVINPVQAHRLAQAQLRRAKTDAIDAQLLMELGFKLEPLPWTPPPPLYDALYQRLRQRDALLEIRTQERNRLHALQQWPEAQPAVVERYHRHIAFLTEQIETLQTEIEQLLRSDSDWAAATHSLLSIPGIGPITTAWLMVATLNFTTCQTVEQLVAFAGLAPYPRQSGTSLHRTRGVGSGGYIRLRAALYMAAIASVRSNPIIRRFYTRLRERGKPAKVALCACARKLLLLAWAVVTKHQPFDPDFGKRIVCPV

SEQ ID NO: 297662 - protein, 352 aa, unidentified
MKYVGLDWAYRTAQWCALDPGGEIAGEGRFAADRDGLARLVLELGDEVTACLEMMSGALWVRDELVACGWQVQVADARKVKTVAPLAAKTDKVDARLLAELSRRQLVPALWLPSLDERALRERLRRRMHLVRLRTSAKGRIFGLQTQWGVRISLRRLRRADGMTLLERAGMPAVWRHSISECLALIDFLDARIVPLDAELRPFAQADPRAVLLDTIPGVAELLALTIAVEIGEISRFAGPEKLVSYGRLAPRVRQSGEGRPHTGPLNKSGSRLLGWAAVEAAQHAWRESNPWHQLYLDVGRRSRNHNSAKAAVARKILIAAWHMLSRNEPFKPAPRTGATSVPASSRLALAA

SEQ ID NO: 297663 - protein, 343 aa, unidentified
MDSYVGLDVSLREVSACVVDEAGTIQSERTVAADPDVIAAWVHAQAPTVRRVGLESGPTSAWLWRELAKRGLPVICIDARHAKAALSMQINKSDRNDAAGIARIMQTGWYREVQVKSPHSHAIRGLLNSRSLLVKVQRDLENQVRGLLKSAGLIVGRAKDGVFSARTKQLLAAHIDLAAIALPLLEAREAIHGQLVQLERRVRQLAKEHRQTSAFMTVPGIGPMTALAFLATVDDPRRFRRARAIGAYVGLTPRRYASGEVDWTGRISKCGDTMLRTYLFEAAGVLLTRVQKWCALKAWGLRLAKRSGMKKARTAVARKLAVILLRMWRDGTQFHWTAAPAAS

SEQ ID NO: 297664 - protein, 429 aa, unidentified
MTQDGIAVWLGIDWADEKHRWAMRINGESRIHQEELEHTPEAVEQFVSGLAIRFPGRQVAVALEQSRGALIFMLGKYAHLVLYPIHPNTVDHYRKSAFPSGAKSDPGDAVLILDLLYRHAERLRPFHPDTVETRTLQLLVEARREAVDDKTRYLNRLTAQLKMFYPQVLDWFSTPDTVVVGRFLLKWPTLEKLQRARAGSIADLLSEHRIPDSRIETLMELIAQAVPAVKDAAVLESSVLIVRRLVQQLEVLHEAIADHDKKIAALAKSHPDYGIFSSLPGAGPAMAPRLIAAFGTQRDRYATASAIQRYAGIAPVTESSGKQKWVHGRWACPKFLRQTFHEWAWMSTKKSTWARSFYDQQRNRNKSHHAAVRALSFKWIRIVFRCWKDRVPYDETRYTLSLQKRSTSKNVEIRVKNFYGFAQFDGLSC

SEQ ID NO: 297665 - protein, 358 aa, unidentified
MSSIPVFVGLDYHQDSVQVCVLNADGKVLTNRSVSNDATLVRLLSTVHGEPQRIAIEACCGSADLAEELATKWGLPVQLAHPGYVNRIKQSPDKTDFGDSRLLADLARVNYLPRVWLAPRTTRELRRLVRHRGQLVHRRKDTKLRIRGLLRENRLKCPHANAWTKAWFTWLTNETALSESDRWLIVDHLEELVSLSGRIGAVEAKIRIRVQDDPVVSRLMQEAGVGLITAVTIRAEVGRVDRFNSGKQMARFCGVTPRNASSGARQADAGLIRAGNPDLRVVLIELAHRLMWLPTPWQSLAKKMLQRGKPRNVVVAAVANRWVRWLYHELQRPCAEAPASAPARQKGPAPTDSAIAST

SEQ ID NO: 297666 - protein, 337 aa, unidentified
MKVTLIGIDLAKSIFQLCGVNQAGKAVFNRTIKRKDLLALLADYPDATIAMEACSGSNYWGRTLEALGFKVLLIPPIHVKPFVKGNKNDRNDAFAITEAARRPNMHFVRPRSLEQTDMMIVHKLRKRRVDARTALINQLRGLLNEYGIIFATGRTSLKNALSDLLEDAENGLTSAARALIGDIQQEWASLDAVIDRLDKHIKTQAQTNPNAKRLMTIRGVGEKTATTALAFAGDGKAYKNGRHFSANLGLVPKEHSSGGKQKLAGITKRGNAYLRNMLIQGAWSVLRNADNNNDRLSSWARKVTERRGKHKAVVAIANKLARIIWSVLYHQQEYQPG

SEQ ID NO: 297667 - protein, 347 aa, unidentified
MKILALDLGKYKTVGCDYERESGKHRFRGSFTTPAALQQLVKDVKPDRVVIEVCNIAGWVCDLLRGMGVEVQVANTSDDAWRWRKVKKKNDRSDALKVAQLSAVNQLREVHIPTMDVRQWRALIAFRQQLVKRRGKVKNHIRDLLLTAGQLLPRGAKCWTQLGVARLEAMAKPLQEVGMTDLWRGQLYMELRQLREVQQEITVAEEKLDAIAAADPRIALLRTIPGVGPRLSEAIVALLDRPERFHKASEVSAYIGMVPKQFDSGESERHGRITKHGSRLVRSLLVEVAWAGLRYNPWVRQTYQRISGGKKSRKKISIVAVGRRLLVRCWAMLRDGTSWRSPALKAA

SEQ ID NO: 297668 - protein, 392 aa, unidentified
MVLTVSSALLCLKNLAECANGRFSPTARSLELSPFVLEGHRAWRGAWDSSGVFLNPNSCMGLEPEPSKEGSWMMAQDDLVVAGIDIAKDKVDVCLRSPSLRRTFASTAEGRRELASWFRRQKVGKAVMEASGGYEREWANALRDGGIEVRIVDPKRVRSFAQSAGRLAKNDTIDAEMIAWFAETFDEAPGQAYDAKREELHQMVNARQALKDMQAKLTSQGEHAVPAVVQRIHARISKTIAVELVKIEAAISTSVQATPRFAELAEIIESVPGLARTTSAALIAGMPELGHANNKIVAALLGVAPYDDDSGKRRGERQIKGGRRRTRNAFYMACLGAATRHNPVLKAFYDRLVAKGKEKKVALVACMRKLINILNIMIERRQKWDPSRYAVN

SEQ ID NO: 297669 - protein, 385 aa, unidentified
MAPTRMPEAVIGLDVGKSSHWACVATRDGEVLLSAPVANREGDLDSLFGRFPDALVVVDQSRNIGALALARARAAGMSAAYLPGLAAHGAARLFAGDAKTDERDAMVIAKTALGIPDALLPVGDPGPTIAAARALAAQRNFLTCENTRNKNRLRSILLESCPAFEALVDLSDGPQLRLMASLGGAWSVADAGPRRAAALTRGAARGKIEALVRSTASSTRPDASAVAAEDRAVKLLARRISENSAEIEAITAEISALLEGDDTYRCLLTVPGIGPKTASELAISIDIEDFPSHDRLASYCGLAPRNRQSGTSISSVTASRQGNKRLKNLLIFSCNCLTRTEGRWGDYYTRCRERGMSHGKALKALARKRLKVIYAVMRDRVPYAA

SEQ ID NO: 297670 - protein, 368 aa, unidentified
MAHVTSIGLDVHARSVKGCAFNPFTGEVERKTFGYEPAEVASWILSFEAPKAVYESGVTGFHLQRELESLGVDCVIGAVSKMDKPAADKRKKTDRRDAAFLARQLALGTIVEVHVPDPGCEACHDISRALDDARDEVAACKQRLSKFLLRYGHVYDEVNERGQRKSTWTKAHWEWIESVEMAEPAAQEALDYYIDRCKRAIDDKRALEAKVKSHASETRWKESVDALRCLKGIDVVTAFALVVETDGFGRFRNASAYSSWLGLTPSEHSSGEGRHRGGITKAGNKHLRKLLVEAAWHYASASRREKARTRGQVVAPDVRRHAAKGVRRLVDRRAALLDGGKKSVVANCATARELACWVWAIGCMVEAA

SEQ ID NO: 297671 - protein, 332 aa, unidentified
MGNVTTVGIDLAKNVFSLHGVDANGAVVLRKTVSRARLMETVAQQPACLIGLEACSGAHEWARRFQALGHTVKLMAPRFVAPYRKNGKNDGNDAEAICEAVSRPSMRFVPIKTLEQQAVLCLHRVRQGFVEERTATINRLRGLLAEFGFVLPQKAAEVRRRATECLEQLPPHAACAVRDLREHLRVLDERVKEYERSIEAHARDHDGAKLAQQRLGIGPMTASAIVASVGDVREFKNGRQFSAWLGLVPRQHSTGGKQRLGHITGRGDPYLRTLLVMGARSVLQRASSQSDPFSRWALAVRVRRGYHRACIAVAAKNARVIWAMLNQHARVT

SEQ ID NO: 297672 - protein, 391 aa, unidentified
MIYVGIDVSSEKHNFMIMNHENKFYSKESIEIPNDELGYKKLHKSIQEFCGATKDYKVRIGLESTAFYHITIVAYLTRMKYEVMVINPSLVTDYKKGRKVHSAKNDNLDAIAICKFLKDPETEFIPYTSISYHSEALKSLSRERYRLVKRLSQEKLRIYRLITLIFPEYLKLFTNIYKGCPKEIITKYPSPNKIKTAHISTLSDMLHGGCKTNAEHLHDVASKSIGKSDDYLSFELIKSYSCLDFIQSQIDSYDEKIKEIIDSSNTKIMTIPGIGYTTASLILGEIGDLSKFKSADSIVAYAGIDTNIYESGKNVGKSKYITKKGSSYLRYALYQAAKVCWIFDLQFNSYYLKKKSENKHHYVILGHIMKKLIKVVYSVLKYNKEYYIPQK

SEQ ID NO: 297673 - protein, 332 aa, unidentified
MAKVEKIVGIDISKSTFSVAYRSGLSVKTNEWNYTDGQIRKFAETLQGEACIAVMEATGVYHTRLAYHLHSKGIKVSVVNPLAAKNYARMQMRRTKTDKADSVLLMEYGEMMDLEPWRPREEWCVEVQQIQSLIEGKNKELTASKNRMEALSHSEHASKMCVEMLKKDIERVKKDIKKLEKEMERLVISNDGDNMRRLETIPGMGRKTSCMLLAMTESMKHFDSCRQLSSYLGLCPRVYESGASVRGKARICKMGLGSARNALYLCSWSAIKFNKKCREMYERLIEKGKAKKLALIAVANKLLKQAFAVLKSGVDYDENYISEKKVQKTLAY

SEQ ID NO: 297674 - protein, 419 aa, unidentified
MKKDNNSRKKSELNSKRAKSGSTEHRGTKEVLAELVGRLREKLNPKVASADPRQEGPRDRGSLRPNLDRLTVGVDLGDQWSNYCILDLEGDTLAEGKLRTTQEEFSEFFQGLNAARVVVEVGTHSAWVREVIVGCGHEVLVANPRLMEGSKRRKRKNDRIDANKLARLGRVDPQSLHPLEHRSTEVRQDLVILRARDALVSTRTELINTTRGLVKSMGKRLPSCSSRSFASKTEEGVPVEIREALLPLLQIADAVSNCIKEYDRRMEEMANQKYGHTKLLRQVKGVGPITALAYALTLENPQRFAKSRDVGPYLGLVPKQEDSGESQPQLGISKAGDSMVRKLLVGSAQYILGPFGPDTDLRRYGLRLCERGGKNAKKRAVVAVARKLAVLLHRLWVTGEVYEPLHHSMSLPTVTATAA

SEQ ID NO: 297675 - protein, 339 aa, unidentified
MQVTTVGLDLAKNIFQVHGITAEGSVAFNRALRRGQVLRFFEKLAPCLVGIEACGTSHYWARELSKFGHRVRLIPPVYVKPYVKRGKSDAADAEAICEAVGRPTMRFVEIKSAEQQALLSLHRARDLIVRQRTQTVNMLRGLLAEFGYVTARNIERATALARDIVKGDGPELPEIAQAVIASLCQQLLLLNDRIRWFTRQIAAAARSDKRIRLLQTIPGVGPITASAIVATVGTPDQFRGGREFAAWLGLTPLNRSSGGKERLGRISKMGDRYLRRLLVTGMTARVRAARSRPERADPWMISLLERKPVRLVTVAMANKTARIIWAVLTRNEAYKSAAA

SEQ ID NO: 297676 - protein, 410 aa, unidentified
MDAILERCAGLDVHQETIVACVMFGPLDKRAKKEIRTFGTTTKELLQLQDWLAEYNCTDVAMESTGVYWKPVWNILEGSFHLWLANPQRIKNVPGRKTDMKDAVWIAQLLRCGLIEASFVPPEDIRDLRDLTRYRRKLLGDATAEKNRVHRILQDANIKLTTYVSDIFGVSGRALLESLVNGEVLEPHEVERMVKTQLKRKVPQLIDALNGRIRFHHRKMIQKHLKHIEYLEKEIEVLESDIAQLLSPYQEAVDLLVTIPGIQKDAAAGILAEIGCDMSMFPSEGHLASWAGVSPGNNESAGKKKSTRTRNGNKGLKSILCQAAWAAAKAKNSRLSSFYHRLVKRRGPKKANMAVSHLLLRIIYQMLLRNQPYSELGWDYLPKKEKSLEYWVQRIKTLGYNVVQLQPEIT

SEQ ID NO: 297677 - protein, 350 aa, unidentified
MKKFIIGIDFSKETVDASIVQKEQPETLIAYKKFRNNLKGVDGLIAWTKSKVAQDGEIIFCGENTGTYSTLFSDELTDRGFIIWIEHSMNIVRGMGDVRGKDDKTDSLRIASYAARFYDKMKPYVRPKDETRVLKTLLAKRDRLKSFLKAEITNTKENPLMLQDSNIASSINEFFKRLEESLRKELKELERMILDVVMSSSEYAKNFNILTSMKGIGLINAVALIVYTDNFTKFNFNHRKIATYWGVVPFKNESGTSVRRGTHVSPKCNSWLKALLTEATLCAIRYNSRIKAYHDRLMARGKAIGIVLNNCKNKMLKILVAMVRDSKIYSDMDVSKDPHTTTTTSSIVVC

SEQ ID NO: 297678 - protein, 420 aa, unidentified
MKAWKEITHYAGFDWARDHHLVVILDQQGQVVADFQFEHSVEGWKSFHEKTASFVNLAVAIETSQGAAVDQLLQQEYTVYPVNPAAAASYRQRKAPSGTKTDHLDGWSLADALRVDGHGWKALQPMDELSCQLRLLCRDEVALIEQRTLLVNQLQQALVEYYPGALEAFEDWTNPSTWDFIIQFPTPEALVKAGKRRWEKFLHTHRLWRAETAEKRLAIFSQADQFKASAAITKAKSQLAVSLCKLLRTLQQQLDEYRKQIEALFKSHPDHDLFGSLPGAKTVLAPRLLGAIGSDPARYGSLQVLQCIAGTAPISFESGQIRKAKIRWACDKFMRHTVHLWADCFRKASAWGQAYYRKKREEGMSHACALRCLGQRLLKILFRMITDKQPYDAELHARNQQKHGSWVLTLVHKTAAQAGK

SEQ ID NO: 297679 - protein, 462 aa, unidentified
MNRNRSKSKVDRTMPMVHPNAAAIDIGASMHMAAVRADRALEPVRNFGTFTADLHRLVDWFTECGVETVVMESTSVYWIPIFELLDARGFTVFLVNARDAKHVPGRKTDVSDAQWLQRLHSFGLLRASFRPKGQIAELRAYVRQRERLLEYAASHIQHMQKALTEMNLQLHHVVADITGVTGLGIIRAILAGERDPEALACLRHYSCHSSAETIAKALTGSYRAEHLFALDQALALYDAYHEKASACDVRIEAVLKELIIHRGRDHGSAPPASRRRNRTDQANALAFDVRAALFALLGKDITTIDGLGPYLSLKLIAECGDDLSSWPSAKHFTSWLGLAPSNKISGGKMLSSRTRRSGGRAAALLRLAAVTVGRTDTALGAFYRRLSSRIGKAKAVTATARKVAVLFYNAVRHGMEYVDPGASYYETRYRARVVDNLHRRAKAFGFVLRPVEPKAGAGAAVS

SEQ ID NO: 297680 - protein, 362 aa, unidentified
MRIIGCDLHARQQTLAMLDTTTGEVVEVTLKHEGDNVREFYSALPRPVRVGIEGTGSMQWFLNLMEELGIECQVGHPAQIRAAEPRKQKNDRRDAELILKMLVEGRFPAIWLPSKELLDLRALLRHRHQWVRMRTRIQNALQSIALANGLRRGTALWSHDGQSRIASLPLAPHTAYRRSELQAMYEKFEAEIEKLNQRVEEQACQRPGARLLMTHPGVGPITALATEVFLGDPARFADSKALASYVGMIPREYSSGGRQRLGGLSKQGNTLLRFLWGEAGAHAARKDPELQRFYRRKLVQKGLGKASVAVARKLGIRLWIMLRDHIEYNEFCRRGQKQQKSSDACAGMPETPYGANSHRPVD

SEQ ID NO: 297681 - protein, 344 aa, unidentified
MEVAIGVDPSKSSLAVAAVDPLGRVVGTAEFSNDPRGHRALLGWVGERGPDRVIGIECSLSYGATLSRVLLRSGEDVREVPTTLTHRQRRRRASQGKSDMVDSVAIARIVASGEVLPSAHRLEVLADLRALVEYRDQLVRARTQVANRTHADLVNVLPGYERQVPNLRAKAHRTTARSLLRGDRSVRGELVRKRLGELSRLEGEIAAMDRRIRATVQKTGTSLTSIPGVGPFIAAKILGEVGDPSRIRSKPAFAVLSGTAPLPASSGQVQRHRLNRGGNRQLNWALHYIALVQCRITPEAQAYMARQREAGKSHKEAMRCLKRQLSNVVYRHLVADARRAELAA

SEQ ID NO: 297682 - protein, 412 aa, unidentified
MPAFTLYIGIDWATQTHQVCVMDAYGAILREFVVDHTGESVREFLRSLEAASVEPSKIAVGIEVPRGPIVEALLERGYAVFAINPKQLDRFRDRHSVAGAKDDRRDAFVLADSLRTDQHCFRRLSIEPATVVRLRELARAEQEAGEELRRVANQLFQLLLRYYPQVLELCRFPDEPWIWGLLEIAPTPEQAHRLTLARLRNMLTKHRIRRVTAEDVREILGRAALPVATGVAEAISERVLLMLPRLRVAYQQRKQIVERMEALFAHISGAEDESCGSLRRDVAILISIPGVGRVIAAALITEAFDALSQRDYDALRAHGGTAPVTRRSGKTTQIVMRYGCNQRFRTALYHWARTSVMHDERSKHHYARLRGVGHKHARALRGVADRLLALLVAMLKSGTLYDATRRTLPAAA

SEQ ID NO: 297683 - protein, 366 aa, unidentified
MKKTSTVRVNGNMNFKGHKLTIGLDLGDHWSCYCVLDEAGNIILEQKVATTPEAMKQVFAKIPQSLIAMETGTHSPWVSRLLTELGYKVIVAHAQKVQLITKSNRKDDRHDARTLARLARIDAELLGPVRHRSAQAQIHLTVIRARAELVRARTALVNAARGLVKSYGQRLPKCGTQQVNRELAAGLHAELREVLEPLLKEIESLNERIQEYEVRMEKIAKESYPHVELLKQVKGVGTQIALTYVLTLDDPHRFPKSREVGCFLGLRPGRRDSGESQPQMNISKEGDRYLRTMLVQGAHYILGPFGEDSDLRRWGLKLAARGGKSAKKRAVVAVARKLAVLLHRLWVSGEVYEPLRNSQKAMRAVA

SEQ ID NO: 297684 - protein, 389 aa, unidentified
MDPHKRSATIEVMTGDETVIGGGRFDTDLAGFAAMRRYVNQIRPDIEDRVWAVEGCNGIGHHIAMRLLAAGEQVIDVPPKMSARARVFSTGQGRKTDATDAHSVALVGTRMSGLRPVVNDEQLAVLRLLVDRRRSLGEDHTRMISQLHALLLELIPGGAKKSLSAAQAKTLLATVRPRDVVGKTRRRVAAELITDLERVYARKKAADKELKELVAATGTSLLDLHGIGPSGAARLLVEVADITRFPNRDHFASWNGTAPIDASSGDNVRHRLSRAGNRQINRTLHIMATVQLRNDTEGRRYYDRRRADGKTPMEAMRALKRRLSNIVYRAMLDDAVRASAAAEVTGPGGQRGSDSDSSATGSQPQHRLFGQATPGPVTPQPRTPLPRVS

SEQ ID NO: 297685 - protein, 405 aa, unidentified
MNAVGIDVSKGKSTVTIRRPGDVVLMPPCDIPHTQSAINALIEQIKSLDGETKVCMEHTGRYYEPVANWLSDADIFVSAVNPILIRDFGDDSLRTPKTDKADSKKIARYALDRWAKLKQYGSMDKTRNQLKTMNRQFGFYMDQKTAMKNNLISLLDQTYPGANDFFDSPARSDGTQKWVDFVYTYWHVDCVRSKSLQAFTEHYQKWCKRNGYNFSVSKAEKIYQSSSDLIAVFPKDDSTKTLIRQAVTMLNTASQTVETLRLKMDQTAATLPEYPVVMAMNGVGPSLGPQLMAEIGDVTRFTHREALTAFAGVDPGKNDSGKRNQKSVRTSKKGSPSLRKTLFQIMDGLIKRSPADDPVYAFMDKKRSEGKPYYVYMTAGANKFLRIYYGRVREYLASLEESQKS

SEQ ID NO: 297686 - protein, 412 aa, unidentified
MKDLLEISCGLDVHKEKIVACILTGPLGKPTRSEIREFSTLIPDMIALRNWIVSKNCHHVAMESTGIYWMPIYEILEDAFSGDITLLVVNARHMKNVPGKKTDMRDSEWISTLLRAGLLNGSFIPEKRIREFRDLNRYRKSVIRDITSQKNRIEKFLQSSGFRLSSFISDIFGASGRNIILHLVEHGQIDKTALDSCLKTKTRNRIDEILMSVNGTLSEHQKAFLKILMTHYDSLKKHLAEIETSLEEDMAPFALQVEQLNSIYGISTTASCAIIAEIGIDMKPFKTAEHICSWAGLCPGNNESAGKRKSTSVTKGNPYIKSMLCEIAWVIAGKRNTYLSAWYWRIKQKKGAKKAIVALARKLLVIIYTMLKQGTLFDESCFETRRKHCEQKQLSRYIRELEKHGYHVEAQS

SEQ ID NO: 297687 - protein, 465 aa, unidentified
MSKLSRRNRTRSSHGETRPFEGMRTVNPHAAGVDIGAHEIMACVPDGDDQQIVRAFGTYTADLEALADWFIDRGIQTVAMESTGVYWIPLFETLEARGIQGCLISAQSLQHVPGRKSDVLDCQWIQTLHSYGLLSASFRPEADFVALRTLLRHRAQLLEHRAPHILHMHQALLQMNIQLSQALSDVTGVTGQCIIRAIVAGERDPRRLAALRNYRCTKDADEIALALTGTWRAEHRFILTPALALFAFYTAQISACDAQIEHTFAVIKPRFEPAPPVPAPTEATTSPRRKPHSPSKNAPEVNTRAHILRITGVDLVAVHGISDSLAQTILAEIGTNMDKWPDDKHCCSWLGLAPKHDLSGGKVLKSRTMKNRTRAAQAFRMAAHAVIRADCAFGAFYRRLKGRLGPTQALVATAHKIARTVYHMLKDQVSYHDIGAAAYNKRFRERELKYLQKKATKLGYTLSPV

SEQ ID NO: 297688 - protein, 402 aa, unidentified
MNAVGIDVSKGKSMVAIMRPFGEIVSTPFEIKHTASDIRSLVELINSVEGESRIVMEHTGRYYEVLAHQLSEANLFVSAINPKLIKDFDNDSLRKVKSDKADSVKIARYALDKWQNLKQYNVMDELRNQLKTMNRQFGFYMKHKTAMKNNLIGILDQTYPGVNTYFDSPARSDGSQKWVDFASTYWHVDCVRKMSLNAFIDHYQNWCKRKKYNFSQSKAEEIYGKAKELVPVLPKDAITKLIIKQAVDQLNSASTTVESLRTLMNETASKLPEYPVVMAMKGVGTSLGPQLMAEIGDVSRFTHKSAITAFAGVDPGVNESGTYEQKSVPTSKRGSADLRKTLFQVMDVLIKTHPQDDPVYQFLDKKRAQGKPYYVYMTAGANKFLRIYYGRVKEYLSSLPES

SEQ ID NO: 297689 - protein, 355 aa, unidentified
MTVTIVEEARPVTCRTAITGGVDTHADTHVAAALDPVGGLLGVEEFPATAAGYARLLGWLGGFGTVCLVGIEGTGSYGAGLARHITAAGIRVVEVDRSDRQDRRRQGKSDPLDAVSAARAAQSGRARGAPKGRDGAVEAIRTLMVARRSAAGERTRTINQARALVLTGPDDLRARFARHKPAALITGLAALRPRPGDVAGHATRIALRELGRRAQFLDGQLVRLDELIIPLMTARAPGLLAIYGAGPRTAALLLIAAGDHPERLRSEAAWAHLCGAAPIPASSGKVTRHRLNPGGDRQANHALWRIVFTRLGSDPATRAYAERRTAEGKSKAEIIRCLKRYVAREVYRQLRPAAG

SEQ ID NO: 297690 - protein, 339 aa, unidentified
MNINVLAIDIAKNVFQLCAVDQNGKILKEKKVTRAKLIETVNAWSPAKIAMEACGSANYWSREFESRDIEVNLISPQYVKPFVKGNKNDKQDARAIAEAVQRPSMNFVSAKTVEQQDMQSLLRIREGYLEMRTKICNQIRGLLAEYGIIVAKGVNNLRNQLPSIFDSKVGNGLTARMKGYLEMQYTLLLTLDEKIDMADIEIKQLAKENDNCRRIQAIEGVGEITAVAIVSHIGNGSAFKNGRHLSAYLGLVPKQQSSGNKQQLLGISKRGDKHIRKLLVHGGRSVVRVAEKKNDQRSCWVKRIKNERGTNKANVAVANKNARIILAMLKSGEEYRKAA

SEQ ID NO: 297691 - protein, 411 aa, unidentified
MSATVRYIGLDVHKDSIVIAVAEDGVQPAEFLTKLPYDIPRLLKQLRKLGSPARLRCCYEAGPTGYGLYRALSAAGLACLVVAPSLIPVKSGNRVKTDRRDARKLAHYLRSGDLTAVWVPDEASEAMRDLERARDDAKRSERVARQQLGKFLLRHDRRFPGKTSWTRTHLAWIVTQKFAHEAQQQMLTDYLHTVEEATTRVQRLSEQIAKLVEGWALAPLVKALMAMRGIQLITAVTVAAEIGDLKRFHKAGQLMSFVGAVPSERSSGDSRRQGRITKTGNAHVRRVLVEAAWTYRHRPRLSQAIRARNAGLPPQVQAIAWKAQVRLNERYRRMLAAGKAHNVTVTAVARELAGFVWAVGQQVESPTAPRSRAALTRDPDACGTCPPKSSFGVPQAKAARSPRRKPRQSAP

SEQ ID NO: 297692 - protein, 294 aa, unidentified
MTDAVLGIDVSKNTFDTNLGAGTKARSKSFANSPAGWHHLIAWLGEHKIGQVHACLEATGRHGLGIALALHEAGHVVSIVNPAQIRDFARTKLGRNKTDQVDAVHIREYAELFKPRPWTPPSPAMRRLCELQTIRAGTVAGLTEWKNRRRSGIMDDLALSLAKTTIQHFTSQLEAVDQAIAETIDNDVELSAKRDLLVSVNGVGEALAGIVLAELPGPDILGSSAAVTAYAGLNPQQHQSGISVNRPVRISKIGNAVLCTALYMPALSAMRTTQRSLLWSIGSRLRAASRESRL

SEQ ID NO: 297693 - protein, 424 aa, unidentified
MGKTIPICCGVDVHKKFLVATILTGDYLIPQCKQKHFGTSFRNLLAFKQWLLDNNCKDVCMESTGKYWVPVWNILEGVVNVVIANPKWVSAVKGNKDDKKDSKWIGNLFRMGLVPSSYIPGKNIRILREFTRYRSKLVAMRASEKNRYQNAFTVCNLTLDAVVSDMFGKSAMAIENYLLDTDAVDPEICVSFLQRSLKKKSAEIIEAVEGFNMTQEQKERVRIVQGHFADIDKRISQIDEIIGRLTAEHEGTISLLCTIPGIDRRLAITIISEIGTDMSEFGSSRRLCSWAGLVPGNNQSAGKKKSVRITRAGVYLKPALVEAAHAAVKATEKSPYFRIKYEKIMKRRGKKRAIIAIARMILTSIYAMVSTGEVFNPSDLQRFDMPEELQKKRTIAEAKDAVKLLVSLGVVPEGSISLEALLAS

SEQ ID NO: 297694 - protein, 371 aa, unidentified
MTDNSTFIGMDVHKNSIDIAIAQTGRKGQVRHYGKIDGTLSALDKVVRKLVSKGNRLQFVYEAGPCGYQIYRHLTAQGFDCSVVAPSRIPKPSGKQIKNDRRDALMLARLHRAGELTAVYVPLAEDEAIRDLTRAREDAKGDEKKSKQRLLAFLLRSGIRYTGRASWSQAHMRWLSDIKMPHRSQQIVLQEYIGTLNQCKDRVKRLTDQIQQLLPEWQLFPVVQALQSMRGVSMIVAATTVAEVGDLKRFQNPAELMSYLGLVPSEHSSGQKTRRGSITKTGNGHVRRVLVEAAWAYRLPARVSRVLLKRQEGLPQSICEIAWKAQLRLCSRYRHLWAKGKIKPVVVTAIARELCAFMWAIANETKVPAAV

SEQ ID NO: 297695 - protein, 341 aa, unidentified
MHTYFVGLDVHKQAIAYCVKTVAGEIVVEGTIAASRTALDEWVRTVPEPWHGGMEATMFSHWIYHYLKPHAARLEMGHPGRMKAISAGKKKSDKLDARTIADLLRCNLFPACFVISPELGALRQQLRFRRLVVEEMVMFKNKTAGLLMEAGVPYERQRLHGKRYYQALVKDNQWIKDEMEPLLEFNRGQIESLKSMDQRLIRMLQRHPRLQARVEALQAIDGVGPVTALTWALEIATPQRFGSIKMAMSYCGLTSALRESAGQSKRGPLSKQRNRHLQCALIEAAKIAPTLNPKLNEIYHKARQKGAHRNRATLAVARKLVAYLLAADRAFLASHSDNVAA

SEQ ID NO: 297696 - protein, 392 aa, unidentified
MFYVGIDIAKRKHEAVVTDDKGDIVIKAFSFTNDLTGYNYLLGKIKLVTISREQIAIGMESTSHYWLTLYTRLIKDGYNVHIFNPIQSDSLRGMYIRQSKTDARDSFIIAEVIRFGKYSESNVPQEKLFALRELTRNRYFIVDSVSDLKRKTTALIDQVFPEYEKLFSNNFGVSSMALLLKYPTPEKLKNVSLQSLAKLLSKASNGYFGLGKAKEVKETAKSTFGVIDNCGIYATLISTYIKQILFIQDQIKEIDSQIAEIMSELDSKITTINGIGQALGAVIISEIGDISRFQNSDKLAAYAGVDPTVKQSGDYCAVRNHMSKRGSPYLRRAIWQASVIAVGCDPMFKAYYDKKAAEGKRYMNIIGHCTRKMISVIFAVLRDDKEYIPMAA

SEQ ID NO: 297697 - protein, 345 aa, unidentified
MEYYAGIDVSLESARLCVVDAKGRNVREAKVASEPETLIEWFRGLGIAMMRIGLEAGPLSQWLYAGMRDAGLAVELLETRHVRDAFKAMPVKTDRKDARGIAQLMRLGWFRPVHCKSLPAQEVRALLTARKLLQTKNHDVEMSLRGVLRGFGLKVGPTTPRTFPGRIRELVAGHTTLSTVVEALLAARNALFEQWQKLEKRLRSLARENGRVRRLMTAPGVGIIVALTYAAAIDDPGRFRSSKAVGAHFGLTPKRYQSGETDVTGRISKIGDGSVRTALYEAANVILTRPVKGSMLKSWGMRLAARAGMRKAKVALARKLAVVLHRMLADGTNFLAEKAAVAAAH

SEQ ID NO: 297698 - protein, 406 aa, unidentified
MISVGIDVSKGKSTICAIKPYGEGLMTPRDFKHTRDGLDSLIKQLSRFKEEIHIIMEATGNYHLPIYQYLKSKGYQIAVINPLEMKRYRCQGIRNPKTDKIDSMIIAQYGIDYWYRFKPNDDTEERRQELRLLGIQYTQFMKTRVIRCQALCEILDRTMPGVYGLLDDFNRNNGQDKLCDFAEKYWHSDNITKYSEKAFIERYNSWLKKKGYRPNEKEARQLYSIAKNAIPTLDSKLPSTKLLVQEAVNVLREVDSSLYDILNQLKALSKDMPEYETVLSMKGIGETLAPRFIAEIGDPRRFHSAKALIAYAGIDAPPYQSGQFIGTKRHISKRGSSNLRKLGYELMDSVNKHKSSYIGDPICEYFMKKRNEGKPYRVAMVAAFNKFLRIYHSRVCEVLNEYDKTK

SEQ ID NO: 297699 - protein, 340 aa, unidentified
MERITTIGLDLAKNLFQLHGVTAQGEVALRRQLRRSQVLDFFAGLPPCLIGMEACAGAHYWARELTNLGHEVRLMPPSYVKAYVKRGKTDAADAGAICEAVTRPSMRFVPVKTDDQQAILLMHRTRDFLVRQLTQVTNALRAHLGEFGIVAPKGVHNVERLLALAGTADLPRNARGSIDLLAEQFRDTQTKIEDVTAEIKATAAQDESARRLQSIPGIGPITSSVLAATLPDVTSFRSSRDLAAWIGLTPKPHSTGGKERLGRISKMGNRYIRRLLYLGAMGVIIARKRRAPGDDWLWQLIARKPVKLAAIALANRMARTVWALLKRKQSYRRVNRPAMA

SEQ ID NO: 297700 - protein, 456 aa, unidentified
MRKYYLGGDASKGYTDFVIIDDMKKIIEPNFQIDDTYSGHQTLEEVLKRFFTQHPDAVVFAAMESTGGYENNWLKKLKDLSNHYPIQVARINPKGVNYDSKAALQKCANDKLSALNVAEYQINHPEKILYNQEDRFQSLRRMLTVILGKIKNKAALLNQLETLLYTANPEIMQYCKEKTPLWVLRLLSRFPSAASLASTTVEDLCSLPYISITKAKKIIDHAKHSVASVSDDFSAFSIAQLAENILYFQEQIKKDILFMENRLSHSQIHLLKTFNGIGTYSAMVLIIEIGDINRFPNVKKFVAFLGLHPVYKQSGDGKWAWHMSKQGRKKARAILYMIAFSALSNNPLIRHLYHSYRSRGMGHKFSMAVCMHKIARIIYAMLKYNRPFDLSFGQKSRQIPMVGKKPPRLDMNRRYHKEDAIAPISYRQTKKRKERQRSQSELVTICEIQLPAPSGV

SEQ ID NO: 297701 - protein, 420 aa, unidentified
MKAYNVDNFAALIGIDWADKKHDICEHPTSTNKYHYTVVKHRPEALHEWAMDIKQRYPDQKIAIVCELKKGPLIYALAKYDYLTLFTVNPCAVAKYRQAFTPSGAKDDPSDAFLQVEILKLHMDKLSVIEPESAAMRTLSQLVEYRRSLVQDSVDLSNKITATLKNYYPQALEWFKEKDTYIFCDFIQKWPSLTAIKKARKQTLLDFFESHNSHYCTVNNARLDSIKNAMPLTLDEGVIVPNQMLVEVLITQFKVLLKGIEKLDKAIKSAYKAQQDKKIFDRLPGAGPQLAPRLLVAFGSNRARYNDAAELQKYAGIAPVIERSGQKMWTHWRYSCPTFLRQTFVEWAGFSIRYSFWAKAYYEQQKAKGKPHNSIIRSLAFKWIRIVLRCWKTNTPYDESPYLAALKRRGSPLLKFAINS

SEQ ID NO: 297702 - protein, 367 aa, unidentified
MMGWMAPLRHLSAKLLSDRISSEWEPSMGEVTTIGLDLAKHVFQVHGVDAEGATVLRKQLRRAQVLAFFSRLPPCLVGLEACATAHYWARELRALGHEVRLMPAQYVKAYVKRNKHDAADAEAICEAVVRPTMRFVPVKTADQQAAVLLHRGRERLVRQRTGLVNALRGHLAEFGVIAPQGLRNVGKLIAIVRDERDARLPDLARQVLQVLAAQIEQLEAAVAAIEKQLMAWHKSNPVSQRLASVPGIGPIIATAIAATVVEPSGFRSGREFAAWLGLVPRQNSTGGKHRLGGISKRGNQYLRRLLINGASANLLRSKATNADPWVIGLRRRRPSLVVAVALANKTARIAWAVMHRHENYQRVAAAA

SEQ ID NO: 297703 - protein, 340 aa, unidentified
MNHYAGIDVSLEASSVCVIDGSGKIVREAKVASEPEALIAWFGSLGLSLTRIGLEAGPLSQWLYAALRDAGLAVELLETRHVRNAFKIMPVKTDRKDAHGIAELMRLGWFRPVHCKSMEAQETRAMLTARKLVQKMLHEVEMSLRGVLRGFGLKVGKTTPVQFEARIKELVAGHQNLEVIAHSLLAARATLRREFNGFEKRLRAMARVDPRARLLMSTPAVGTIVALTYASAIDDPSRFKSSKVVGAHFGLTPTRYQSGETDRTGRISKIGDGSVRAALYESAHIILTKPIKGCTGLKSWAMRIAKRAGMNKAKVALARKLAVIMHRMLADGTTFANQPA

SEQ ID NO: 297704 - protein, 373 aa, unidentified
MVADRKRGKVKGCRMNSLVAGIDLGDRESLTTVLSPFGDVTDRFTFPMDEEGYAYFASRVPKEARVAFESTIMAYPIMRALRGHGYMDVTVAHPKELAWIVRSKKKNDRVDSLKIAKLHMAGMLPESHLLDRDAQTARDLLVQRAKLGVEIGRLKNSVIGYLKREGIYDSLPRTGDSFSVKRREAIHSLRFNDDRDLVLGTMMDRLEFLEKQCTPLEDRVRENARLSEDVRLLMTITGVDFYLASLISSFKGDVNRFPSDDHLASFFGIVPTSRDSANVKRRGKMTKDGSSTARWALSIIVDTVTQHNEPIKDYYQSVKKRTGSGKLAHVSTMRKLTRMFYHMLKTREHWKWEKTQLTERKLSRLQLGGGVVS

SEQ ID NO: 297705 - protein, 341 aa, unidentified
MEKYVGLDVSMEETSVCVLDGGGNIVFEGKTSSQPDALSKLLRAKASDAARIVLETGSLASWLWHELRSRNFPVICLDARHVRAALSMRVNKTDRNDARGLAELARMGWYREANVKSMESRYTHSLLAARAKLVDLRRDVENQMRGLLKGFGLPPGKGGIKALLEKIVVIMREAPHLHMLFKPMMLAHSALVTQVEFYDVQILKLAKGDETTRRLMTAPGVGPATALAFRSTIDDPNRFKSSNDVGAYLGLTPRRYQSGELDRTGRISKRGDRLTRFYLFEAASVLLTVVKRWSVLKAWGVRLAKRVGIKKAKTAVARKLAVILHCIWVDGTEFQWGKEKA

SEQ ID NO: 297706 - protein, 474 aa, unidentified
MSTQRSTKSKGSRPSVADPSLRIANPHAAGIDVHARVHWVCVPASSVPSRTPDQPANLPANVRAFGTCTPDLEQLADWLLTCGVTTIAMEATGVYWIALFELLERRGFQVILVDPRQTRQVSGRPQSDVLSCQWIQRLHSYGLLSASFRPDDQTCVLRGYLRQRQLLIADAGRSTQHMQKALEQMNVKLAETISDITGVTGMLILKAIVRGTRDPQELAKYRNEHCKCTPAEMARALQGNWREEHLFALRQALKTYEHLRRQLAECDHCIKKYLQTLEDRSGGEVLPKRILRRSSKATEPKFDVRRLLFRWSGQDLTVIEGIDDSTALNVLAEIGIDMSKWPTENHFVSWLGLCPQHRGSAGRIKNRRLRGGANRAARAFRLAAQGCHHAHNALGAFYRRVQARAGGGKAVIATARKIACRVYRLLKYGEKYVRLEMAAYEAQFQIKRMKGLAKKAASLGYKLVPLAQSQGEPA

SEQ ID NO: 297707 - protein, 321 aa, unidentified
MSKSTIDVYFRNAAKHRVFPNDLEGFEAMVEWLMEILGQVTHDEMLFGLEHTGLYSELLISFLNGHNFPFTVLPGLELKKSLGIRRGKSDKADSKDIAEYVYEKRERVRLFEMPSKNLESIRSLASFRERLVKERTAFKTRLGEYQKIHGMEDFEVYVNSHKEVIECLDNQIKKIEAETGRLIREDRELSRQYLLIQSIKGIGPQTATMMIVLTRGFTSFENWRKFASYAGIAPFPNQSGTFTGKTRTSKLANKRIKSLLTMCAVVAIQHNPEMKLYYEKRISEGKNKMSTLNIIRNKLVSRIFAVIERGTGYVDTMKYAA

SEQ ID NO: 297708 - protein, 370 aa, unidentified
MKDSITFVGLDVHKDTIDIAIAESGGNKEVRHYGKIDGDLSALDKAVRKLQSKGSKLHFAYEAGPCGYDIYRHLIKQGFTCIVVAPSLIPKKSGDRVKTDRRDAMGLARLYRSGDLTAVYVPREDDEAMRDLSRSREDAVNASRTARLRLCAMLLRLGYRYNAKTMWNAAHFNWMSTIKMPHPAQQIAFQEYIHAVMECGERVNRLTEQIHKLIPEWRLAPVVKALQSLRGVSVMVATTTIAEIGDLSRFANPRQLMAYLGVVPSEHSSGKKEKRGSITKTGNGHVRRALVEAAQAYHHQARVSRVLLARQEGLPDSIRKISWKAQVRLCGRFRKLTGRGKARNKVVMAIARELSAFMWAISKEVPVQYA

SEQ ID NO: 297709 - protein, 356 aa, unidentified
MQHTILNFINQHFFVGIDVHLKQWKVTIRSAGIELKTFSMNPSPQELYQYLHKHYPGGTYHLVYEAGFCGFWIQRAFTELGVQCIVVHPADTPTSAKEKIHKTDPVDSRKLARELENGSLKTIYVPQVASEQLRSLMRLRFRLVQQQTRTKNRIKGFLRVNGIAIPAVHLTNPRWSRAFIIWLKSVQPSFNAGKFTLENLIVQLEQTRGHLANVLRQLRREATSKNLASTVEAIDSAPGLAFITSMTLVTEIIDIRRFSRFEHLCCFVGLVPSVYSSGETSYTRGMSFRHNQYLRPLLIEAAWTAVRKDPAMTLRFNELCRSMSKQMAIIRIAKKLLRRIFHLWKQQDRYVYALVA

SEQ ID NO: 297710 - protein, 352 aa, unidentified
MKYVGLDWAYRQAQWCAVDPGGEIAGEGRFAADRDGLARLVLELGDEVTACLEMMSGALWVRDELVACGWQVQVADARKVKTVAPLAAKTDKVDARLLAKLCRRQLVPALWLPSLDERALRERLRRRMHLVRLRTSAKGRIFGLQTQWGVRISLRRLRRADGMTLLERAGMPAVWRHSISECLALIDFLDARIVPLDAELRPFAQADPRAVLLDTIPGVAELLALTIAVEIGEISRFAGPEKLVSYGRLAPRVRQSGEGRPHTGPLNKSGSRLLGWAAVEAAQHAWRESNPWHQLYLDVSRRSRNHNSAKAAVARKILIAAWHMLSRNESFKPAPRTGATSVPASSRLALAA

SEQ ID NO: 297711 - protein, 348 aa, unidentified
MATNKNPLTIGLDLGDRRHAVCVLDGAGQIVSEESLPNTRASLEQLSQRCPCATIAMETGMHSPWVSRLFEARGHPVYVANARKVRAISQSITKCDEEDARMLARLCRADPQLLSPVKHRSERCQRDLVQLKARESLVRARVDLMNSVRFLLKSLGLTVPSQVKATAFVRKLRPLLDEASTALVEPLLQSIDSLGAQIKTLEDKLETLGREQYPDTARLQQIPGVGPITALCYVLTLESPERFAGNRDVGPYLGLVPRRDQSGNSDKPLPITKAGNTHLRCLLVNCAHYILGPFGPPTALREAGLRIASRGGKSAKKRAVIATARKLAVTMMALWKTRAEYQPLPRAA

SEQ ID NO: 297712 - protein, 341 aa, unidentified
MKNKSFIGIDISKNVIDASIFCEGAPIKDFPHAVFNNSHKGFGEMCTWLKKNHVVLSNCLFGMEFTGSYSMELEKFLNARKYQFCMLSTHVVKHYPMGPKDKSDKIDSAKIADFLYRYDGTECVKPYKMPDKTMQRLKALMNERKFLVEQRTCFMNRRQLCTTKEDTQLYDGYIKKLNHDIENIELEEQKLLATDDSLLATYKNLLTIPGIGFVNAMNVIVITRNFTAFETARQYASYVGVAPHFRTSGTSVRWRPRPSARCDGQAKADLSMAATVAVQYDAELQSFYNRKLGGKQDSDTKRKALNAVKFKLVLRMFAIGKQNRKWEPLDSKSSNEKLAIS

SEQ ID NO: 297713 - protein, 418 aa, unidentified
MGKPRSKVCGIDVHKKFLVATILDRRGEKRIKEVPNSLEHLLQLREWILEEQCEVVAFESTGEYWIPLYDILEGSVETIVANPYHIKWIPGKKTDTIDSEWIAELAMNDLITPSRILPKEKRDIRALTRLREKLVNERTDHKNRVHKILDSACIRLAAFFSDLFGKTGVKILKYIVSGVPPEEIIKKLPKRLQPHSDAILDTIRTQISSQQVLQLQTSVTMIDLLNDRIKELEQTILNELHKERRKLQILMSIPGIGVIGATTLLAEIGDVTDFSSPDKLTKWAGITPRVYQSSNKLHTGSITKQGSKHLRWILVEIAHSCIRTKNTALRDFFDRIFSRSGYKKAIVALARKILKLVWHLLIHDEMYQEKDIRPKSSRLPNPRDIGSISVSAALELLVKAGYHIVDGTDLSQKGNLGT

SEQ ID NO: 297714 - protein, 369 aa, unidentified
MTKVRTWVGLDVHAAKVVACVVDAESGEMSVRRLPGDTTNVVSFCAGLPGPTRVAYEAGPTGFGLSRALYAAGIGCVIAAPGKIERPAQDKVKTDRRDAERLVRLLMIDGLHAVRVPTSEEEALRDLVRAREDLRGDLMRARHRMGKLLLRHDVRYDGTSDAWSHRHRQWLSMVRLPEPAAQSTLLDYLGAIDALIIRRDQLEATITELVPSSPWAQPIARLRCLRGIDTLSAVGLCAEIHGFERFEHPRQLMSYVGLVPSEHSSGQTRRQGSITKSGSQHARRLLVEAAWHYRHPPRLGTRLKARQVDQPVAVIAIAWKAQQRLHQVWRRLHTQRRKRMTIVTVAVARQLAGFCWAIVTADTDELPTT

SEQ ID NO: 297715 - protein, 410 aa, unidentified
MRIIALDVHRSFAQTAILENGKLRDAGKIDLEYSRLLRFARKLKPDDEIVIEATGNTSAIVRALLPFVGRVVIANPILVRAIAWAKVKTDKIDAAVLAKLHASGFLPEVWMPDEETEARRRVVAERTQLVSQMTRLKNRIQSVLHANLIPPYKGVLFSQRGRAWLEAQPLAEDQRRVIVRHAGELDRLGAELAEVDKSLAQAALEEPRVKRLMTITGVNSTVAMSVLAAIGDIHRFSSPEKLVSYFGLNPRVRQSGDKPAYHGRITKQGRAHARSMLVEAAWVISGAPGPLRAFFIRIRDKRGKHVAAVATARKLAVIIWHILSKDEDYTWNRPALLQWKLRKLELKAGHPSRRGGRQKGSAAAYSNKSVRDSERETIANAEDEYRRFVATWKQQSPKGRSGATKEVRRS

SEQ ID NO: 297716 - protein, 400 aa, unidentified
MRAVFGIDVSKASSEVAILVNGEKVHGYTISNDAIGFSRLLGDLRTVHKPEIIFEAKGVYSRRLQTFLDEHGYAYTRLNPLEAKKQLDSLRVRKTDQIDAEKLAQSQFVLNRKTTYVQEEVYQNLRDLSRFYQNLTEDIVRAKNRLHKALQVTFPELENILSTPTGEQYWNLVIAFPCKDFVLELSKDKLSESIRQSTSKRISDKRVAYLAEKLIALANQSYCAVKKNSPMLEEVRYYTKELLRLSEQRQAVLDEMVELAQPLPEYDILLSIPGIAETTATSIIGELGDIRRFQSANQINAFIGIDLRHYESGNFIAKEHITKRGNPYARKILFKCIHNIASASHTNPCHIADFYEKRKRQSQTTSTKPHTIASIHRLIRTMYYLIMHNKLYDYASTQNR

SEQ ID NO: 297717 - protein, 408 aa, unidentified
MSLVVIGMDPHKRSATIEVMAGDEAVMGGGRYGTDAAGYQTMLAAVKTWPERIWAVEGCQGIGRHLASRLLADGEQVVDVPPKLSARIRVFATGQGRKTDATDAHSVALAATRMSRLRPVADDAQLAVLRILAGRRRSLGEDHTRMVCQLHHLLLELIPGGAKKDLSAAQAKALLGKVRPRDAAGKARRRVAAELISDLERIYQRKKTANKELRDLLKATGSTLTSLHGIGPSGAARLLVEAGDITRFPSKAHFASWNGTAPIDASSGDQVRHRLSRAGNRQVNRALHIMAVVQLRNPTEGRAYYDRKVAAGKTPMEAMRALKRRLSDIVYHQMILDHRAAQTGPGGHVGAAAGSSAAGFNPSTGASEKSLPGPANHRPYPAKPIRSSDRSRHAQPAPARSRSQAHFA

SEQ ID NO: 297718 - protein, 315 aa, unidentified
MVSERVFVGIDVSKRVLDIALSDGESWSCANQEGDFQELIQRLKAKEVGLIILEASGGYEGAVTGSLAAAGLPVLVVNPRQVRDFAKATGTLAKTDRIDAHVLARFAQSIRPQPRALKDEQTQQLDALLTRRRQILSMLVIERQRLHTAAASVRADIKEHIHFLVKRLKDTDRGLDELMRLSPLWSEREELFKPVKGVGPNLLRSLCAELPELGQLNRHKIAALVGVAPYASDSGTLRGKRICWGGRAQVRCALYMATVSASRYNPVIKAFYQRLLKAGKPKKLALTACMRKLLTILNAIARDKTQWNEQLHVTA

SEQ ID NO: 297719 - protein, 335 aa, unidentified
MSQYYAAVDLHSNQSVLVLIDEKDRQVWKGRLDNDLEVILLALAPYREQVLAVAVESTYNWYWLVDGLREAGYKVELVNPCAVKKYEGLKHQDDVSDAYWLAHLMRLRILPTGYIYPRERRGLRDLARKRLRLVSQQTSHILSLESLYNRCLSKRLRASQVGRVEPEQLEDPYWAQAARSSQHVLESLRAEIHLIEEQLKAELESDQQYQILKTIGGVGEVLSMTIWLETGPIERFSKVGNYASYCRCVGSEKTSNQKKKGEGNRKNGNKYLAWAWQEAAAGAIRWQSKARSFYQSKKAKKGPWVAHKALAHKLCRAGYFMLRDQVEYSSARLFG

SEQ ID NO: 297720 - protein, 415 aa, unidentified
MDASSLEQFAAFVGIDWADRKHDICLQPAGSTRREFSVLAHQPEAIAQWAEGLRQRFAGRPVAVCLELAKGPLVYALQRYAFVVLFPVNPTTLANYRKTFHVSGAKDDPSDAQLALELLLTHPEKFSPLCPQSAPMRTLQQLVEQRRLLVDDVRRLTNRITNALKQYFPQPLEWFKDKDTLVFCDFLTQWPTLKQVQRARKTRLSTFFYEHNVRYPHIVEQRIRAITSATAITFDPAVIEPNRLLVEALVGQLRPLLQAVERFEQSIAKLAPTLDDYVLFASFPGAGPTFAPRLLAAFGEQRERYASPSELQRYSGIAPVTERSGNKSWVHWRLQCPKFLRQTFVEWAALSIPHCYWAKAYYAQQRARGSSHQAALRALAFKWIRIAYRCWQNRTPYDEATYLNALKRRGSPLMN

SEQ ID NO: 297721 - protein, 390 aa, unidentified
MRTSYIGADVDSKMTHLTIDTGRGKRLRCAVPTTIPALKAVLASAPGRKLLTFEEGPMAQWLYRNLKGVVDELIVCDPRRNRLISGDGDKADPIDADKLAELLRGRHLRAVHHSDDDRRVLLKEWVSLYHDRVREAVRQVNKIRARCRMHGLRPPRGSLRNEAIWDGWLKGLRRHPVAGQLRVLWMGLAVNRRQSRMARERLGRLSRRWPVVAAWQEVPGVGLIRAVTLFAYLDTPWRFARPKKLWKYCGIGLLRRASGTDRRGRPKPGTLQLAYQVNRRLKDVVAGASLSAIRQGNNVFSEYHQRLLGKGIYAANAWHAVARKMLTVLWGMWKTGGRFEPGYVCAVPGKAQAKNQDTGSRKSQDLAAGSSSRRSSNRGTGRSSRTSSCL

SEQ ID NO: 297722 - protein, 367 aa, unidentified
MDLVHPRCAGADVSKRDAKVCVRVAGRGRAGAASKVTTWGSFTNQVLALREHLISEQVSLVVMEAAGDYWKPFYYLLEDGPFEVMLVNARHVKNLPGRKSDVPDAAWLAQLGAHGLVRGSFVPPEPIRQLRDLTRTRTAIVRERGREIQRLEKLLEDAGIKLSSVAADITGVSGRAMLEALAGGQHDPAALADLARRRLRSKIPQLSEALTGRFTQHHAFLTIAETGADMTRFPTAGHLASWAGTCPGSNESAGRVKSAHTRPGNPCLKGALGIAAMPAARSNGTCLSAKYRRIASRRGPVKAIVAVEHAILIAIWNMITNGAFHDDPGSDFYTRRNPDKTRQRAIDQLRQMGYAVTLEPLKTAAAQ

SEQ ID NO: 297723 - protein, 349 aa, unidentified
MDHIGIDVHKRESQIYILADGGEVIEQRIRTEPERFAAVLGSRPRARIVIEASTDSEWVARCLEALGHEVIVADPNFAPMYATRTRKVKTDRRDARALAEAGLLGAYRPAHRLSDPQRHVRGRLGVRDALVHTRTRYISIFRALLRQQGYRVPSGSAEGFIQRVRALPLPGRLVSLTAPLLAVMRHLNRQLAYSHATIEHLAIQDPRVPRLRSVPSIGPVTAAAFLAAIDDAGRFPHAHQLEAYLGLVPREYSSGDTQRRGPITKAGHSRVRWLLIQAGLSILRRRPPVAEALWTWALRIAARRGKHVAVVALARRLAGILYALLRDGTVYTPRHPAALPDPALAALHA

SEQ ID NO: 297724 - protein, 369 aa, unidentified
MDEVVEFCAGLDVHRDTVVATVRFPQGRHRGSETKTFGTDTAELVALGDWLISHRVTRVGLESTGVYWKPVFYLLEDRIEQLWLLNAQHLKNVPGRKTDVVDSAWIAQLVEHGLVRPSFVPSPPIRELRDFTRHRRVLSEERTRMVQRLEKVLQDAGIKLTSVASTVLSKSARAMLEAMLAGESDPVVLAELAKGRMRSKIPALTDALRGSFRVCHHGVLVRQILAHVDFLDAQLAEIDEQITTRVATFEPIIERVQTIPGVARKCAIGMIAEIGVDMSVFATPAHLALWAGICPGNNASGRQSQIRTHPPRTGRAQDGAHRGGTSRRTHQKHLSGCAVSRHPRTPRHLQSRRRDPPRHPDRLLAHRHC

SEQ ID NO: 297725 - protein, 349 aa, unidentified
MAKEIAVLGIDLGKNSCSLAGLDAAGAVIKRRRMRPENIPSFTAGLPRCVIAMEACCGAHHLARVLAAQGHEVRLMSPEYVRPYVKAQKNDDLDAEAIAEAATRPTMRFVTMKTEEQLDMQTLHRVRDRLVGERTALINQLRAILLERGVTAPQGRSKLEQFLATMFAGDENRELGMLTGRIRSLVVDMRAEWAEIDRRIAAFETEFLARARDDEAARRLLTIPGIGVMNATALVAAIGNGETFRRGRDLAAWLGLVPRQVTTGGRPRLAGISKRGNKYLRKLLIHGARAALPSLLTRATPLGGWLRTLTAKVHKNAAIVALANKLARIAWAVLRHGTTFEANAAIAME

SEQ ID NO: 297726 - protein, 428 aa, unidentified
MRKKNQSVLKMEAITSYTLVVGIDIAKHRHWARFIDHRGVECDKTLSFDNNKIGFDSILSKIFEICKHKSFDKVIVGMEPTGHYWKALANFLMKQNILVVLVNPYHTKMLKELDDNSPTKSDKKDSLTIARLVKDGRYFECYLPHDIYADLRAYGTERFGLNRMKKSLENKITAILDEYFPEFVAVFKCPYSGKVSMQMLKVCPLPKMVLELGFDGLLKETKKVVKKSVGEKKILQLLSIAKDSIGVDYGLIAIYHKIRCIVEELELINRQLYELTIAMKKALEEITISKYLLSIKGIGVVSLSMCLGEIGNPLRFDSDRQLFRLAGYNLIENSSGKSNSGTCISKRGRKHLRCVLFQISLVMVAKNNEMKQLYNYLKNRDKNPLKKMEALVVISKKILTLIFKLSKKQEYYDPTRALGAALKKQFVS

SEQ ID NO: 297727 - protein, 356 aa, unidentified
MNNRKYIGMDVHQASISIAVSDAAGKVLMECIIETKAATVLEFIQGLRGSLWVTFEEGTSAAWLYDLLKPHVTKMVVCDPRKNALLKAGNKNDRVDARKLGELLRAELLTPVYHGESGVRTLRELSRGYLAVSKDLTRVMNRLKAIYRSWAIPCAGQQVYSPRHRAAWLEKLREAGVRRRAEQTYQQLDFLMGIRKETRKELLAESRKHPARKLLEQIPRLGPIRVALLIALIKTPHRFRTKRQLWNYCGLGLRTRSSGEYRYTGGQLQHARKPPALRGLNVNHNHDLKNLFKSAATQAGTSKDDPLGEFYRNLLARGMEPPMARLTLARKIAAIALKIWKKGERFDPAKLKQQAA

SEQ ID NO: 297728 - protein, 457 aa, unidentified
MSRKRKVKRSGQPGRLETIPILNPNAAGMDIGADEIYVAVPADRDRQPIQSFGTFTSELGRLSEWLQQCRIETVAIEATGVYWIPVYQILESCGFEVCLVNARYFQNVPGRKTDVSDCQWLQRLHSAGLLRGSFRPAQEICVLRSITRHRDKLIRLASTHVLHMQKALDQMNIQLHHVLSDITGLSGLAILDAILAGERDPKVLVQLRDGRVKASEETLILALTGDYRAEHLFTLKQSLAAYRHYQKLIAACDLEIEQQLKLFDDKLDGKREPLTPLKVRRKKPFSNEPNFDLRNHLYRIFGVDLTAVPGISVLTAHTILSEIGPDLSKFRNSSAFASWLGLCPHNDISGGKVLNVKTRRVNNRVSHALRMAANALFRSQSSLGDFFRRMRAKLGAPAAITAAAHKLARIVFHMLTTREGYDESSFTKNERRFRARAEARLRAQAKALGYSIVAATA

SEQ ID NO: 297729 - protein, 345 aa, unidentified
MPIVGGLDIHRKQITFDYLDTATGEVKRGQIAPAGREHLRAWLARFAGCEDVAFAVEGCCGWRYVAGELAAAGVGAHLGEPADTAALRGRKRHAKTGKTDARHLRSLLAEGRLPECWIPPAQILEYRALLETYHDLRRAHTAWVQRIHAVFFHQGAPPLSEGMLRTEPGLEALRAAAAVHLPAAGQQQVATALDMLAATEAQLGPLRHQLRDAARHLTGARVLAERLYGVGPLTALALTCWLGGKYRFSSSAKAVRFTGLDITGHSSDRKGPPGRLSRQGPPVLRWAVYEAGKTHARTSAPDHGYYAAVADRKNTKRAALPEARKIVRQACHILTELGDDALTAA

SEQ ID NO: 297730 - protein, 368 aa, unidentified
MSFVAGVDTHKDSHAIAFVSAAGETVAQLTIPATRAGFKRAIETAQKLGEVVWGIEGTGSYGRGFAEALVAQGYVVYEVPGLFTKRERRFGSRPGKSDALDARAIADVVLRENARLPRFEESDQQEAIRLHYDRRDRCVRLRTEAANRLRAAALRLAIGPLPSSLWTEKALKTVETRLVSMPISSYTAHALADEIRDACTEIRALNERIDTITRYLRPFVTRLAPELLTIHGVSTIVAAGIIGHAGNLRNYRDAAAFAMRAGTAPIPCSSGRRTAVRVNPGGDRQLNRCLHTIALSQAHKRGHPGHEYYQRKRTEGKDHLAALRSLKRQLATVMYFRLKLVQERLLPATQAQPASLCRTRRATAVKAA

SEQ ID NO: 297731 - protein, 276 aa, unidentified
MRTIGLDIHKHFAEAAILEPGRPLRRRRVATTAAELREFAESLGPDDQVALESTFNTWALVDLLRARAGRVVVSNPMKTKAIASAKVKTDKVDAEVLARLLASDFLAEVWVPDQQLRALRRQVAQRASLVQQQTRHRNRIHAILNRNLLHCPYTDLFGKAGQRWLSEQALPPEERSQLESALRLLAAVRSEIEALERPLASVAFDDPGARHLLTIPGVGLVTALAMVAVIGDVRRFARPNQLVGYLGLDPKVRQSGDKPARTGHISRQARPTPVRC

SEQ ID NO: 297732 - protein, 345 aa, unidentified
MSEDYDGRQVVGMDLHRRRSVLVRMSEDGQRLGVARITNSPAALRQQIAAAGKSPRVVLEATYGWYWAADTLAAAGAEVHLAHPLGVKAFTYRRVKDDFRDAADLADLLRMGRLPEAWIASAEVRELRELTRYRQKLIGLRTSCKDQVHGVLAKLGVPVTCTDIFGTWGAQWLDELRLPQPYAGKVTSLRQLIGELTTEITMLGEVIADLLAGHRGWRAIQELPGIGPVLAAVIVAEIGDVTRFKTAGQLACWAGLTPRHRESDIKVARGHVTKQGSRPLRWAVIEAIQRSPAASRPGQVKAAIIARRGKQARNIAKVAAARQLLTLIFYGLRDGHIRCLAALAA

SEQ ID NO: 297733 - protein, 374 aa, unidentified
MNMHSTNVGLDVHKDSIRVAVIESGHSEVSKEWTMRSDGKSGGRLAKKLEKLVGASEVVCCYEAGPCGYDLKRRLEALGVRCMVVAPSLIPVQPGCRIKTDRRDAVRLASLLRADELVEVQAPTPEQESLRDLCRAREDAKADLTRARHRLSKMMLRRGLRYETGKKNWTQAHNRWLAGIRFDDELAQAVFADYLRAVDQIGDRVARLAEKISEASLQEPYAEAVAHLRCFRGIDTVAAVTLIAELHEFSRFESPRGLMAYLGIVPSEHSSGERRHRGSITKTGNTHARRMLVEIGWHYRHQPAEGVKLRARRKGQPSWVISIADRAQERLHAKYWRMLGRGKSPNVANVAVARELVGFLWAVLHPSAPARMNA

SEQ ID NO: 297734 - protein, 346 aa, unidentified
MATMARITGGVDTHLDVHVAAALNDVGGVLGTASFPTTTAGYRQLLGWLSSFGEIILVGVEGTGSYGAGLSRFLHSRHVGVVEVDRPNRQTRRLAGKSDPIDAISAARAALGGTANGAAKTRDGNVESLRVLRVAMLSARKARTQAINQIHSLVCTAPDELRDKLRHLPTVDLIRVCASLRPPASTDVAAVTKTTLRALARRVHHLDEEAADLQALIRPLVSTTAPELLAHHGVGPDTAAALLIAAGDNPSRLRSEATFARLCGAAPIPATSGKTQNRHRLHRGGDRQENSALWRIALTRMSNDPDTRAYVTRRTQQGLSKREVMRCRKRYIARELYADLPQQMLA

SEQ ID NO: 297735 - protein, 309 aa, unidentified
MGKEYVGIDISKDTLDVAIHGTDKKRKYSNDQSGIKKLCDMLVKMGPALVVFEATGGFEIPLYIGLDTAKLPAAPVNPRQVRDFARSTGKLAKTDALDAAVIAHFGHAIQPAPRPLSDTQELKTLQNRRSQLIDMITAETNRLRGMPKPVKQRIKAHITWLKEELAETDRELQEMIKKDPSWKAKDKLLRSVPGVGPVLSCTLIARLPELGKLNRKEIAALVGVAPFNRDSGGYHGRRSIWGGRGKVRNTLYMVTIVAARFNPVIREFYQRLLAAGKAKKVALTACMRRLLTILNAMVKHDTHWDYSSC

SEQ ID NO: 297736 - protein, 392 aa, unidentified
MVVSVGIDVSKDKHDCFIVNSEGEVLADVFIIPNNMDGFHYLLQRIQDCTNTQDKIKVGLEATGHYSYNLLGFLLDNGLSTYVLNPLRTNLYRKSLSLRKTKTDRVDARTIASMLLSDAGLKPYTDTAYHYEELKSLTRYRFDKVKARSKLKSSISRLVCILFPELEKLVPSLHLASVYALLEEFPGAKQVAGAHLTRLKTLLETVPNGRYKRDMALEIRNAARNSIGSRMPAKSLELQHTIRLIRELNAEITEIEEQIQSIMAELHSPITTIPGLGFRMAAMILAEVGDFTRFESPDKLLAYAGMSPSIYQSGQLKNCYPHMEKRGSRYLRYALYNATKYVCQWDPTFSDYLAKKRAEGKHYNVALSHAAKKLVRLIFAMEKSRTTYRLAA

SEQ ID NO: 297737 - protein, 306 aa, unidentified
MEHYVGLDVGLEETNLCIVDHEGKTVREVKVSTEPAAIRSALEGYADRLSRVGVEASSLGLWLHRELHAGGLPIIVVEARHMRVSLSTMRNKTDRNDARGIAQMMRLGWFRAVHVKNIEMQKMRTLLTNRKLLKRKLVDIENHIRGALRTYGLFVGFVGRGHYEARVRELIERTDFVFSTMIETMLDVRRAIFDGYSRLHRAVLQVVQHDPICRRLMTVPVVGPVASLSFKVGVDDPLRFTRSRTVGAHFGLTPRRHQSGTSIDYEGRITKQGDVSVREALCEAAASLLLRVRKWSALRALGSSGC

SEQ ID NO: 297738 - protein, 330 aa, unidentified
MERYIGLDAHATSCTFAVLSERGRRLDSAVVETNGRALVKSLRSVPGDKHLRLEEGTQSAWLYEVLQGHVRELVVTHAYERKRGPKDDQRDAFHLAESLRIGAVSPVYKDRGQLSELRAHADVYAKLVTYVVRAQNRLKALFRSRGVQVVGGAVYTQRDRQAYLDELARPYRGSAELLYSEIDALRAIKKEAEKQLIAQSHQHCISAVLQTCPGMGPIRVAETIPIIVSPYRFRTARQLWAYSGLAIVMRSSSDWVQTPQGWQRAETIRTRGLNRNYNRRLKNIFKRAATTVITQCLEPMVSDYHRCLEQGTKPPMAKLTLARRISATPS

SEQ ID NO: 297739 - protein, 313 aa, unidentified
MECFVGIDTSQERLDVYVEPTREQFSHTNDGAGIAELVKRLKALSPTLVVIEATGKLEIRFMNGALEACLPVVVTNPQRIRDFARSVGQSAKTDTLDARIIAQFAEKVRPELKRLPDHDQQKLVELVVRRDQIVAMLAAETHRLHRVSPFMRTEIQQDVTYLMSRLNEITEQVQQLVRNHPVWKERRKLLESVPGVGPATSACILACLPELGRCSNRQIAALVGVAPFNADSGTRKGQRFIRGGRSRVRKALYMATLVALRYNPVLSAFYTRLITAGKRKKVALVACMRKLVVILNTMIRHQQPWRTQTATQT

SEQ ID NO: 297740 - protein, 453 aa, unidentified
MRKIGSHGSAKLTTINAAAAAIDIGSKMHMAAVDPACADNPVRSFGTFTRDLHQLADWFQSCGVTTIAMESTGVYWIPAYEILEHRGFEVVLVNARYAKNVPGRKTDVSDASWLRQLHSYGLLRGSFRPEAKIAILRAYLRQRERLVEYAAAHIQHMQKALMEMNLQLHHVVADITGATGMRIIRAIVAGERRPDVLATYRDVRCHASMETIRASLTGNDRDEHVFSLRQSLELYDTYQSKIAECDRVLEASMAALIDEVEKPAKPLSKARVQTKQVNAPAFDVRAALYGMLGVDLTQIHGLGPSLALKLVSECGRDLKAWPSAKHFTSWLCLAPGNKISGGKVLSSKTRRSSSRAAALLRLAATTVGRTDTALGAFYRRLSSRIGKSKAVTATARKIAVLFYNALRHDMEYKDPGADHYDERYRARVVANLQRRARTLGYALERIPCRGAVS

SEQ ID NO: 297741 - protein, 352 aa, unidentified
MHMIAFDSHKRYTVASVQSMEGQIIKEARIDHGRGNIVRFLAQWDKGSPVAVETIGNWYWIVEEIEHAQMRPRLVHARKAKLMLGMINKTDKLDARGLNRLQQTGTLPIVWIPPLEIRDKRELPRTRMVFVHQRTKLKNRIHSVIDKYGLQQKFTDISDMFGKAGRERIQESLGLLPEQTRYTLETLLHHLDQVERQIGEIEKRMKEVFHLNEESKLLITMPGVGFILAVVISLEVGDVGRFSGPERLASYSGTVPRVHASGDKIRYGRLRPDTNRYLKWAFSEAGNAVAVNRKKWPHRHVSKVYARVRHRQGHAKAVGAVARHLAEATYWILTRKEPYKERGVSRVSLAEA

SEQ ID NO: 297742 - protein, 376 aa, unidentified
MIKHSLGIDVSASSLACCISSIDLQQQVKVLATRTFANSQSGFKSLIHWTKKHHKQTHIPLVCLLEATGVYYENCALALTTAGLYVSVILPNKSKKYMESLGLKSKNDKIDARGLARMGAEQSLPRWQPLSNYFFTLRTMTRQLESLQKTKTSISNQLHAAENSIYKVGMVTRQLKSLIRTLEKQMKTLEAAIASHLRSEAQMAEKVAHLCSIKGVGLTTAAVILGETNGFALIENVSQLVSYSGYDVVEDQSGKRVGKTKISKKGNSRIRRALYFPAISAVGCGVKPLYELFHRTHGKHHIKMKSYVAVQKKLLILIYTLWKKNEPYREPGPESKCLEKTQVIQTVSGQKRKFPTNGREPQGKLPHEMAVSSQME

SEQ ID NO: 297743 - protein, 315 aa, unidentified
MNNLPEKTAAVYIGLDIAKATLQLHCQNQQTTLPNNAQGHIRLIKRLRAVPGAHLVCEATGGYERSVVAAFHAANLPVSVVNPAQVRHFALAQGRRAKNDPLDAAVLTAYGHALQPAPTPVPEAVLAELRALVQWRDQLKEQRARLRMQTEHLTLRFALRQQAKLITHLEKQMAGVEAELARILALTPNVQAQVQALIALDGVGWITALSVFAQMPELGRLNRGQTAALAGLAPWTRQSGPWEGQRHIGGGRAGVRHAFYMSAVVLARKTETALGKFYARLRLAGKPAKVALAAVMRKLLIQMNQTLKDHALKTT

SEQ ID NO: 297744 - protein, 362 aa, unidentified
MSYGSRGRTERTVGLDLGDKYSYFFVLDNESGKMIEEGRLRTTPDNLRRRFDSEEQMKIAIEVGTHSTWVSRILHDCGHEVLIANPRKTRLIYSDKRKTDKLDAKKLARLARVDPELLYPIEHRGEESQAHLALIHSRDVLVRSRTQLINHVRGVVKSFGARLPKCSAESFHRRIRHQLPQELEEALVDVVETIGSLTERIRDYERRIERVCKGSYLQETELLQQVAGVGVLTSLTFVLSLEDPDRFKKSRTVGAYLGLVPGKDQSGEQDPGKRISKEGDEMLRRLLVGSAHYILGPFGPDSDLRRYGEKIAGRGAKNAKKRAVVAVARKLSVLLHRLWITGEVYEPLHNARLSGALGEEVA

SEQ ID NO: 297745 - protein, 433 aa, unidentified
MPTTHPYDLVIGLDRSDRKADLHLIDTRTGNAQKHSLPTAPEELHDWLAGLRRDHPQERVAICLEQPAANRIFFLESYSWITLYPINPISLQKFREAFVTSRAKDDGKDAQYLAQLLLNHHDKLKPGQPDDAQTRQLQQLVSHRRAVVDERTGLTNRLKALLKQYFPQALDLCGEDLWRPLATAFLLKWPALQSLQKARKESLKQFYYLHGSRSQKLIEQRLERIDKAVPLTDEIALLQSYTLRVLLICRELQLLHKTIDQFDEQIATVFQQHADRPIFQALPGAGPVLAPRLLASRGSERERFARPQNLQSFSGVAPVTKQSGGKGHVHRRYSCPKFLKQSFHEYAKESIRHSRWAAAYYGQQRNRGASHHTAVRALAYKWQRIIWKCWQTQSIYKEQIYEAALKKNHSPLFDLLDQIELGKSPVKTDANKS

SEQ ID NO: 297746 - protein, 416 aa, unidentified
MKMPPPAPSEEGAVIKYVCGIDIGSQSCAGCICRPDKSVVIKSITFANAREGWQIWEEKLNQLDAPAGQILIGMEATSRYGENLYHELEQRGYVLHLLHPGQTHHFHQQRGLRAKTDRLDAMTIARTLLSGEARMGYVPSEQVATYRELVRLHTQLSDTAAGYQNEIQALIVVLFPEFTQVFADPCLPTALSVLKAFPSAQALVEAGVEPLFQLLRAQPVAHYGRPTAKKLVALANQSVSSGRARAGRSTSLRILCDQLEHTQANLARLNAEIEQLLNTDPGVKGLQQVPEFGPKTVAVLRAELGDVQRFSRTDEVIAYGGMDIEIKESGLWKGKAKLSKRGSGLLRRVLYMTALRCIHRDGSAFGVYYQRLVERGLKKGSALMAVMRKMLAVAAHLLRHEGEEYDPSKVCGSSAG

SEQ ID NO: 297747 - protein, 337 aa, unidentified
MQHVAIDLGGKESQICVRDANEKILEERKYATKKLGAFLAKQPKSRVILETSAEAFAVADLARNAGHDVRVVPATLAPSLGVGARGIKTDRRDARVLSEVSCRVELRSVHIPSEQARAWRTLCNSRDALVTSRTKLTNTVKSQLRCRLVLTYKRRSAATPEQIRTLWTELAGSVPPHVERMLEVIEALDKQIHAADKEIRQLVKTSEVCLRLMTAPGVGPLTAMRFVATLDEVKRFATAHDVQAYLGLTPGENSSSTRTRRTHLTKAGSPQMRWLLVQAAWTAQRCAPKDPMVCWTTQVAERRGKRIAAVALARKLAGILFAMWRDGTTYTAQRGAD

SEQ ID NO: 297748 - protein, 343 aa, unidentified
MQTVTTIGFDIAKSVFQVHGVDAAGQVVVRRQLKRRYVLAFFEKLPPCLIGIEACASSHHWSRELQALGHKVRLMPPAYVRPYVKRQKNDAADAEAICEAVTRANMRFVETKTPEQQSCLMLHRTRHLFIRQQTAVINAIRAHLAEFGIVAPVGRNGVEELLGVVADASDKRLPEIARACLAALGAQLRMLKAQILEFDRMINAWHRSNETSKRLDEIPGVGPALATALVASVADPRAFRSGRDFSAWIGLVPKQHSSGGKDRLGGISKQGDRYLRSLFTAGALAVIRYAKIHGAKHRPWLTALLARRPTKVAAVALANKIARMAWAMMARGERYKEPVALAA

SEQ ID NO: 297749 - protein, 332 aa, unidentified
MNKKQIFAGVDVSKASLDICIIDEQTLQNFTVKNNEKSIRSFFFKIQRQDMQRQIVVCMESTGYYNWPLYEAFGKLEGINLYVVNPLHLKRSMGLVRGKSDSIDARRIADFIRLNYTDLKPSLIPRKQIRQLQALLAHRNRLVATKSKFSVPAAELNLLADKQIKNMIQNDSKKLIEAIEIRIKKIETLISEIIDQDVELKEKYQYLESVQGVGKVLAWTMLVKTNEFKSINNPRKLACYAGVVPFEFQSGTSIYKRPRVSPMADKTIKKLLHMAALRVVRLKGDLQDYYQRKVAEGKNKMLVLNAVRNKIVTRICATVNNKRFYQNNLILS

SEQ ID NO: 297750 - protein, 424 aa, unidentified
MKVTYQTCCGVDVHKSFLVATIVKTTGGIEPSYQKKRFSTFNNSILEFKQWLLDNDCRDVCMESTGKYWVPVFNLLEDQINVTIANPKWVKAVKGNKDDTKDSKWIGDLFRLGLVKSSYIPCRLIRILREYTRYRYKLVSCRSSEKNRYQNALTVCNVALDSVVSDIFGKSSSSIIDYLLEQSGTTINHEEIASKLLKSLKSKEDAVIESIEGYQMTDAQKYRMRLVRAHMDYITAEIKDVDKMIENMISSNPDFENAVQFLCTIPGVKCDSAITIISEIGIDMSQFCNSKRLCCWAGLTPGNNESAGKKKSVRITRAGIYLKPALVQCAHAAVKSDKSPYYKKKYESLVKRRGKKRAIIAIARMILTAIYRMLSTGEVWNPSDLYKIDMPAPLVERQKAKAIKQAKKLLQKEGLLPPDEPLAS

SEQ ID NO: 297751 - protein, 345 aa, unidentified
MQVTTIGLDIAKRVFQAHGVDEGDRAVLRRKLQRAEVLTFFRGLPPCLVGIEACGTAHHWARQIGALGHEVRLMPASYVKAYVKRGKTDAADAEAICEAVTRPTMRFVPIKTPEQQAVLMLHRTRDLLVRQRTMLVNALRSHMAELGIIAPQGISRVADLVAVLLGEDEKAMPMLARQVLQGLAAELETLGERIEAIEAAILTWHKGNEASRRLATIPGIGPITASAIVASITNPTQFRTGRHLAAWIGLVPKQNSSGGKERQGGISKQGDRTLRRLLVLGATAVMRHARAKSATEATWLKGLLDRRPAKLVAVVQANKTARIVWALLTWGGTYRAPVAAQAVAP

SEQ ID NO: 297752 - protein, 346 aa, unidentified
MKINRVGVDLAKNVFQLHGADRRGKAVWKRRLSRGKWLAVLCDAVEPGTEIGMEACAGAHHWARQLIQRGYPVKVIPPQFVKPFIKSNKNDANDAAAICEAMDRPDMYPVKVKTVEQQDLQAMHRIRDEIKGHRIAKANQIRGLVTEYGLVAPQQLHALRKAIPDWLEDAENGLSFLFRQLLQGLWGDLYALDQRMTELDKQIAVIAQEDPTARRLQQLRGVGPLIATALVATIGDGKQYRKGRDMAAALGLTPRQHSSGGKDRLLGISKRGDAYLRCLLVHGARSAMRTAKDKDDRLSRWIINLQARRHANVVAVAMANKMARMAWVIMTRGVDYDPDLAAASVR

SEQ ID NO: 297753 - protein, 315 aa, unidentified
MTKQLLPVNAGVDVSKDKLDIYLLERDLSLSVPNDEQSIASLVRRLARYRLERIVIEATGRLEHAFVSAAIAKGLPIVVVAPLKVRRFAQAAGQLAKTDAIDARLIARFAAALKPATRPTIDTKSQISKDLVVRRRQLTSLRTIEKNRRSVMPEALTPSIDRIIESLDREITSLEQLIQNAVEQHATWRHKRDLLTSMPGIGPTVASTLIGDLPELGSLSRRQIAALTGVAPFNRDSGNFHGKRRIRGGRAHSRTALSLSAMVAIRYNPDIKRFYERLLQTGKHKKVALTACIRKIVTALNAMLRDNKPWQSSFA

SEQ ID NO: 297754 - protein, 347 aa, unidentified
MKQVITIGLDLAKHVFQVHGADADGSPVFNRKLRRSEVMRFFEKLPPCLVGMEACGSAHYWAREITALGHDVRLIPPAYVKPFVKRGKTDAADAEAISEAVIRKTMRFVPIKTAEQQAAAMVLKTRALLVRQRTQAVNALRAHLAELGIIATAGLAKVEVLVSIVRDETDARLPAAARFALMAIADVIEASADQIDRLERAIVVEAKRDEDMRRLTTIPGVGAITAATIKALVPDPGGFKSARHFAAWLGLTPRSHSSGGKERLGRISKMGNPELRALLVVGATAVLRVARNDARTRPWLKALLARRPFKVAAVAQANKTARIIWALLNQGGTYRRAAPLAITAVAV

SEQ ID NO: 297755 - protein, 305 aa, unidentified
MFVGIDVSKDRLDIHVLPLDDAFGVMHDAEGIASLVERLRELRPDLIVLEATGGLQTRIAATLAAANLPTAVVNPRQVRDFARAMGRLAKTDALDAEAIARFAEAVKPDPRPLSDEEGQALQALVARRRQLVDMRVAEKNRRQQVREAQLLKGLDDHLEWLAQAIAELDKDIDDHIKGSPLWRAKEDLLVSVPGIGSTTARALIADLPELGTLSRRRIAALVGVAPFNRDSGRMRGKRSIAGGRASVRNSLFMATITAVRCNPAIKATYQRLVEAGKPKMTAIVACMRKLLVILNAIMRDRVVWA

SEQ ID NO: 297756 - protein, 483 aa, unidentified
MPKKMRSTKTSPKLDGRTKPAGHGKRGRPGKGMCLQDRPILEPHAAGIDIGAREIFVAAPPDREEPPVRIYATFTEDLEGMAQWLLSRGVTTVAMESTGVYWIPIYDVLEQQGIQCCLVDARGMKNVPGRRTDWHECQWLQFLHSVGLLRAAFRPDENVRQVRSLMRHRSELVNATSQQIHRMHKALTQMNLQIHHVISDITGVTGLAIVDALLAGERDPVELAKLRCGGIQANQETIRKSLVGNWRAEHLFTLKQSRESYRHFQDQIAACEEEIQKAIALFEPRVDPTERPMPPDAKPRDRGRKKYNNPKTGFDLRSECYKLFGVDLTQIPGLMTLVLTLFSEVGRDMRRWPTSEQFVSWLALCPDNDISGGRVLWRGVRRVQNRAGQLFRMAAFTLHHDPSPLGNYLRRMKSKMGPEAATTATAHKIAVIFYAMVKNQVEYDSSLWAQRDAERDKRLEAKLKRQALQRGYKLVPIEENPAA

SEQ ID NO: 297757 - protein, 344 aa, unidentified
MEHFAGLDVSVKETSVCIVDDTSKIVREVKVASEPAALLAVLKNPAYHFKRVGLEAGPLSQWLFSALAEAGLPVICVETRHMRAVLKAQINKTDRNDARGMAQMMRVGLYRPVHVKTLRSQKLRMLLTHGKLLQSKAIAIENDLRGTLRNFGLKVGMVGKVKFETRIKELVENLPDLAVLVEPLLIVRRALREQFCILHRRLLAIVRDDEVCRRLMTAPGVGPVVSLTYRATVDVPARFRKSKSVGAVFGLTCAKYQSGEVDWSGRISRCGDEMMRVMLYEAAQSMMRSKKWSWLKAWAMQIARRCGMKKAIVALARRLAVIMHRMCVDGTEFRWTRDHVATAA

SEQ ID NO: 297758 - protein, 316 aa, unidentified
MNTKTNQSINVGVDTGKHQLDIYIRPLDIYFTVENNEKGIKEAVKTIKKYKPERIVIEATGRLEMPFILACASANLPFTIANPVHIKRFAGALGQRAKTDKLDAQLIAHYSEAIKPRLSRLKPDTMQAMSDLVTRRNQLLNMQTMEKNRLQIMPKELVMTIKPVLTLFKNQIIKIEDKIVKLIESCPEYQAKNMILQSMTGIGKIAAASLISNLPELGYINSKQASALIGVAPMNRDSGRYKGQRKIQGGRPQVRTVLYMAMMSAMQSNPVFKSTYQRLLAAGKPKKVAIIACIRKMIVILNSMLRDGVMWEAPKV

SEQ ID NO: 297759 - protein, 415 aa, unidentified
MEKQRNKVCGADIHKKFLVATVLSRDGSKTAERFGMTLEDILKFKEWVIENNCEQVAVESTGVYWVPIHTVLENKIEVIVANAYKIKHTPGRKTDVRDSEWLAELCLNGMIEPSRIFPKEDRELRTLTRARESLVNNSTQMKNRIHQALESSCIKISSVLSDIFGKSGRHILDSLLEGKHIDEILMGIKSKRVKKKERELREAIKNSLDLAQILLIRNCLELMEEIQKRINRLDTEIMVRIERRKEDVKIAMSIPGIAFTSASAILAEIGDYRDFANGEKLAAWCGLTPKVSQSANMLVTGSITKQGSKHVRRMLVQVAHAISRTRNSKLKRFFLRVQAKKGTKKAAVALARKVLCILHHLLTNREMYKENGNTKSKPVKFDRTSSPIQMTEQDMINVLSSAGYFIKKMDARGCI

SEQ ID NO: 297760 - protein, 408 aa, unidentified
MERYYLGVDWADGFHQIWVSNPDGEKVHEQKLVESVEEFSQFGRRLDEDRAQGIEIWAAIEKPHGRIVEFLLDHGVVVYPVNPKALDRARDRFRMSRSKSDSFDAYVLAQFVRTDHGHLKALVPNSEPAQELKLLTRDQYRLVRQKTRLIHQLSRTLKEYYVQPLEAFSDLESNIALDFLQDYPTPQALCTLTGRQWKRFAMREHHLGEARSQELWEKLNQPQLKVPEHVVRAKAQLLGVLLAQLKPLHHAVESYNERIKSFFASMPAAEIVRGLPGAKTGTILATLWAELGDAKGRWESFRHLQAEAGVVPLTKASGKSRVVEFRFSCNKILRHAAYWLAFVSLNRSEWANHYYREQRAKGHSHPQALRALGAKWLKIIFVMWKDHQPYDENYHLANIARQKMHQAA

SEQ ID NO: 297761 - protein, 354 aa, unidentified
MIIIGVDFHPEFQQIASVDTDTGEFQESRLTHREETEKFYRGLAAAGQRVRVGMEASGHARWFERLLAELQFELWIGDAAEIRTKRVRKQKTDRQDAQLILRLLVEDRFPQIWVPSWENRDLRQLLWHRHRMVQARTRIMNQLQAVALNEGLRCKKRLWREHGRQQLEAIRLAPWASRRRRDLLELMDRLNPTIAELTQAIEREVEKCPEARRLMTHPGVGPLTALAFVLIIGEANRFPCGKQVASYLGLVPLEDSSGNRRRLGHITKQGSSMLRFLLVEAAQVTVRSLPQWRSKYVHLMMRRGRKTAKVAMARRLAVRLYWMMRQGWDYEQWVKFGSHAGQPGNRDGVQRSTE

SEQ ID NO: 297762 - protein, 366 aa, unidentified
MEATDERSECNELAGSGNPIWIWFGLDISKESFTAARFHGLARETFRPKEKSFPLDKKGVAGFLKWRKSFDNGILTDAVAMEATGSYTGKLCRLLLAADPALRVSVCNPFATSLYTKSFTPAKSDGTDAEYIARYACSHQPRQWRMPDPDQAHLRALEGEREKFVEMRTKLSNRGETIEFKDVAKFNQDMIEKLNQKIDQIEAAMKEIIRSRRDIADEIALLDTVPGIGFTSAAAIYAMLGSLKQYTRKELSALSGVCPAIAQSGKSLKTSRIDKRGPSRLRQILFCDSRWAVKIPSVKALKDRLDAQENSSKMRSRCACMRKLLLICRAVVVSGNAYDKEYNQEKSCQGSDEKSPKKSENTVQTA

SEQ ID NO: 297763 - protein, 346 aa, unidentified
MSYSTTVGVDLAKNVIQISVVSSRGKELSNRSLTRKKFAEFLGKQKPSRVAFESCASAHYWARAAQRHGHEARIIPAKAVAPFRQGHKTDSNDALAVAEAARRPNIKEAPMKTVEQQGLQAIHRSRELLIQECTALSNHLRGLLMEFGIVIPKGFASLLKAVPEILEDGDNELPDLYRPTLHRMYSRLLELREDIEAMTKEVDCLAKAHPICSKLMALEGVGPIGALLLYATMGSGAAFSGSREFAAYLGLAPKQYSSGGKTNIVGLSKKIGNSRLRSVLILGARAYTYRLKEPKSSKDKWLKANIERNGECRAAIALANKNVRTAWAMVTQGTEYQRQVQLEMAA

SEQ ID NO: 297764 - protein, 328 aa, unidentified
MKLQHIIGADLSKESIDLFSHEFQAHLKIENSFKGFRQMLKWLRDQKISCSNVMIVMEHTGLYSYHMEAFLHKHQISFTKVSALAIKRSLGLVRGKNDKIDARRIARYGFEKKDVLVVTSKPDKAIERLRMLHSTRNRLVRHRASLICAIKEYKNILKQSDLIIKSQLSLVKSFTGQIKKIEAEISQLITKEQLVNQNFQLLKTIKGVGKVVATAAIIKTRNFTQFSNARKFACYCGIAPFEHSSGKTIRRKTRISHLADKEMKTLLDQSAKSAIQYDKELKSFYQRRIAIGKSKKSTINIVRNKILYRMFAVIKRQTPFIENYLKTA

SEQ ID NO: 297765 - protein, 421 aa, unidentified
MGKLIERCAGIDIGKRFLVCCVMTGAAHEEPRSETRRFDTTVPGLKRLRNWVNEERVTDVVMESTGSYWIPVFNLLEGHVTVVLANPEEVKNRKGHKTDRKDAGHLADLLRHNHVKSSYIPAEPVRQLRDLTRRRVQLTQDATRERNRVQKLLEQVNVKIGSVLTDVFGVSGLHMLLALLDGRAAPEEIAGLARGSAKRKTPQLIEALEGNRMSDHVRFLIRGCLRHLACLEEEVEELDAEILRRMQLSTFQKAFTLLQTIPGVGQLSAATILAETGPDLDSFPTIEQMASWAGLCPGNRESAGIQKGPQTTHGNPYLCTALVQCAWAATRKRDSVFRSRFQRLAPRRGEKRAIIAVAHHMLIILYYMLKRGVPFLGAEHAPKQRRRERRAHHHLRCLRRLGFSVEIRLSSESTPPDTISR

SEQ ID NO: 297766 - protein, 408 aa, unidentified
MLKIVYPNCCGIDVHKTFVLAVIAITDEHGVTQYFRHRFSTFTKGLGELKQWLEYYSCTDVCMESTGKYWIPVYNVLEDSCSICLAHPKYVKAIRGKKTDKKDAKWIADLFKHDLVAGSFIPPLPIRELRDLVRYHFKLTNFCSSEANRLQNSLTVSNITLSSVLSDVLGVSGSRIIDAILEKPTDEIDLSALIHGRLKSKLSDLELAIDGKITDEKAIKIRIIKSHYDALTLCKSDLEKAIIEVAEEFRAQQELIQTVPGCANQFTAIKIISEIGVDMGQFPTAGHLCSWAGLTPTNDESANKKKSVRISKAGHYLKPLLVQIANGIVKSEKYPEHRNKYLQLKKRRGHKKAIIAIARRILTAIYHVLLKREPYDSSYYSIEIVHPNRVMTINGAISFAKSHGFVVS

SEQ ID NO: 297767 - protein, 352 aa, unidentified
MEQFIGCDAHKQFSVFVAVNEKGCAGEALRVAHDRQLYREFLTQLPPHSAIAVEASGHYSWLVDEMERSGHCPKLANPLEAKRRMGLTKKTDKLDARGLAILLRNGTLPEVWIPPSELRDQRELLRMRIFLVRLKTRVKNRIHGTLARHNVVVPGADLFGVEARLRLASRLPELPLHSREAVERELATLDFLETQVESAERQLEAIMKVSVEADLLKTLPCVGKILSMVLMLEIGRVGRFPSAAHLASYAGLVPRVHSSGGHTRMGQVCGNVNRNLKWAFVETGNLVVVNQRRLAGTHVVRLYQRIKRAKNHQKAVVAVARHLAEAAWWVLTKQEVYREPRNLRQALSSTHG

SEQ ID NO: 297768 - protein, 337 aa, unidentified
MTTLTLGLDIAKNVFQVHGVDSHGKLRLQRKLRRGEVLRFFARVEPCLIGIEACHSSHYWGRELTKLGHQVRLIPTQYVKPYVLGGKNDANDAAAICAALGRADIHSVAIKSAEQQSVQSLHRMRERLNHERTAKSNQIRSMFAEEGFVFPISIGKLRSSVASLVGNADATITPILRRLGAMYLEQIATLERWLAELNVQLQEIFTQREDCQLLASIPGIGPVVATALVGTVADPRQFKNGRQFAAWVGLTPRQRSSGGKVRLGGITKHGDTYLRTMLVQGARAVMRFVGRRTDRQALWLQRLMQRRHKNVVVIALANKIARIAWAVLAKRVAYSPA

SEQ ID NO: 297769 - protein, 337 aa, unidentified
MDNYIGIDVAKATLQVYIPKNDLDLEINNTESALKTLYSKLKKQYKKQLNDIVFVYESTGSYSTYLEYFSESKNIRCFKVGAYQSASFSKVVKNRSKTDTVDARMLSKMHVIARDEDIKVPSRDVNAHQIRAYIKYYQSLVKEEIRSKNYLEAATYNLEDKFVLKQVQKRITTIQKEQVEIISKTMEIINSNEKYKKAYENITSIKGIGEKSGIILLYLFLRYPNASRQHITALCGLDPIQRTSGTSVEHKERISKQGLSLVRAILFMPTMAAIQHNDEMKLIYERLVNRGKPKSLAQIAVMRKIILLAHSLYKNNEKYDEKMYLRFTQARENENMK

SEQ ID NO: 297770 - protein, 343 aa, unidentified
MDHFAGLDVSVKETSICIVDDTGRIVREVKVASEPGALLPVLRNPAFHFKRIGLEAGPLSQWLFSTLAETGLPVICVETRHMRAALKAQINKTDRNDARGIARMMRVGLYRPVHVKTLRSQKLRILLTHRKLLQSKAIAVDNDLRGTLRNFGLKVGMVGTVKFEARIKELVENLPDLAVLVEPLLVVRRVLREQLGILHHRLLAIVRDDEVCRRLMTVPGVGPVVALTYRATVDVPARFRNSKAVGAAFGLTPSKYQSGEINRTGAISKCGDEMMRVMLYEAAQVLLTRTNRWSWLKAWAMQIARHRGMKKAIVALARRLAIIMHRIWVDGTEFRWTRDVAAA

SEQ ID NO: 297771 - protein, 428 aa, unidentified
MDFEVKHLICAGLDVHKKTIVAAVCMTDPVTLEAAYKVKSFSTNNSQIAAMRDWLLSYNCHDVCMESTGKYWIPVFNILETHMHVVLTHPKYVKAIKGKKTDKRDAKWIANLFRFDIVKASFIPPADIRALRELSRYRLKLSYMRSAEKNRFQNSMTISRIRIDCVLTDPFGKTASSIMDYLLTDVPFDETECAKLIHGRVKASNEEIFDSIRGFEILSEQRFKMSHAKQHMELLSSYMDDIETELFRLSRSYDEVIKRISGIVGFTERSALFVISEIGADMGVFESAKHLCSWAGLTPANNESANKKKSTRCSKAGQYLKPLLIQCALAAVKSKKNPYYAIKYKRLAKRRGRKKAVIAIARMMLTGIYHMILHNEEWKPDDYEAIIHPSKPVKVALTLDNVIQFLGEQGADPETLKLLQQQCAVTPG

SEQ ID NO: 297772 - protein, 332 aa, unidentified
MDLIHIGIDISKKTLDLSIYGRERRDSGFLHVTNDKKGFSKILSWVKGLKIQLSQVWFCMEHTGEYGYALALFFDEHGITYSMVSGADIKGANPSKKGKNDKQDAAMIARYAHEKRDSLAPSHLNIRPLYELRCLLNERRMYVRQRAQWKAQRSERRLFSTKHRDSRVNRAIKTLSATIREIEEEIRSVIAVNEDIRRNFELIMSIPGIGLINAVNFIVATANFSNFNNARRYASHICVAPFAVVSGTSINKGTHTSKIGRHDLKTELRTTVLAVLKADSEMRKYFDRRKADGKKYNVIANNIMFKLICRVFAVVRRGTGFVETHKYLQKKE

SEQ ID NO: 297773 - protein, 344 aa, unidentified
MTTEASEKLCAGLDLHANNTYCAVINQAGQPVFQQRLGNELPTICQALQPYQAQLQAVAVESTFNWYWLVDGLQAAHFPVPLANPAKIQQYTGLKRTGDSSDALWLAELLRLNILPTGYIYPKAQRAVRDMARRRMLVVQQATRTLLSLQSMVTRHTGQTVRGRGLEDWTLVEVGAAFPEPASQATALALLELLREQRRIQHALEKHVLAQVKLAGAWERLLTLPGVGNILGVTILLETGPIARFASAGDYASYCRAVDSRCDSNGTKKGENNRKNGNQYLAWAFVEAANFAARYNAKAHAWLARKTARTLRVVAVKALACKLAKAAYYVLRDNVAFSEQKMFG

SEQ ID NO: 297774 - protein, 363 aa, unidentified
MFTERTSVGLDVHARSVAAAAIDGVTGELFRSRLTPSFEHVESWLRELPGPVAVAYEAGPTGFGLYRHLTAAGFGCVVVAPSKVHRPSGDRVKTDAKDAVLLARLLRLGELTAVAVPTVDQEAARDLVRAREDCRGDLMRARHRLSKLLLRHGIVYSGGAAWTGAHDIWLRTARERLTTTATRLTFDSDYEAVVAVKARRDRLDTAIETMAAHSQFTPVVRRLGCLRGISTLTGFALTVEIGDWTRFTGASIGSFVGLTPAEYSSGSSRTLGPITKTGNAHVRRLLVEAAWHHRARYRPGKTLQQRWDLAPAAARVRGDQGNRRLHHRWTCFIGRRKRLTIANVAVARELAGWCWSLAVLDAD

SEQ ID NO: 297775 - protein, 370 aa, unidentified
MTMLAEDYDFVIGGDPDRDTIDLAVLDTGAGRVHAHLADSADGAGYRRMLTWAGEHAPGRRIWALEGTGSFAAGLVVFLGDAGEKVVEVGALKRARGAKNDRIDAIRAARQALARDEQGAPRSGGLREALRMVFACREGVLVSRTKAINELKSLIVVAPEELRAQLRGRSLLVQLARIEQLQIATVAPVEQRLSVFSLQSVAARVRFLYAQLAELDPQLLELIRQHPAGPALLAEAGVGPVVAAQLLISWSHHGRVRNEAAFASLAGVSPLEASSGQRSRHRLNRGGDRALNRALHTVAITRMRYHPETRVYEARRIAEGKSHRDIRRSVKRTLARRPRPIPRSRLLETCCSKQEIPSRQSATSSSVSAR

SEQ ID NO: 297776 - protein, 393 aa, unidentified
MVVSVGIDVSKNKHDCFIVSSEGEVLADVFTIPNNMDGFDALLEKIRACTTPQDKIKVGLEATGHYSYNILGFLLDNGLATYVLNPLRTNLYRKSLSLRKTKTDRVDARTIAAMLLSDVGLKPYTNTAYHNEELKSLTRYRFDKVKERAKLKSSISRLVCILFPELEKLVSSLHLATVYALLEEFPGSKQIAKAHLTRLKTLLGNASKGRYGRDMAVTIRSAAQNSVGSCMPAKSLELQHTIRLIRELDAEIAEIEAEIETMMDKIQSPIITIPGMGFRMAAMILAEIGDFSRFESPDKLLAYAGMSPSTYQSGQLKNCYPHMEKRGSRYLRYALYNAAKYVCHWDPTFAAYLAKKRDEGKHYNVALSHATKKLVRLLFALERSRQPYCSLAA

SEQ ID NO: 297777 - protein, 429 aa, unidentified
MRAESTPGARGPVFCGVDTHADSHWLCVLDWRGRKVLSRQFPADAAGYEALAGAIAAAGEPACIAMEGTSSYGAGLTRHLASLGMPVREALSPAGMQRRRPGQGKCDEADAERAARAAMSGSKLGTPKSQDGWVDGVRCMLAARSGAVKARTSAVNTARSLLTTAPEGLRSRFRGMGGPRLMEELPSVRSEGALGAALGALADLWAAARDAALDMERAIEASLEENCPALLAMYGCGPVSAAKLAVAAGDNPGRLRSEASFAAICGACPVPASSGKTVRHRLNRGGDRQANSALHEIARQRVMRDPETAEYAERARARGKSDREVMRCLKRYVAREAYRALMRPHEVRRPEDASELVAARRAAKVSQVRAASILGTSEKYISMLERGQRELKPIRRAYEAWVEAGLPLDWDRQAFEAERKMDSKKHLAK

SEQ ID NO: 297778 - protein, 337 aa, unidentified
MSSSAIALQLSSRSRFFIGIDVGSRSISAALSSGRVRDFRHDSAGVAAMLDWAAASCRGEVLQAVCESSGAYSSKLNHLLQQQGVGCSIVPPQRIKYHAKARGRRNKTDRMDAANILDYAIHVQPEATPAPDPQQLALAALLAARDDLKTDIRRWENRRLSLELLPGSPPEVLELAHRMADAARLEVKALESRIKQLIESDPEFRRLSALIQTIPGVGPEIAKACLARLDLFRNHGEKQLVSYVGLAPMHNQSGTSLKGRSLIGMSADPEFRQLMYMGSLSAARANPALKEFYERLLANGKHKTLAHTAVARKLLLQIRSILHTGIPFDPNFKPNRG

SEQ ID NO: 297779 - protein, 353 aa, unidentified
MTNDKYVAMDVHKASVVIGMRDGGGKMIGRAVVETKAQTLRDYVRGLSGTVHLTLEEGTQAAWLYDLLKPLVAECIVCDPRRNKLLESGNKSDDVDVEKLSELLYLGRLRAVYHGGQGTRALKELAQNYEALVKDNTRVKNRLKAIFRGRGISYEGSEIYDYEQRAQWLAQLSERGVRQRASQLYEQLAQLEQWVAGARLQMLRESRKQKAKKILEQIPTLGEISVAQLIATVDTPFRFRSKRQFWTYCGLAVVRHTSADYQFAQGELRRRAKPGPTRGLNRNYNRRLKRLFKSAALAGSSKGPFKPYYDRLLARGLNPEVAQVTLARKIAAVTLTLWKKGASFDREKLVKPE

SEQ ID NO: 297780 - protein, 340 aa, unidentified
MNATTYGLDVAKRVFQMFWVDAETGEIVNRKFGRDDLIQYLSRRPAGRVALEACGSAHWWARNIKALGHDVVLLHAKFIRPFVQTNKTDAADARAIWTAVQQPGMRTVAAKSAEQQAMLGQHRIRSLLVKFRTMQVNQLRGLLYEFGVSFRAGRSAGLAEIRSRMAEIEEAVPGSLMYCLKDQLKRIDELQKEIDQLERHMSIWQKKESACRAISDVPGIGRLTATALVATIGDAKTFKSGREFASFLGLVPRQNGTGGKVHLGSISKRGDPYLRTLLIHGARSVLYHSKTPTPWLKAIQERRPANVAAVAVASKMARTAWAILARGQAYEREHVSMKPA

SEQ ID NO: 297781 - protein, 360 aa, unidentified
MAQVRSWAGLDVHAAKVIVATIDAVSGELRFVRLSGQTGEVAAFCRALPGPARVAYEAGPTGFGLARELAGMGVGCVVAAPGKIPRAPQDRVKTDRRDAERLARLLMAGELHPVRVPATEEEALRDLVRAREDLRGDLMRMRHRVSKLLLRHDVRWAGNNWTQAHRQWLAAVALPEPVAQIVLEDSLGAIDALLVRRDSLERQMTALIPGSPWAGEVARLRCLRGIDTLSALGLCAEIGDFDRFRRPGQLMSYLGMVPSEYSTGDKRRLGSITKSGSQHARRLLVEAAWHYRRPPRIGRELARRQDGQSQAVTAISWQAQRRLYRTWQRLDSQRGKRRTIVAVAVGRELAGFCWAVSTAD

SEQ ID NO: 297782 - protein, 378 aa, unidentified
MSKIRFVGLDVHAETVAVAVAEPNGEVRSLGLIPNRPESIRRLVRKLEPVEQLRFCYEAGPTGYVLYWQLTALGTQCEVVAPSLVPTKPGDRVKTDRRDALKLARCYRAGDLTPVWVPDAAHEALRDLVRAREAAKGDLLRARHRLSKFLLRHGWRRPESLKSPWTNAHLEWIKTKVHFDQPAQEIALTDYVHQVEHLVARIERLDQAVLEAARSVPPQMRAVIEALQALRGIAQVTAVTIVAELGQISRFAKARQLMGYSGLVPSEESSGQRERRGAITKTGNAHLRRVIVEAAWAYQFRPWLGGYLLKRQVGLSEEVKEIAWKAQHRLHSRYRKLLAQGKNKPQIVTAVGRELLGFVWAIGVNVETRMREPQQVAA

SEQ ID NO: 297783 - protein, 424 aa, unidentified
MNLTQNDRLKQVTADTLIVGVDIGSKTHFCRAFDWRGFELSRKVFRFSNTGVGFLTFLRWTEEVMNKTGMKKVIVGCEPTGCYWLTFQKFLQDHGVQLVTVNPFTVNRSKELDDNSPEKSDLKDPKTIALLVKDGRYSTSYLPSGVYAEIREASVCRDQIMKQHIRLSNQIQGWLQKFFPEYLECYAEWDSTSGLLLLKEAPSPQDILRIGTGGINQIWRNAKVRAAGIKRAQTLVEAAQNSVGLEAGEAARLEIWVLVNDYILKAEQLKRLDEYLEEKVKEVPNVEKLLAIKGVGMSTVIGFIAEVGDIGRFTDPKQIQKLAGLEIVKKSSGKKKGQPRISKRGRRKLRRTMYESARALMNWNPAFQDVFLYYRNRKKNPLGGMQAKIAVACKAIRIFYVVLQTGCDFDEKKFRKDIIRLETA

SEQ ID NO: 297784 - protein, 424 aa, unidentified
MKVTYQICCGVDVHKSFLVATIVKTTGGIEPSYQKKRFSTFNNSILEFKQWLLDNDCHDVCMESTGKYWVPVFNLLEDEINVVIANPKWVKAVKGNKDDTKDSKWIGDLFRLGLVKGSYIPCKIVRILREYTRYRCKLVSCRSSEKNRYQNALTVCNVALDSVVSDIFGKSSTSIIDYLLEQSGTSINHEEIASKLLRSLKSKEDAVIESVEGYQMTDAQKYRMRLVRAHMDYITAEIKDVDKMIENMISSNPDFENAVQFLCTIPGVKCDSAITIISEIGTDMSQFSSSKRLCCWAGLTPGSNESAGKKKSVRITRAGVYLKPALVQCAHAAVKSDQSPYYKKKYESLVKRRGKKRAIIAIARMILTAIYQMLSTGEQWNPSDLYKINVPEALIEKQKAKAIKQAKKLLQREGLLPPDEPVAS

SEQ ID NO: 297785 - protein, 338 aa, unidentified
MKGYAGIDLHSSNSYLGIIDEQDRRHFAKRLPNSLTQILVALEPFKKDLEAVVVESTYNWYWLVDGLQEEGYKVHLANPSAIKQYEGLKHTDDKSDSFWLAHMKRLNLLPEGYIYGKEERPVRDILRRRLLFVKQRTSQILSLQSAILRNLSLKLSGDAIKKLKEEDIEDLFDSPFLVLTAKSNIAVIQSLTKTIKEIENAVKSQAKLRKEFQLLKTIPGIGDILSLTIMLEVGDIGRFPKVGNYSSYCRCVKSEKLSNKKKKGENNRKNGNRYLSWAYVEAANFAIRFSPEAQKFYQRKMAKTNRIVAIKALSNKLARASYYIMRDQVVYDPTKLFA

SEQ ID NO: 297786 - protein, 412 aa, unidentified
MLKIVYPICCGLDVHKDFVYACIATSVNGVTTYKSHRFSTFTKGIRELLSWLLEHNCKDVCMESTGKYWIPVYNILETDCKIVLAHPKYVKAIRGKKTDKKDAKWIADIFKHDLVSGSFIPPADIRQLRDLVRYHTKLTNFTTGEKNRAQNCLTVSNLKLDSVFSDVFGKASSNIIGHILANPSEKLSDVSAFRTKHMKATDDAILEAIDGEFCPEQAEKLRIIREHMSNLDLCKLNLQSLILTTAEKYISEIELVCTVPGISTLSAISVIGEIGVDMSVFPTSKQLCSWAGLTPQNDQSAGKKKTTRISRAGAYIKPLLVQCALAAIKAKNKHPEIFNRYSALKKRRDHKKAIIAIARMLLTAIYNILKKREPYNPELYRKSDVPPEHRNVSVDEAIFILQRQGYLVSSPT

SEQ ID NO: 297787 - protein, 411 aa, unidentified
MKRFAGIDIGSERHVVAVVDEHGAVLLKPTPFGEEAAGYRRLMELLGSPQGCLVAMEATGHYWRNLFAYLIAEGFTVALLNPVRTRRFAEEELERTKTDAVDALGIARFAAQKDPPASQLAEEGLDELREVVRLRERLLQDFGDRVRQLHRALDLSFPEFTRYVRSLDSELATTILTHYPTAAAFRTVSVKKLAGLRYDGRHRVGEELAHELLAAARISVGRHQSEPYRLRIHYACEDIVMLRRRLHQLKADIEQRLERHQVGKLLTTIEGIGPQTAACIIAELGDPARFGSVKALASYVGVIPRLRQSGKRRLSGRRMLPLGNTRLRRALWMPTLSAIRVNPWLRAYYLRLRGAGKRPKVALIAAMHKLLAAIFSVARRRQPFVASLVSPPATIVAGGAVVDPAAGLTAR

SEQ ID NO: 297788 - protein, 382 aa, unidentified
MKSVLSVDVAKGKSMIMLSTEYGEVLIEPKEIKHNFRDFNELKDKIESFNLEDLTIFMESTGIYHLPVERYFKENNFNTLVINSLTTKNNYDTLRKTKTDTKDCMRLAKLFFVNEVEYHDLSKKDLYANLKAMTRQYFYLTQLNVSCKNRYKRLINICFPEFEEIFKGSRIYEETALNFIKTFPHAYIVKEKRIDALYNNLYKTNSRHDYYYKRLANKIKDIAVNSYPGVDKDHSDVKNLSDMAAILQENIKTINELKEKMIKTAKESPYFDIINSFYGIGEVLTTELLGELGDITRFDNHRQLIAFCGLDPTIIQSGKSINVHGTISKRGNKYARWILFNISQIVVKLGHQCPGHPVYDYYTKILRMLYTMCKNNTTFKIN

SEQ ID NO: 297789 - protein, 368 aa, unidentified
MHRRCSVFHSDYAVGCDAHKHFSLFVVLDGGGNLVQRTRVGHVPGAIGAFLAQFPRGTPVAPETVGNWYWIVDEIEEAGCIPLLARAAKAKVMMGNIHKTDKLDAQGLATLLYLGKLPSVWIPPSDVRDQRELPRTRMGFAKHRTMVKNRIRSTLAKYALSLDTDSDIFAPKWRSDLEATLLRLPDETARCTLQQLQILDALNHHIRELEDRILQRIQASPSLQLVQSVPGPAKLLAIVIDRELGSIDRFPSPHHFASYCGLVPRLSASAGRAHYGRMVKQGNTYLKWACIEGDRRPPPPSQLAAGVQLYERTHRRKGHSGSVGALARYLAESTYWVLKKGEPYREPPHWRPGGIQSPVSLSREQARA

SEQ ID NO: 297790 - protein, 340 aa, unidentified
MTITTVGIDLAKNVFAVHCIDQNGKAVLVKPKVSRGALSELIAGLPPCVIGMEACSGAHYWARLFRQYGHDVRLMAPKFVSPYRMAGKTGKNDAADAIAICEAVQRPHMRFVPVKDESQQAMQCLHRTRQGFIQERTATYNRLRGLISEFGVIAPQSTDALRHVVSDQKETLPVQVRLCIDDLLTHVTNIEEKIAEYDRVLSRVAKTDHRSQQLMELKGVGPTTASALVASIGNAHDFKNGRQLAAWLGLTPSQYSSGGKSKLGRITKAGDAYLRTLLVQGARSVMVGAENRTDPFSRWVCSLIGRRGYWRAVVAIAAKNARLCWASLHYGDDFRLYSTT

SEQ ID NO: 297791 - protein, 341 aa, unidentified
MNIKRIGIDLAKQVFQVHGVDGQDKVVLRKQLRRAQLLAFFKKLPPCLIGMEACGGAHYWARELQKLGHTVKLMAPQFVKPYVKSNKNDANDAEAICEAVARPNMRFVAIKTIVQQDIQAMHRIRSELVQQRTAKVNQIRGLLAEYGIVVERRVEVLRHALPQLLEDAENGLTADFRVLLDGLKQDLVTLDERVDDLDKKIKTLANNNPDAKRLQQIPGIGPMIATALICAIGDGKQFKRGRDMAAWLGLTHRQHSSGGKERLLGISKRGDAYLRTLLIHGARSVLKVADKKDDPRSRWLQNLSSRRNKNLAAVALANKNARIAWALLSKETDYLPEGEPA

SEQ ID NO: 297792 - protein, 309 aa, unidentified
MKQSVVYIGVDVAKRHLDVAWQEQSRRFANDKSGRAALVAWIKQSPTAVQLLCEASGGYEQALLESLEQSELKVTLVQANRVRQYARAAGILAKTDKIDAHVLSAFGAAMRPCPTAPHSAAQKRLRQYEAQRRHLSAILVAEQNRLAQLSCAELRSLSRSLISKIKKQIATLDARLSSLIAQDQELCLKVQKLTSITGVGARTATLLLAQMPELGQLNRRQAAALGGLAPFNRDSGTLRGKRTIFGGRRALRSGLYMAALVAARHNPILSSFYQRLRAKGKPHKLALTAVMRKLLLALNHTLKPIPSPA

SEQ ID NO: 297793 - protein, 429 aa, unidentified
MTNPQSTPEAVVWVAIDVAKDCHEALIEAPGWKSRKKFRVQNTAEEFRSFADFLHGLGCKVRIGFEPTGNYHRALAYFLHSEGFQLKLVSSLALARTREAMHNSWDKNDPKDAQVILHLLKAGLTQHYHDPIVHNLNDLQELSKTHHQVSLEKTRTQHRLLTHYLPLYFPEIARYHSSARSEWLWNLLIEFPTPHSMTRLSKAEFVRRAWPLVGRKVSKERILTDVYLTAQTSVGLPVEENSETVTMLRFVFRQLVTLCQLRDSIEERADALLSSNQDYQRLRRIPGIGPIASLTILAEAGDLRRFSHHRQFLKFCGFDLATEQSGQFRGLSRLSKRGNARLRAVFWMAASVAVRMRENSFRAKFERYMRTDPGSADRKRKAYVAVAAKIARVTFALIRSGADYRCFHEVAVPGGRTRSARAVEAIPTS

SEQ ID NO: 297794 - protein, 454 aa, unidentified
MTVPKPARLRIENLPTVFPNAAGLDIGASEIVAALPPDRDVTVVRTFTTFTADLRQLVTWLLDHHIETVAMESTGVYWIPIYEMLEAAAIRVYLVNARHFKIVPGRKSDYNDAQWLQKLHALGLLTGSFRPDDEMCILRSLLRHRAQLIEHRSPHVLHMQKALKLMNIQLPEVLSDVTGVTGMAILRAIVAGERRGAVLAKLRRPGCRRTEEDIVHALTGTWRDEHLFVLAQSLDLYDHYTAKVTECDRRLDQQFSSMRPRFDIEGEPPAAPTSRTKKNSNSKNQPAYNVRAHLVRILGIDLVDIIGISESLAQTIISEIGTDLSRFPTSKHFCSWLGLAPHNDISGGKVLRSRVMKVHNRAGQALRQAAQSCSRSHSIFGAFYRARSARSSSEEAVVATAHKIARVIYHMLTCHEAFKPESIRAFDQKRQQREVKHLQKRAKALGFTLQPVSA

SEQ ID NO: 297795 - protein, 335 aa, unidentified
MSPHHARKGREWKENMERQSNYAGIDVSQATLDMAEHATGQQWSFGNDDAGIAEAVAVLVNLKPALVVLEATGGIEVPVVTELVAANLPVVVVNPRQVRDFAKATGRLAKTDALDAQVIAHFAAAVQPELRPLPDTQAQEFSAIMARRRQLQDMLTMEKNRLRAARRLVRGRIKAHIGWLENELTHTNADLERSIRESPVWREKDDLLRSVPGIGPVTSCTLIAGLPELGMLGRKQIATLVGVAPLNRDSGTLRGKRTIWGGRAQVRAVLYMAALASTRHNPVIKSLYRRLCAAGKVKKVALVACMHKLLLILNSMVKHNIRWHYTTAELIGPCS

SEQ ID NO: 297796 - protein, 400 aa, unidentified
MYVGWDWADKAHDVTVLDEQGRVVEHFEIGHHEAGFQHALKRLGRHGRPEALPVAIERPSGLVVERLVEAGHPVVPIHPNAFNAARSRWGASRAKSDPGDSYRLADYLRTDGHRLRRLQPMDQATRQLQALVRMRDDHVEARIAASNQLAALLNAHWPGAVCIFAELASDIALEFLDRYPTPDTAARLGETRLAAFLTRHSYSGRRSPAQLLERLHRAPAAPGRLDPEVLAEMVRHQVHVLRTLLHTGKELEHAIVAVLPSHAKASLLARLPRIGGGVNLAQVLSEVGPILDASLDVDHAAAQCGASPVTKASGQSRGVHFRWAANPHARQALQIFADNSRHASPWAARLYAKHVAAGKRHPHVIRILMRAWLRVIWSCWHSQTPYDPARHRNEVRLAGA

SEQ ID NO: 297797 - protein, 457 aa, unidentified
MARKSAQKSKGGSRMLPVMHPDAAGVDIGAEEIFVAVPADRAADSVRSFGTFTRELHELADWLQKCGVRTVAMESTGVFWIPLYQILETRGFEVFLVNAQHVKNVPGRKSDVSDCQWIQYLHSVGLLKASFRPPDEICVIRSLWRHRESLVQMAAEHIMHMQKALSQMNLQLHHVLSQITGLSGQKILDAILAGERDPMRLASLCNGRVKSSRETVAKSLEGDYREEHLFALRQSLVGYRFYQTLIAEVDRELEFKMRKLPRATGGPEQMPPRTKACFYQRADNEPAFDLKGELFRIAGVDLTDVPGISAITAHTILMEVGPDVSRFRNASAFAAWLGLCPEKQISGGKVLYTRSRKVKNRAAIALRLGAHCLYRAKNYWGEFYRRMRWRLGAPAAVTATAHKLARIVYHLLSTKEPYSETVLAHCDHLANKRAEIRLRKQAANLGYQLTPIPEPST

SEQ ID NO: 297798 - protein, 343 aa, unidentified
MQTIATIGLDIAKSVFQVHGVDAAGQMVVRRQLKRRQVLAFFAKLPPCLIGIEACASSHYWARELQALGHTVRLIPPAYVKPYVKRQKNDAADAEAICEAVTRPNMRFVPIKTIEQQGCLVLHRTRHLMVRQQTATINSIRAYLAEFGIVAPVGRRGVEQLLEIITDASDARVPEVARSCIAALGAQLRQLKAQILELDRRITAWHRSSELSWRLNEIPGVGPLLATALVASITDPKVFRSGRDFSAWIGLVPKQKSSGGKDKLGNISKRGDRYLRSLFTAGALAVIRYAKIHGTKHRPWLVALLARRPTKVAAIALANKLARIAWALMTKGSSYRQPAALRV

SEQ ID NO: 297799 - protein, 320 aa, unidentified
MRNAVGLDISKLTFDATAIVGNAEYSAKFDNDSKGLDQFSDRLKSLGCQNLHICMEATGNYYEEVADYFAQYYSVYVVNPLKISKYAESRFKRTKTGKQDAKLIAQYCRSAQESELVKRQKPTDEQYRLSRMTAAYAQIKSECAAMKNRHHAAKDEEAAKAYAEIIKAMNEQLEVLKEKIKEQTEKPNCKEGVKRLETIPAIGRMTAAVLFHHLTSSKFETSNKFAAFAGLSPQQKESGTSVRGKGKLTKFGNRKLRAVLFMPAMVAYRIRAFPDFIKRLEEKKKPKKVIIAALMRKLAVIAYHVHKKGGDYDPSRYKSA

SEQ ID NO: 297800 - protein, 349 aa, unidentified
MDATTVAIDLAKDVFQVAVANRAGRILDRQRLTRRQFERFIDTLVEGTDMIMESCGTSHYWGRRMQSRHLRVRLLPVQYVRPYVRRNKTDRADTDALLEAARCGDIRSVPVKTVEQQTLQAIHRVRTQWQTARVARINAIRGLLAEHGYAIPVGARTVLRRVTAILTDPDAAVPDVLRQTIALVVDEVHALEEKIAGVDRQLKQIAGVHPVATQLQTIPGVGVLTATALVGSVGHIHAFRRGRDFASWLGLTPRESSTGARRYLGRISKRGDIHLRCLLAHGARAVLRVALQLAERAPDRLTRLQQWAVSIATNRGRHKAVIAVANKLARIVWAVWHYDVAFEAQPRVA

SEQ ID NO: 297801 - protein, 344 aa, unidentified
MKITTIGLDLAKNVFQVHGVNEHGVAVLRKQLKRNQVAAFFANLQPCLIGVEACGGAHYWAAKLTALGHQVKMMAPQFVKPYVKTNKNDSLDAEAICEAVARPNMRFVPVKNPEQQSVLTLHTARESFVHARTAQANQIRGLMMEFGIVVPQGIRHVYARVPDLIEDASNELPGRFRLLIQRLLDHLKELDRQVGELEREIEQWHRSSEVSKRLETIPGIGPITASALVASAGDPSNFKNARQFAAWIGLVPNQDSSGGKTHLLGISKRGNVYLRTLLIHGGRALVQLARTRADRAGTWLGKLVTRRHHNVAAVAMANKNARLAWALLSSGKAYEPGHVPMRTE

SEQ ID NO: 297802 - protein, 348 aa, unidentified
MFQLAVADEHWRVVETQRLNRTQFERWFVNREVGLVIMEACGSAHHWGRWLNRLGIEVRLLPAQYIRAYVKRNKTDAADAAALLEAARSSDIRPVRVKSVEQQALQGMHRIRSLWMGTRTSRINALRGFCREFGIAIPVGARTGVEAISRVLADPNTAVPDLIRGTARLLVEEIRLLEARIAQLERELATLARLSPACTTLLSIPGIGLLTATALVAATSGDVSHFKDARHFSSWFGLTPKEYSSGNSRYLGHISKKGDRYLRMLLTHGARSVLRASKVAQEAGREVCGVRRWALDVQSRSNHNKAACALANKLARICYATLRDKEPFGESTVRLNKKVNRESFVMPA

SEQ ID NO: 297803 - protein, 373 aa, unidentified
MPKYSTAFGMDVHLRSTTVCALDADTGEAVTRRFPGNPWGEIAGWMDGFPGPSLAAYESGHLGFAPQRELAGLGVECAVAAVSKIPRSAADSASKNDRNDAARMAKAILAHDISPVWVPSPEVEGIRDLAGAYDGATARLATAKQRLLAFLAKRGFVYGGTTPAGNPRKYWTYDFLRWLDKVRPEDDGGVRTLAALRNEVEAAAEARADLLSEYRAAVDASPIAAEVAALQSIKGCAFALAAAFSAEVGDFTRFRSGRQVTAYFGLAPSQRSSGDSVRLGGISGAGNALVRKLAVEGSWCYAAARHQPKLMPRDTGVPLEIRMHGRKGSERLLRRREEMLARGMPAAKANAATAAELVRWLWALGMMCREGAE

SEQ ID NO: 297804 - protein, 430 aa, unidentified
MTKPQLTPTQGILVAIDIGKTRNEVLIEIPGQARRRRLTVLNTRADYDRLIDLLSGLGQPVTCAFEATGNYHRPLAWRLLQAGFTVRLISSLALARTREALHNGWDKNDPKDAQVALHMLRIGASQHYHDPLAAGLNDIQEVSKTHEAISKAKTEVLHRILTHHLPLYFPEIGRFRHNSRSDWFFAFLDRFPTPGSITALSKEAFIAAAWGVVGRKVAKERLLGDIYETARASIGLPIPIDAPAVRLFRLVIAEARSLIEQRNALEAMAIELLHESPDYKLLCRIPGVGPITALTILAEAGDLRRFGHHRQFLKFCGLDLATHQSGAFRGQTKLSKYGNARLRRALWLAGQVAIRQKENSFRDKFERTIARDRHKANLRRKALTAITAKMARVVHAIIKSGADYRPFVEGPVPGGRTSLSMGREGATATL

SEQ ID NO: 297805 - protein, 412 aa, unidentified
MELLYQRCVGLDVHKETVVAAVRLAVDDKVVTEVKTFATTTQGLLCLSDWLAENGCTHVAMEATGVYWKPVWHVLEDGEVELVLANASHVKNVPGRKTDVSDAAWLAELLAHGLIRASFVPDGQTQELRALLRTRKQLVREKTRHTQRIHKTLEDANIKLDAVLSNVLGKSGRAMLDALIAGESDPARLAALAHAGVKCPQDKLREALRGRVTRHHRFLLQLHLRQIDALDAAIATIDQEIEGSLAPFRTAVELVSTIPGVSTLSAQVIVSEIGTDMSRFPTAGHLLSWAGLCPRNDESAGKRRSTRLRKGAAWLKTVLVQCAWAASRKKASYLQAQFLRLKGRRGPQKAVCAVAASILTAVYHMLKNGTLYHDLGPDHFHRRSKTTQTQRLVRRLEHLGYAVDIKPLPTAA

SEQ ID NO: 297806 - protein, 343 aa, unidentified
MQTITTIGLDIAKSVFQVHGVDANGQVVIRRQLKRRYILAFFQKLPPCLVGIEACASSHHWSRELQALGHTVRLMPPAYVKPYVKRHKNDATDAEAICEAVSRPNMRFVATKTPGQQSCLTLHRTRHLFIRQQTSVINAIRAHLAEFGIVAPVGRHGVEQLLQVVADKSDKRLPEVARTCVAALGAQLQTLKAKILEFDRLIIAWHRSSETSRRLDDIPGVGPALATALVASIADPNAFRSGRDFSAWIGVVPKQNSSGGKDRLGSISKRGDRYLRGLFVAGALAVIRYAKIYGTKHRPWLTALLARRPTKVAAIALANKIARMAWAMMAKGERYKEPVALAV

SEQ ID NO: 297807 - protein, 318 aa, unidentified
MSHGYDKFVGIDVSKDALDVHGLPDGSPSRFDNTAAGRAKLLSLLPPAGACLSVVEATGGYERDLVAEAVTAGHHIAVVNPRQVRDFAKALGLLAKTDRIDASVIARFAETTRPVPKGYDERQEQLRELIVRRRQLLDHRTAEKNRSEMAHSSLVRKSVLKLIETLNKDIQRIEKAILQLVESNDDWRERFEKLKGVPGVGGQTAATLMAELPELGKLNRQQVAALVGVAPFNRDSGQFRGRRAIWGGRQSVRNALYMAALSAKKHNPVIREFAARLMAKGKPPKLVLTACMRKLLIILNAMLQSGDSWSPRVATLTP

SEQ ID NO: 297808 - protein, 338 aa, unidentified
MSIVRIGIDPSKSTFHVHAVDNEERVVVQRMMSRAQLRHFLAMTPPCSVATESRGSAFHWARYATQCGHLTKIVASQFVKPYVKSNKNDFNDAAAICEAASRPSMRFVPTKSIEQQDIQALHRVRTRRVAERTALGNQIRGLLLEYGVPIGLSLITLRQRLPAILDDEQNELTPRARSLFRELYDELLDLEGKIAYVERKINQIFKASEPCQRLAQIQGVGPLTSTALVAAVGDARVFKNGRHMAAWLGLVPRQHSTGGKARLLGISKRGDRYLRTLLIHGARSALRVMGRKSDRRSRWAIDVEKRRGANIATVALANKTARIAWAMLAHDENYRAAV

SEQ ID NO: 297809 - protein, 438 aa, unidentified
MAFLRQPPCQQLGRAKGYAMEDVVEYCAGLDVHRDTVVATVRYPEGNRRCSTTKTFGTDTAELIALGDWLVERKVTRVGLESTGVYWKPVFYLLEDRIPQVWLLNAQHLKNVPGRKSDVADSAWIAQLVEYGLVRPSFVPPPQIRRLRDFTRHRRVLSEERTRMVQRLEKVLQDAGIKLTSVASTVLSKSGRAMLEAMLAGQSDPAALAELAKGRMRSKIPQLIDALRGNFRIDHHGVLVAQILAQVDFLDRQLADIDEHIAAFVTDLEPVIERVQTIPGVARKCAIGMIAEIGVDMTVFPTAAHLASWAGICPGNNASGGKARSGHTRRGPIALKTVLTEAAQAAGRTKNTYLGARYHAIRGRRGTFKAVGAIRHDILIAYWHIVSADANTADVSASYRELGPDWITRRHSREYQIAKLAKQIEKLGATVTVTLAAA

SEQ ID NO: 297810 - protein, 363 aa, unidentified
MIVIGADTHKSSHTFAAVDAATGKLVAARTVAADEAGQRAALSWARRLGAERVWAIEDCRHVSGRLERALVGVGERAVRVAPKLMGESRRGERRPGKSDEIDALAVARAAVREGVETLPSAYLDEAAMEIRLLVDHRDGLVAERTRAQNRLRWQLLELCPELEASIPAGALDRDCWLDRIVRALAKRSPTARVRVAREEVRRIRALTRSARALERELAVLVRAHRPGLLEERGCGVLTAATFIARTAGAERFPTDGHFARQAGAAPIPASSGRRDRVRLNPGGDRQLNCALHRIAVTRARIDPATRAYLQRKQAEGKSRTEALRCLKRHLARRIWKLLQAPPEAASSRSALRIEAPISAPCLT

SEQ ID NO: 297811 - protein, 430 aa, unidentified
MRSTKKTKQNEEMIAAYIGLDWADKEHEVTMLVVETGLVESCKLKQESEALAEWVQSLLRRFPGRKVAIAVEQRKGALINALMIYDFLILYPVNPKTLARFREAFNTSGAKSDPADSELLLDLIRLHRDKLRAWVPEDADTRLLQMLVQDRRELVDDVTVLTNRLKSTLKQYFPQALDWAGDLSSRQALDFLTRWPTLESIRKAGAVAVEKFYHCHSVRNKEKIEQRVKAIKEARALTTDRAILTASRMKALAIVRQLGALVKSIAEMEARIQELFEKHPDHEVFSSFPCAKKVLGPRLLAAFGRDRSRYEAALDLQSLSGIAPVTRSSGKSKTIHKRLACPKFLRQTFHEYAAQSIKKAGWARVYYRAHRDKGVKHHAAVRALAYKWIRIMFKCWQEQEPYNEAKYVASLKRRSSPLVPGLLPAPNALV

SEQ ID NO: 297812 - protein, 356 aa, unidentified
MNEGSCVGLDVHARSVVAGVIDMGSGEVRSLRVPPGNEGTVAWLKTLPAPVRVVYEAGPTGYGLARGCAEAGISCVVAAPSKIRPAADRVKTDRRDAERLARLLRLGEITPVRVPGPEEEAARDLVRAREDARGDLMRARHRLSKLLLRHGVVYEATAWTRAHDAWLRRNRFGGGPLAIVFDECYARMLDAKTRRDSLDAAIAELAASEPYVDVVERLVCLRGVSTLTAFALTVELGDWNRFRPESLGAFLGLTPSENSSGERRRQGGITKAGNSHARRLLIEAAWHQRSAPRLSVTLERRRTGKSLAVRAQADRSARRLHGRWGALEARGKPRLIVVVAVARELAGHCWALATMK

SEQ ID NO: 297813 - protein, 364 aa, unidentified
MKKISTVKIKSQAASKKVTIGMDLGDRSSRYCMLDEEGVVIGEGSTPTTKAGMAKVFGAMVRCRIALETGCHSPWVSRQLQAFGHEVIVANARNVRLIGESTRKDDRLDARTLARLARIDPNLLSPVRHRGAEAQAHLAVIRARRVLVRARTMLVNAARGLTKSFGERLRKSGAGQVGPTLAAELSPEIRAAVSPLLAEVEALNQRIAAYDRKIEQLAKEHYPEVERLTKIKGVGTLIALTFVLTVDDPSRFQKSREVGCYMGLRPGRRNSGKSEPQLHISKEGDRYMRTLLVQGAHYILGPFGSDCDLRRWGLKMSERGGKNAKKRAIVAVARKLAVLLHKLWVSGEAYDPLRNSRQVAAHAA

SEQ ID NO: 297814 - protein, 359 aa, unidentified
MLMLAEPNGKIEDRPLDAVVGGDTHRDTHTLFMLSVAGVVITQIVIGNNADGFARALAWIADNAPGPNVLVGLEGSRSYGGGLCRALQAAGLVVVEVEQPRKADRRGRGKSDPIDAHLAALAALRMPSDRKVLPRTDGDREALRILLAARNEMSPARTRQINQLRALLLTGDDADRELCRGAMTKAHLDAIARRRAPRGGETTEQAVRRGEARRLAVAIRTADIDLLENNKQLTALVKKFAPTLLDQKGVGPFTAAQAIVSFSHRGRCRNEAAFAALAGVSPLLASSGQHDRHRLNRGGDRQLNRALHTIMLTRWRACPRTAAYIERRRKEGKTDREIRRCLKRYIARELFRELTAATA

SEQ ID NO: 297815 - protein, 272 aa, unidentified
MKNTTIAIDLAKSVFEVGISDRPGHVAQNHRLSRTEVSAFLAAQPPATVIMEACSSSHYWGRKFEGFGHDVKLLPPFYVRPYVQRSKTDRTDVKGMLEAWRNSDIRPVPIKTESQQQLTSLHRVRSTWMSARTMRMNSARGLLREFGIVFPVGASTLPDRVQLLIEDANAAVPMVLRDLLHELVLEIGELESRIKTVEKYLEALAAQTPVVERLRTIPGVGLLTSTALVGFVGDVARFPSGRHFAAYLGLTPRERSSGGRRRLGRISKQGDV

SEQ ID NO: 297816 - protein, 343 aa, unidentified
MDHFVGLDVSVKETSVCIVDEVGKIVREVKVASEPEALLAVLKKPAYRFKRIGLEAGPLSQWLFGALAEAELPVVCVETRHMQVVLKAQINKTDRNDARGIAQMIRAGLYRPVHVKTLRSQKLRMLLTHRKLLQSKAIAIENDLRGTLRNFGLKVGIAGTVKFEARIRELVENLPDLAALVEPLLIVRRVLHEQISVLHRRLLAIVRDDAVCRRLMTIPGVGPVVALTYRATIDVPARFKNSKAVGAVIGLTPSKYQSGEINRTGAISKCGDEMMRVMLYEAAQVMLTRTNKWSWLKAWAMKIARQRGMKKAIVALARRLAVIMHRVWVDGTEFRWTRKVVAA

SEQ ID NO: 297817 - protein, 333 aa, unidentified
MHYKNYVGIDVSKVTIDVFIHGSNQHRQFPNLTRGFDALLKWLALNLPDVQPGEIHFSFEHTGLYSLPLAAFLEANGLPYAMISALQIKRSLGLVRGKNDKIDAKRIAEYAYLYREKLSLTRLPSLEIIQLQSLLSLRDRLVRQRGGLEATQHEQARFLYKTHCAPDMSDVYEQVIATLKEQIRRIDETMKLIIAHHAELKQTFDLITGIKGVGKIVAVYLIVYTHNFTRFANWRKFACYAGIAPFENQSGSTYLGKTKVSCLANKQIKKMLHLAALSASRTDAELNAYFVKRVQGGKSKMATLNIIRNKVVSRVFAVAMRRTPFVDIAKFAA

SEQ ID NO: 297818 - protein, 356 aa, unidentified
MRDKPIAGIDVSKGWLDVCVAGGAGVERIANNAEAVAAWLDRIGPGLVAFEPTGGHERILIEGLRERGVSFIRVHPNDVIAFRKSRGIKAKSDPIDARLILAFLAEELSRRGWRSSVIGDDLLRALAARRRQLVEALHAERCRLALAAVAAVRHSLEAVITALRHSLDALEAEIAAVITGDHETARLAELLQTIHGIGPITAATLIADLPELGLLSAKQIAALVGLAPHTKRSGTMRYREPTGHGRAGLRQALFNAARAAIRHPSPFKDFYDRLVTQNRRPGKVALTAVMRKLLITANAVARDRQPWHGLRETTPPPVAVGTPGRPRGEPCAHRAGWVKAVAAPGAVARSASLDAA

SEQ ID NO: 297819 - protein, 348 aa, unidentified
MLNAVGIDVSKGRSTVAVLQPGGTVVRKPFTVIHSSCELKSLATYISSLSGETKVVMECTGRYHEPILKALNDAGLFVCAVNPHLIRDYNGNNSFRKVKSDPADAKKIASYTLDRWALLRQYSSMDTVRTQLKTLNAQMDFFNKQKIAARNNLISLLDMTYPGVNKLFESPVRSDGSEKWVDYASSFWHVDCVRKIGLKAFTERYRAFCKKHGYKCREGAPEELYNAAKDLVAVFPKEKAYKQIILAGIAQLRTASVNVEHVRKEMNELASTLPEYDTVLSMCGVGPTFGPQLIAEIGDITRFTHREALTAFAGVDPGVDESGDRRKLSNKASKYGPARLRKTLFLIM

SEQ ID NO: 297820 - protein, 375 aa, unidentified
MDASMTSPSVIHIAIELSVTSWVIAYRLPKIDKVKLDRVEAGDGEALLALISDLRKRAAARTGGEAIVASCFEAGRDGFWLHRLLTEHGVISHVVEPTSILVSRGARRAKTDRLDAQGLLRVLAAAFAGDRDICRMVRTPTVAEEDGKRPHREREYLVQERVRIENRMAALLATQGVMKRPSLRSWEADLEALRTGDGRRLPPFLKAELHRLRRRLLLTLEMIREVEAERERAMAVGNSPANETVKALRKLRGVGDNFAAVLAKEVFYRTFDNRRQIAAYLGLAPTPFQSGGMDRDRRINRAGNGRARKTMVQLAWLWLRYQPDSALAQWFRERVGELQGRTRRIAIIAMARKLLIAIWRFARFGIVPTGAIVAA

SEQ ID NO: 297821 - protein, 338 aa, unidentified
MKLYAAIDLHSNNSVLVILNEADRMVLQRRLPNKLECIREALCPYGEQIEGIAVESTYNWYWLVDGLMDAGYRVHLVNTAAVKQYEGLKYKEDVDDARWLAHLLRLGILPVGYICPKEARGVRDLMRKRNQWVGQRSRQILSIENMLSRDTGGRASANEIKRWQETDVDQLALAESSRLAVKSNLAVMHCLNEQIEKLEAEILKKAKLRPDYQGLLTVSGVGKVLALTIALETGEVSRFATVGDFSSYCRCVGSEHRSNGKKKGNGNVKNGNQYLAWAFVEAANFAVRYEPAVKRFYQRKCAKTMPVVAIKAVAHKLARACDHVMRDRVPFDVQRAFA

SEQ ID NO: 297822 - protein, 326 aa, unidentified
MQGKEASEQETKANSNVGIDVSKDWLDVHVLPADERLRVPNAGEGIRQLKRWLTCFDVALVVVEATGKWHRPVQRSLAASAIPVAVVDPFRVRMFAKAQGILAKTDRLDARVLAMFAAVMTPSVRPPASQALADLAELVTARTSAVEAQTALKNQRAAATVKFLQRQLHRRIERADKDIAALDAAILKRIEADQGLARRYVILTSIPSFGFVTAVTPIACLAELGSISAKQSGMLAGLAPIADQSGIRDGVRVIWGGRVRVRRILYLAALTAARFNADLKAFYQRLTASGKPPKVATIAVARKLVVLANILINQDRIWQPQPPKHA

SEQ ID NO: 297823 - protein, 338 aa, unidentified
MKLYGGIDLHSNNSVISLLDENDRLIYEQRLPNELDIILVELAPYREALVGLVVESTFNWYWLVDGLMETGYTVHLSNPAATKRYEGLKHTDDRHDARWLAHMLRLGILQQGYIYPKAERAVRDLLRKRAQLVRLQTSQILSIENLLSRNTGTRLNSNRIKRLSAEGLSELLELPEQALAAQSNLAVLKVVMAQIKVLEDQVKARVKPQGELKWIKTVAGVGEILGWTILLESGDIRRFSKVGRYASYCRCVQSKRLSNAKKKGENNRKNGNKYLGWAFVEAANFAVRYHDQVKRYYQRKRSRTNSIVAIKACAHKLARASYYVQRDQVAFDITKAFG

SEQ ID NO: 297824 - protein, 400 aa, unidentified
MHLTANISIPQKNFIAIDLHSDNAVICVRRNALNKAGELVGKNIWCGRVSIRDGLDNFIKVLVPHSQDFDHVAVVESTYNWYCLADAFEERGWLLRVADPSTVSQANLKSSDDRTDAQYLAERLRVGSLKHYLPLNYSSRALRDLCRYRMAMVQDCASLKIKLINLYRNQLSKNVRVADLLERCQPHMQPNYRFNSDILEEFKDPNIRLRVAFEISRIAMLEEMIEECNAEIQKQCKDQELVKLCKTIPGCGPVLSAVICTEISTMQRFKSAGDFVSYCRLCSTSKLSNGKSKGLGNAKNGNAYLSWAFTEVAQYASRNPVIREILQRLLRKYGGLRVKAIRTLAAKIARVTFYVLKNKQPFNAAKCFGMELTKSIVKKLPHKPLGEDAAVVLPAAAGQA

SEQ ID NO: 297825 - protein, 387 aa, unidentified
MIYIGIDIAKNTHFASVVNSDGEVLINPFSFDNSREGFNLLFSKIKDFQLNDCLIGLESTGHYGDNLVCFLFPKGFNICLINPIQTDSLRKSNIRKTKNDKIDTFLISKCLQLGSYSLLQEKDINIIKLRTLCRFRFDIIKTQTTLKTQLTGCLDLLFPELAKFFKGKLHLKTSYALLSKYSSPKQILSVRIDTLTKLLTTSSRGHYSYDEAVKLKHLSKESIGIDNPALEIQVQCIINQLALLKEQISSIDKNIREIMDLLNSNILSIPGISYTLGAIILSEIGNIHRFSNPSKLLAYAGLDPSVRQSGNFNATTTRISKRGSKHLRYAIHRASFLIVYNDKVFYEYYTTKRSKGKSHNNALGHVSNKLVRVIFKLLTENIPFNLS

SEQ ID NO: 297826 - protein, 410 aa, unidentified
MKIAGIDVHKKVLMVVVIDARVPEVKAARRRFVTLPSELLRLRIWLQEQGVEEAVMESTAQYWRSVWLELEPHMRLQLAQAFSNRAPRGRKHDFKDAERLVRRLIANELILSFVPNGEQRIWRSLTRMKVQLTRDQVRLQNQMECLLEEMRIKLSVVVSDLLGVSGLRILQALAAGETDAKKLAQLGDERLHCTEEQLVDALTGRVQPMHREMLALQLQRLELLNQQMAQLNRMIAQAMKSQQDAVIRLAEVPGLGVDSAQQIIAEVGAQASTFSSAAELTSWVGTCPGKQESAEQNHSSRSAKGNKYLRRVLNQAAHAAAAKKGSHFQIVFRRLLPRLGYRSAIWAVAHRLCRVVWKILHEGVRFIEYGPQVTPREKKKRAQMLARALRKLGYQVTITPMNQLTAEPAI

SEQ ID NO: 297827 - protein, 341 aa, unidentified
MEQATTIGLDIAKHVFQLHGAGAAGHVLFRKRITRVKLLSFLAAQPRCVVAMEACAGAHYWAREIAKLGHHVRLIAPAYVKPFIKRQKNDAADAEAICEAAQRPSMRFVPVKSEEQQANGIVFRARDLLVRQRTQCVNALRGHLMEYGYVFPKGIPHVETLVALVENPQSSLPDSVRVILKLLVDTFTALEAQIAVLDAEINQRSKSDPTARRLMTIPGVGPITSTAITALVPAAEGFPAGRDFAAWLGLTPLQKSTGGKQKLGAVSKRGERTIRRLLIIGASAVVQQASRRGAPRGSWLAQMLARKPKMLVTVALANKMARIIWALLVKGGTYRTPAVAA

SEQ ID NO: 297828 - protein, 350 aa, unidentified
MIIIGCDYHPAFQQIAFVDTDTGELQERRLQHREEAEKFYRDLAAQGMKVRVGMEASGHGRWFERLLAELNFELWIGDAAEIRAKRVRKQKTDRQDAQLILQLLLEDRFPQIWVASWENRDLRQLLWHRHRMVQARTRIMNQLQGVALNEGLRCKKRLWRAWGREQLEAFRLAPWASRRRHDLLELLDRLTPTIAELTQAIEQEVEKCPEAQRLQTHPGVGALTALAFVLIIGKAERFQCGKQIASYLGLVPLEKSSGNQRRLGHITKQGSSLLRFLLVEAAQVTARSLPEWRSKYYHLTMRRGRKIAKVAMARKLAVRLYWMMRKEWDYGQLTKFGSHAGKLGTGDGVK

SEQ ID NO: 297829 - protein, 367 aa, unidentified
MGNDNIVWIGMDTDAKKNQVALYRGWETQPAAEWEAGMDEKGIKRLIERLKREEGEVQCVYEAGPCGYELYRKLRKAGIGCDVIAPSLTPKKASDRVKTNRRDARNLGRLYRAGELTVIGVPDEKQEALRDLTRAREDVREDLTRRQHRLNRFLARQGCHYQDGEKWTQKHWAWIRKIRLEDSNAETVREESIRAVEQSQEQLKTYDAKIEENAGKPEYAKKVERYQTLRGVKTVTAMTIVAEVWDMRRYGRAPQFMGSTGLVSSERSTGDHQRRGKITKTGNAHLRRVLVEAAWHYRHRPIAGQAIKKRRQGQPEAVVSIAERADQRLNRKFRRMVDRYNKKPVIAAVAVARELAGFIWAIGQLQD

SEQ ID NO: 297830 - protein, 358 aa, unidentified
MKFYTQSHDFYCGIDLHARTMYLCILNKEGQIVLHRNMPSSPDALLTAIAPYRSNLVIGVECMFCWYWMADLCAREQIAFILGHALYMKAIHGGKAKNDKIDAHKIAGLMRGGMFPQAYVYPSEMRSTRDLLRRRMHLVRQRADCLAHIHNTNSQYNLPAIGQPLARKKHRGGVVERFTDSQAQKSVAVDFGLIEYLDNAIHDLELTITRLARQHDPVAFKLLLSVHGIGPTLALVMLYEIHLIARFPTVQNFASYSRLVKCSKESAGKLYGYSGKKIGNAFLKWAFSEAAVGFLRANPPAQKYHARLVRKHGKGKALSIIAHRLGRAVYHMLSSGKPFDNERFFKSTSSRAENRMSA

SEQ ID NO: 297831 - protein, 343 aa, unidentified
MHIKRIGLDLAKYVFEVHAVDAQDEVVLRKTLRRDSVAQFFAELEPCIVGMEACCGSHYWARVLTDLGHEVRLISPQFVKPYVKYNKNDRNDAEAICEAIGRPSMRFVPPKSAEQLEIQAVHRIRQRVVANRTRLVNQVRGLLGEHGVVVARDITRIRRALGEIADSHESAFGDIFIDMLRDMRDELAELDIRLASYNRRIKNLFRSNEMCQRIGQIEGVGLITATALVAAIGDKSCFKNGRQFAAWLGLVPKQHSSGGKARLLGISKRGDRYLRTLLIHGARAVLGKAAGKTDARSQWIGRMRERRHPNVVAVAIANKNARIIWSLLSRDQEYRPDHKMSFT

SEQ ID NO: 297832 - protein, 323 aa, unidentified
MVISVGIDVSKDKHDCFIVNSEGEVLTDVFTIQNTRDGFNFLLQKIQDCTTPQDKIKVGLEATGHYSYNLLGFLLDNGLPTYVLNPLRTNLYRKSLSLRKTKTDRVDARTIATMLLSDAGLKPYTDTAYHNEELKSLTRYRFDKVKERAKLKSSVSRLVCILFPELEKLVPSLHTASVYTLLEEFSGAKQIAAAHLTRLKTLLETASKGHYKRDMALEIRDAARNSIGSWMPAKSLELQHTIRLIRELDVEIAEIEEQIQSIMDELCSPITTIPGLGFRMAAMILAEVGDFTRFDSPDKLLAYAGMSPSTYQSGQLKNCYPHM

SEQ ID NO: 297833 - protein, 415 aa, unidentified
MKVVFPTCCGVDVHKTFVVATIITTPTDSLQPRYRKKRFSTFNSDLNRFADWLLEHNCLDVCMESTGKYWVPVFNILEKRGIRVVVANPKWVKAVKGNKDDTKDSKWIGDLFRIGLVKSSFIPALEIRILREFTRYRYKLVSMKSSEKNRFQNAFTVCNVALDSVVSDMFGKSATAITDYLTSDESFDPEHCVSLLRHSLKKKAEQVLESIEGFSIADEQKTRIRIVREHYDVIEKLIAKVDTCVNEMVAKYEGEINLLCTIPGIDRNSAVTIISEIGIDMIQFGSSKRLCCWAGLTPGNNESAGKKKSVRISRAGVYLKPALVQVAHAAVKDTNNPYYKLKYEKIAKRRGKKRVIIAIAGMILTAIYSMFCTGEVWNPVDLFKIDMPEHLKEQQLAKAIKQATRFLEKQGLSVA

SEQ ID NO: 297834 - protein, 415 aa, unidentified
MARVFEAVFERVAGLDVHKAQVTACVRVADAAGQRVAHLAEFSTTVTGLLALADWLKSYEVTHVAMEATGVYWLPVWHILEDDFQLTLCNARHVKNVPGRKTDVSDAQWLCQLMQAGLLRGSFVAPKPQRRLRALTRYRKTQIAERQREANRLHKALEDTGIKLDCVASDILGKSGRAMLDALVSGTTDPEVLAELAQGLLRKKLPALREALQGRFEPHHALIIGAILSHLDFLDEHIAQLSEAIETELGPTGQAAITLAATITGVAARTAEAMVAEIGTDMTVFPTAGHLASWAGRCPGNDQSAGKRRSGQRRNASKFLGIALQEAALAATRTKGSYLQAQYQRLRPRLGHRRALGAVQHSMLVAYWHMFTNGETYRELGGDYYQRRDPERLTKRLVARLQSLGHQVTLTPTTA

SEQ ID NO: 297835 - protein, 466 aa, unidentified
MQPNRRRSLGKPRVSPTVFDRLNPHVAGIDCGSGEHFVAVPPDRDPHPVQSFPTFTSDLLRLADWLAACRVTSVAMEATGVYWIPIYEILDARGFEVLLVNARHFKNVPGRKSDVSDCEWIRELHSVGLLRGSFRPTDAIVALRAYMRHRQTLVESAGTYTQRMQKALVQMNLQLPLVVSDITGVTGLRILRDIVAGQRDPQHLAAHRDARVRASTADIVAALTGHYRPEHLFVLQQNLELFDACQAQLAACDRAIDAHVQTLTAQRPPPVTPLPDPRVTKKPHDHQPRFEIRTPLFQLTGGVDLTQIDGVAPYTALKLISEIGLDMTRWPTEKHFTSWLSLAPKNKISGGRLLSSRTPPSANRAAAVLRMAAMSLGRTQTALGAFYRRLAARIGKPQAITATARKLAALVSRALKGELVYRDPGADAYDIQQRARVLRRLRQRAATLGFSLVNRDTGEILAPAIP

SEQ ID NO: 297836 - protein, 340 aa, unidentified
MEISTSFVGIDVSKQTLDVALALDATPKRVNTARFANTTQAFVPLLTWLQARSTAALHVCLEATGTYHDAVLAFLLEHGLCVSLLPSSRLREFRLSEGQRNKTDKQDAILLARYGQQKQPAAFVPVPSDLQWLRTQLARLRDLEKMHRQESNRLENSRMPETMCEQIRMHVQLLSQWEKEGCKQIRAWIKQQPPRQKAVELLRSIDGIGERTSWGLLSILGPDASRFSSAHQLVVYLGLDVARQDSGKRIKAGHLSKQGPSHLRQCLGMGAISAKRWDPDIARFAAELSGRGKKPLQVRVAIMRKLVHLAYGVLKHQKPYDPRLAWPTHEHRQQEELPAA

SEQ ID NO: 297837 - protein, 358 aa, unidentified
MSEITRVGVDLAKNVIQVHAVDATGKLVTNRALARDKFTAWCAQLPALCLIAMESCSGAHHWARKLVALGLDARIIAAHLVTPYRSQGKSGKNDANDAAAICEAASRPTMHFVTVKTASQQGMLSVHRLRESLKEERTACTNQIRGLLAEFGVVMAKSSKVLHGVLSEVIEDASNDLPGLARMTIERAQTRWKELDEHIDWCDERIAAHLQDDAQAKAATQLIGVGPVTASAVVATVGDFKQFKNGAQFGAWLGLTPRQNSSGGKNNLGSITKRGDMYVRSLLIQAAKSAVMTAHKRDDPISKWVHHLREKSGWQKAAVALANKNARILWAVMTKGKPFDARHISVKPVASAVVGAPA

SEQ ID NO: 297838 - protein, 472 aa, unidentified
MTVHWYRVKKTYAKPQGGFLAIGPRYPGVLSDDGLVVLFTHWATHSGPRSYERDSGMRRRAAGSRLQLNSHFRRKPMPTTTRHARTPALPQSMPVPPRVLYLALDLGQRHWTLAFTVGRGQRPRVRTIPGGDLARLTTELAAARRRFGLPPESPVVSCYEAGRDGFWVHRALLAHGVTNVVVDAASIEVPRRARRAKTDRLDARKLVTMLVRHAEGEREVWHVVHVPSEADEDRRHLERERQTLVAEHTGLVNRIQGLLATQGVVLTLRGDVPAQLAAVRRWDGTPLPPELRARLEREWARVTAVRAALRTLTARRHQRVTAATPAAADVPAVHLTRRLAALGAIGETTAWLLATEMFSWRAFRNRRQVGGFVGLTATPDQSGERVRELGLTRNGSVELRARVIELAWSWLRFQPGSALSQWYRRRYGSGTARLRRIGIVALARRLLIALWRYAIGGPLPAGAHQKGDAVAA

SEQ ID NO: 297839 - protein, 307 aa, unidentified
MSYIGIDVSKDTLEVHVRPEGTQWNTTNDKHGLITLVKTLKKCEVELIVMEATGGLEQEAADKLAKAGFGVAIVNPRQVKDFAKSTGKLAKSDKLDAGVIAHYAEAIKPEHRHVVDKVGQALKELVRRRRQVVDMIAAEKNRSVTAKGKALESIRSHIHWLQKELEEIDSDLEGEIKDQPEWKEKDEILRSVPGVGPVTSVVLLSSVTELGSVNRKEIAALAGLAPFNQDSGTMHGKRAVWGGRADVRSIMYMATLSAIRCNPKIKEFYDRLVKAGKAFKLAMTACSRKLLTILNKMIHDRTVWHTT

SEQ ID NO: 297840 - protein, 431 aa, unidentified
MDIVHPRVAGIDVHKKVVWVAVRVPGQRPGERAVTVKRFKTFWRPLRQMAAWLSGLGVTDAALESTGVYWWPVYHALAGAGIEVCVCNAAHMRNVPGRKRDITDCQWIAELHEHGLLRASFIPTGAVAELRARTRYRKKLIEQRTSEGQRLSKVLEDAGIKIDSVASRLLGVSGRAMIEALIAGERNPGRLAGLAKGVLRRKIEDLQMACDGRFTAAHAQMCRLHLDAHDHLTGTIAELDALVAEAAAPFAALIARLVTIPGIGQRTAEVIVAETGGDMARFTSAARLAAWAGLAPGDNESAGKRKHAAARKGDRQLRAAMVEAAWATARTRTRPGARFRRLARRFGKGHEKKAAVAVAHTLICIAWAVLSRGEDYAEAGEDYYEQRDRRDREHLIRHHQQALARLGCQVTLIPPGDGSPPSAGPDQQPAA

SEQ ID NO: 297841 - protein, 351 aa, unidentified
MPKKIATTPKLFIGIDMHKKSWKIHFCTDITVGSTKTMTPDSVALRKYVEQYYKQHQVFIAYEAGCCGFYAARSFIEFGWDTFVVNAADIPRPAKQIVVKTDKIDARNIALQLRAGNLKKITIPSVERECLRGLTRRRTQLVRRLRRIKSQIKALLLYHNLDIPDEYDNPTWSKNFIKWLHEFEWFYAPIELTFSSMLQELDFLIEQERTVSNSIRAYCRKHHKHDYMLLRSVPGIGPLNAAYILSEIGDIRRFNLFKKFASYVGMIPNVRNSGENTFVFGVNYRANMTVRSLLVEAAWVAIRVDPALLQYYRKHAKHNSKAAIFKVARKLLSRIYAVIKSNTEYQIGVLQ

SEQ ID NO: 297842 - protein, 458 aa, unidentified
MQRNRSKPKTQRTMPMVHANAAAIDIGATMHMAAVRADRTSEPVRSFGTFTTDLHRLVDWFTECGVETVVMESTSVYWIPIFELLDARGFTVFLVNARDAKHVPGRKTDVSDAQWLQRLHSYGLLRASFRPKGQIAELRAYMRQRERLLEYGASHIQHMQKALTEMNLQLHHVVADITGATGLRIIRAILAGERDPKVLARLRHYQCHASADTIEKALTGSYRSEHLFALEQALALYDVYQEKASACDIRIEAVLKELSIGRGPRSDPLPSPRRHRATQANGLAFDVRAALFALLGKDLTQINGLGPYLSLKLIAECGDDLSAWPSAKHFTSWLGLAPSNKISGGKVLSSRTRRCGNRASALLRLAAVTVGRTDTALGAFYRRLSARIGKTKAITATARKIAVLFYNALRHGMEYVDPGASFYETRYRARVVDNLHRRAKAFGFVLQPIEPTPSSVVS

SEQ ID NO: 297843 - protein, 391 aa, unidentified
MKPDGSKHSQFSVKNSLDGARELSKRIVSAMNSEALTDLIIGLEATSVYGEHITMFLREDASLASYNHKVFVLNPKQVNKFKAAYPDLPKNDYVDAFIIADALRFGRINKDIYTDDYRYVALRNLTRARYFAVQNLTREKQRFLNYLFMKYSSFTQEKVFSNTFGTTAISVFEEFDSPDELAYMDLHDLTDYIIKKGKNRFDDPEAVAKAIQKAARSSYRLPKTVNDSVNQVLSLSISSIRALESQIKEFDKAIAEQLALIPNTLQSIKGIGPVYAAGIVAEIGDINRFSNQAALAKYAGLAWTQHQSGNFESEYTRQIQSGNRYLKYYLCEAALSLVRCDTEYKRFYQLKYNEVNRYKHKRALALTARKFVRLVFRLLKDNRLYIPAVQK

SEQ ID NO: 297844 - protein, 404 aa, unidentified
MNAVGIDVSKGKSTVAVLRPYGEVVASPFDVAHTGSDLRALADSIKKLPGETKVVMEATGNYFEPIARYLHEQNIFVSVVNPVLISDFGGNTLRKPKTDKKDSVKIASYALTYWLDLKEYTPQEDLRKSLKLLNRQYQQSIKLKTMMNNNLISLLDLTFPGINKLFTSPSRESDGHEKWVDFVLKFPHCDMISKLTIKAFAKKYKKWSDKNSYHFTESSCEKIYAFAKECVSSISSDKAIVFSVVQAAKMLISATENCHAIQYEMNRVASQLPEYDTVMEMFGVGKAVGPQLIAEIGDPRRFHSRKAITAYFGYDSENNDSGQKTTRSNPITKKGAGALRRTLFIIMQVLLQTKPQDNPVYDFLIKKKSEGKHYYSYMNAAANKFLRIYYARVKEVLNVSEQMT

SEQ ID NO: 297845 - protein, 419 aa, unidentified
MEQITEDGEIVARVAALDVGKATLVACVRVPGEDKPGRLQEVRTFATTTAALLELRDWLVCLGVTLCVMEATSTYWKPPFYLLEDAVGCWVVNARDVKNVPGRAKTDKLDAIWLCKLAERGMLRPSFVPPPWQRELRDLCRYRRTLVQERTREKQRAEKLLEDTQIKLSSVISDIFGKSGRDMLEALISGQRNPAVLAELARGSMRGKKSVLQEALTGQFRDHHGWLLRMMLDRVDALTAQIDALTGRIDEVLAPFAHQVAQLDEIPGVGKTGAQELIAEIGVDMTRFPTSGHLVSWARFAPRARQSAGKAEPGTTGKGSPWIAGMLGEAVPGAGRTKTFLGSRYHRLARKRGKQRAIVATGRSILVIAYQLLSDPGAQFADLGPDWHDRIAPLRRKRQLIAELERLSGKKVTLQEAAA

SEQ ID NO: 297846 - protein, 318 aa, unidentified
MTEIVCGVDVSSQSLEARIGRQGASAGFPNTPAGIAALGSFCQAHQAGLVAMEATGGYERQAFALLSEQDLRVAILNPRAVRQFAQSMGSLEKTDRIDAGMIAWYAEVKQPPPACLAPASQQHLRALVTRLRQLTELRVAQLNQQRLVADRAVQASFQKLLTVLARQIRDLEQRIAALLEQDPLWRELDRAFRTIKGVADRTVARIMAEMPEIGALSHKTISKLAGVAPLANDSGLHQGKRRVRGGRAAVRDILFIVASVVGRYEPDFIAFQKRLRAAGKPPKVVRIALAHKLLIRLNAKAREVRARFAASNQLASQS

SEQ ID NO: 297847 - protein, 311 aa, unidentified
MEHACFVGIDVSQTHLDVHVRPTGDSFRVNHDDTGVGTLLERVRPLAPTVLVLEATGGYEVPVAATLASAGLPVAVVNPRQIRDFARATGQLAKTDTLDARVIALFAEAVRPAARPVPDEQAQALGELIARRRQLVEMLGAEHNRRRLLRDRRLQRHLDAHIAWLEEALRRLDHDLTPLIRSTPVWRETDDLLRSVPGIGPVTACTLIADLPELGRLDRRRIAALAGLAPFARDSGAFRGRRMIVGGRGHIRRVLYMATLTAIKHNPAIRTFYLRLRAAGRPGKVALTAAMRKLLTVLNAMLRDRRPWRPA

SEQ ID NO: 297848 - protein, 320 aa, unidentified
MKHKVGKDNTLARFIGIDVSKQWLDVATLPERETRRFSNDGAGQEQLGAWLVQLAPELIVMEATGGFETRVATVLAAEGLALAVVNPRHVRDFARAFGILAKTDRIDASVLATFAEKVHPPVRPLPDEDRRELIDLVDRRRQLVTMRAEEKTRLSQATASARQDIKEHIEWLDERLRRLDIDLTAKLRSSSLWKAKEEILISVPGVGRVTVLTLLARLPELGALNRRAIAALTGVAPFARDSGQHRGRRMIWGGRADVRSVLYMAAVSAARINPVIKSFYLRLKQAGKPAKVALTACMRKLLTILNTMLRNNQSWHAPTT

SEQ ID NO: 297849 - protein, 424 aa, unidentified
MKFKMQDKQNQLIERISDKHLVVGVDIAQELHVARAVNFRGIIVGDPLTFENDEEGFARLLQWINQLKTLKGFTSTIIGMEPTGHYWINLSKWLYDQDIEAVTVNPHLVKKNKENRDNSRSKSDKKDALVIADMVKNGYYSFIRPTSEAFEKLRVLMSNRDMTVKRLVSAINQINRWVDIVFPELRQVFKDVKGKGAMATLRLFPTPVELRSMKAPDVVVGWKTQMKRQPGLIKAQVLIELAKHSVGTRQALDAYKLHLEQLIEEFDLATAQLKRVENEVTEVLKRIPFAKKLLAIKGISEIALAGILGESGDLSGFAHGNSLLRHAGLHLAEASSGKWKGQIVLSKRGRSRLRRFLYLATMSLVMNNPDFKELHANNVKVKKMKKMKSIMKLIHKFARVIVGMARKNDSYRPEKVQPIMSMAA

SEQ ID NO: 297850 - protein, 364 aa, unidentified
MKIVGCDLHARQQSIAMVDTETGVLTEKVLKHEGNAVREFYAALEGPVVVGIEATGAMQWFLELLEQLGIECRVGHPAKIRAAETRKQKHDRRDAEVILDLLLMKDRFPEIGMPSTEQRDLRTLLRDRHQGVKMRTRLQHTLQAIALNHALREGRALWTAAGRRSLQDLTLPKYTAQRRDELLRLYTQLDKRIQQLDKQVETEARQRPQARRLLTHPGVGPVTALATEVFLGDPHRFAGAHQVASYIGMIPCEHSSGKRQRLGKLSKEGNSLLRYLWIEATLHAAVKDPELKRFYRRKLVQKGMGKARVATARKLGIRLWIMLRDEIDYEEFCRRGKLPQKGKAHAGMPDYNSGPARAVTGSTE

SEQ ID NO: 297851 - protein, 478 aa, unidentified
MEQQGGQSGPRRLVGIDLGIASRHSVRVLEADGLVVCRTSCVPTTESLTLTERAALAGAPEGTRLAVVFEPTGPAWMPIAVFFARRGHDVYRVSSAKAADLRRFLRRHAKSNGIDAETLARIPLADPAGLHRLELPGADAAALDRRVRACDRLTSAASEHKVRIKDLVRQLLPMTPLTGDLGKADLAVLEQFADPRALLAAGAAELTRLITSASGHQQGTERALQWRAAAAAAIDLYGDHPAVPFEELAAEVATEVRLLQAIGAELAVHAAAREQHYRQVDPAQLARSLPGFAEISAPVLVAIMGRPGRFRNGTKFKSYAGLAPKASETGETDRKGQSMSKAGPSLLRATLFRAADTARRQDPQLARIYYLQMTERGATHLKACCVVAGHLAERAWTVLNRGTPYVICDNNGNPVTAQEAKRIIAERWTVPEEVRKRRRSRKQAGKAPQAATTRPDKRGDLPRPRSSRPHHKAVNPVT

SEQ ID NO: 297852 - protein, 331 aa, unidentified
MTNATHDSDVDSRPVDYIGVDMAKARFEWGVHGARSTQSATNDAAGFEALLADLRQRRVGLIVIEATGGLEHALASRLLQLGLPVAVVNPRAAREFARSMGHLAKTDAIDALALAHYAHTLAHKANQAGVLLTPLPAHLELLQAMVLRRQQLIAMRTAETNRRGGAMRVLRQSIDAVIKTLNKQINSLDKDIGAHLDKHFKELDQRFEDIKGVGPNTCAAVMAFMPELGQVNGARAAKLAGLAPLNNDSGNMRGKRSTWGGRSIVRCALYMATLSAVQHNPVIKTFYLRLLAAGKPKKVALTACAHKLLRILNAMARTGQPWNESLHAINP

SEQ ID NO: 297853 - protein, 346 aa, unidentified
MILIGCDYHPSWQQICWLDTVTGETGEKKLEHGSGEAERFYRQLPAPALIGMESTGNCQWFVEMATTQGHDVWIGDAAKIRASEVRAQKHDRRDAALILKLLMEGRFPRIWTPSGQEKDLRQLLIHRYKLVRIRAQVKTELQHLAMNQGVTRKRKLWSKAGEKVLRELPLKPWASRRREDLFKVRGMLDEQIAPLDQAAAEAAEKNEKARLLMTQPGVGPITSLAFVLTMGDVSRFQRGKQVASYLGLIPREYSSGGKQRLGPISKQGNRFLRMLLVEAAQGAVRCDPGFRNEYLHRCHTKAKGVAKVAAARKLAIRLYWMLRTNTGYPEVVRVESSSRVALVSAS

SEQ ID NO: 297854 - protein, 365 aa, unidentified
MKDPIQQSVGIDIAKESFTACVCQRDQSNGTQLSPVADFKNSKSGFNQLVKWSRKLTQSSSSVVFVMEATGNHYENLAHHLYNLKMNVSVQLPNKITHYAKSLNIKTKTDAVDARVIAKLGVERKLSAWRPPRTIFKQLKELTRLYSELMKEKTVFLNRLDSIKSGYKPQPFIIKTNKKLIKALTKQIEVCVEEIEKLVQSDEWLWSKVQKVITIKGVGLTSAAIVLAETQGFEFVNNIRQLTSYAGLDVVRRESGTSVMGRTRISKKGNSRIRAALYFPALVAVQHNEDLRRKYHRIKSGKPSKMIGITAIQRRILILMYTLWKKDEEFIDNYETESVSKAGSSENTLPAQDELHPNRTKLSFV

SEQ ID NO: 297855 - protein, 456 aa, unidentified
MVSSSQSEAQFQTIHPNAAGIDIGADRHWVSVPPGRDQECIRSFGCFTPELNALADWLKQCGIETVAMESTGVYWIPLFQILETRGFEVHLVNAHHVKTVPGRKSDVLDCQWLQRLHSYGLLAGSFRPNDQVCQLRSYIRYRDTLVTSASTHVLRMQKALTEMNVQLHRVISDITGSTGMRILRAIVAGERNPEALAAMRDTRIKASQSEIAAALTGDYRTEQVFILQQELHLYDTYQRQIKACDVEIERLLNDFTDQVDMDASPPPKSTQRRTKKPGSNTPEFDLHTHLYRMSGVDFTQVPGLGTLNVLIILSEVGLDSSRFPSAKHFTSWLGLCPGNRITGGKVKSSKTRPVANRAAHAFRMAAQAVSRSQSAVGAFYRRMKSRLGGPKAITATAHKLARIFYQLWARKQAYVDPSLEVYEQQYKARTLKHLQRKAQALGFELVPQPAAHADVS

SEQ ID NO: 297856 - protein, 353 aa, unidentified
MIHIGIDLHSRNMTLVAINDNGKFLAEEKMTNTPLNLGRFFEQFNQPIQAVVECTSYWYWVADWCTEHDIPLTLAHAKMLKAISYAKVKTDAVDARTLAELLRVGLIPEAHQCRRDQRDLRELTRGRLRMIERRSSLQSSLWQLAAKYNVIVQDVGWRYLDRLGNFLQQQLPEVAWMEAQLLLDQIRLTQNHIIALEQAIEQQTGFHQDVERLKVLPGFGLVCAWTVVAEIGDIARFPSDKQFVSYCRLVPGSKDSGGKHRHRSKNKDGNRYLRIAFNQAAIVAYRDYPVVKEHFKKVKRRSGKHVARTVVGKELARIVWQMLSKGEEYKGYKGRMTKITTQNYWPQPISPGA

SEQ ID NO: 297857 - protein, 345 aa, unidentified
MTQYKRIAIDTSKAVFTLHGIDQQDRPVLRINLRRAQVIPFFAKLPPAEIAMEACGGAHHWARELTALGHEVRLIPPQYVKPYVKRAKNDRNDAEAICEAAGRPGMHFVPVKSVTQQAQGMVLKVRESLVGQRTLLVNTLRGHAAEFGVIAGKGLSKIGPLLAAIEQEAAIPSEAKDMAALLGQQIADLDTRIKEIEVKLTAAHKANAVSRRLATIPGVGPVTALTLAIEIDPAAFESGRHLAAWAGLTPKEHSTGGKQRMGGISRAGNERLRVLLVTGATSVIKAAMQPGSQQMTDWLRAMLLRKPRKLVAVALANKMARVAWALMTRGEVYRRSVTTTGVAVA

SEQ ID NO: 297858 - protein, 352 aa, unidentified
MERYVGLDSHARSCTLGVMSASGQRLKSLVVETNGSALVEAVRGIAGRVHVCLEEGTQSAWLYELLRPHVAEVVVAMAPERKGPKDDQRDAWARANELRTGSIETRVYKAPEHLAGLRNAVRAYGFAVTDVVRAKNRLKAVFLSRGMSADASVYDVKKRPEWLNKLSSPHRELAEWLGRQLDQVEPLRDEAQRWLLTEAKRHPIMRKLATAPGMGPIRTAQVVAIVATPERFRTRRQFWSYSGLGIVTRSSADWVQDRNGKWARSQIAQTRGLSRKRHPRLKSVFKGAATTVIAQLPDDPLHGDYERMLQSGIKPPLAKLTLARKIAAMVLSMWKHQEVYDPKRHHPSPDQP

SEQ ID NO: 297859 - protein, 418 aa, unidentified
MIPAVIERCAGIDVGKKFLIVCVLTGPANEKPTAEVRKFGTVRAELERLREWLKSEGCTHVVMESTGSYWKSPLNVLEDDPEYRLQIVLANPQQVKAVTGHKTDPHDASWLAHLLRHGMIRPSFIPARPLRELRDLTRRRKQMIRAAADERNRVQQVLEDANVKIGDVLSDVFGLSGQRMLEALVAGESSACEIAQLARGHARKKIADLTAALEGHQMRDAHRFLITHAMRHMAFLAEEIEALDQEIERRIAGGELDQAYQLLQTIPGIRTQAAGTLLAEGGPDMKQFPTAGNFSSWSGAAPGNNESAGKRKRSPTLRGNPHMKTALVESAWSASRTNGSEFQDRYQRLQPRLGHKRAIVAVAHLLAIRIYEVLDSGLPYQNCRARPSPASVRRVVRHHSRRLKHLHRWLADPLRKDA

SEQ ID NO: 297860 - protein, 304 aa, unidentified
MAKPIEPIRIGIDVSKAELVIARSDSKSLEKIANTPRAISRWLKTLPCGTPLAFEATGAYHRTLASLAHQAGFALYLLDGYRLNRYRDGIGNRAKTDPADARLILRYLSKELSELKPWVPPHEAFYRIQSLLRRRASLVHTRVALTQSLGDVPELKNASKRLSNNIKDIERLIERRLKEAMAEVGWRPDAQRCKAIEGIGDLTSVALANTFHRGEFKSSDAFIAYLGMDVRVRDSGKQVGRRKLTKKGDPELRRLLYNAAMSARRTKAWAGQYETYLSQGLKTTQALVKLARKLARIAFALMKN

SEQ ID NO: 297861 - protein, 425 aa, unidentified
MEVTDETDQLVARVAALDIGKASLMACIRVPGERDGSRRRQEVKEYATTTGALLRLADRLRELGVTRVAMEATSDYWKPVFYLLEAEGFQCWLLNATHVKNVPGRPKTDKLDAVWLAKVVERGMCAPSFVPPEPIRRLRDLTRYRRSLIRDRTREKQRLEKLLEDAQIKLSVVASDTFGVSGRAILAALIAGQRDPAVLAELARGRLRSKISQLREALTGHFQDHHALLCAKMLDRVDAITADITDVSTAIEAAIRPYQAQVTQLDEVTGIGVTCAQELIAELGVDMSVFPTAAHLASWARFAPRANQSAGKTKPATTGKGNPWLASTLGEITAVLARSDTFLGERYRRLSRRRGKLRAIVATGNSILTVVWHLLNDPDARYHDLGANFHDTRYHQRHQHNLITQLERITGQQVTLTTRDQPAAA

SEQ ID NO: 297862 - protein, 367 aa, unidentified
MKKVSTAATKQSRNISQQKLIIGLDLGDRNCWYCVVDEAGQIQLEQRVRTSSKALQEVFGAMPRSRIALEIGTHSPWISRLLRELGHEVIVANARKVRLIGESRKKDDRMDAQTLARLARIDPELLYPVKHRSAQAQADLMMIRARAGLVRARTGLVNTARGLAKSYGERLRSCNVRNMNPEKAEGLSPELQRALEPLLACIESVSEQIREYNERIEDLAQASYPQTALLKQVKGMGTLIALTYMLTLEDPHRFGKSRDVGCYLGLQPGRRNSGKSEPQMHISKEGDPYLRTLLVQGAQHILGPFGIDCDLRRWGLKLAERGGKSGKKRAIVATARKLAVLLHHLWVSGEVYQPLHNSSRTTVAAAA

SEQ ID NO: 297863 - protein, 367 aa, unidentified
MEKSTKVFVGMDVHKESIDITLAEQDGEVRRLGQIGGDRGSLLRMVRKQQSQGGERVFVYEAGPCGFWIYREITALGERCMVVSPALIPRRAGDHVKTDRRDSERLASLARAGELAAIHVPDIRDEAIRDLVRGRDDAVIAQRRVRQQLKALLLRNDIRYVGKTSWTGAHRRWLAELKLPEPAQQITFEEYVDAIAVATGRIERLTRAIATEVIAWRFAPVVAALQALRGIQFVHAVTLIAELGDLTRFGSARQLMGYLGLVPRENSSGEHRRQGAITKAGNSYARRALVEAAWAYRHPARVTRIIATRQAGLPKAACDIAWRAQLRLSSKYRRMNVRHLNRNKIVMALARELSGFVWAIGQSVRPL

SEQ ID NO: 297864 - protein, 347 aa, unidentified
MSHTNIVTIGIDLGKNTFHVVGFDTTGAIILRKKRSRNQLEQSLANVPACLIGMEACSGAHHLGRKLEKLGHQVRLLPAQYVKPYLKGHKNDFRDAEAIAEATQRPTMRFVPLKSAEQLDLQALHRVRSRLVTQRTAVINQIRGFLLERGLPVRRGAAALRLALPQILSAPKDNLSPRVVQLIQDLGEDWRYLDRRVASMTKEIDELADQDPHCRRLMSAPGVGPIISSAMVAAIGTGDAFHKGRDFAAWLGLVPKQISTGDRTILGRISRRGNRYLRTLFIQGARAVLLRRQSWPRHGFGAWLEAAARRLHSNVLVVALAAKLARMAWSMLVNDRDYDANLLGRTA

SEQ ID NO: 297865 - protein, 359 aa, unidentified
MRTQINKLEFTGQNIYAGFDVHLKSWRVTIMTEYLTHKTFTQPPKPEILHQYLAKNFPGGTYHSAYEAGFCGYWIHNKLKSLGINSMVVNPADIPTTDKERDRKDDTRDSRKIARSLRNNELTPIYVPSLKTLEDRTLVRTRSMLVGDITRYKSRIKSFLYFHGIDIPESFANKKSCWSKCFIDWLENIEMTEKSGKEALNLHIATLKNLRISLLQITRTIREISKTEFYKEMMGLLISVPGVGFITAITILTELENINRFGNIDSLCGFIGLVPSKHSTGEKDRTGDITKRGHSVLRNALIESAWVAARLDPALMKSYISYCKRMEPNKAIIRIAKKLLSRISYVLKNKQPYVCAIVK

SEQ ID NO: 297866 - protein, 338 aa, unidentified
MPLYGGIDLHANNSVVVLLNEQDQVIYQRRFANHLPEILEPFALYQADIQGIVVESTYNWYWLVDGLMEAGYRVHLANPTAIQQYSGLKYTDDHSDARWLAHLLRLGVLPEGDIYPKAERAVRDVLRKRAHLVRQQTANVLSLQNIIVRHTGVRLSAKRIHALTVEELERLLPVPEHVLAVTSSLVVVHCLAQQITTLEKTVQKHLKHTSAYAQLQTVAGIGPILAQTIVLETGDIGRFPTVGNYASYCRCVGSTKISNGKRKGQGNVKNGNPYLAWAYMEAAQFAIRFNPMVQRFYQRKQAKSHLMIARKAVAHKLARACYYIMRDLVPFDVHKAFG

SEQ ID NO: 297867 - protein, 346 aa, unidentified
MRIIGCDYHPSWQQVCWVDTETGETEERKLVHASGEAERFYRQLPGPALIGMESTGNCQWFVEMARAAGHEVWVGDAAKIRAADPRQQKHDRRDAELILKLLLEGRFPRIWVPSGEEKDLRQLLIHRYKLVRIRAQVKNELQHLAMNQGVTRKRRLWSKAGEQVLRGLPLRPWSSRRREDLFRIREMLDAQIAPLDQAVAQSAENDERARLLMTQPGVGPVTALAYVLTMGDVHRFRRGKQVASYLGLIPREYSSGGHQRLGSISKQGNRFMRMLLVEAAQVAVRCDPQMRNEYLHRCHRKAKGVAKVAAARKLAIRLYWMLRTKQGYPEVVRVESSSRVPLASAS

SEQ ID NO: 297868 - protein, 435 aa, unidentified
MNGIDDIRLEQFLQLKKEIRGSEKYLIVGIDAAKEKHNAFFGTARGKTLVKNLVFDNALEGFQKLLAYVERIKVQYSLTAVVFGIEPTANYHKPLAEHLIKCGHMVVLVGGVAVKNNRQLLDGRWDKHDVKDAANVADLISQGKCLFYEYPLMTLRNVRILNALKRRLKKREHGISVCIRNNLLAQYFPELDRHYGPSETLAVVRECLDPSEIAGMEYDAFYRTVAPGRTTLAKDRRVGAIWREAVGSIGCTMGEAASFEAQVMVDSLKQLRQTIKSVENKLEDACLEFPEYTYLLSIPGFGPDISAKVLGAIGEPHRFTSAKQVLKMAGLDLCANRSGKKSNSAIPVISKQGKADLRYGLYQAALIASLKNKDFVAYFTNKLKGRAKEKGIGTKMRVKLAAKLLVIAWTLMKKNEFFDPKHLKQEDQDAQKKAA

SEQ ID NO: 297869 - protein, 477 aa, unidentified
MLDLRRAVGTEVVHRLGANKPAYKLDPEFLEHPRLSPRVVIGPGARFLEFLFTGLHADDATQEKVMELLHRRCCGLDVHKETVVACLRLVSNGKVTTEVRTFQTTTADLLRLSEWLAANDCTHVAMEATGVYWKPVWHILDDGEFELVLANAAHVKNVPGRKTDVNDATWLAELLAHGLIRASFVPDTQTQEMRNLLRTRKQLVREQSSHVLRVQKTLEDANIKLDSVLSDLMGKSGRAMIEALIVGETNPAKLASLADRRVKASPEELREALRGRVTKHHRFLLRLHLNQIDALDAAMATLDAQVAANLGPFRTAVDLIMSVPGIKNLGAQAIVSEIGIEMSRFPSDAHLISWAGICPRNDESAGKRRSNRLRKGAPWLKTTLVQCAWAAVKKKNSYLQAQFYRIKARRGPNKAIMAVAASILTAIYHMLKDGTMYQDLGRDHFDRRSTDQQKKSLVKRLADLGYAVEIKPLVASA

SEQ ID NO: 297870 - protein, 346 aa, unidentified
MQYTAFDAHKHYTWARVERPDGTLVREKKIPHDRGALQQFLADCEPGSPVAVETVGNWYWIIDEVEAAGCLPQLVHARKAKLMLGQVNKTDRLDARGLVRLQRTGTLPVVWIPPRELRDARELPRTRMVLVQQRTRLKNRIHATLDKYAIRLPEVSDLFGKRGRQELQTRVAELPPQTGFVLSRLLKQVDGLDREIETLEQRMGELFEVDKAIQLLMTLPGVGFILATVIRTEIGDVRRFARNEQLAAYAGTVPRVHESGGRRHYGPVRSDVNRYLKWAFGEAANGVCRHRRTHRQRHTTRLYERIAGRRGHQKAITAVARHLAEAAYWMLTKGEAYREPGSSTGA

SEQ ID NO: 297871 - protein, 345 aa, unidentified
MGSKLEQLLERPSRPFTPRAGPAWPARILEAGVIYHVKEQLVYLGVDIAKSYLDAAVGNEKRRFSNDAIGHRELIKWVKQLKAPVQVICEPSGGYERALVQGLARARVKISLVQANRVRQFARAAGILAKTDRIDAELLCEFGKVMRPQTVTAAKLEQEHLRELESQRRHLTHLLVMELNRGARVSDASVQRLNRSLINQIKKQIEQLDLLIKGHIDQSHQLSAKAAKLTSISGVGARTAALLLAQLPELGELNRREVAALVGVAPFNRDSGRMRGKRAIYGGRKPVRHGLYMAALVAAHHNPILRNFYLRLRAAGKPAKLALTATMRKLLIVLNSALKTDLRYA

SEQ ID NO: 297872 - protein, 424 aa, unidentified
MSLEFVFCTRFYEISAVDITLHILRKECMIMILVGIDIGKNQHTFSIIDKNTGEILSNPSFFPNNREGFLFLIKKLNTYSKSDLLIGMEDTGHYHFALLKHLLDSRYTVALINPTTTDLTRKLQGGITKNDPLDSLTICDVIGSNQRNKPYRITKVNRFDLYEQKQLTRHHHNLKEELNTYKNRLQKCIDIVFPEFNSLFRSKYGIVYMNVLKTFSSAEKIANSDIRTIRKCFEYNKRGKRISLSAEQLKAAAKTSIGMPSVAEEIQIRHLVCQIEMIEEQLSEIDKKIEEFSLQNNSPILSIPGISHFSGTSILAELGDICNYTKASQIIKFAGVAPYHYESSQFTAQHTAITKKGSRYLRKTLYQIILPVITHNSVFTAYYNKKLAEGKGHRCAQGHCIRKLLRIIYHLLSTGQTFNPALLI

SEQ ID NO: 297873 - protein, 429 aa, unidentified
MNYNTQNAKIASITEKTLIVGIDVGSETHYARAFNWRNYEYSKKPFAFSNDEAGFSSFKDWMDDIAEKHGMKVVIPGMEPTGHYWLNLGAYLQEQGMKPVHVNPHHVKKSKELDDNNPSKNDRKDPKTIAGLVNEGRFSYPYIPTGIYAEIRNLSNLRIQTQEEITRIKNRIARWFSIYFPEIKDVYRNPDAVSGLMVIKQAPLPCDIKELGVDGVNKIWRDARLKGAGIKRATTLVTAAEHSIGNTEAPRSARKEIRNLLNDYEIYKNRMDELMEEIKETLSEIPYIDKLMEINGIGIKTVSCVIAEVGDIGRFDNPKQVQKLAGYAIVADSSGKHNGESRISHRGRKRLRYALYEAAISVIGKNKEFKEIHSYYRTREKNPLKKMQSVIAVACKLIRIFYTILTKGVDYDGQRMLADIVRPEMQLAA

SEQ ID NO: 297874 - protein, 416 aa, unidentified
MKTYLLRDPNPVEPQKAPRPWRAEPVARPAPAAPRPGPALFLGLDVHNESIAVSLAPSESPEVRRYGIIGGQHDDVLKLLKKLSAAHPGVALQCCYEAGPRGYPLCRFIRQHGAECLIVAPSKVPRPPGDRVKTDRRDADQLARLFRAGELTGIYVPDPQDEAVRDLIRARYQVQKQQHRARQQLKMFLLRQNIRYAGTKPWTAKHLNFLATVKLPFAEQQFVFQEMVNVITEAGQRLERYEKEIASVVEGWRWEPVVRALMSLRGVALLTGATLVAELGDLHRFATAPQLMSYLGLCPGEHTSGETRKQGGITKLGNGIARKAMIEAAWNNSRAPRVSRTVLARQAGLPKAVTEAAWNAQTRLHQRYKHLTGVGRKKSQVAAAALGRELSGFVWAIGRMVKPRALEIEAAKPNAA

SEQ ID NO: 297875 - protein, 389 aa, unidentified
MVYVGIDVAKDKHDCFIVNSDGEVLYDVFTIQNDMDGFEDLLFKIKTASKDLSKVKVGLEATGHYSCNILGFLHNKGLTTIVINPLYTSLSRKSVSLRKTKTDKVDARTIASMIMSDVSLKPYSDTVYHNEDLKSLSRYRFDKVSDRSKLKQSVSRLVNILFPELEKLVSTLHAKAVYALLSEFPGAHQVASANLKHLTALLSTASKGHFGREKTNEIREAARRSISSYLPAKSLELRHTIKLIHELNAEIAEIETEIKKIMDSIDSPTLSVPGISYALGSVIVSEVGDFSRFDNPDKLLAFAGCSPSTYQSGQLYSTHAKMEKRGSKYLRWALLNAAKYVCKWEPTFAVYLRKKLAEGKHYNVAVSHAAKKLVRLLYHLETTGEKYIP

SEQ ID NO: 297876 - protein, 445 aa, unidentified
MGTSKPKIGRTKLEVMHPDAAGIDVGGSRHYAAVRSEAAEQPVKDFGCYTRNLHEMADWLHECGVKIVALESTGVYWIPLYEVLERRGFEVLLVNARHVRGVSGRKSDVLDCQWLQQLLSYGLLKGAFRPHDQMCELRELNRLRTRLLREQGRSVQHMQKALTLMNVQLTNAISDVAGVTGQKIVRAIVEGTRDPEELASYRDARIKASEEEIAASLQGNWRTEHIFALKVALATFDFCAQQLLQCEEQIDRAMQALQRFSSEPAKGKKRSKAKNAPKFDVRERLFKMCGVDLTRINGIDVSTAMTLVSEVGTDMSRFPSDKHFASWLGLCPGTYISGGKSLGSATKHSTNRATQALKQAAAALRTSQSALGAYFRRLCGRMDKAKAVTAAAHKLARLVYAMLTKGQEYTDQGQQYYEERYRERAVRQLQRRANKLGMLVVPAGA

SEQ ID NO: 297877 - protein, 376 aa, unidentified
MHALYIGLDVHKASITTGLAFAGTGPAQLHGSCTSDVDRFVAVLGQLLKTHGLTREQVKLCYEAGPCGFVLARHLLRLGYAVEVVAPSLIPTKPGERVKTDRRDARKLARLLRSGDLTAVHIPDVADEILRDLCRARTDAMDDHMRSRQRLSALLLRNGFHYQGKSAWTEAHMRYLRELVLQDPTQKLVLEEYLQGIDRAGERVHRLEEQMRLRLEGWGRRPLVEALQGLRGFQLVASMVVASEIGDFLRFGHPRSLMAYLGLVPSEHSSSNRRRQGAITKCGNSHVRWILVEAAHHYRLPPKVSKELAKRQEGLSRDVRELSWRAQHRLNRRFLKLTFRGVHYNKVIVAIARELAAFIWELARLVEHEQEARRMA

SEQ ID NO: 297878 - protein, 320 aa, unidentified
MTPECFVGIDVSKDRLDVALRPTGERFSVDNTDPGVERLIRRLVEVSPALIVLEATGRYHRLALGELLAAGLPAIAINPRQARDFARAIGVLAKTDRIDAAVLAEFADKIRPEVRTIADEDTQQLEAVCTRRRQLILMLTAEQNRYPIASKAVRPKIKKHIHWLEAELEDLDEELKTRIRSSPAWREKEDLLSSFKGVGKVTSHSMLAYLPELGRLDRRQIAAIVGVAPFNQDSGKRRGQRHIRGGRRRLRNVLYMATLVAIRHNPTIREFHRRLANAGKAPKVAIVACMRKLLTILNAMLRSKSRWQPDFPLVSQDSLS

SEQ ID NO: 297879 - protein, 422 aa, unidentified
MNMTSKSAEFAALIGIDWASQRHALCLYDCATGKRESSILEHTPEAIAQWARGLQERFRGNQIALCLEQTRGPLIYALLEYSFFVLYPINPATAARYRQAFKTSRAKDDPSDAQVCLEFLLHHREKLNPWLPNDGQTRELSCLLQHRRVAVDLRTLLTNMLRDALKSYYPQALELAGQDLFAPLGCQLLLKWPSLQELQKARKQSVRKFYYAHNCRRMDVIEKRLDAIAQMTPLCRDRALLEPAMVQVKMLARQLLQLGGALKEYDSKIEQLFAQHSDALIWKSFPGAGLSLAPRLTCAFGSQRSRYQSAAAIQQYSGTAPVTEKSGKNQHWVHRRWARPHFTHQSFFEYASQSVLHCHWAKLYLKEQMARGKAYPTAIRALAFKWQRIMFVCWRDRVPYDETTYLQSLKRRGSHLARTLNQ

SEQ ID NO: 297880 - protein, 365 aa, unidentified
MKKVSTVRTKQSRNISQQRLTIGLDLGDRNSWYCVLDEVGQIQLEQRVRTNAKALQEVFGTMPRSRIALEIGTHSPWISRLLKQWGHEVIVANARKVRLIGESRKKDDRLDAQTLARLARIDPELLYPVKHRSAQAQADLMMIRARAGLVRARTGLVNTARGLAKSYGERLRGCNVRNLNPEKAEGLSPQLQKALEPLLSAIEELSEQICEYNDRIEALAQASYPQVELLKQIKGVGTLIALTFLLTLEDPHRFRKSRDVGGYLGLQPGRRNSGQNEPQMHISKEGDPYLRTLLVQGAQHILGPFGIDCDLRRWGLKLAERGGRNAKKRAIVATARKLAVLLHHLWVSGEVYEPLHNNLTVVAAA

SEQ ID NO: 297881 - protein, 413 aa, unidentified
MDVMHPRCAGLDVHKKTVVAAVRIVEHGKVRAEVRTFETTTAGLIALAEWLSEHGVTAVAMEATGVYWKPVWHILSTAGSFELVLANAQHVKAVPGRKRDVSDAVWLADLQAHGLIRGSFVPPPEVAELRSLMRTRKQLVRERTSHTQRIQKTLEEANIKLDSVISDVLGQSGRAMLEAMIAGESDPKRLAELASPRIKASPETLMRALDGRQTEVHRVLLRIHLDQIEALDRSIAVIERRAEDRLDPFREAVELIVTIPGMGERSARAVLGETGIDMSRFPTEGQFMSWGCMVPRNDESAGKRRSSRLRPGGNWLKTTMVQCAWAAVRKTDGRFAALFARLKPRRGAGRAICAVAAEMLRTIYHMLKDGTFYEERRAEHRQATREQEAKRLIRRLARLGFAAEITPMASAAG

SEQ ID NO: 297882 - protein, 324 aa, unidentified
MIDGILGIDVCKNTLDVSISSYTKVRTKSFTNSPDGWRHLLDWLIAQKIQRVHACLESTGRYSLGIACALYEAGHVVSIINPAQIRDFVRTKLGRNKTDGVDASHIREYCELFKPSPWAPPSKAHRRLGELQTIRSGIIAGLTEWKNRKNSGIVDAEAQALADATISHFTSQLGAVDKAIALTIDNDCDLRSKRDLLLSISGVGETLAGVVLAELPGPDVLRSSAEVVAYAGLNPRQHQSGTSIDRATRISKIGNAVLRAALYMPALSAMRYNSAIVALVTRLKSRGRLKPKQIVVAAMRKLLVLCFGVLKTGRPFDAAIAMGG

SEQ ID NO: 297883 - protein, 336 aa, unidentified
MEHLAIDLGGRESQICVRSSDGQIVDERRCQTRALPGYLANRPRSRVVVETCSEAFGIADAALSAGHEVRVVPSTLARSLGVGARGLKTDRRDARALSEVSCRIDLPSVHVPSRQARQRKTMCGMREALVGARTKTINTVRGWLRAEGRRPRGGDITTFSARVRALCAEGALPTYVERQLRTIEALSKEITDADRELAATAKADPIARRLMTVPGVGPSTAVRFVAALDEISRFSGAHAVESYLGLVPGEYSSSERKRRTSITKAGPAALRWCLVQAAWAARRTRRKDPMQRWADEIEKRRGKRVAVLALARKLAGILYAIWRDGTEYEPRRSGTV

SEQ ID NO: 297884 - protein, 418 aa, unidentified
MTVFATIGEGIMIFVGDDWAEDHHDVWVMDADGRRLVFQRFDEGVEGVSGFHALVADFVSDPVEVVVGIETDRGLWVHALVGAGYQVYAINPKAAARYRDRHSISGAKSDRGDAKVLADLVRTDRHIHRPVAGDTPGVEGVKVIARAHQNLIWEKRRHTNRLRSFLREYYPAALETFTSLADRDTLAVLAVAPSPSKGARLTIPQIRAALKKGGRQRNLDRRAAEIQEGLRGEHLRTSDAVEAAFAATTRSAVAVITAITDEISRLEETLEASFGEHPDADIYLSMPGLGVVLGARVLGEFGDDPNRYTSAKSRRNYAATSPLTKASGKYKTVSARYVRNNYLYNPIIRWAFSSITTSDGCRAFYDERRAKGDRHYQALRALANRLVGILHGCVKHHTLYNEDTAWAHRQPAIENLAA

SEQ ID NO: 297885 - protein, 456 aa, unidentified
MASKKKKGARAPTELTPIHRRAAGIDIGATFHVVAVPPELEAEPVRTFRSFTADLNALGDWLVGCGITTVAMESTGIYWVPVFEMLEARGLDVVLVNARDAKTVPGRKTDVNDAQWIQQLHSYGLLRASFRPGAAIVALRAYLRHRERMLEYAAAHVQHMQKALMQMNLQLHHVVSDMTGVTGMKIVRAIIAGERDPKVLAAHRDRRCKASAATIREALTGHYRPEHVFALRQAVELYDTYQTKLQDCDAEIERGLRALPTVPAAAPPTAPVSRARGPQKNEPHFEIRPVLHALLGVDLTQIDGIGPYSALRIVAECGTDMTRWPTVKHFTSWLTLAPGSKISGGKVLSSRTRRSANRAAVLLRLAAVSVGRTNTALGAFFRRLAARIGKAKAVTATARKIAVLFYNTLRFGKAYVDPGADYYEERYRQRVIANLRHRADALGFTLVEGTGIVGAS

SEQ ID NO: 297886 - protein, 436 aa, unidentified
MEVRMVNTPSAGMNNEPVDCFIAIELSKSGWVVGFQTPLSDKTSRYQVKAGDANGLLELIERVRTRVARQLSRPIEMMSCYEAGYDGFWLHRVLEAHGIHNHVLDPGSLQVNRRARQPKTDRIDADRMVRALIRHLRGEPEACSVVRVPSIELEDAKRLHRERRRLIAERVQHVNRIKGLCATQGIYDYSPLRKDRLTRLDDLHTGDGRVLPPQLKAEIVRELKRLELVLEMIATVETERDAILTNPASTHVNAGKIKMLAKLKAIGPEFATTLVGEVYCREFVNRRKLGSYVGLGSSPFRSGSLDRDQGISKAGNPTARSVMIELAWTWLRYQPDSALSIWFRERVGTLKGRPRRIAIVAMARKLLVALWRYLETGLVPTGAVLKASSCATWVARAQWAPALDASSTVNQKHIALKIGVAMRSMPHYAPPLREIS

SEQ ID NO: 297887 - protein, 331 aa, unidentified
MEYGAIDLHKKESQVRIITADGAVIDRRILTTRDRLTAVFGGRARMPILIEASTESEWVAQHLESLGHEVIVADPNYGAMYARRSRRVKTDRRDAVALADACQHGNYRPAHRRSARQRIVQSMLNVRRELSDSRTRGISVARAITRAGGFRVRSGRAETFLERLAALELPASMTATLLPLRHVIDVLDDEIAIADDQFEKVAAEDPVTTRLMTVPHIGPITATAFVAALDDAARFDGAAQVTSYLGLALLVQAAWRISRSSDAKTAGLRAWADAITHRRGKKVAMVALARRLARLLFAMWRDQTEYQAKRVPMIRRPAATIRDGAAAAAVV

SEQ ID NO: 297888 - protein, 378 aa, unidentified
MPSETTVYVAGELSVSSWLVAARSAGAEKSRLHRIQGGDTTTLLALITKLRSRASTKLGLAVDVACCFEAGRDGFWLHRLLTAHGIAAYVLEPTSILVNRRARRAKTDRLDAEGMLRVLAAWLAGDRQVCSMVRVPTPEEEDAKRPHREREHLVQERLRIENRIEALLFTQGIRKRPSLRSWVRDVAELRTGDGRELPCLLRIELERLRRRLVLALELIHEVEAERAEALAATTDDKMTQKIAALQRLRGIGPNFAAVLVREVLYRSFANRRQLASYVGIAPMPYQSGGMDRDRSISRAGNPRARTTLIQLAWLWLRYQPGSALATWFRERVGMLQGRTRRISIVAMARKLLIALWRYVETGVMPEGVEIRAEADATA

SEQ ID NO: 297889 - protein, 378 aa, unidentified
MKRILKIGMDVHSTNYTLCAMEPVIGAEDRVFANVQVTPDYKNIILFIENLKQKLGLNDTYDIECGYEAGCLGYSLYNQLTQAGVKCVILAPTTMLTEQGQRIKTDSRDAHLIAQCLSYGGYHPVYIPTEQDDSVKEYLRMRDDHKKALKKIKQQIGTFCIRHGYYYEGTKWTIAHLKWLKKLELAPMYQETLDEYLASYEEQTAKIERFDARIEEIASQAEYVEKVKKLGCFLGIKTHTALSLIVETGDFTRFAKGNVYAAYLGLAPGEHSSAVKVNRLGITKAGNSHLRLLLVEAAGGICKGAIGHKSKALKQRQQGNSTEVIAYADKANSRLRSKYYRLIRHGKKRNVAVAAVARELACFVWGMMTDNINVIEAA

SEQ ID NO: 297890 - protein, 332 aa, unidentified
MSIIGCDLHSRYQVIAMLETETGEITTRRLEHEGGEVKGFYAGLGKPALIGIEATGYTQWFERLVAELGHELWVGDPAEIRARAVRRQKTDTRDAEQLLDLLLSKRFPRVWVPTPEERDFRQLLKHRDKLVKMQTSVRNQLHFLAMSQGVCRKKRLWSARGRQELEGLRLGPWASRRRQELLDLLDGLGPRIEQLDAAAKAEAARRAEAVGLMEQKGVGPVTALAFVLTVGPVERFATSRKLISYLGLNPREHSSGGHQRLGHISKQGNEMLRWLLVEAGHTAARLDPELRRVYQRLKFRRGGRVAKVAIARRLAVRLYWSLRRYAAASHVQ

SEQ ID NO: 297891 - protein, 360 aa, unidentified
MQRQITTLDFKGQNIFVGIDVHLKSWTVTILTEELTHKTFTQPACAETLCNYLTRNFPGGDYNSVYEAGFSGFWAHYKLKGMGINNIVTNPADVPTSQKEHLQKDDPTDSRKLARSLRSNELKAIFVPNPAILEDRSLVRMRATLVKDMTRFKQRIKSFLYFYGISYPPQFEKSVTHWSKRFMKWLEEEVSLQHDSGTQALKILIQEAEQQRKLLLEVLKKIRLLSRSEKYAENIALLRTIPGVGPITAITFLVEIEDIERFTNTDHFAGFVGLVPNRHSSGPKISDGEMTFRGQKTLKSLLVESSWIAARTDPALMMSYLGYVKRMEPNKAVVRIARKVLNRMYFVLKNKMEYVPGVVK

SEQ ID NO: 297892 - protein, 405 aa, unidentified
MYYVGIDVAKEKHYVCILDKDAEFAVKPFWIYSDILGLLELEKRLASVSLDRDDFIIGVESTGAFSENLYGHFTDSDYKVILLNSYQTAKYRDFSTMKKIKNDTIDAYVIAQLLSTGKYKSSHISNDDYHSLKVLGRLKSSLDRKIKTIKREISTVMATVNPEITKVFPNLFSKTGLETIKAYPTATMLQKATPKKLTKLFRHIKGNNFSEDKAKFLIELASSSVYTGRAQKSRALMIQTNIRILELYIQEKSKVESQINDLINNQIDNSPDSPIENLQTIDGVAIKTIATLLGECGDISRFESSKSFIGYLGLYPTQYQSGNSLSVGRLAKRGIPTAKHALYMAAVASVRHNTQLNKLFRDKVSSGKSKKEALIIVAKKLATIIYSICKYNKPYEPNRVFIPRK

SEQ ID NO: 297893 - protein, 409 aa, unidentified
MRIIGLDIHRAFAEAVAWDDGKLKRLGRVDMRRPLLEAFAKKLSKDDVVVVEATGNASSVAAVIAPHVKKVVIANPMQVRIIAHAKIKTDTIDASVLAQLYASGFLPEVWIPDEPTQALRRQVTRRNQIVRQRSRLKNIIQSILHSHLIPSCPHADLCGASGRAWLFHQVLPEDERLAVERHLREFDRLGDDLKVIERDLARSALGDEGVKRLMTIPGVDMVVALAIVAAIGDVGRFEQSQKLVSYLGLNPSVRQSGPGPAYHGRITKQGRGHARGMLVEAAWAAARAPGPLRAFFLRVRARRGQHVAAVATARKLAVLIWHLLSKGESYVWARPALHARKLRDLELKAGYKAARGQRGAAHAYNIKSHRDQERRWVEQAETAYARFVSGWNPRGPKRVRTGAATEVRR

SEQ ID NO: 297894 - protein, 418 aa, unidentified
MKKHNNSGKKSEPTSKPTKSRGPVQRDTKEVLAELVGKLKEKLDPKKVAATSAGEKLQSGELRPNLDRLTVGVDLGDQWSHYCILGLEGETLAEGQLRTTQQHITEFFQALNAARVVFEVGTHSPWVQEVICGCGHEVLVANPRLMEGSKRRKRKNDRIDANKLARLGRVDPQSLHPMQHRSREVRQDLVVLRARDALVAARTELINATRGLVKSMGSRLPQCSSPSFAQKAEETVPLEIREALLPLVRMAATLSDCIQGYDEKIEKLGREKYGHTALLRQVKGVGPITALAYVLTLENPDRFVKSRDVGPYLGLVPKQEDSGESQPQLGISKAGDTMMRRLLVGSAHYILGPFGPDTDLRRYGLRLCERGGKNAKKRAAVAVARKLAVLLHCLWVSGEVYEPLRQGMSATIAPAVAA

SEQ ID NO: 297895 - protein, 313 aa, unidentified
MYYIGIDVSKKDLSVFNGKLDLEFINQEGLRPFKKYLKGKYKNFSDLVIIFEPTGIYSFNLKEFCAENSIKAYIVNPKKSHNFARSLGIRPKDDKIDARILYQFHRLIDSKDIKVPKIDQQTRVLSSYLTSYEFAVKQRVAISNHLESIRDKKLISLLKKELKRAQKLEDKIFNDIKEYIRQNQNLREDYQRLLTISGVGEKMAIALLTLFKTYQGTNRAQITALVGLDSTKRESGTSVRGRAKISKNGKAIYRKVSYLPAICATVHNQKIKIFYQRLLANHKPKKLAIIASMRKILLIAHAIHRDKTEYVAA

SEQ ID NO: 297896 - protein, 402 aa, unidentified
MPINGALAPVAAVVAVDVGKNTAAALITDAGRHRLLGPLSFSMTGPGLDSVITKARGVLPAGVIRVGVEAAGHYHRPLATSTVWPGWEVVELNPAHVTEQRRVMGRRRVKTDAIDLEAITELLLAGRGTPVTALVSTVGELAGWAAHRRRRVLTRTATKNQLPGQLDRCFPGVTLALPDPLGTRVGRLVTAHFSDPQRLAVLGVTRFVRFAAACGVRVRIAVAERCVSAARDALAGPDAAVARRVLAADLVLLASLDAQVDQAEAEMARLLPATPFGPLMTVPGWGIVRAGNYGAAVGDPHRWPGPKQLYRASGLSPAQYESAGRRRDGAISREGSVELRQALIDLGLGLWLTEPAAKRYGQTLRARGKKGGVICCAMAHRANKLAYALVRDQAGYDPARWV

SEQ ID NO: 297897 - protein, 345 aa, unidentified
MKITTIGIDLAKAVFQVHGVDGRGKVLVRKQLKRKDVVGFFANLEPCLIGMEACGSAHYWGRTLSGLGHMVRLMAPQFVKPYVKTNKNDRNDAEAICEAVGRPNLRFVPIKSAEMQAVLALHRARQGFVKGRTAQANQIRGLLAEFGIVIAKGIGHIGERLPEVLEDGENALPGMMRQLLARLGENLKEMDKQVGALERQIKLWHRDNEQSRKLEAIAGIGPITATAFVATVGDVKSFKNARQVPAWLGMVPRHEGTGGKATLGRISKRGDVYLRTMLIHGARTVVAQLERKRDATDEWLRKLVARRNKNIAAVALAAKNARIAWAVLAHERSYERDYVANRAGA

SEQ ID NO: 297898 - protein, 340 aa, unidentified
MNHYVGIDVSLEASSLCVVDANGKIVREAKVASEPDALIAWLRGLKLELTRIGLEAGPLSQWLYAAMRQAGLAVELLETRHVHTALETMPVKSDRNDARGIAQLMRLGWFRPVHCKSMAAQETRALLTARKLLQTKLHDLELSLRGILRGFGLKVGPTTPARFEERIRELVAGHPSLEVIAEGLLATRVVLRREFNRFEKQVRDAARCDTRARLLMSIPGVGAIVSLTFTAAIDDPARFTSSKQVGAYFGLTPTKYQSGETDIDGRISKIGDASVRAALYEGAHIILTKPLKGCTALKSWAMKIGRRSGMKKAKVALARKLAVIMHRMLADGTSFRNAAV

SEQ ID NO: 297899 - protein, 384 aa, unidentified
MEKSITLHVGLDVHKESIDIATADPGRSGEVRHVGSIGGDLASLDKALRKLTSKGHQLHVVYEAGPCGFVIWRHLTARGQACDVVAPSSIPKRAGERIKTDRRDAMMLARLDRSGDLTAVRVPGAADEAVRDLVRAREDGVRECRNARHRLKALLLRNGIAYAGKSSWTAAHLRWLATLKMEHAAQQIGFQEYLHSITEATARIQRLEQAMRDALADWTLKPLVQALMALRGVQLIAAMTLVAELQDFLRFESPRKLMAFVGLVPAEHSSGPKRRQGSITKAGNSAARRMLVEMAWHYQHSPRVSPIIAARQDELPKEVTDIAWKAQLRLNAKFKRLLARRVMKNKAVVAVARELTGFVWAIGCEVQASGWQGLAIEPASARVN

SEQ ID NO: 297900 - protein, 458 aa, unidentified
MRIVGIDLGVTGAHKAVIANEHGQALRPPISFHTRVAELDQLVQAAQEGNPDGQVQAVLEPTGMAWFPVAVYLRGKGWHVSLVNSRQVADLRRYYKKYAKSDRIDARVLAKLPVVSDVPLVPFPLPSAAAQACQRGCKQLNKLQKWATAIHNRLIDIDHFAWPGLENIFGDRFGRAARWFRAQYYNPAAVVAAGSAGMHKAWQDSQIDGKDAGEWIEALVALAGEILTLYGPSSPYLEWASLQAEVQREQAQLDLFETLIDQVRRQEVHPRYQQLHPSGHLESLQGVGLDSAAVYASFIGDAKRFPSVAHLRGWSGLIPKSSQSANSEASGLSITQAGPALIKKYAYLDADVARRYDPQIAAIYYDQMVRKNKHHDQALCACATHLLGRIRAILLDQRPYELRDVDGTPLTKKQAREIVQQRYHVPEEVRKRNNKRARRERAEQRNERKQQKESPAHL

SEQ ID NO: 297901 - protein, 316 aa, unidentified
MAMRVSKSIVGVDVAKVELVTYQGDLDLLTSITNEKPAITRWLKTLPNTAAIAVEATNIYHVDLVELAYQAGFDVYIIDGFQLSNYRKGVGGRSKTDASDARLLARFLKNEGEYLRPWTPPPAVYGKLQSLLRRRASLIQAKTSLTQSWANDASLKASFAAFLKSIERLDLLVKKKLKDALREAGLLEQVARCQAVEGIGFLTATALVMAYSRGAFNSSDSYIAFLGMDLRVTDSGQKNGRRSLTKRGCSEIRRLLHNAAMSASRTSAWKEFYNHHRSRGKATTEVFVMLARKLARVAFALMKNQSEYQPRGSVMA

SEQ ID NO: 297902 - protein, 412 aa, unidentified
MEVLYARCCGLDVHKSSITACVLIAQAGKPLKHIRRFGSTTRELRELVAWLREFGVEHVAMESTGVYWKPVWNVLEDNFQIVLANAQHIKAVPGRKTDTKDCQWIAELLQHGLLRASYIPSVLIRDLRDLTRARTSLSQEHSRIASRIQKVLEDANIKLASVASNTLGKSGRAMLGAIIEGEESSERLADLALGHLRVKIPQLQTALEGQVRDHHRFLLRSLLRQLQFLEAEIELLDARLDQIGREHLDLAEALDRWITVPGVDRVAAWSFIAEMGIDVAQFPTAAHLASWAGVCPGNNESAGKRISSKTRKGSPWLRRMACQSAWAAARTKNTYLSAQFKRLAARRGRKCAIIAVAHTILVIGYHLQRTHCTYTDLGSSYFDRLHADGLKRYLVKRLESLGHSVILQPRTA

SEQ ID NO: 297903 - protein, 403 aa, unidentified
MTDRPLVWVGIDVGKATHHACAMDPTGKIVFSQKVANDQAAIEQLVARAGKAATEVRWAIDLTSNAAALLVAVLVASGQRVVYVPGRVVNRMTGVFRGESKTDSKDARVIAETARMRHDLTVVTATDELVVELRTLTAHREDLMADWVRGINRLRDLLTGIFPALERAFDYSTRSPLILLTGFQTPEAIRAAGDNGLVTYLREHSAWPKGIPGMASAALAAAQAQTVRLPGEATTAGLIARLAAQLLDLDRQIKDTDKLLTNRFRAHPQAEIIESLPGFGPILGAEFVVITGGDLAGFATSGRLASYAGLVPVPQDSGRVTGNLRRPKRYNRRLRRVFYMAALSSIRANGPSRVFYDKKRGERLIHTQALLALARRLVDVLWALLRDGRTFTPTAPTPITSAA

SEQ ID NO: 297904 - protein, 387 aa, unidentified
MPKPNDLSRSPAALSEDSTLIAVIEMGLASWLIAGRIPGVNRNPLRKQDPDPEALLVRLHRWRDEAVQAGHSISRIVVAFEAGRDGFWLARWLQARGIEAYVIHPTSIPVKRDHRRAKTDRLDTALLMRAFLGWLRGEADHCSMAAIPTLEEEDRKRPNREHQNLSGERTRIINRVKGALIRLGIRSFNPNLRTAAERLKQLQTPEGAPIPPNTLAELDRDFARLRFVADQARAIEKTRLNQLKTAPNDGPNSMVLLLARVIGVGIETADMLVHEVLSRGLRDRRAVGRYAGITGSPDESGVKRREKGLAKAGNSRVRRGMLQLAWRWLMFQKDSALTQWYRARTENAPPRARKTMIVALARKLLITLWRYTTNGEVPAGVVLHPAV

SEQ ID NO: 297905 - protein, 315 aa, unidentified
MEAMIERCAGLDVHQETVVACVLFGPLDQKPKTSIETFSTTTTGLLALSDWLATLQVSDVVMESTGVYWKPIWNILEGSFHLVLANARHVKNVPGRKTDVKDAEWLAKLLRCGLIESNFVPPEDIRDLRDLTRYRKKLIHHRTSEQNRIHKILQDANIKLTSVLSDIFGVSGRRILEAILNGEKIETDGLRKMVDWRTKASITDIASAINGRIRRHHRDMLRYHWEHMSYLEKAIEELEKQIDQLLSPYRKEVGLLDGIPGVNKAAAATFIAEMGVDMSVFKSAKHLASWAGVSPGNYESAGKKKRVKPHKVTKL

SEQ ID NO: 297906 - protein, 340 aa, unidentified
MNRNVVGLDIAKNIFHLYIESADGKPEKKKLKRTEMLPYFANSTVSLIGIEACGGAHYWARELTKLGHEVVLLNARFVKGFVVGNKNDFNDAEAIATAVTRPNKRTVAVKNDAQQDMQMLHRLRQERIGERTALINQIRGFLSERGIVLDKGINKVRALLPVILENIDNALTPMSLELFTELSERVQVIDADIKKHDQRINRLCGENTLSQRFMEVPGIGPITATIMASDIGSGKNYASSRDYAASLGVVPRQHSSGDKQVLLGISKRGNPYLRTLLIHGARAVLAVCSGKTDPLNVWLQALIARRGFNKAAVALANKNARILWAMAIKDQAYEAVPLAA

SEQ ID NO: 297907 - protein, 389 aa, unidentified
MKNTIVHHEGAASLEDAVGKVKLSGSIIKIGLDVHARLYVAVAQYDHLLPKPARRFAPMEFVPWVEQLLRVGHTVHVVYEACGFGFGLYRELKALGAHCYVIAPRKLDEHFTRVKTDPRDATTLCQRLSRYLDGNTRELAVIRVPTQEEEQDRHVSRQREQLLRLRQKLEAQGRSLLISHSLASPAHWWKNQTWSRLRKLLPAWICIRLEVHRPPLLTLQKQIDALSAQLEAAAPADVPLGIGKLSTVVMTREICSWERFRNRRAISCYTGLCPGEHTSGTKRMPGSVTKHGNPHLRAALVECAWRMVRFQPNYPPVKKRLSVLAKGARATGAQRKKAIVAVARHLAVDLWRIHTGRCSAAQLGLSSAETSSCSRGTEKEARTASTIIT

SEQ ID NO: 297908 - protein, 355 aa, unidentified
MESVKYIGLDVHQSTISVAVLNAEGKVMMQSVIATKATAVLDLLQGLRGVLHLSFEEGTYSAWLYDVVVRQVARVVVCNPRKNALLKSGNKSDQIDARKLAELLRAGMLSPVYHGEQSTRTLQQLVASYSALTEDTGRAMRRIKALYRSQAIACAGKKPFGKRHREEWLARLSDSGQRRRAEWLYQELDAVQILRREARQAVMVECHKNPAARLLRSMPFFGPLRAAVLIARVQTPHRFRTKRQFWTYCGLGLETRSSADYVEKDGQILRRRKPVYIRGLNWNYSHELKNVFKSAATTASAMDGPFRAFYEMRVANGMLPAMARLTLARKMAAIALILWKKGETFAAEHLKLQAA

SEQ ID NO: 297909 - protein, 413 aa, unidentified
MSIVPSAPDVRVTAGVDWAKDDHAVCVVGDQGEAVNRFSVAHDAAGLKRMASRLLRAGVEQVGIERGDGPVVDTLLAAGLSVFVIPPAQIKSLRSRYGSAGNKDDRFDAYVLGDVVRTDARRLRPMVADTEQTTALRRSVRARRDLVGHRVAAANQLRAHLQLVFPAAATLFADIDSAISLSFLERFTTQEAADWLSPKRLATWLQSVAYSGGADPAVLHARLLAAPRGATGQYATVHAASTTALAAVLRVLNAQIAVLATSIGDQLAAHPDAPIFTSLPRSGTVRAARLLAEIGDARGRFPTRDSLTCLAGVAPSTRQSGKVKAVTFRWGADKQLRDALCDFAGDSRRASPWAAALYDKAIARGCDHPHAVRILARSWAHVIWRCWQDNTPYDPQAHGAARALHNEDQPAAA

SEQ ID NO: 297910 - protein, 399 aa, unidentified
MLNPQALQLRVGVDVGSQCHSVAVGLTDGSLLEEFEIPHTAAGFEDFFARIEGHAKRHPYPIAIAMEGYNGHVRPLDSLVKVRGWRLFNVNNLKLARFKEIFPAAAKSDRIDSAKTLELFQLRDHLPMARDVLQEVMATPEENDILKRLSRRRRRLVNERVRVLNSLQADLQAVAPGLLQITRDVGNLWFLNFLTCRKGLLKLARLRRASLLKVSGIGATYADAIQAWQSRAFFGHDASLVGDMIQQDAARILELKQQIKALEEQMAHVAESSSIASQLASIPGYGAICTAELAGEIGTIERFRGEASLALYLGMATLDNSSGKYRGSKAPKHVNARAKAAMMAAVDHHRKRVPQSQRYYEKKRAEGKRHNQAIRALGRHLCRVIFKMLTQERPYWIDP

SEQ ID NO: 297911 - protein, 374 aa, unidentified
MSDHSEAYVAFDTSKLRNAVAIADAGRSGEIRFLGEIENSSAAIAKLVRKLAAKYGRLTFCYEAGPTGYGLYRQIKGLGHACMVVAPSLIPRKPGERVKTNRRDALSLVKQLRAGDLTAVWVPDARHEAMRDLTRARETAVEDLRRKRQQVSAFLLRQGLHYPSERTWTKTHRNWLASQKLEHAEQRLAFEEMLLAMRQAQERIERLEQAIRAAVPDWSLAEVVTALMAMRGIEFISATAFLAEIGDLSRFATPRELMAYLGLVPSEASTGDTVKRGRITKTGNRRARRILVECSWSYQHPPRVGKEKQERVAAAPPAVREIAWKAQCRLTARYRALTRRGKLKTVAITAVARELSAFIWAINREIANSRAAAK

SEQ ID NO: 297912 - protein, 313 aa, unidentified
MAMRAEQFIIGVDVAKVELVSYCEQSGQHHSFRNTQPEIRKWLALQPSNTAICVEATNIYHLDLVEMAYEKGFAVYVVDGYQLSNYRKGIGGRVKTDASDACLLARFLDREGSALRPWAPPPPVYRKLQSLLRRRAALVSARTSLTQSWSNEASLKEAYHSFSRHFESLDLLIQKQLKTLVREAGLLEQVVRCQKVEGIGFLTAVALVTAFIRGEFRSSDAYIAFLGMDLKVADSGQKSGRRRLTKRGCSEVRRLLHNAAMAASKSAAWKELYEYYRSKGKATTQVLVILARKLARVAFALMKTQGEYVSRRA

SEQ ID NO: 297913 - protein, 320 aa, unidentified
MPMRVRGFFGVDASQKSLMIAEHGRSATQEIGNSARAISAWLKALEGPCAIAVESTGRHHRLLATLAIAAGHAVYVVNPRDIKHYGKALGRRAKTDRVDALLIARYLAQEHDSLRAWVLPSKTQELLSSALARRGVLVGAREQIRASCEAHEAQLTQLGATLEQLARLIEEVDEQLEQLSAADPVIEAIKRRLLGIPGIGPVVSTALANLLSRYQFRNADALIAYVGLDPRANDSGQHRGRRKLSKRGPAELRRLVFNAAMSGARTAAWRGYYRCYRERGLSGTASFVILGRKMLRAVFSMVRHNTEFDPIRVQGACAKP

SEQ ID NO: 297914 - protein, 425 aa, unidentified
MFNHPKMKYVYLGIDSHKDTHCIVAINCFYEKLGTITVRNSPKELENLLTEVKKFKLKGTSLAFGLEDVSEYGRSLAVFLKEKKFIVKHVNSYLVAHERESLNIIHKTDEFDAECAARVLLNRFDTLPNADSQDKYWVLKTLVTHREAIVKNNIALKNRIHSIIASHYPSYSKFFCNIDTLGALAFYEKYPSPSKLKGVTVEELDELLFKVSGKSNPKDKGNKILEYVEADGYNEIEYQDIRDMAVKSSITLLKTNIKELAEIDNKLKELLQHFDYNLTSIRGVSTVLAATIISEIGNMSKFSSPAKLARYSGVAPTTYASGKSELQFANRRGNKSLHHAFHTLSVGLIATPGNMIRNKYFYDYFHRKVSEGKTKRQALNCLQRRLVSIVWAMMTHKTEYINPDLISIDDFNADNTETIESTISQ

SEQ ID NO: 297915 - protein, 412 aa, unidentified
MLFIGDDWAEGHHDVVVQDGAGKTLARRRLPEGADGLARFHELVASCWGEDSEPDPAQVVVVIETDRGPWVKALAAAGYRVYPVNPRQAARHKETIAVSGKKDDFFDAGALADMGRTRRHQIRELAADSDIAEAVKIAARAHQKLVWERTRHLLRMRSALREYFPAALEAYAPLTLSGPDALELLGRAPDPASAARLTVAQITAALRRAGRRGDLAGRARDIQAALRAPHLAQPAVIAEAYAASVQAAAAVIATLNAQVKVMEAKVSGLFHRHPDAGIYQSQPGIGDITGARILGEFGDAPGRYATAKARKNYAGTSPLTIASGKKRTVHARYIRNRHLIDALRAQALSALTTSSGARAYYDELRARGTGHDDALRRVASRLTAILHGCMKTGCEYDEAAAWSHRSHPPQAA

SEQ ID NO: 297916 - protein, 391 aa, unidentified
MFYIGIDIAKKNHEASIIDSSGKSLSKSISFPNSTKGIEKFNNFIAEFGVTTNNCIIGMEATGHYWISLFSYIVDLGFTCYVINPIQSDAFRKMYVRQTKNDSVDSFIIAQIMRFGEFSISNFSDENTFALRNLTRYRFALVDECSDWKRKLIAILDQVFPEYSSLFSNIYGVASKELLSKYPLPEDMLSIPAEELGDLLCKCSKGRLGINKAEEIQSCARETFGIKFAKRSFSFQIKQIISQISFLEEQLKEIEIEISCLLEDICPVITTITGIGSVLGASIVSEIGNISRFERANQLVAYAGLDTRVKQSGDFSATNTKLSKRGSPYLRRSIWLAATVAAFKDPALSIYYQGLRARGKAHGTAIGAVARKLTNIIFAVLRDQKPYTPNI

SEQ ID NO: 297917 - protein, 459 aa, unidentified
MGKRGEKRERRSAILEPDAAGIDIGAEEIYVAVPLDRDEQATRRFSSFTCDLYAMAEWLKCCRIRTVAMESTGVYWIPLFQILEERGFKVYLVNAHSLKTVPGRKSDVSDCEWIQYLHSVGLLKASFRPAEDICAVRTLWRHRGSLLEMAAEHTQHIQKSLSLMNLQIHHVLSDITGASGLAILDAILAGDRDPLRLAHLCNIRVKSPRETVAQALVGDYRPEHLFTLKQSLDGYRYYQKLIAELDDEIARLMHTLPNAAEYASPIPKRTKRTPYQRMGNDPSFDLRSELYRIAGVDLTDIPGVSAIAAQVILTEVGPDVSRFRNASAFASWLGLCPDKRISGGKVLSTKTRKVKNRVAIVLRLGAKSLSRAKDYFGSFFRRMRARLGTAQAITATAHKLARVVYHVLHSKEPYTETVFHHCDEQEQQRAEMRLRKHAAQLGFQLLPISTDPAISQISS

SEQ ID NO: 297918 - protein, 400 aa, unidentified
MHLTANISIPQKNFIAIDLHSDNAVICVRRNALNKAGELVGKNIWCGRVSIRDGLDNFIKALLPYCQDFDHVAVVESTYNWYCLADVFEERGWLLRIADPSTVSQANLKASDDRTDAQYLAERLRVGSLKHYLPLNYSSRALRDLCRYRMAMVQDCASLKIKLINLYRNQLSINLRVADLLDRWRNHMQSNYRFDPDILEEFKDPNIRLRVAFEISRIAMLEEMIEECNAEIQKQCKDQELVKLCKTIPGCGPVLSAVICTEIGTMQRFKSAGDFVSYCRLCSTSKLSNGKSKGLGNAKNGNAYLSWAFTEVAQYASRNPVIREILQRLLRKYGGLRVKAIRTLAAKIARVTFNMLKNKQPFNAAKCFGIELTKSIKKKLPHKPLREDAAVVLPAVAGQA

SEQ ID NO: 297919 - protein, 421 aa, unidentified
MSYKIAAIDIHKRVLMVVVASVADEVADATGAAMEFECRRFGTGASERQHLVAWLQQHQVREVVMESTAQYWKPVWLDLEPHFEKLHLAQAQSNRAPKGRKNDFRDAKRLARRLLAGELMLSFVPEPEQRTWRLMTRGRLQLVRERVRLQSQVECLLEEARIKLSSVIRDLLGVSGRRILEALSKGETDAAKLAELGDDRLQCSKEQLADALRGAPEPAHLQLLKLHLERLQLLDEQIDRLSQMSATALQTYQDAVVRLAAVPGFGAESSQQMIAEVGVDAEAFPSAGEFASWVGACPGSNVTAEENQSSRSPKGNRYVRRLLTEAAQAAVKKKGSHFQNLFRRFLPKLKYKGAIWVVAHRLARLVWKILHEGVSYIEQGEETNPRAKKRRAQKLAKALRKLGYSVTLTEIHPGAVANASA

SEQ ID NO: 297920 - protein, 352 aa, unidentified
MRTITTIGLDLAKKVFQVHGVDAEGKVVVARKLRRKEVLAFFAKLAPCQVGMEACGSAHYWAREIAKLGHSVRLMPPKYVKAYVKRGKTDAGDAAAICEAVTRPSMSFVPIKGLEQQGLSMLHSARSQLIGQRTQLVNAVRGHLSELGIIAERGLLGFTDLAAIVRDESDQRLPTTARAALMILVRQIEAVSAEISALDTALRKENKASELGPRLETIPSIGPVIASALRARVTDAKLFENGRHLSAWIGLVPENDSTGGRVRQNGLSKKGDRYLRSLLVNGAMAVVQKAQKRPDKHPWVTKLLTRMSAKQVAIAIANKTARISWAIMVHGGVYEAGHRAAHYRAEACALTG

SEQ ID NO: 297921 - protein, 338 aa, unidentified
MGKITTIGLDLAKNVFHAIGCDEHGKIIKKKMLKRPGLLAWFATLPPSLVGMEACASAHYWARELKALGHQVKLIPPQYVKPFVRGNKNDYNDALAIAEAVTRPEMRFVSIKTPEQQDIQALHRLRERRLRDRTALCNQLRGLLGEYGLVFSRGVNTLRQRIPEILEDSENGLSDFFRGLLSQGYQQLTELDAHIDAYTQTLEAHSKRNDACQRLRTIPGYGPIVSSAFYSVVGNGEAYRRGRDVSASLGIVPKQHSSGGKEVLLGISKRGDRYLRSLLIHGARAVVIQAANKTDVLSRWINKTRAARGFNKAVVALANKLARIGWAVLANNTVYQAR

SEQ ID NO: 297922 - protein, 391 aa, unidentified
MICVGIDVAKDKHDCFIISSEGVVLADVFTIPNNREGFNCLLGRIQACAMPGNEIKVGLEATGHYSCNILGFLLDNGLDSFVINPLHTNLYRKSLSLRKTKTDRVDARTIAAMLMSDVGLKPYTDTAYHNEELKSLTRYRFDKVKERAQLKQSVARLVCILFPELEKLVPTLHMASVYALLDEFPGAQQIADAHLTHLKAVLHDASKGRYGRDRAIELREAAKASIGSRMPAKSLELRHTIRLIRELDAEIDEIESAIQQIMDDIHSPITTIPGIGTRMGAMILAEVGDFSRFDSPDKILAYAGLSPSTYQSGQLTNCYAHMEKRGSRYLRFAIFNAAKYVCLWDPTFAAYLAKKRAQGKHYNVAISHAAKKLVRLIYALEKSREPYHQAA

SEQ ID NO: 297923 - protein, 311 aa, unidentified
MTEYSVIGIDIAKETFDVYIDTSCTYLHLDNSPDGHQQLLSVLSALRVKLVVMEATSRYHSLLAATLTLQGFAVAVVNPRLVKNFARATGTLHKTDPNDARLICEFGRRMEPEVRATPDEQTQRLAGMVTRRRQLVENRAMEINRYKSCDDVAISASLKRHIDWLKAEIKDADDDIDRQIRTMPLWKEKVKLLEEVKGIGPTTMAVLLSMLPELGALSRHKISALVGVCPYAHDSGKMKGKRCIWGGRSAVRSVLYMATLTAVRYNPTIKAFFERLTGRGKVFKVAITACVRKLITILNAMLRDNKEWRPA

SEQ ID NO: 297924 - protein, 412 aa, unidentified
MDVIHSRCAGLDISKKDAKVCVRINGAGRRKTSETVTTFGATTRQIMAMRDHLAAQQVTCVVMEATGDYWKPFYYLLEDLSGVEVMLVNARHVKNLPGRKTDVADATWLAQLGAHGLVRGSFVPPEPIRQLRDLTRTRTAVTRERTREIQRLEKLLEDAGIKLSSVAADLNGASSRAMLEALLAGETDTAAMADLAKKQLRLKIPQLTEALYGRFTSHHAFLTRMHLDLIDQHTAAIAQLTDRIEVVIEPFRSFRDLICTIPGIGGYTADVVVAETGADMTRFPTAQHLASWAGTTPGNNESAGKVKSRRTRPGNPYLQGALGTAAMSISHTRNTYLAAKYRRIATRRGPLRANVAVQRALLVAIWNIATTNTTYHDPGGDYFTRLNPQKARSNAIRQLEAMGYHVTLDQAS

SEQ ID NO: 297925 - protein, 398 aa, unidentified
MAKETHVAQITNYRGIVLTNRHLSFSNSIEGFERLQRWMESIQQKHRLSNIIIGMEPTGHYWWNLANWLTHKGLQVVLVNPATTKRNKENRDNCQSKSDPKDALVIADVVSRGYYYEYTRQTQVFQRLKTIMSDREFWVANSVRLQNRIIRWLDIRFPEYSSVFKDWTRKRSLATLKEFPTPQDLADRSVPELIAIWKKHMQRAGGTTGTQKAAELIAQAKRSVGDVTALAEAKLDLARLIAEFERITEMLADIEKQLHVLLDEIPMAVLMRSIKGIGPIFVAAILAGAGDLRQYAHGRQLLRKAGLNLAESTSGKRKGQIVVSKRGDSSLRKYLYLATIQLIGINPIFQELHQHNVQVKHMKKQQSVFKLVGKVARILIDMVHRVETFSPEKASHLV

SEQ ID NO: 297926 - protein, 404 aa, unidentified
MNAVGIDVSKGKSTVTIRRPGGKVVLAPRDYKHNRSAIDALINEIKSLEGETKVCMECTGRYYEPMATWLTSAGIFVSTVNPMLIKDFSDDSLRTPKTDKADSQKIARYTLDRWDKLKQYGLMDETRNQLKTMNRQFDYYMEQKTSMKNNLISLLDQTFPGANDLFTSPPRADGSQKWVDFVYTYWHVDCVAGRSLDAFTEHYRNWCSRKDYGFSAKRAREIYAISKDIIAVLPKNETTKLIIHNAVDQVNSISKTVETLRSKLYDTAATLPEFPIVMAMDGIGPTLGPQLMAEIGDVTRFKHRGALTAFAGVDPGSNQSGQYAQKSVRTSKKGSPHLRKTLFQVMDGLIKRSPADNDVYLFMAKKRAEGKPYYVYMTAGANKFLRIYYGRVNEYLNSLNQETQ

SEQ ID NO: 297927 - protein, 425 aa, unidentified
MNDNINQKINQVTEDTLVIGIDIAKRKHYACAVDDRGRVLRKAFPLAQSLEGFACFYQELLTLQNKHDKSHMLVGFEPTGHYWMNLAAYLTAHDIPYVMVNPMHVKKSKELDDNLQTKNDAKDAMVIAKLIRDGRFSFPRILEGVEADLRNGANMRAILQQEIIRVKNRMIKWLDSYFPEFQLIFKDFGKNALAILNKTPFPADIRSKSFEELLLLYKEDTDLKYVSSTKVKQIKQAAEATIALSTGLDTARTVIEMLLAQYKLYTHQYEMLAEKLEQIVQDLPEYAFILSIPGVGPNTAIEIISEVGSFSNYNNPRQIIKLAGLTLRENSSGEQKGQKKISKRGRRRLRASLFRAALPMIRYNSAFKALYTYYIERPENPLKKKEAMVVLCGKLLKIIHGLCKNKQYFDANQMMKDIPVLQATA

SEQ ID NO: 297928 - protein, 410 aa, unidentified
MRVIGLDVHRNFAQVAILDGGLVKDHGRFVMDREAVLAFANKVLTKEDDIVLEATGNTAIIVRLLRPFVRRVVIANPLQVRAIAWAKVKTDKIDAATLARLHAAQFLPEVWMPPEDVELQRRIIAERTQLVGQITRLKNRIQSILHANLIPKETGHIFSTRGRARLEALPLPADQMRMALRHHDEIGRLATELAVVDRDLAQHALADPNVKRLMTIGGVDAIVAASVLAAIGDISRFSSPEKLVSYLGLNPSVHQSGDHPAYHGHITHQGRGHARGMLVEAAWSIASSQGPLSAFFHRISVKRCKSIAAIATARKLAVLIWHMLTKRQDYVWTRPALLQYKMRRLELMAGHASRRGGNKPGSARDYSVKAIRDQERARLASAEQDYRGFVAGWRERPPAKTGPTSKAKAC

SEQ ID NO: 297929 - protein, 435 aa, unidentified
MNYTQNEKIEQVSDTTLVIGIDIGSQTHYARAFDNRGRELTRKVFSFGNDIEGFNTFNQWAEKLKTENNKTKVMIGCEPTGHYWFAFAKYVTDHQKELVMVNPFSVKKIKELDDNSPKKTDSKDPKTIAKLVMDGRYSIPYLPDGIYAEIRDLVYSRDRIVKQHNISANRIQRWLAIHFPEYLGIYTRFDSKSGLAVLEKAPLPKDVIALGIDGIRKIWHDKKIRGRGVTEDRAKILMEAAHNSVGLDGGAGTRSELYMLLEEHRLWTSQLEAVEKVIEETTLKVEHVEKLLAIKGVGIITIAGFIAEVGDIRRFKSPKQIQKYAGLELVENSSGKHKGRSRISKRGRRKLRRILYQVMIPLLASNKEFREVYDYYVTRVKNPLKRRQAMVAVGCKLIRVFYAVLTKGLDYDRTKMKSDIHRDSELIAAQEAQVL

SEQ ID NO: 297930 - protein, 402 aa, unidentified
MRQALTVGSRSHFVAIGQNKEDIREFGIYTENLHDLCKYLASHGITETALESTGSYWQPLFVLLQQYNLHPILVNGKFTKNVKGRKTDVQDCQWIQKLHTMGMLEGSFIPDLFTEAVRQYYRHRQYLVESAASYINKMQKALRLINIRLDAVLKDVMGRSGKDIIEAILKGERNPTILASLAQKTVKTSTKEIEAALTGDWREEYIFELRQCYEIYQYYHQKIDECDEKIKNLLSTEIERKQKEEGLAKMEGIEIKKKKARKNEARINIQQLTVDLTGGIDISVIDGIGLGFLLCLVAETGLELKAFGTDKQFVSWLRLSPDIKKTGGKVISDKTRKGKNRLAHAFMHSANTIGNMKDGDYLVHFFKRIERRRGRMVAIVATARKLAIIVWNMLVKEKNIQT

SEQ ID NO: 297931 - protein, 337 aa, unidentified
MSQASSSPSPSSSTPRFVGIDVAKATLDLAVRTDGQAEGEPWQVANTSEGHAQVVSQVAVLAPALVVLEATGGYEVAAVAALAAAELPVVVVNPRQVRQFAQATGRLAKTDRLDAQMLAHFAEAVHPTPRPVPDAQSRELTALVARRRQLVQMRVAESNRLTPTTSGRVQQQITAHLDWLDAQLASLDDELREQVRTSPLWRERDDLLQSVPGVGPVLSCTLLAHLPELGTLSAKQLAALVGVAPPNDDSGRLRGRRLVWGGRAAVRAVLYMATVRATRCNPVVQTFYERLRAAGKAPKVAYVACMHKLLTILNAVLRHRTPWAPASPPAHRAPVLA

SEQ ID NO: 297932 - protein, 455 aa, unidentified
MKHEPEEIPDAEHELVIERVAAVDVAKASGKVCVRVPGKAGRRVSRVWDVAATTAAVTELAEDLVELGVERVTVESTSDYWRIWYYLLEAAGLEVQLVNARDVKNVPGRAKTDKLDAVWLAKLTEKGMLRPSFVPPTEIRRLRDYTRLRADLTHDRSRQVQRLEKLLEDALVKLSTVATDIIGVSGRAMIEALLAGQRDAKVLAGLARGRMKTKRAALIEALSGRFDDHHAELARMLLDQIDALTAQIDTLTARIEQLLAAMPEAQPVDPRRDGPTSGHPVGVTADTLAECARLTTVERLDEIAGIGEHNAQVIIAEIGLDMIRFPTPAHLVSWAKLCPRTIQSGPVTRGGRTGKGNPYLKGVLGDAAAAAAKTSTFLGERYRRIVKRRGKLKALVAVARSILVIVWNLLNDPTARFHDLGPDYHTNRIATERRMRNHIAQLTAMGYRVTLEPAA

SEQ ID NO: 297933 - protein, 345 aa, unidentified
MLAEEIGFVVGVDTHADHHAVVVVDAVTQRARRALTIAATRRGYRQALRLADRLAPGDRVWALEGSGSYGSGLARFLSERGERVLEVERPAREGPRSRFKSDPLDAEQAARQVLAGEAGALPRLSGDTQALRVLVSTREGAVNACTAALNELRALIITSPPELRERLQGLTETRLLNACVRLRPGADSERAALALALRSLAQRVRLLRTESQTLERELERRVQALAPQLLARPGIGPISAAAVLIAWSQPRRIRSEAAFARLAGAAPIPASSGKTIRYRLDRGGDRQLNRALHTIILSRRRTDNETKAYIARRLGEGKTQREATRCLKRYLARSLYRTLETMPTT

SEQ ID NO: 297934 - protein, 417 aa, unidentified
MSDDIRWFAGVDWASEIHQVVLVDAHGTVTGEHTFPHGGEGLGAMCDWLLTAAGVSAEAIAVAIEVPHGPVVETLMERGFPVHAINPKQLDRFRDRFTVAGAKDDRLDGRVLADSLRTDRHCFRPLHAADPVTVELRERSRMAEDLRQERNRLSNRVREQLWRYYPQLLKLTDDAGADWFLALWTLVPTPAKATRVHKSTIERLLKAHRIRRIGADEALTTLRQKPIQVAPGTTEAATAHIRTLAVRLKVVNRQIKDAHRQLDALCAKLAGPEEVEPGQSHEQRDVTILRSLPGVGRIVVATLLAEAWEPLRERDYHALRSLCGAAPVTRRSGKRCVVVMRQACHVRLRTAIYHWARVAIQHDELSRRRYRELRKRGHSHGRALRTVADRLLAVACAMLRTRTLFDPARASVLKEAA

SEQ ID NO: 297935 - protein, 419 aa, unidentified
MRSIQTKKVKIVNNETLIVTVDIGKAKNFGYCRCPNGIDIKPFGFHNNGHGLKYFWDKITQMKKAYNLKTVVVGFEPTGPYGEPLVHYLRKKEVKLIQVNPMHTKRVKELQGNSPNKTDQKDPKVIADIIELGHALTIVLPEGTAAELRRLSHSRERAMQRRTSLFNQLQDLVFVVFPEFSQVFKDVKTKSAMYVLENCPAPEDIIKYKLKNLTATLRKISRGQIKEERTRELYAVAKTSVGIKEGRTSILFEIKEILSMIKTTERFITEIEKEISRHLKDIPYSKFIISMKGIGEITVSGLIGEVGDFREYKTISEILKLGGLDLFEISSGKHKGQHRISKRGRSLMRKLLFFAAINVVRKGGILHEYYQGCLERGMVKMKALIAVSRKLLGIMFALVRDHREYIEDYIVEQELKKAA

SEQ ID NO: 297936 - protein, 348 aa, unidentified
MVAELEYVVGVDTHRDEHVLAVVEASSGALLARRAVAADARGYAQALRFARRHAPVGRGWALEGAGHYGAGLARYLSKRGETVLEVGRSPRRQRRLQGKDDELDALRAARAALADEPLASPRLGERREALRLLLVARRSAVDVRKEALVQLRSVIVTAPDRLRDELRRLPLRRLLDRCSRLRPASGAASDEAACRLVLRSLARRAEAATLEAAELEREILGHVRVLAPRLLAEPGVGPIVAAQLLVAWSHRGRVRSEAAFARLAGVAPIPASSGQTSRQRLSRGGDRQLNRALHTVVLHRRQHDPATRDYIARRVAEGKSRREATRLLKRYVARSLYRLLQAQEPLMA

SEQ ID NO: 297937 - protein, 320 aa, unidentified
MQQQAQAQEFIGVDVAKNELVVWQSIDGTIRALSNQADAIGSWLQTLQPDASIAMEATGRYHRLLATMAYQAGLTVYVLNARDVYFYAKAVGSRAKTDGVDARLIARYLAEHRARLHVWREEGAGSDTLRLLLARRTQLASQRASVAQVINDGLADYIEANALLVAFEAMLKRLDVQIHAALETNPLQAERYRRLLTIPGVGPHTGAMLTDVFGRLSFANADAVVAYSGLDPRANDSGTKRGRRRLSKRGPSQLRRNLYMAGFSASRSKCFKPFYQALRARGLTTTEAFVILGRKLLRVAFSIWRTGKSFDPALIGPRGD

SEQ ID NO: 297938 - protein, 537 aa, unidentified
MSRVQRRVARTVLRGVGRSNAPHLPGAGQNFGSRPRPPGSPLVSLACQGRRRVGVPEVQEIPDEEHEQALERVAAIDVAKMSGMVCTRLPRQGGKPGARVSRVWEVPATTRAVVELAVQLVELGIQKITVESTSEYWRIWFYLLEAAGLDVQLVNARDAKNVPGRPKTDKLDSVWEAKLTERGMLRPSFVPPAAIRQLRDYTRLRVDLTRERTRHYQRLEKLLEDALIKVTGVASKIDTMSVRDMLEALIAGERDPKVLAGLARGRMKVKYAALVEALTGRFDDHHAELARILLDQIDALTRQIDQLTTRIDELIAELPEAAAPQPGDPTDQGTAGLVDPLTGEILAPEPGDPTSERATPVAGRPNQHRGDRAALSAIERLDEIPGIDVRGAQIILAEVGLDMTRFATADHLASWAKVTPRTIQSGAKSRGGKTGKGNPYLKGLLGEAAAAAAKTQTFLGERYRRLVKRRGKLKALVAVARSILVIVWHLLADPTTRFQDLGPDYHTSRLDHGKKTRNHVRQLEALGYTVTLNPVAA

SEQ ID NO: 297939 - protein, 339 aa, unidentified
MSKLLKNFVGIDISKTWFDAAVIKAGHPSVSMHNQFSQSPDGFKKMITWLRQQNVLLNTETLFCMEYTGIYNTGLVNFLVEQKAQLWVEMPLRIKKSAGFERGSNDKTSAVKIAGYAFRYQDSIQLWQPVDSSIEKIKQLIAQRDRVVNAITQLTVPVKELLECGCNKEAKELEKIQRSCLKALQKTKAAIEQLIVKTVGQDALIAKKVQQVQSIKGIGQVTAVSLLAYTKGFTTFSNAKQLACYCGVVPFAKRSGTSVRFKPTVSPHANKKLKKLLHLCALSAIRNDVEMQTYFERKVAEGKNKMSVINAVRNKLIHRVFAVIRDDRTYEGNYIRKCA

SEQ ID NO: 297940 - protein, 351 aa, unidentified
MMIIGVDYHPSFQTIAFLIEETGECGEQELNHSDGQAEKFYRDLKQRGICVRVGMEATGYSRWFERLLAELGFEVWMGDPAEIKAKRVKKQKFDREDARLLRRLMLENNFPQIWVPSPENRDLRQLLWHRHRLVQMRTRIMNQLQALAMNEGYRWKKKLFSEQGRAQLEKLALAPWASRRRQELLELLDRMNPTIEELTAAVEREARKRPAALRLMTHPGVGPLTALAFVLIIGTPTRFQRGKQIGTYVGMIPSEDSSAGKQRLGHISKQGNSLLRFLLVEAAQAAARIHPDWRRRYLHLAMRRHKSIAKVAMGRKLAVRLYWMWRNGCEYSQSLEFGSYAGQLEIGHGVK

SEQ ID NO: 297941 - protein, 299 aa, unidentified
MMKQYVGLDVSQRETAICVVGEMGQVIFEGKAKSDPGALTSLLRKHAPHAERIGFETGAMASWLWHELRRVDLPVVCIDARHAHAALSVRMNKSDQNDARGLAELVRVGWYREVKVKSEESQKIRAILVARFRLVTIRRDIENQVRSLIKEYGLLFSRGIGQQFRNQVSELLGDNHPLLSVIAPLLSIHENVCQQQDKFDDQVRRLAKQDETTRRLMTVPGVGVVTALTFRHTIDDPSRFRSASTVGAYLGLTPRRNQSGETDTNGKISRWGDRLLRTYLFEAATVLLYRTKKWSCLKA

SEQ ID NO: 297942 - protein, 388 aa, unidentified
MQFAADRLEAPTAIRTDLGAIFVSLELSRSSWVVTSLSPGGGEKMSKHTVRGGDVAGLLKRFAQLREKAKGRTGKVFPLIVIQEAGLDGFWIDRVVQNEGIESHVVDPASIATSRRRRRAKTDGIDGEALVRALLAYKRGEPRVCSMVRLPTPEDEDRRRLCRERKVLIAERVKHVNRIKGLLFSQGVSGYEPLRRDRRERLDALQTGDGRPLPPHLKAQVRRELDRLELLIAQINTVEAERDALLAVEQTTAPVPPAMLLGVKGIGPEFAAVLWSEGLSRPFENRRQIAAYAGLAPTPWQSGSVDREQGISQSGNPRLRTTMIQLAWLWLRHQPDSALALWFHDRVKRNGGRLRKTTIVALARKLLVALWKYVTVGVVIEGAVMKTA

SEQ ID NO: 297943 - protein, 343 aa, unidentified
MSIMILGIDLGKNSCSVVGVDATGAIVTRRTMRRQTLIDYVTKLPACIVAMEACCGAHHLGRLFTGRGHEVRLMSPEYVRPYFKAQKNDDRDAEGIAEAASRPTMRFVDLKSQEQLDIQTLHRVRSRLVAERTNLINQLRAILLERGVIFPAGRRKLELGVDSMLAEDVKLLSSRVQQLVRELRAEWQELDTKIGALNTELIQLARNDAATRRLTSIPGIGVLNATALVAAVGNASSFAKARDLGAWLGLVPRQYSTGGKPRLLGISKRGNTYLRTLLIHGARASLPSLSKSDTPTGRWLKAMMERGVHRNVMVVALANKLALIAWAVLRKETGFDRSCPAVA

SEQ ID NO: 297944 - protein, 336 aa, unidentified
MAKSVFQVHGVDERGKAVLRRQLKRKDMVRFFANLQPCVIGMEACGSAHYWARKLTELGHTARLMAPQFVKPYVKTNKNDRNDAEAICEAVGRPNMRFVPVKTAEAQAVLGLHRARQGFVRARTAQANQIRGLLAEFGIVIPNGIGHVTKRLPEILEDAENGLPGMMRQLLERLVEQLKQLDRQVGELERQIKLWHRANEQSCKLEEIAGIGPITASALVASVGDARSFKNARQVPAWLGMVPRQDSTGGKATLGRISKRGDVYLRTLLIHGARAVISQFERKPDQPDGWLKRLLARRNKNIAAVALAAKNARIVWALLANDRTYQSDYAAKRAAA

SEQ ID NO: 297945 - protein, 361 aa, unidentified
MTGMVTYAGLDVHARSTHAAAIDVLTGELVRARFGPGIEEPVAWLAGLRGPVRACYEAGPTGFGLYRAAAAAGVAVEVIAPGKTPRGPSDRVKTDRKDAELLARLLLAGSLTSVVVPPVEVEAARELMRAHDACRRDLMTARHRVSKMLLRHGRVYPESSTWTVAHRRWLSAQQFDETASELVFADLIAAVDGLTARKSAIAERLSRLAEDEQWWPTVARLRCFRGVDTLTAFALHLELGGDWQRFQRANALSAWLGLTPSLHQSGESSHQGSITKTGSTLARRLLVESAWHYGRAPRIGVTLKNRQQGQPDHVLQISNRAQHRLHRVHHRMRGRGKAHNVIVVACARELACFLWAAATAD

SEQ ID NO: 297946 - protein, 340 aa, unidentified
MGQVVTIGLDLAKSVFQVHGVDAAGEVVLRRQIRRSQLLQFFSKQPVCLVGMEACASSHHWARELIALGHEVKLMPAQYVKPYVKRGKNDAADAEAICEAVRRPTMRFVAIKTPEQQSAMMLHRVRLVLCRQRTQLSNALRAHLAEFGIVAPVGRIGLDQLLAVVTDSDDDRLPVEARISLQMLATQLDVVKAQILENDRRIMADARSTELGRRLMAIPGVGPLLASALVATVADPSIFRSGRDLAAWIGLVPRQNSSGGKERLGSISKAGHRYLRQMLVVGAMAVIRYAERSATRRPWLAQLLARRKAKVAAVALANKIARTAWAMMMTGERYREPLAA

SEQ ID NO: 297947 - protein, 426 aa, unidentified
MELILGIDLACRAAHQASLARPDGTFVWTGRKFFTRSAELEKLWADLGLGEQDTVRVVMEPTRNVWAPVASWFRQRGAHISMVPTTQSAALRAYYSKHTKNDHLDSKLLARLPLLHPEGLREHTGDGPAEPLRRVVKIRSSIVKRRTAVFQRLDAHLELLGPAWYDALGSNYGKAALALLARYADPNSLIRLGHARLTRFLIRHSRGAWREHHASMLLTAAQESLQLWGSGVDARVDFAELAADIAVEAEQAQILTEQIEDLDERCANLYAEADPTAIIASAPGVGPVTCAVIAGRIGDPHRFHSLAAIRAYSGLVPKVSQSGQAEHHDGLTKAGDPLLREALFGGADQARKTDPQLAATYKRLMNTGRHHDSALCHIATILLTASPPAGAPAGTTCFATPTVVPSPPKKDVESSAPTTPSTSRPA

SEQ ID NO: 297948 - protein, 455 aa, unidentified
MKLGMDVVNFNAAGIDIGSRSHYAAIGQELEDVKEFGVYAEDLTSLCEWFVSNDVTTVAMESTGDYWQNLYTELISFGFEVVLVNGKFTKNAKGKKTDVKDCRWIQKLHTLGLLTGSFLPDLVTEHLRTYCRQRTNWIELASSATHKMQKYLKLLNFRLDVVVKDVCGLTGMKIIEDICKGNLDPYNLAEHRHFNCRKPKEEIAKALHGNNREDFLFGLQQELKSYQFFQRNIKACDKKIEQFIKQELKQYPERKKLKTTEKTYKRINKNAPKIKNMNQIAFRYFDGVDLFAIEGLSHSSILSIMSEIGPEGFKKFPTAKHFTSWLRLAPNNKISGGKILSNRVPKGSNRLKIALRQAANAIGNLKDTHLSDFFRRVAYRKGRHSAVSATARKLAVIIWNMITKKIQYQPPKLYLFLDQKRKLGLVKRIKKQIDKFDLKPEDLGFNNSIIINKQN

SEQ ID NO: 297949 - protein, 428 aa, unidentified
MKYNQNHKISQIAENTLVVGVDIAKKKHYARAFDYRGMELDKVIKFKANGGGFESFINWTESVAKAHGKKKIVVGIEPTGHYWYTFGRAVIDRGLMLVQVNPYHVKKTKELDDNTPSKSDYKDPKTIAFLVKDGRYQIPYMPDGKYAELRKANNLREEWVQKKIRVKNKVTRWLDIHFPEFLNAFSSWEGKTALMTLGKIALPEKIASKTPEEILCIWRKEVRRGVGIKKAEKLVKEAQNSVGIREGAQMAEYEIKLYIKEYMEIREVLEDMERKLEKIVLTIPGANRFLEIKGVGIKTVAGFFAEIGDIKRFTSAKQIIKLAGLNLRQNSSGQHKGETTISKRGRSRLRALLFRAILPIVATNEVFNKLHHDNISQKERPMKKMQSLIALCCRLIRIVYSLITKDQEFDPDKLIRDIHRDDALQGAA

SEQ ID NO: 297950 - protein, 331 aa, unidentified
MKFLETAGIDVSKDTIDSTLHVKKCSKQFKNNTTGFRAFIRWAQNQSGLSINQIQICFEHTGLYSLNLAMFLSNNEIKFSMVPALEIKKSLGIARGKNDQLDARRIAEYAYLRREKLAFYNVPSINIIKLQALTTLRAHMVKNKSGYQSSLQGLKTFFKQKDNDNIYKTIQSEISGLNKKIKKIEREILQVIRSEESLYHLYSLITSVKGVGLILAANFLVMTNCFTRFETSRQFACYSGIAPFEKQSGTSLKSKSKVSHFANKRMKTLLNLAASSAIQCDPELKAYYNHRIETGKSRMSTLNIVRNKIVYRVFAVVKRGTPYVPLHLHAA

SEQ ID NO: 297951 - protein, 322 aa, unidentified
MEQFSFFTGIDVSKLWLDIAVFKPTDGFVYQTRIDNNVKSIRGFLKDLKKHLKAEITEHLFCMEHTGKYGHAFLNASILEQAKVWVELPIQIKRSQGLVRGKTDGWDAARIAQYAYRFADKATFWMPADKIIQDLKELQAKRNILVKTYSQLSQENKNDPLFKKPLMALKQGIGAIELKMELLIEQNELANHQYELLKTVPGIGKQTAMALIIVTNGFTRLTDSRKLSCYSGLAPFPYQSGSSVKGRTKVSKMGDKKLKVLLNLSAWNAIRSITAFKDYFNRKVSEGKHKMSVINAVRNKLLALALAVIKRNSPFEKNYSFS

SEQ ID NO: 297952 - protein, 397 aa, unidentified
MYIVGIDIAKRKHEAAVIDGEGTVIIKPFSFTNNCSGYNRLLAMLTKAKLPLDEVSFAMEATGHYWLALFTRLQKEGFRVQVINPVQTNSIRSFYIRQAKTDPRDALLIAEVIRFGHFSESTLHPENIYELRELCRGRHAIVSMQADVKRKVVALLDQVFPEYETAFTNMFSDTSMAILQTCPTPKELSEMPLEELCHLIEVSSRKRFRMAKAQELQALARGSFGFAMAGDVFSTMIRLYAKHLDFLKQQVREMDRKIAEIMDTLDTPITTITGIGPTLGAYILSEIGDISRFSSAAKLAAYAGIDPTMRQSGEYNGVRNRMSKRGSPYLRHAIWLAASSAVLHDPALKFYFQKKRDEGKPYMASVGHACRKMVSIIYAVMRDNKAYTPHIPNEISA

SEQ ID NO: 297953 - protein, 464 aa, unidentified
MKRHRRHTPKPRVSSSVLEHLNPHAAGIDCGSAEHFVAVPADRDSTPVRSFATFTGDLERLADWLTTCRVTHVAMEATGVYWIPIFEILEARGFLVALVNARHVKHVQGRKSDVSDCEWLRDLHMLGLLRGSFRPADGIVALRGYLRHRATLIESTGAISQRMQKALVQMNVQLSLVVSDITGVTGLRILRDIVAGQRDPQHLAQHRDYRCHASEAEIVAALTGNYRPEHVFVLAQNLELFDEYQRQLTTCDAAIEAHLARLTAQVAGPTTALPPPRRRQKPRDNEPRFDLRTPLHQLTGVDLSQIDGLGPYNALRLLSEIGTDMMRWATEKHFTSWLTLAPQNKISGGRLLSSRTQPSANRAAAILRLAAMNLGRTQTALGAFYRRLAFRVGKAKAITATARKLAILVYRTLKDRLVYADPGADAYDAQHRTHVIRRLRQRAANLGFTLVNVSTGEVVEGAVS

SEQ ID NO: 297954 - protein, 427 aa, unidentified
MPYRIAGIDVHKKMLAVVVTDVELAEEYQFQRRRVNTTPESLRQLAEWLVEQEAQEIVMESTAQYWKPVWGALERYWQPRCQKAEGTGGNPGTLHLAQAQSNRGPRGRKHDFGDAERLVKRLVAQELILSFVPEAEQRLWRTLTHKRQQITCHRVRLHSQLEALLEEAHIKLSSFASDLLGVSGQRILNAIAEGVQDPVALAALADPHLRATPEQLADALGACAQLHPLYRKLLKMALEELQLLETQSAQLDQQIAGLLAPHQDAVRRLAEVPGLGVDSAHQIIAEVGPAAAVFPSAKQLASWVGVCPGQEQSAQVTRSSRSPKGNRTLRRLLNQAAHAAVKMKGSLFQIQFQRLLPRLGYKQAIWAIAHRLCRLIWKILHHGISYQERGPEISAKSLRTRTARMIRQLQVLGYRVEPIQAQTLTPA

SEQ ID NO: 297955 - protein, 344 aa, unidentified
MYFIGVDHHKQWSVMSVWGEVGPEVKFGRVDNHRDAVRRFLEGCEPFKAVIEAGYSSYVMADLLEELGGEVVMANPGGLKAIAQARIKTDKRDARTLAELLRGGLIPEVRRRPVENRRAQRVIRLRAFWVAKRTELKNKIRVLLAQQREEIRLEMENREEGLFSGKGLEYLGRLVLPELDQMILDDLLGSYGEVQAHLRKTDGIVEKLYAELEAARRIDTVPGFATTLSVLVAVEIGDVERFESAAHLQAYAGVIPTTHSSGGRTYHGRITKAGNPWLRWAALEAVFPATQGSLEIRGLYSRLARRKNPNVAKVAVARRLLAIIYRLLKEKRDYIRDMNHPSVA

SEQ ID NO: 297956 - protein, 439 aa, unidentified
MSELVAYVGLDVSQDEAVACVLLVDGREPVPRWAVPNSQPGADALVGRLAELAERHGLGELRVGLEATSLYWWHLASALTDAAALAPYHPRVYALNPKLVHDFRKNYGALPKTDRADAFVIAERVRFGRKLPPPFQLDVRYAPLQRLTRFRVHLAQTLAREKSYFLTFLFLKFSGFAQVQPFKDPFGATSCAVLEEFTTEELAQADLGELARYLEAKGRGRFADPDALAATLARAARDSFRLDKVLDEPLTLVLGTTMATIRTLQAQLKAVDTTIARELAPIAQTLSSVPGLGPVWTAGLVAEIGEIGRFPDEAALAQYAGLVWKAHESGQFQAEDTQMAKTGNTYLRYYLVEAANSARTHCPEYAAYYRAKLQQSTKHAHKRALVLTARKLVRLVDALLRTGALYRPPETRRDPMEVSAPSTQRPARNRRSPRAPAVV

SEQ ID NO: 297957 - protein, 447 aa, unidentified
MAQRKRPTTQSAISLTHPNTAGIDIGSAAHFVAVPPDRDDEPVREFASFTTDLHRLADWLDACGVDTVAMESTGVYWIPLYELLESRGFTVFLVNARHVKNVSGRKSDVLDCQWLQQLMSFGLLRGAFRPAEQVCVLRSLSRQRTMLLRSQGRFVQHMQKALTQMNIQLANVISDVVGETGQKILRAIVAGERDGLALAKLRNARIRASEDEIAKSLQGSWRAEHLFALKQALDAFDFCGTQLAECDAQIQAQLQALHVREDEPAKGKKRGRARNAPKFDLRTQLFQMCGVDLTRIDGIDVTTALVVVSEVGADMGKFPSDKHFASWLGLCPGTKITGGKVMSGKTKRCANRAAQALRLAAAALRSSQSALGAYYRRMCARMDKPKAVTAAAHKLARLIYAMLTHGQEYTDRGQDYFEERYRQRVLHNLAQKAKAMGMQLVPSDNTA

SEQ ID NO: 297958 - protein, 449 aa, unidentified
MIRPQEIEDEEHEQVLERVAAVDVAKASGMVCIRVPQPGRPGRRRTLVWQVDATTNAVLELADHLVGERVEKVTLESTSDYWRIWFYLLEAAGLEVQLVRAQDVKHAPGRPKSDKLDAVWLAKLTERGMLRPSFVPPAEIRQLRDYTRLRTDLTRERTRHYSRLEKLLEDALIKVSAVASKLDTLSVRDMLEALIGGERDPQVLAGLARGRMRAKHDRLVQALTGKFDDHHAELARMLLDQIDALTAQIGKLTARIEELIAAIPAAQGIDADGTTGPAAGRGEGAPVMPTVDRLDEVTGIGREAAQAIIAEVGLHMSAFPTAAHLVSWTKISPQTIQSGARSRAGRTGKGNPYLKGILGEAAAAAAKTDTFLGERYRRLVRRRGKLKALVAIARSILVIVWHLLADRAARYHDLGASYYAGRIDKNRKMRDHVRQLEALGYTVTLTQAA

SEQ ID NO: 297959 - protein, 316 aa, unidentified
MGGVAVFVGIDVAKANLDVAVRPSGQHWRVTNTEAGIADLVQRLAGLAPVSIVLEATGGLEWPLAAALAAAGLPVVVVNPRQVRDFARATGKLAKTDRLDAAVLAHFADAVRPAPRPLPDETSRSLAALVARRRQLVEMLTAEKNRLPLATPAVRADLDEHIAWLTARLKQVDQDLEAAIRQSPVWRTNDDLLRSVKGVGPVLSTTLLTDLPELGTLDRKQIAALVGVAPLARDSGTLRGTRTCWGGRASVRGALYMSALVGTRFNPTLRTVYERLLAAGKPKKVALVACMRKLLVILNALLRDQTRWDPNHRVTS

SEQ ID NO: 297960 - protein, 391 aa, unidentified
MFYIGIDIAKHNHEVSIIDDNGKALGKSFSISNSQKGVDKFNTYLDSFNITSENCVIGMESTGHYWINLFSFLVNLKFNVFVINPIQSDAFRKMYIRKTKNDSKDSYIIAQIMRFGEYSPSNISDENIFALRQLSRYRTSLVDECSSWKRKIISILDQVFPEYSNLFSDTFGVTSKELLSKYPLPENMLELSTEELTNLLNKTSKGRLGNEKAQEIKESAKNSFGVSFAKQTFSFQIKQIINQISFIESQLKELDNEISNMLKELNSEITTITGIGDVLGACILSEIGDISRFEKASQLVAFAGLDVAVKQSGEFTGTEMKITKRGSPYLRRAIWLAVTVASFKDPALSIYYKSLIARGKKHLTAIGAVSRKMCNIIFSVLKNKKTYTPNI

SEQ ID NO: 297961 - protein, 343 aa, unidentified
MEYYAGIDVSLKESSVCVVDATGKVVREVKVASEPEAVVRYFDELELSVCRIGLEAGPLSQWLHAGLGAVGREVVLLETRHVKAALSAMTVKTDRKDARGIAQLLRMGWYRPVHAKSVASQDTRAVLVGRKLLQGKLLDVELSIRGILRGYGLKVGEVSRGRFAARIQELIAGHATLETVIGAMLMARAALWSEFTRLHREMLKIARADKICHRLMSTPGVGALVALTYRSAIDDPTRFGKSSTVGAYFGLTPKKYQSGETDRDGGVSKVGDAMVRTALFEAAHIMLTRATRFSSLKRWALEVAKRRGMKRAKVALARKLGVVLHRMWVDATDFRWGATAMAV

SEQ ID NO: 297962 - protein, 416 aa, unidentified
MDTVVERCCGLDVHQASVVACILIQEGRTVRKEIRTFSTMTRDLETLRDWLVAQGVTHVAMESTGVYWKPVHAILYGFFELIVANAHHIRHVPGRKTDVKDAEWIAELVRHGLLTASFVPPPAIAELRDLTRYRRKLVETQATERNRTLKLLESANIKLSAVATDVFGVSGMAMLKALIAGDAAPADIADLAKGRLRRKLEPLAQALAGRLTETHRFLLKLQVNRLEEMERDILALDHLIAEKAKPYSRQMGLLTQIPGVDRQIALVIIADPKGSASKMGVDLSHWPTAQKLAAWAGVCPGNYESAGKARSGRTRKGNLYLKSALFLAATTAARTKGSYLKDKYHRLKARRGAKRAGMAIAHKILMTAYHMLTNGTDYSELGEAYLDKLAEQRITRGLVHRLTNLGYKVTLEQQAT

SEQ ID NO: 297963 - protein, 343 aa, unidentified
MYYIGLDVHKRTISYCVKDAAGHVHSEGKIGSTRRELDVWIKTLPQPRMIAMEATIFTGWIYDHLLPHAEKVKVAHPLMLRAIAASKKKNDRIDAGKLADCLRCDFLPECHMATREIRDRRRTLRYRNLVIKQMVQMKNRVSGLLLETGVSYNKQRLHKVGYFAELMTTNKEVQESIRPLLQLSREMISRSQKLEYALVSSLERDPLLQERLRRLRTVPGVGPITALTWALEIGDYTRFSSIKQAISYCGLCGDEKSSADKVMRMPISKQRNKHIQRVLIEAAKLAPRQSHELALIHARELERGNRNRATLAVARKVVCYMLAVERRQQDFVPAEEFSRTVAA

SEQ ID NO: 297964 - protein, 268 aa, unidentified
MYIGLDVHKKLSYYSMVDGEGTEMKRGRFPTTCEGLDEFASKLPEGAKVAIEASTSGIFAYEYLDEGGIEVHLAHPVYVKPFAKKHVKTDKVDARVLAQLLRMDYLPESYVPGKEIRDQRVMIRHHASLVRLRTSIKNRVHALLAIEGIQTSKFSDLFGKRGMEFLKGVKLRQVRREALDNYLEVLKAVEERIEEMEAILKERAKITDEAKWLMSIPGIGYHNALLILSELGEIEQFSNPRSMVSYSGLALKVEQSGDYTRYASPVRA

SEQ ID NO: 297965 - protein, 410 aa, unidentified
MKRDEFIYVGVDLHKFQHTAVIVNCWGEKLNEITFLNKPSLFPDFIRFVEEQAEKGITPVYGLEDVNGYGRSLAVYLLERGYIVKSVNPSLSYAERKSHAMTKKSDSWDAECIAEILARKITQLPDAAPSDIYWTISTLVGRRDTLVKQLGSLKNQLHLQLSHHYPSYRQFFSQVEGKTALAFWEKYPSPHHLEGVTMDELRLFLLNASNNSLSTKKSKTILSLVKFDGETKRDYQSQRDFIIQSLVRDIRFKQEEIKRVEKELNGLVKSLGMQLATMTGIDTVTASALISEIGDIHHFSHSNKLARYAGIAPVLFGSGGKETYQKSQQGNRNLHHIFYNLAVQQVQVSKGSKTPRNPVFYGYYQKKLSQGKTNKQALICIMRRLVNIIYGMMKNKTAYIMPEQVEKKAS

SEQ ID NO: 297966 - protein, 376 aa, unidentified
MEQSITFVALDTHRDTITGASLPPGSERPTDIRTLVNDVPRLLKWLRRVERKYGEIRVCYEASGAGYVLQRELEAHGIRCEVVAPSLIPKRPGDRKKTDRRDAEHLAIQYRAGGLTMVSVPDREDEAVRALLRCRRAQTKDMLRARHQVLKHLRRNGLVFRGTRNNWTQAHWAWLERVELEHRAEQVVFRMHLEKLRYLMAQRDEVDEEISAVAFSEAYLERADRLMCFKGFSVYGSMGLVSEIGDFRRFPTAQAFMDYVGLVPTEHSSGETVRRGGITKTGNSHCRHILIQASWAIVQSQPRVVNRLRAQWEGRPSWLVALALRAMKRLYGRFRYLTNRGKLRQVAIVAVARELAGFVWAAMQDHEGAQRASRVA

SEQ ID NO: 297967 - protein, 344 aa, unidentified
MDHSAGLDVSVKETSVCIVDDTGKIVREVKVASEPEALLAVLKNPAYHFKRVGLEAGPLSQWLFSALAEAGLPVICVETRHMRAVLKAQINKTDRNDARGMAQMMRVGIYRPVHVKTLRSQKLRMLLTHRKLLQSKAIAIDNDLRGTLRNFGLKVGMVGTVRFEVRIRELVENLPDLAALIEPLLIVRRTLREQFCILHRRLLAIVRDDEVCRRLMTTPGVGPVVSLTYRATIDVPARFRKSKSVGAVVGLTCAKYQSGEVDWDGRISRCGDEMMRTMLYEAAQAMLRSKKWSWLKAWAMQIARRRGMKKAIVALARRLAVIMHRIWVDGTEFRWTREQATTAA

SEQ ID NO: 297968 - protein, 325 aa, unidentified
MKDIYIGLDIHTDGFYGTMMDTQGKVIAEGRSNYNKEAVQNFFAGISSARMKIAIEACGIWRGVYKLLTEIGYEVVLANPLKTHQIAAKKKTDKVDSRILADLLRTGYLPEVYIPSEDVTKLRDIARHRARLVRVRSLLQCKIKAYLSRDGIKHPGGWSKESLEFLKNLDRRIANFVRIIGTINEEIKEVTREINEIARNRYLTKLLQTVPGIGEFSSLMILGEIGDIKRFDNPKSLVSYAGLCPGIYQSGNKSHDVINRACNKWLKWIVTECSGRAAMLDNRYMKHFYRVKRRKGFKVARRSVARKMLTDIWYILTNEEPFKES

SEQ ID NO: 297969 - protein, 391 aa, unidentified
MELLHRRCCGLDVHKETVVACLRLVSDGQVTTEVRTFQTTTADLQRLSEWLAANECTHVAMEATGVYWKPVWHILDDGEFELVLANAAHVKNVPGRKTDVNDAMWLAELLAHGLIRASFVPDTQTQEMRNLLRTRKQLVREQSSHVLRVQKTLEDANIKLDSVLTDLMGKSGRAMMEGLIAGETNPTKLASLADPRAKASHEEFREALRGRVTKHHRFLLRLHLNQIDALDAAMATLDAQVEANLGPFRTAVDLIMSIPGIKNLSAHVIISEIGIDMSRFPSDAHLISWAGICPGNDESAGKRRSNRLRKGAPWLKTTLVQCAWAAVKKKNSYLQAQFYRIKVRRGPKKAIMAVAASILTAIYHMLKDGTMYQDLGCNHFDRRSTDQQKNA

SEQ ID NO: 297970 - protein, 367 aa, unidentified
MKKVSTAAVREAKNFSEQKLTIGLDLGDRSSWYCVLDEAGVILLEQRLGTTPKAMREVFGGMPRSRIALETGMHSPWVSRVLNELGHEVIVAQARKVRLIGESRKKDDRMDAQTLARLARIDPQLLCPVKHRSARAQADLTVIRARAGLVRARTALVNTARGLAKSYGERLRGCNVRNMNPEKAEGLSPELQTALEPLLAGIESLSERIRECNERIEKLAQESYPQVALLKQVKGVGTLIALTYLLTLEDPHRFRKSRDVGCYLGLQPGRRNSGQSEPQMHISKEGDRYLRTLLVQGAHHILGPFGADCDLRRWGLKLAERGGKNGKKRAIIATARKLAVLLHRLWVSGEVYEPLRNSHPAAMPAAA

SEQ ID NO: 297971 - protein, 377 aa, unidentified
MKKELYLGLDVHKDCIITAVAEEGRKGEVRETGALSNDLHAVEKWIGRLRQAHGKEVILRACYEAGPCGFGLARRLKQLGVECEVVAPSLTPKRSGDRVKTDRRDARKLARLLRAGELTAVYIPEPTDEAMRDLCRARSDAVDDRRRSRHRLKGFLLRHGYRYQGKSSWSAAHERYLRELVLPHPAMKVILEEYLQGIAAADQRIARCEAAMRDLLEKWRLAPAVHALMAMKGFQTVAAMILVSELGEVHRFTHPRQVMAYLGLVPTENTSSERRRQGHITKCGNAHARWLLVECAQHYASPPKVSKELSWRQQGQSHEVRAISWRAQNRLHRRYTRLLARRLQRNKAIVAIARELCGFIWELLRTQPCYQAQSRSV

SEQ ID NO: 297972 - protein, 323 aa, unidentified
MTTSPLGIDISKLKFDVCLVREGGKLRHKVFPNTSAGFAQLSAWLSKHHVERAHACLEATGTYGEALATYLHEAGHVVSVVNPAVIKAYAQSHLSRAKTDKADATLIAQFCAERHPPEWCPLPRAGRELQALARRLDALLEMRQMEANRLEVAAGAEAVRESLTGHIAFLDAEIARTEGQIRGHIDSHPGLRGQRDLLLSIPGIGETTAAKLLAEIMDVKLYESARQLAAFAGLAPRLHESGSSVRRKAHLSKTGTPRLRKALYFPAVVAIRHNPYIKELSERLRARGKCPMQVIGAAMRKLVHIAFGVLKSGRPFDPEMKTA

SEQ ID NO: 297973 - protein, 341 aa, unidentified
MQPYFVGLDVHKQLIAFCVKTADGEIVAEGTIAATRAALNEWVKTVPGPWHGAMEATMFSHWIYHHLKPYAARLQMGHAARMKAISAGKKKNDKIDARTIADLLRCHLFPECFVISPELGALRQQMRFRRLVIEQEVKFKNKTAGLLMGAGVEYQRRRLHGKRYFAELLRESQWIAGEMRPLLEFNRGQIESLQAMDRRLMQMLQRHPRLEERIQFLRGIDGVGPVTALTWALEVGTPERFGSIKQAMSYCGLTSALRESAGQQKRGPISKQRNRHLQCVLIEAAKIGPLYNEKLRETYQKACEKGAHRNRATLAVARKLVAYLLAADRTFFSTPVPAVPA

SEQ ID NO: 297974 - protein, 343 aa, unidentified
MTHYAGLDVSVRTTSVCIVDEAGKVVRETRISTEPAAIVAVLTEAGILFHRIGLEAGPLSQWLFGALIEAGLPAICVETRHMKAALAAQVNKTDRNDARGIAQMMRVGLYRPVHVKTRSSQEKRTLLTSRKLLQDQIRVLENHIRGSLRTFGLKVGLTSAGGFESRVRELIETHPPLSMVMVPLLAARDTLRAQFAGLHRALLTHVRSDPICTRLMSVPGVGPIVALTFQATIDQPQRFARSKAVGAHLGLTPRHYSSGETDYVGRISKCGDAMLRSTLYEAAHTLLTHTRSWSSLKAWGVRIAARRGLPKATVAVARKLAVILHRMWVDGTEFRWGAAPSSV

SEQ ID NO: 297975 - protein, 379 aa, unidentified
MAIKQESVGRQETVYAAIELSKKTWVLGIALPDRDRPSIYRVTGGNLGELVARLRAAALENRRILVCYEAGYDGFWLARALAKFGIECRVLDPASIQVNRRARRVKTDRIDVLALLRALIAIDRGERHVCAVVRVPSVEEEDARRSHRERQRLVRERTGHINRIKGLLFAQGIRGIEPKLRRTRIDFAALKTAEGHPLPDRLRRELEREYARHDLIQAQLREVEKERDTADAQDPVVERKRQMLVALQGVGGTSAAILAREVFARSFASRRQLGSYLGLTPSAYDSGSMTRCQGISKAGNSWARRILIEVAWLWQKHQPVSPLSHWYIQKTTGQSSRIRRIMLIALARKLAISLWRYVETGLVPEGVVIARAESRCAPA

SEQ ID NO: 297976 - protein, 424 aa, unidentified
MSDSLSSLPFHDLTHFAGLDWARESHQCTVVDRAGVVVLDLAFAHSAEGWASFREKISAFPKLAVAIETSCGPAVEQVLALNLPVYPLNPKAAQRYRDRKRPDGSKSDPIDAWSFADALRTDGHAWRVLRPMDALTMELRLLCRDEIALIEQRTALVNQLQATLHEYYPIVLKAFDDWTAAWTWKFVIAFPTPQELAKAGKRRWEKFLHVHKLYRPATAQKRLEFFAQAMSFTNPNPAVTAAKSFLAVTLAEQLLTLEGRLEKYRARINQLFAEHPDHDLFGSLPGAGQKIAPRLLGEIGADRELFASVEGLQSYAGVAPVTRKSGKSRWVSIRRACNKVLRATVHLWASLSIPQCAWAAAYYQRKKECGMAHAAALRCLGNRWLKIVWRLWQEGTPYDEARHTLDQVRHGSWVVKLLPEAAKP

SEQ ID NO: 297977 - protein, 405 aa, unidentified
MIEPVVKRVAGLDVHKMVVVGSVLIEEIDGSIKQETREFGTFKRDRRQMCQWLKSHEVELVAMESTGIYWKSIYATLERAEILTYVVNARHVKNVPGRKTDVSDSQWLAALARMGLLRPSFIPTKDLRELRIISRQRMKINGTLSAEKNRLNKVLDDAGIRLGGVASDIDGVSAQKIIEGIIDGKPIEELIACARGRLKAKADDLRACLDEELSERHIFLLKALQKHIQFLKSELEDIDAYLFAAMSPYQKQWEILQTLPGIDKVAAMVLIIEIGIEMERFGSADQLSSWAGMCPGNNESAGKRKSGKTRKGNQAVRSILCEIANAARRTKSQFKSKYESLVIRRGHKRTIIALGHKILRVIFVMLKNVKPYFDPGIDYEELMVDRNAPRWLQALKKFGYLPQTV

SEQ ID NO: 297978 - protein, 400 aa, unidentified
MSLAVGIDVGAYKCAVARCHQGEREAERKVINIATNRAGYVQLDAWMAGLGESADVVVMESSGHYWFNLASHLRRQGYPVAVVNPVQAKYFAKSRLQRSKSDPADARTLAALGMRDQPRISEPLLGAELKEASRFAMRLVREQAQVCQRIQRLVDIGFPELREVWDDPTCVSALAVLRHAPTAATVARMQEHRLARLKRPGAGGRVIGPMKAAQLKRLAQASVAAPELEQQVAFEMRLLVAQHDLLDNQIAMADVRVASLLDGDVAARLLSIPGVGPSIAATLMAEIGDIWRFTDVDQLLAYAGVHPKEQSSGQKGANPETSWTMAKTGNAYLRAAAYRMAVVGVQHNPIIRAHYARKRAAGKSAMNALGHCMSKSLAIVWGVWRGGRDFDPARGVAGSA

SEQ ID NO: 297979 - protein, 387 aa, unidentified
MLQVNDLSRSLAALDPISTLVVIVEMSKTSWLVGGVVPGVERQPLKKLESDATALLRLIERWRIEAVRAGRPIRRIALAYEAGRDGFWLARWLIARGIEAHVIHSASVAVSRERKRAKTDRLDAAILMRVFLGWLRGERGHCGMVAIPTMEEEDARRPSRERESLVNERSRIVNRMKSALTRLGIRGFKPHLRRAPERLACLRTAEGTGLPANIIEELRRDMARLALVREQISSIEKTRAERLERAPDTGPHAMVRLLSRVIGIGIETADMLVREILSRKLRDRRAVARYAGLTGSPDESGLKSREKGLAKAGNARVRRGLIQLAWRFLLFQKDSALARWYRTRTEGPSGARKTTMIVALARKLLIALWRLATTGEVPDGVELRPAA

SEQ ID NO: 297980 - protein, 340 aa, unidentified
MNELKNKKHYLGIDISKDTLDLSLIHKSSYGTFKDKKVLNSFNGFKMLYSWLLKEKVDLNECLICMEHTGAYGLLLFAWLSQTGIDYCVESGLEIKRSIGMTRGKSDRVDARRIADYVYTHVEKLKLFKFPSTLMIQIKQSLTYREQMVKIKTALKNSLKSHNEYQKVSGLIKISEQISQQIKEQEKHIKEIENQIVDLINTDKNVKKNFEMAKSVKGIGFVISAFMLVTTNNFTGFENGRKYACYAGVAPFEFVSGTSIRGKTKVSNLGNKKIKALLSNGANSACKYDPELNAYYKRKSKEGKDHKVIINAISCKLINRVFAVVKRQTPYVSIYEQNFA

SEQ ID NO: 297981 - protein, 368 aa, unidentified
MDYRVYCGVDFHARQQTICSLTTEDGVMSTHELKHQDKAELKTFYAQFSGPVLVGLEASGYSPWFEQLLEELGHEVWLGDAAEIRRRARRRQKNDRRDAELILDLLIHNEFPRIHRPTPSSREILRMLRYRHKLVKMRTIIKNSLQALSIQSGLSLRARLFTRAGLEQLRATTMSPMMQYQRDQWLQSLEPLHQRIVEAVNWLEQEAADDERIARLRTHPGIGLLTGLGLVHTLAPIARFSNQRKVAAYVGFDPKERSSGEKKRYSGISKAGSRVLRFLLVEAAQGACKGDPELKRFYLRLLHRHGKPKAKVAVARKLLVRSYILLRDGIDYAEFNRRAVAARLARKSQGPNVPDSLIEQPTSIASDE

SEQ ID NO: 297982 - protein, 391 aa, unidentified
MICVGIDVAKDKHDCFIISSEGVVLADVFTIPNNREGFNCLLGRIQACAMPGNEIKVGLEATGHYSCNILGFLLDNGLDSFVINPLHTNLYRKSLSLRKTKTDRVDARTIAAMLMSDVGLKPYTDTAYHNEELKSLTRYRFDKVRERAQLKQSVSRLVCILFPELEKLVPTLHMASVYALLDEFPGAQQIADAHLTHLKAVLHDASKGRYGRDRAIELREAAKASIGARMPAKSLELRHTIRLIRELDAEIDEIESAIQRIMDEIHSPITTIPGIGTRMGAMILAEVGDFSRFDSPDKVLAYAGLSPSTYQSGQLVNGYAHMEKRGSRYLRFAIFNATKYVCHWDPTFAAYLAKKRAEGKHYNVAISHAAKKLVRLIFALEKSGEPYRQVA

SEQ ID NO: 297983 - protein, 409 aa, unidentified
MQVIHVRCAGLDVHKRTVVSCVMISLPDGGVEKHTRTFGTMTPEILALSDWLKGYGVTHAAMESTGVYWRPIYQLLEGQFTLLVANAQHIHRMPGRKTDVKDAEWLADLLRHGLIAPSFLPAQPQRELRELTRHRSNVAARRAQCINEVHRTIEGTNIKLSSVATDITGKSATDMLRHLLSGQYDADFLAELARGVLRKKIPQLRQALQGVVRPHQQLILSQLMADIEALEQQVKALDAEIGRRLEKEQELIERLDEIPGVNSKVAQVIVAELGTDMKRFGSASRAAAWSGMCPANRQSGGRHYRARSRFGNKHLKSALTEAGRAAGRSIDTYLGAQFRRITARRGSKRAALAVGHSILTISYHMMERATRFEDLGADYFDRRNPQAVKNRLVQRLEKLGYKVSLEQTS

SEQ ID NO: 297984 - protein, 340 aa, unidentified
MLHITTIGLDLAKNVFQVHGMDHEGGAVLRKKVRRGQVLKFFGTLPPCLVGMEACGSAHHWARELRAQGHEVRLIPPQYVRPFLKTNKHDAADAEAIAEALVRPTMRFAPIKSADQQAVLMVHRSRELLVKQRTMLINAVRGHCSELGMIASQGASKVTDLMVMIEDPDDGRLPAFAREALGVLITQLQAVKEAIRTLESKLQAWHRSQQASQRLTTIPGVGVITATALIATIGDGSQFNSGRHLSAWLGLVPRQHSSGGKSRLGRISKRGDGYLRRLLVHGSRAVLRWQRAAPKKPSPWIGELLTRRPTNVVLVAMANKTARTVWAMMRDRQDFNTVFR

SEQ ID NO: 297985 - protein, 395 aa, unidentified
MSHWIGIDVGKTFHWASVLDDEGREVLSRKVLATEEDIEAFRSQVGALGAERAFFCVDMMGGPATLLEAVLPGHGERVFYLSGTALNRARDAYRGGEHKSDPRDARVIANQLRMRWRSLPEINPREESSAEMRALLAHRRDLVQDQVRRITRMRGLLLETFPGLEAILDLTKKDGPLVAVAKVATPGAARRLGEPRLTRWLKARGIRKAEELARRVVEAAKAQRHELPAAELKAELVAEIASEVLRTKGRLAALHERLEELVSANPKAEIVRSMPGMGTIFAAEFVAEVGDIGRFASADALAAAAGMVPVLRASGSTSHLRRSRRGNGVLKRALYRSAFSAIAHHGPSSVFYRRKRAEGKTHHQALIALARRRVNVLWAMLRDEQRYREQPPKAA

SEQ ID NO: 297986 - protein, 344 aa, unidentified
MENYAGIDVSLELSSVCVVDAHGKILKEAKVASEPDAFVEFFEKLGFAVKRIGLEAGPLSQWLHARLKRAGFETVLLETRHVKAALSAMTVKTDRKDARGIAQLIRMGWFRPVHAKSIGAQEIRALLVARKQLLGRLIDVELSIRGILRGFGLKVGPVTRKNFEARIRELVAGQATLERIATSMLLARSALKAEYGRLHKAVLAIVRDDAVCRRLMTVPGVGPLVAITYKSAIDDPHRIVKSKAAGALFGLTPKKYQSGEKDVTGGITLAGDEIVRTGLYEAANVLLSRITRFSKLKRWGMDVAKRRGSKRAKVALARKLAVILHRIWVDGTTYRWAEAGSIAA

SEQ ID NO: 297987 - protein, 329 aa, unidentified
MKKEWFVGIDVSKKWLDVAIFVENSDLKGFIHTQVNNDKQGYRELLRWLKVHDVDAFTCTYGMEHTGFYSDGLQHFLDKKGYKYTMLEPAVIRHYPIQPREKNDRLDAAKIADYLFRFKDTIKMGRVPDNTMEELRNLHRERKFYVEDRVCYMNRKQVVGKEEAKRLDKMITMLDKQIDSIEEKIREIIRNDESLMENYLYLTSITGIAFVNAVNAIVITQNFTAFKTARDYASYLGVAPHTKTSGTTVRWKPKPRKHCDLTAKADISQAAKIAVVHDVELKQFYERKCNGKEDADTIRKAMNAVKFKLVLRMFAVVKQKHSYRQFTTI

SEQ ID NO: 297988 - protein, 413 aa, unidentified
MDVFCGIDWAEGHHDVALVDDTGKLLAKCRINDDLDGYRLLLDLLAEHGDTVETPIPVALETSRGLLVATLRQGPRKIYAVNPMAASRYRDRHGVSRKKSDPGDVLVLANIIRTDAPVHRPLPADTDLAQAVAVLARAQQDAVWNRQQVANQLRSLLREYFPAMIEAFRDKPGTLTRPDARRILAVAPTPALAAKLQMWKLTAMLRRAGRRRGIEADAERIQQLFREEAPRQLPLVEDAMGRQALALLLQLDVACEAVDDLARATEEAFRAHPDAAIMLSFPGVGPQVGARILGEIGDDRTRFATAGGLKAYAGSAPITRASGKRRYVGRRFVKNNRLNHVGHLWAFASLSGSSGADAHYRRRRAGGDWHMQALRHLFNRMLGQLHHCLLTRTPFDEAIAFPSEPQAAATATA

SEQ ID NO: 297989 - protein, 413 aa, unidentified
MNHIFVGVDLHKRHHTAVFLNGFKRKLGEFKFDNRPSAFPDLIKAAAKVSKGKGVIYGLEDTGGYGRPLAAFLVDHNQAVKEVNPSLASAFRKANPIVHKSDSWDAECVGYVLVDQLEKLPDANPIDHYWAISQLVTTRNSLVREHIGLINQFHVQISYHYPSYRKFFSQVDGKTALAFFERYPAPHHILGTSVEELREFLLKPSNFACSLKTAEKILKLIHSDGTTKRDYQEDRDYVVRSTIRRIQSNKKEIESLEHRIALLLPQTGYRLETMYGIDTVTAANFVAEIGDISRFGSSDKLARFAGIAPVLIGSGDKHKDHKCRQGNRELHQLFYQLACRQIGVKRGSKEPNNPHFYAYYQRKQSEGKTKIQAIICLMRKLTNIIYSLMKNKSEYNMPSSSNLQAGMSMGIKP

SEQ ID NO: 297990 - protein, 332 aa, unidentified
MNNYVNAIGIDISRNTFDVHDYKLEAHKEYQNSESGFKQLLSQARKDHGKNLNGIIICMEHTGLYSLPISVFFTQKKVSFSMIPGLEIKRSLGMTRGKNDKIDAYKIARYAYLRREEIKEYELPSEEILKLKSLLSLRERMVKHRTAYLGHLKELKAFYKKIKNPLLFKTQEKLIKELSSQIKRIETEMLEIIANDPKLKKLYYLVTSVKGVGLVVGITFLVYTNAFTAFENWRQFASYSGIAPFPDESGTSRRKPKKVSHMANKRVKALLSNSASTSIIHNPEMRIYYNKRIGEGKSTMSTLNIIRNKIVSRVFAVVKRGTPYVDTLKYAG

SEQ ID NO: 297991 - protein, 353 aa, unidentified
MNSLTDLREVVDVVIGVDTHVHTHSAAVVDAATGGVLDEITVEATAEGYAELVEFANNHAMLRAWAIEGTGGHGAGLSRTLLESSEIVIELDRPKRAARRNGAKSDPLDAIRAAREAMARPRLGTPRTGGERQALSVLLAARRSAINASTEAQQQVFSLVIAAPEPIRVRFRGQKLAAMLNTAANLRVHASWDTETTSTVVALRTLARRAHAMLKEARELQKELVAIIRSWRPDLLEEFGVGPIVAATVLCAWSHPGRIHSEAAFAMLAGVAPIPANSGQVTTRYRLNRYGDRQLNNTLHTVVQSRIQYQQATRDYVARRTAEGKTSREIKRCLARYIARDLYRLLENRATTA

SEQ ID NO: 297992 - protein, 408 aa, unidentified
MNQNIIFGIDVSSRSSTVCVVIDCIKQGNTFTITNDSFGYQDLLDHLNQYLITPLVVFEATGVYSLSLQAFLEDYHIKYLKLNPLKAKKLMDNNLRHNKTDKLDAYHLALIQFSSPQKLQAPQSREYHELQAASRYYEELTRALIVNKNQLHRNLQSTFPQIEHILSNPSGKIYWTIVSLFPHAQYVLDMNEDQVKQRLLSISGIGRQRAQYLTARLYAFARQAYPYDRKNGITVRAIQRTISNLLSLSNERDQVINYMEKLTKVVNARALTIYLSIPGIARTTALRLIAELGDLRRFNTSAQIDAFVGIDPGRSQSGDKDSRLGITKHGNHIARKILYRVITQMETVKTTCPCHITDYYDKKKQSSHSRGYKKIAIASVHKLIRTLFALIKHNQLYDYNIATQNQKL

SEQ ID NO: 297993 - protein, 414 aa, unidentified
MPNTLIVGIDISSQSNSIFFIDDAGNQLIKKPFSLPNDQEGANELIKRVIDCLSQYNLSYVKFGMEATSHYGWHLHLYLASSSELLPYKPTFYVLNPSIVKGFKKIYTFLPKTDNIDAVVIAECVRFSKLNPTPLPDFKYAALQRLTRMRYHLVHNLTREKNRALNLIYLKFSTYSQDCPFSDIFGKASCAIIENFTPDDIASMPLEDLIKFVSDNGNNRLSDVNKIAEILKTAANRSYRLHPLLAEANDLALSMTLENIRFMQEQLKKLDKEISKLLKAFSQTLTTIPGIGDVLAAGIIAEIGDIKRFKNEAALAKYSGLVWTQYQSGNFNAQETSLAKCGNQYLRYYLVEAANCVRVHTVRYKAFYNKKFSEVTKHQHKRALVLTARRLIPLIFAMLSKGQIYQERGDVYNT

SEQ ID NO: 297994 - protein, 382 aa, unidentified
MQPINTVNPTIYLAIELSASTWLIAARLPGSEKPHLHRIEGGDTAALFALISSLRARVARRLDAAIDVVCCFEAGRDGFWLHRLLTAHGVANYVLEPTSILINRRARRAKTDRLDAIGMLRVLAAYLRGDRQSCSMVCVPTPEDEDAKRIHRERENLVQEKLRIENRIEALLFTQGIRKRPSLRSWERDLAVLRTGDGREMPRHLRAELDRLRRRLVTILELIREVEAERDEVVTTNPEHQTSRKIVALCRIRGLGENFAGVLTREVFYRSFDNRRQIASYVGITPMPYQSGSMDRDRRISRAGNPRARTTMIQLAWLWLRYQPGSELAEWFRKRVGTLAGRTRRIAIVAMARKLLIALWRYVETGVLPAGAEIRPESVAAA

SEQ ID NO: 297995 - protein, 456 aa, unidentified
MSQRKYAPPEKPDPPPLVLLNPDAAGIDVHSDVHVVAVPADRDPEAVRSFGANSCDLHQIAVWLKACRVTTVAMESTGVYWIPLFELLEAQGFEVQLVEPGQLASCGARPKTDVLDARWIQRLHSYGLLRGSFRPPEAVLELRGYVRQRAMQVRYGASHVQHVQKALEQMNVKLTEVVADVTGVTGTRIVEAILKGQRDPKVLATLRHEKCAKSEAEIAAALEGTWRPEHLFELEQAYGLLQFHQRLVTECDQKIAATLAKLEDRAGGKQREKKARQRGRKRNDLRFDATGPLFRALGVDLTEIEGIDVGTALVILAEIGVDVSKFPTEKHFASWLGLCPMDHRSNKSQKKRGPRKGKNRLAVALRMCAFSLSRTLTANGLFYRRIKSRVGARAAITATAHKLARLVYRMLKYGREYVKQTASEYEAKMRSQVEKSLRRKAKALGYELVPQTATTA

SEQ ID NO: 297996 - protein, 367 aa, unidentified
MKKISTVAVKQSKNISHQKLTIGLDLGDRNCWYCVVDEAGEIQLEQRVRTNEKALQEVFGGLPRSRIALEIGTHSPWISRLLSELGHEVIVANARKVRLIGESRKKDDRLDAQTLARLARIDPELLYPVKHRSMQAQADLTLIRARAGLVRARTGLVNSARGLAKSYGERLRGCNVRNMNPEKAESLSPELQRALEPLLSAIEELSERICQYNERIENLAQQNYPQVALLKQIKGVGTLIALTFLLTLEDPHRFRKSRDVGCYLGLQPGRRNSGQSEPQLHISKEGDPYLRTLLVQGAQHILGPFGVDCDLRRWGLKLAERGGRSGKKRAIVATARKLAVLLHHLWVSGEVYEPLHNSNSTTVAAAA

SEQ ID NO: 297997 - protein, 404 aa, unidentified
MNSIGIDVSKGKSMVAIVRPMGEVVQKPFELIHDNRSLKSFAVAVAKLGSDTKVIMEATGRYHEPIADVLTRIGIPVCILNPIVIKQSGAGSVRKVKNDKKDALKIAKYGVDNWSNLRHHLPMDTLRQQLKLFSRQYNIQMKTATALQNNLISLLDKTFPNANDLFSSPVKDDGHQKWVDFVLTFWHSDMVSELSLEAFTKCYHEWCKQYGYNFSCAKAKSVHDVTHTHFTILPKSDATKMLITSAVEALMAVMKQRAAVKKEVINLAQQLPEYECVLSMFGVGEITAAQLMAELGDVRNFANRGSIVAFAGIDPEVNQSGNQNRESNSSSKRGSPHLRKTLFQVVSSHLKRSPVDEPVYQFLDKKRSEGKPFYVYMTAAANKFLRIYYAVVKAHLNALSDSNN

SEQ ID NO: 297998 - protein, 454 aa, unidentified
MQKQDSYDYYVGIDCAQNKHDFAMKNNQDKFLIKKGHFSNTLQGYEKFLNTVLSKCLDKDKILFGMEVTGIYGTNLYERLKSDGYHVVMIFPDSVKNYRDYKRLNKTDKIDSACIAELLLNGDAQIVHAEKNGYIDLKAYIRRRNALKVTCTQETNRFLAKVCLYFPDLLKVFPSGRATLKAIFSIYPTPYSIIEADFNELVSVLQKASKNKFGVDKANELIHAARNSIVVRKSISDGELYNIHSLIDSIDSLESEIRNLEKIIDSKAEEFPAYHVLLTLTGCGKITAATIVAEIGDISRFHKASQIVSLAGLYGDNSKSGSSVNKRGKISKKGSRYLRHAIYMVAEFARRNNPIFKAYFTKKKNGDRTKHILAVNAVANKLCKVIYSLMKNQSTYIIQYRDLAKLSESTQNEFFQNAETDFSAKTRRKKYLYEDEYGELHEFVFKSIKTALIE

SEQ ID NO: 297999 - protein, 421 aa, unidentified
MDSYRVAGIDVHKTMLAVVVTDAAGGGESRFERRKFGTVDSELRALSEWLAEREVREVVMESTAQYWKAVWRELEPKFKLHLAQAQSNRAPRGRKGDFVDGERLVRRHIAGELILSFVPDPEQRIWRTLTRTKLQLTKDRVRLHSQLESLLEDARIKLGTCVSDLLGVSSRRMLQALADGETDAAKLAEMADKALRATPEQLQDALCAAATLNTLHRQVLGLFLDRLKLIEKQIGTLDQSIADALKGHHAAVMRLAEVPGYGADSAQQVIAEVGPQAATFPSAEQFASWVGACPGREESAEVSQSDRSPKGSRQMRRILTEVAHAAIKTEGSIFQQLFRRLVPRIGFKKALWAVVHRLSRVTWKILHHGVQYEEKGAVPDPKLAKRRAAKLARRLRAMGYIVQLTPVARPLTNSATIPANA

SEQ ID NO: 298000 - protein, 411 aa, unidentified
MLKIVYPICCGIDVHKTFVVACIASTNSAGVTTYKSKRFSTYTKNLRELSDWLAANNCKDVCMESTGKYWHPVWNVLELTCRPVLAHPKYLKAIRGKKTDKKDAKWIADVFKHDLVSGSFIPPAIVRQLRDLMRYRCKLTNYTTGEKNRAQNCLTTSNIQLDHAFSDVFGKSATSILNYLLEHPDEKDFDVTPFVDRRCKTPIEEIQLSIDGNISREQAEKLKIIRSHMGSLELCKANLESIILTLAQPLLPQINLVSSVPGIKDFSAVAVISEIGVDMSVFPTAKHLCSWAGLAPQCNESGGKKKSSRISRAGVYIKPLLIQCANAVVKSNKHPEIRNRYLSIKKRRGHKKAVVAIARMLLTAIFHILKKNEPYNPQLYRQSDVSPVDPVAQAVKMLEKRGFVVSQVPDK

SEQ ID NO: 298001 - protein, 401 aa, unidentified
MNPVIGLDVSKGESHAQAFSDRGTPYGKTFRFEHNLEGLASFLRFAQNVESFAGQRPAIVLEATGHYHSPVIQFLDDHQYLYIVINPLISHQAKKMNLRKVKTDVADAYQLGEMFYKEELEPYKKRGQYLMNLRYLTRQHESLTEIYVQVKLQFQAVLDQVFPEYHGVFGDLYSKVSLRFLAQYPTSQSVLALSEENVTANIKRLVGHVTSNRWSLDRAQKLMAAAKRNPFRETAFPSHLISLELFINLLLQYQEHLTKLDKSIETLAEELMEYDLIQSIPGIGTKIAATILAEVGEIDRFDHAKKLVAFTGIDPSVFSSGKFTATRNKITKRGSRRLRTALYQAVRCGLKGSRNKRIRAYYDKKRAEGKLFKVAVIACVNRLIHWIYAILTKKEPFRLTE

SEQ ID NO: 298002 - protein, 402 aa, unidentified
MNSVGIDVSKGKSMIAVMRPFGEIVVTPYEVRHTDSELSELAKLLKSLDGETRIVMESTGNYHTPIAWVLYDAGFYVSVVNAMLVHDYKNNSLRKVKTDKKDSIKLANYGLDQWNDLPRYVPEEDTRLMLKNCHRQYQQYSKVQTMLKNNLISLLDTAFPEVNRLFSSPPRADGSEKWVDFVATFWHCECVCGLSEKVFVTKYQKWCKKHGYYFSQDKASDIYAEACGHISVMPKTDTAKLLVEQAVSQLQATSAALAALKKEMQALASSLPEYPVVMKMYGVGPTLGPQLIAEIGDVRRFHSKKALVAFAGLDSPPNDSGQVTNNHRRMTKRGSPALRRTLFVVMGIILQNSPVDEPVYRFMDKKRAEGKHYRVYMMAAANKFLRIYYASVKAYLDALEEA

SEQ ID NO: 298003 - protein, 497 aa, unidentified
MSNKASIYPECNPQVIKLFERAGHPSKVLCVALDYAKAQHTALICNGLGDRVKGTFVVDNTPAGAKLLLGQVRQCAQQRQVRPGQIFFGGEDYPSFAENFLRYLRQKDFLVLRVNAWEAKQQRSNFQASTDALDLLGIARCCLNRRGQTVQELPAAYANLRIATRDREHLVRSATAASNRIHTYVDRLFPGFLSETKSGLTPFCEASLDLMAERFSPAELRRRPQQPLGQWLARRGVSEPHAVAAQLKDLAKDALAPAPEQTVLLQRTLSQLVAIYRSLQGSIGTMDRELAYWLARTPGALLTSIGGIGITLAAGWMAELGPPSQWRAVRRMCSYAGVVSKTKQTGGPEKEAVAGHVQQRCNKRLKNVVLQAVEKVRQFGPEDLRRTAQDLEAHGSHTEFGMAKRLVRLAKSLVLTGTIYRPKALLDPDTPKEVLLLYYQQTWDKLVQKWKGKADLKDVFAPGHPLGQWRQVAKELYALQLRLPVQRADRLTSASTP

SEQ ID NO: 298004 - protein, 356 aa, unidentified
MEYIAFDAHKRYTLASVVRPDGQLVREQRIAHERGALREFLERCERGSPVAVETIGNWYWIVDEIEAAGCMPRLVHARKAKLMMGEINKTDKLDVRGLNRLQQTGTLPTVWIPPGELRDQRDLPRTRMVFVRQRTQLKNRIHATLAKYALHDVEVTDLFGVRGRIVLQQRLDRLPPHTGYATAQLLEQIVSLDRVIGDLEHRIQTIFKPTPVIQRLLTVPGVGLTLAVVIALEVGDVTRFVTAEKLASYAGTTPRVHASGGKTRFGPSRPDVNRYLKWAFVEAANAICLTRGRAAPRHVSRLYARVARRKGHAKAIGAVARHLAEATYWMLSRGESYREPKAFTPFRPRGISAQAP

SEQ ID NO: 298005 - protein, 341 aa, unidentified
MKNLFIGIDYSKKKFDVSLLEREKIEEIKHECFENTPEGCNAMLKWILFQTNVPSEEWLFCGEHTGLYGVLLTELLLKKKFFVWIENPMQIKLSAGLKREKNDKVDSQEIARYAYRFQDKARCFQIQDKSLKSLQLLLSFRDRLMRNKHSILVAAQEIRAVLKRDTTARYIYEQTKRDVERLNKEIKDVESRMKEIIQASEELKVNYLLVTSIKGIALINAVALMIHTDNFTRFQNCRQLACYAGVVPFEKTSGSSIKSGSHISHLANIQIKTLLTQAARSAVLYNPELRQYYERKIKEGKLEQVVINNVRNKLLHRIFAVVQKKQPYQINYINSLNKNAA

SEQ ID NO: 298006 - protein, 342 aa, unidentified
MFIRPLFPLPHGKLLMESLLETKASTIVDFIQGLHGTLSLTFEEGTSAAWLHDLLKPHVSRLVVCDPRKAALLKEGNKSDRIDARKLAELLRTNQLKAVYHEEHGIRALKELGRSYLTITKDVTRVMNRIKALYRSWGIPCSGTSVYAPRHRAEWLAKIVEPGVRVRAEHSYQQLDSLQPLRLQARRELLRESSQHPAVKLLRQIPSIGPIRAALLVALLQTPHRFRTKRQLWAYSGFAVETHDSGEYRYVRGKRQRNRERISVRGLNDNHNKDVKNLFKSAAISASTRPGPLHDCYVARVEKGMRPTMARLTLARKIAAITLTIWKKGVSFDPKHLHRQAA

SEQ ID NO: 298007 - protein, 350 aa, unidentified
MSLELRSLVPYPNSCLGTSPHQQERDTKMATVSFCGIDVAKDRLDVVVLPEQRCWSVCNDAAGWAELAKQLGSFSIAAIGLEASGGYERGVMRVLLAADMPVHQINPFKLRQFAKASGVLAKSDRLDARVIASFIAIMPTRRAQRPSPAIERLTEILSVRRQLTDQKIAAQNASAMLQDAMLLRLSRRRIGRLAADIEMLDRSLVEIVRTDAALAHRYRLLTSMPGVGPVLACTLIALLPELGSMSRKQVAALVGVAPYTFESGKLKGKRCIWGGRAPVRHVLYLAAMSASNWNPVLKAFHSRLKIAGKLHKVAIVAVMRKMITTLNAMVRDDVAWAGHLGGRQILPTAR

SEQ ID NO: 298008 - protein, 481 aa, unidentified
MASRKKSTFQRLNGERLNRKQRRELERRLGSEDPGLEIVHRNVAGIDVGNESHFVAVPPGRDSQPVQEFGSWTADLERMVEWLKACGIEMVVMQSTGVYWTALYDVLVARGFKICLANARHTKNLPGRKSDVQESQWLMKLHTYGLLCDSFHPPDEIRALRSLWRLRDRHVKEAARAVQHMQKALITMNVQLSNAISDITGVTGQAILREILIGERDPWKLAKLRDWRIKATEEEIARSLEGNWRDDMLFELRQAVEAYDFIQQQMAACDQRLKRLLEALPARPVAEREAEAGAAEANQRSQRRGSRQKNTPGFDLKEELKRICGVDLTRIDGIDVMTTQTFVAEVGTDMSRWATEHHFASWLTLTPNRDVSGGKVVRQEPRKSKSRVAAALRTAACTLLRSQSYLGARYRALRARLGAPKAIKAMARYLACLMYRMLKYGQAYVDRGTQHFEQKRAQRELSSLQRKAAALGYQLVQPASA

SEQ ID NO: 298009 - protein, 318 aa, unidentified
MTRRPVMSERVAVGIDISKDEIVIAVAPSGEQWTSPTTPEGLERTMARIAALQPTVVVMEATGGYEAPVAAAGAAAQLPIAIVNPRQVRAFAQALGRLAKTDVIDAHVLAAFGLHVDPPVRPLPDAATQVLAAFVARRRQLIEMLTAERQRLAQATAPAVQKDLRAHVRWLERRIANVDDDLTTHIQGSPLWRAREELLRSVPGIGPIVARTVMAELPELGTLSRHGVAALTGVAPMNRDSGQYRGPRMIRGGRPSLRRALYMAAVVAARYNPPLAAFYQRLRAAGKPAKVALVAVMRKLLTIMNAMVKHETVWNPAN

SEQ ID NO: 298010 - protein, 349 aa, unidentified
MESVSINKQYYCGVDLHADVMYACVMTKAGKVVFHHEMPTDFKCLFKHLKPYLSSIAVCAESTFNWYWLADGCANHNIPFFLGHALYMKLIHGGKTKNDRIDAKVMADLLRTGFFPPAYPYPERMRATRDLLRRRAHLSQLHAETLRHIKTLLYQQGYTDLPAVHNYNAQKIRETFSPYKLPENASFSLENDLTILDHLDTQIAKLEWQIEKTARGHDLHALALLRTMKGLGRIISLTLLYEIHTIKRFKSAQCFSSYARVVRVERSSHGKKLASKNQKIGNPYLRNAFGMLAISAQRYYPSIKVYTDKLVKKYGNAKAYTLLAHKFAVTVYYMLKNKTAFDVKRFVAA

SEQ ID NO: 298011 - protein, 414 aa, unidentified
MHSMTDPPVNVTGGVDTHADIHVAAAVCSTSHRLLDTESFPATPAGYVKLLAWLASFGLLDAVGIEGTGTYGAGLARFLTAEGVTLVEVDRPDRAARRQHGKSDPVDAEAAARAVLSGRATGTPKSRNGIIEAIRVHQVVYRSAVKDRTAAINQFHAIVVSAPAEIREDLQRMALKARLEQVRRWRDRTGDDVAHRATRQALRELALRIGFLDDQAQRAEAELDVLTDLAAPALLDILGVGVHVAAQLLVTVGDNPDRITTEAAFAHLCGVAPIPASSGKTNRHRLNRGGDRSANHALWRIAMTRRTCDARTATYVARRTAEGKSEREITRCLKRYIAREVHRAITRPSPLAPRGAELRRLRNGAGLPLRVVAELFETNPQRLSRVERGLTRDPDLQTRIHAWLTQPETDQIAA

SEQ ID NO: 298012 - protein, 357 aa, unidentified
MAKRSSEKVEIVGLDLGDRYTSWCLCRVGGEVVSEGRVRTTAEALSRQFGDAPRRRIVLETGTHSLWIARLLRAMGHVVFVLHARSLRLITASRRKTDRLDARVLAQLGATTSVEVLHTVDVIDESVQADRAVLLARDLLVRARTQQVAHVRGVAKAWGVRLSSATTKSFPGKVREQIPQALRPALTPILDSILRLCEAIAAYDEQLEKLAEESYPHSRLLTQVPGVGTLSALAYLWTIRDPKRFAKSRQVGAYVGLTAASRASGQRDPQLRITKQGNPLLRRLLVQCAHHILSRNKGDSDLQRFGLRIAAQGGRRGKKRAVVAVARKLAVLLHHLWKTGEVYTPNFGGDSVLKKAA

SEQ ID NO: 298013 - protein, 423 aa, unidentified
MDKNDDSRLAEFRQLKREIRGSTQHLVVGIDIAKERHYAFFGTPAGKTLLHRLVFDNSKEGFEKLCFQTDILKTQHCLTKVVFGMEPTGDYHKPLGEYLIQKDHLVVLVGGSAVKNNRELLDGRWDRNDTKDAANVADLLTQGKCLFYEFASPPLQELRSLLSLQRRLKKQEQGYRVRTRNHLIAQYFPELDPYFGYSEGPAIVKWCLDPREITELPFEEFVRMVSSRNGGEKQRRRLQEIRQKAASSIGCEAHPSVAFEGRVLVEEVRHLQDLLRETQASIRVVCHHFPEYFFLLTIPGFGPDISAKVLEAIGNPHRFENHRQVLKLAGLDLSAERTGKKQDVTPVISKKGKADLRYGLYQAAFVASTRNRQFMTYFTNKLKGREREKGIGTKMRVKLAAKMLVIAWTLMKKKEKFDPGCIA

SEQ ID NO: 298014 - protein, 314 aa, unidentified
MNENTEVFVGIDVSKDTLDIGFRPSGQSVSLAHDEVGIIEVMHRLSEAKPQLIVLEATGGLEVDLATRLMVAGLPVVVVNPRQVRDYAKATGQLAKTDRIDALVLADFGRAIRPEVRPIKDAATRELDDLVTRRRQLVEMRVQESLRLARASKAQQKSLKRHIAWLDKRITEFDTELTKRLRTSPAWRAKDDLLRSIPGVGPTTSATLLAQLPELGTLDRKSIAALAGVAPLANDSGQHRGKRRIWGGRAEVRSVLYMSTVTAIRWNAVIKAFSDRLKAAGKPAKVVIVACMRKLLSIMNAMLKTNSPWTAKIA

SEQ ID NO: 298015 - protein, 399 aa, unidentified
MDNFPVFVGIDVSKDKFNVCAISNPSSIIFESSFDMSQQGFSSFANKLSAFPKQSIIIAMESTGCYHLNLLAFLSSNDFACAVFNPLTVKNFASLRKTKTDKIDARIIATALFYLQHQIPSSAFVNSELRDIVRARENIIHRIAKVKDNIEKLLNVLFPELERVTNIYSDTILNLLSHFPSAKAIQKARNLDVFFSKDRGRSTKLNAQKLKELANNSIAQYWPMKEKILVQNIKELQFLQQQLEEYDKMMKEYCECSAINLDIEILTSIPGIGENSAMHFLAEVGDISRFSTYKKLIAYCGLDPSIAQSGKSKVEGHISKRGNAHLRRILWLMAVSVVIHNEYFRTYYERKRQQGIPYKKAIMSVVHKLLRTLYAMLRKKEKFNIDYAISHSKQKFNFA

SEQ ID NO: 298016 - protein, 347 aa, unidentified
MRFYNTNHNQYCGIDLHAKSMYLCVLSHDGKTLLHKNLPTDPDVFLNAIAPFREDLVVAVECIFTWYWLADLCAQEGIAFVLGHALYMKAIHGGKAKNDRIDALKIATLLRGGMLPQAYVYPAEMRSTRDLLRRRLFWVRQRGQLLAHIQNTHHQYNLPTPKARLAYRKNREGVAEHFADSAASKSVSSDIELAEHYDSLITKLELYLCRQTKLHDQDNFYRLRSIPGIGKVLAMTILYEIHDIDRFERVQNFASYSRLVKCEKSSSGKRLGTGGNKIGNVHLKWAFSEAAVLFLRANPVAQRYIENLRRKHGKAKSLSILAHKLGRAVYFMLKRQKSFSMQTFRMA

SEQ ID NO: 298017 - protein, 488 aa, unidentified
MKKQNIYRNQSQEILSLFESAGDRNKAMCIPMDYAKKDHVVMFCNGNGDILRKPFSVKNSLEGKNYLVDQVKKSCRRRGISRQHVFFGGEDCGSYADNFTCDLKVIAALRSDSWMVAGVNACDAKKHRDNKQASTDILDLLGICKMLINCKGNCSPAQTGIYWNLRMLVRQRRKLVQMATGVKRRIHFIVDQIFSGFLDEKKNGIFPFSRGSLALMDNRFSVHQIRRHSRSTLSRLLARNLVHHTDHCAEHLQKYTSQVLQPPAQHIATLQIFLQQQVKLFVYLQESIQLLEKEIAEHLAQTSGAFLTSIRGIGIVLAAGVCAEIGDPDKQKSLNQLVSYAGIVPRIKQTGGVQGKTQVKKVAKRCNRILKDYVVRSGSHIGINGPEELKLDHKRRSAQGQHADFGMSRRYLRMAMCLMRTSQTYLPKSLRDTRTPKKERAHFYLLTWSTLREKWKRKDALEFAFDKDRPLGQWRNVVQTLYDIELGL

SEQ ID NO: 298018 - protein, 389 aa, unidentified
MKIFVGIDIAKLNHFAAAISSDGEILIEPFKFTNDADGFQLLVSKLESFDKNSIIIGLESTAHYGDNLVRYLVAEFYQVCVLNPIKTCQMRKNNVRKTKTDKVDTFVIAKTLMMQDDLRFITFFDLDMMDLKALGRFRQKTIKQRTRLKIQLTTYVDQVFPEIQYFFKSGLHQNAVYALLKEAPSPKEIASMHMTHLANLLKVNSHGHFTKEQAKELRVLAQKSVGANDSSISIQITQTIQQIELLDSQLEKIEAEMTDIMRFNDSVIMTIPGIGYINGGMILGEIGDIHRFSNPNKLLAFAGLDPSVYQSGNFQAKTTRMSKRGSRVLRYALVNAAWNVVRNNATFKAYYDAKRAEGRSHYNALGHCAGKLVRVIWKMLTDEVEFNLE

SEQ ID NO: 298019 - protein, 316 aa, unidentified
MMTQLYVGIDVSKTKLDIALRPAGAAWQTDNEPEKIASLISRLQELQPVLIVVEATGGLEQPLVAALHVAQLAVAVVNPRQARDFAKATGRLAKTDQLDADNLAHFAQAVQPEPRRLADEQTQVLAALVTRRRQLIEMLTAERNRLKSAPAVTVERIAKHIAWLESELAEVDTDLHDHLSQSEPWQAKAEVLQSAPGVGPITTYTLLAELPELGQLNRKQIAALVGLAPLNNDSGRQRGRRRIWGGRATVRTTLYMATLTAVQHNPVIKAFYQRLLQAGKSKKVALTAAARKLLTILNVMVKNNSPWNPPKITPVS

SEQ ID NO: 298020 - protein, 342 aa, unidentified
MSIVGGLDMHRKQITFDYVDTMTGALCRGKIMPADRLTLREWLGRFADYGGSVRLVVEGCTGWRYVVEECRRAGIDIHVAEPADTASARGPKRHAKTDKLDAKHLRELLVQGRIPESWIPPEQVLEMRAKVRLYKDLRDERTDWVQRIRATLYHQGMPALPGGVLAAGNRVALEAGAGLSPAGAQAVTVALRQIDRLDTEIDALLAEIRSFAAIQPGCKALQRQYGIGKLTAVIIWAELGDTRRFSASRHAVRHTGLDISVYSSDGKRTRGHLVRQGPPLLRWALFEAAKSAAKRTSPDHAYYLQVAERAGANRATLSVARKLARRGHHTLRELGDQAFAPV

SEQ ID NO: 298021 - protein, 489 aa, unidentified
MSEASRQQQVKKDSTLDAKALKRKARGSHRRPGGGNQRKSELTITNPDAAGIDIGSRVHYVAVPEERAERAVRSFGTYTAQLDELAHWLKECAVKTVAMESTGNYWIGLYQKLEEAGFEVLLVDARQAKHVPGRKSDVQDCQWLQQLHTYGLLRAAFRPEDSICRLRTLQRHRKNLTEAAGMWVQHMQKALNEMNLHLHHVLSDISGYSGLAILDAILAGERDPRKLASLADYRVKKSQAEIEAALTGDYRPELLFVLSQSLQDYRQIQQQLAQCDLSIEKQVAQIADCAKPSQDCEPRAQGPEPTGAKRGKTKPKDALEVSLAGHLKRILGVDLTTIPGLNVVAILTLISEIGTNMAKWRNEKAFVSWLGLSPNNKISGQRLLSSRTRKVVNRAATTLRLAAMVLGHTNTPLGSFYRRKRAQLGAPKAITATARKLGCLIYHLIKNGQDYQETDLHVYELKYKHQILNSLRKRANSFGFDLVEVPKAA

SEQ ID NO: 298022 - protein, 343 aa, unidentified
MDRYIGLDVSLKDTAISIREDGKRIWRGKCPSDPKLLAQMIRKHAPNAKRVVFETGPLSTWFYHALTAEGVPAICIEARHAQKVLNETLNKTDANNADGLAQLAEAGFYKAVRVKAFDSMLTRTLVTARNQLLSISTQLSNQIRGLMKTFGLIVPKGTGRVFDSNVREFLDGNDGLAWIILPLLEAWRDIRKRAADLDRQLLVAARKSQATKLLMTIPGIGAVTAVSYVAAIEDPDNFRTSRSVGAWLGLTTRRYQSGEVDYDGHISRRGDHRLRGLLYEAATVILTRTSARNESSLKSWGLKLRERLGFKRAAVAIARKLAVIMHSMLKTGEVFNALAGATA

SEQ ID NO: 298023 - protein, 370 aa, unidentified
MSDGMQSAGCTVLPGVRASVSDECGVVDRPRAIVLGLDQHRAQITADWIDTATGEIGRARIAPADRRAVRRFLGRFGGLPVEAALEATTGWRFVAEELRAIGAEVHLAEPAETSARRGSKKRAKTDRADARHLRELLLVGRLPESWIAPDHLLDLRARVRLRHALVNQRGEWQQRIHAVLYHHGLPQRRELLTRDNRAWVERAPLPATAREQITVALALIDALQARVDPITRELRTYAPRQPGCRALMGHYGIGALTAVAILAELGDARRFSSSREAVRYAGLDITVHQSDQRRSPGHLSRQGPPTLRWALFEAAQAAARRTGSPDRAYYEQAAARLGGNRACLAVARRLLKRSYHTLRELGDDALTPPT

SEQ ID NO: 298024 - protein, 346 aa, unidentified
MEHYAGIDVSLECSSVCVVDGNGKIVREGKAASEPAALIGWFSSLGLGLTRIGLEAGPLSQWLHGALKQAGLAVELLETRHVHDAFKAMPVKSDRNDARGIAQLMRLGWFRPVHCKSINAQEVRAVLTARKLVQSKLLDVENSLRGILRGFGLKVGKTTGTDFAGRINELVKGHPNLEVIAEALLRVRSALLSEFKAFEKRACKMSRMDAKARLLMSTPAVGPIISLTYASAIDDPARFTSSKKAGSHFGLTPKKHQSGETDRSGRISKIGDASVREALYQAAHLMLTKPIKGCSQLKSWAMRIAKRAGMNKAKVALARKLAVIMHRMLKDGAPFNPLAKTNAATT

SEQ ID NO: 298025 - protein, 399 aa, unidentified
MVSVGIDVSKGKSTVCLMRHFGEIAVGPMEISHADSELKTLVKLMKSMNDEVKVVMEATGVYHLPVLTYLKDHGVFVAVINPYQMKQYRVQGLRRVKTDKADSMTIAKYGLDNWDKLNDFVDSEDKYRELTLLSRQYRHYMRIHVASLQELTHILDYTMPGVKKEFNSWDPESGKDKLSDFVEKYWHYDNIRRKPERQFVESYLAWAEKKGYHRNQNKAAKIYSMAKDGIPTLPADQTTKMLVIQAIEVLRRVDKTLNTILARMQEIAKTLPEYPVVRSMGGVGDVLAPKLIADIGDVRRFHNSKALIAYAGIDAPPYQSGQFTGTNRNISKRGSSAIRKTGYEVMRSLKSHPVPSDGAVYQFILKKEAEGKPKKVAKMAGLNKFLRIYYARVMEVHSC

SEQ ID NO: 298026 - protein, 404 aa, unidentified
MPRGPGHGQVLGVSCSASYGDVQMVQWVSRRTEATCPPARSTRGRKTAQHLVPCETVSKHGSPAPSRSEARTVARARIGARIQELESLLGEGITMGTIGIDVSKDHLDWADGPEASVSHCANDGRGIAQLVRRVRRLDPERIVIESTGGYERPLLHALADAGLPVVLVNPWRVRRFGEALGILAKTDPIDARLLSRYGAVAAPPVTPVRRGIHRALADLVARRRQLIAMMAAEKNRLSIAPKALQREIAGLITILQQRIDQLDRRVDAALAQDPERGQVGKLLQTAPAVGPAVARTLLVDLPELGTLSRRQISSLVGIAPFARDSGKHRGQRRIRGGRASVRTALYLAAMTGARFNPVLRALYQRLRNHGKPAKVAFVALARKLLTILNGMVRDGTAWREADAT

SEQ ID NO: 298027 - protein, 352 aa, unidentified
MSEHSKEVIIRVLGIDLAKRSFHLFGVDGDGRQVLSKKLTRARLSEFVANLPPCTVAMEACGSAHHWARRFRSYGHEVRLIAPQFVKAFVKSNKNDAADAEAICEAAQRPNMRFVAVKTIEQQDIQAVHRMRSLAVDRRTAQINQIRGLLLEYGIEVAQGRPAMQRRLPEILEDADNGLSERFRAELHGLAEELRHLNERVAHYDAQIDAIAHGDRQARDLMTIPGIGPKGATALLAAVGEDATLFGNGRGLAAWIGLVPRQHSTGGRDRLLGISKRGDVYLRNLLIHGARAVLRTLEHKDDRTSRWAKALKARRHTNVAIVAMANKMARVAYAVMTTGKPYDPAIGSVATD

SEQ ID NO: 298028 - protein, 338 aa, unidentified
MTIETLGVDIAKNVFQLHGVNRNGRVVLKRRVMRDELLKVIAQIDRCTIVLEACTGAFYWARKFEVLGHEVQLISPQYVKPFVRRQKNDGNDAEAICTAARQPHIPFVPKKTIEQQDIQALHRARQRMVNHRTAVVSQIRGLLLDRGFAFAKSITRARRVIPEILADQDNELTAMAREAIAELYDLFRDLDRRIASFDKKIDAVFRNNEACQRIAKIKGVGPKTATAVVAAIGDGSEFKNGRHLAAWVGLVPRQFSSGDRKVLMGISKRGSQHLRSLLVHGARSVVRTAPNKTDPTNQWINQLRQRRGFNRATVAVANKNARIIWAVLKTGEPYRAAG

SEQ ID NO: 298029 - protein, 346 aa, unidentified
MLYAGLDLSRKRLDVHILDEDGRTVEVTAVSPDAAGLRRLAAHVLHFGHEVYGAIESMTGARFVHDTLERYGWDVAIADAAKVKGIAPLAAKTDRIDARVLAELARRELVPEIWLPDPTVRAERERARFRLHLVHHRTALKNRIHATLMTFGHPVPVADLFGVGGRELLARLALPEPWSGTLATSLRMVDELGAEIDACEADLRRLGADHPSIPLLLTVPGIGPILAYTIASEIGDIGRFSSPKKLTGYTGLCPIVRQSGNRDVRGPLAKNGPKYLRWALIEAATHAARDAHYRDRYERTKRRLGRQRGAKVARIDIARKLAEAIWHVLTKNEPFAPAGPTMLLVA

SEQ ID NO: 298030 - protein, 407 aa, unidentified
MDFFLIILLEVITKRQPCWIPAFASYHEEQGEAKRLKKDSLIGIEKINFNLNQIKEPKMNKEKLSYGGKKVYLGIDVHKKSYSVTVMYKGEVVKRDKMRADAQALCRYVKTHFKGAQVHSVYEAGFSGYSLHRILVEGGIKNIVINPASVERAANDKVKTDRVDSRKLAEQLSAGRLKGIYIPSKDQEQARSLTRTRDQIVEHRKLVSNQIKSKLHYFGLMRMDDKRRLSERYLKELEGQELGKYLSYSLRLLIEQWRFLNAQIKELRQKLEEQARENKQIEVYRSVPGIGEVGAPMLANELGDLSKRFVNERKNFSFTGLTPGEHSSGESERKGAISRQGSPRIRKYLIEVAWRAIYQDQALFEAFERIAKTRGRKRAIVAIARKLIGRIRACFKQGCLYQVGVVA

SEQ ID NO: 298031 - protein, 414 aa, unidentified
MADEETISWFAGVDWGSEKHQVCLLDAQGSTAGEHEFPHSGEGLTELGDWLLSMASVASTVAVAIEVPHGPVVDALIDRGFVVYAINPKQLDRLRDRFSVAGAKDDRRDAYVQADGLRTDRRLFRRLQVADPRLIELRAWSRLAEELRAERVRLSNRVRHQLWRYYPQMQKLTDDLAAPWFLELWTIASTPAKAVRLRKSTVERLLKQHRIRRIDAETALRILREPAIKVAEGVAEAASIHMRSLVARLRIVNRELRKAERKLDELCTVISEIEQTSGEGLQRRDVEILRSMPGIGRINLGTLLSEASGPLSRRDYEGLRTLSGAAPVTKRSGKSVIVVRRYAAHVRLRDTVYHWARVATQRDPKCRARYTAMRKRGHSHGRAVRGVADRLLALACVLLQRQTLFDPYFGRLTK

SEQ ID NO: 298032 - protein, 313 aa, unidentified
MSQNIPILYTGLDVAKLSFVVHFQDQCHEFANDAQGRKRLVRLLSKAGGVHVVMEATAGYEQPIVAALHEAQIAVSVILPMRIRAHAKALGRHAKTDPIDAAVLTSFGYAVKPSPTLPRPPLEMAIVEVMRQRQQFVELMTQLKNQACHCASASAQKRNAALQRALSLQLKSCLKELAELQAQDDKLTARSARLQEVDGVGPIVAAVLIADMPELGSLSDEEAASLAGTAPHPCDSGPYRGARHIGGGRGPVRRALYMAALTARRKDGILKRFYERLIAKGKPKLVALVAVMRKLIVLLNRMLKNPEFKLQTA

SEQ ID NO: 298033 - protein, 341 aa, unidentified
MQITTIGLDIAKNVFQIHGIDAAEKVIVRKQLRRGQVTAFFEALAPCLVGMEACATSHHWARELTKLGHEVRLMPAKDVKAYVKRNKNDAADAEAICEAVRRPTMRFVRIKSAEQQGQLMLHRARDLLMRQRTQVINALRAHLAEFGITAAQGREGIKELLAIVAQDEGSRLPVDAHASLTVLAAQLQAAQTMIGSIEKRIVAQHRSNEASKRLETIPGIGVIGATTIAAVVPDPRVFRSGRDFAAWIGIVPRQDSTGGKQKLGPISKQGDQYLRRILIVGAHAVLRRARQQPETYPWLTQLLARRPFKVVAVALANKMARIAWALLAKGGTYRAPQLVAA

SEQ ID NO: 298034 - protein, 317 aa, unidentified
MTEQQTTFVGIDVSKARLDIAVRPGGRYWHCPNTPERFPELIAQLRAIAPTLIVLEASGGLETALAAALAEAELPLAVVNPRQVRAFAKATGTLAKTDALDAHVLAQFAEAVRPAGRPLPPAPLAALDALADRRAQLVKMQSAEQNRLASAPPCVRPDIQAHLDWLAQRIDITNRELRRLIESRPGWRAKDDLLQSMAGVGPVLSVVLIAAVPELGTLNNRQIAKLIGLAPLNRDSGKHRGKRRIFGGRAQVRSTMYMPARAAVRFNPVIKALYERLKAAGKPENVAITACMRKMLVILNSMVKSNTHWHQTAVPQP

SEQ ID NO: 298035 - protein, 343 aa, unidentified
MNLSRVGVDLAKNVYQLHGVDRHGKAVWKRRLRRAQWLQALLDKTDPSCEIGMEACTGAHHWARELQSRGYTVRLIAPQFVKPYVKSNKNDANDAEAICEAMSRPNMRFVTVKGVEQQDIQATHRVRTELKNHRNAKGNQIRGLVAEYGLVAKPSLLALRRAIPEWLEDAENGLTDNFRRLLHGLWDDLLMLEERFKELDKEIEKLARSNEVTKRLQQLRGVGPIVATALVATVGTGEQFKNGRQMAASLGLTPRQSSSGDKRRLLGISKRGDTYMRTQLIHGARSVVSHAKHRDDPLSRWATDIAKRRHPNVAAVALANKTARMAWAMLQNETDYDPNLAVG

SEQ ID NO: 298036 - protein, 358 aa, unidentified
MKRIVIGIDISKEKIDASAIDMQNAHLGVQKLGYQSFENRPMGFRRMLVWARHLIKGVTLDEVLFCCETTGGYDRCLCDYIYAKDLDIWRESALQIKRSMGVRKGKDDKADSLMIAEYAMRHMDKAVIYQTPSSTIRELKALLQYRHKLVQEKTEKKVRMSHLEDTAAKSKSMSFILRDARKSIKALEKSIKLCEQQILELIKGDEELYSSYRHIVSVNGIGIVNATALIAYSNNFKGITTANRMASYYGIAAFRDTSGSSVDKKAYVKCYSNSLLKAYLTQAAEWTIRENGIYHDYYLRLKEKGKPYGIIINNARNKLIHLVFSLVQNDVDYEHGHEAIRTQRIGNGYTTTPLKNIN

SEQ ID NO: 298037 - protein, 401 aa, unidentified
MTATHTMNSTVANAPVLYLALDLGMREWKLAFTVGLGQKPRLKTIAARSTSSLVLEIKAAKRRFGLPEDAAVICCYEAGRDGFWLHRFLLAHGVQNHVVDSSSIEVNRRKRRAKSDRLDAVKLVQMLIRWHNGEKRVWSIVHPPSVEQEDARQLHREMIKLKAERTAQGNSINGLLAGLGLCVKVDETLPTQLERLRQWDGAKLPPGLHQRLLREFQRWQLIDRQLGELETERMAKIRDDRTPHVEKVRRLLNLKGIGDNGAWLLVYEFFAWRTFRNRRELGSLAGLTPTPYSSGQSEREQGISKAGNRRVRWMMTELAWGWLRYQPTSELSQWYQRRFGRGNKRLRKVGIMALARKLLIALWKYLEGGEAPAGAVEVGWDNKPRFRAVKRRRQKEFSQTG

SEQ ID NO: 298038 - protein, 401 aa, unidentified
MISVGIDVSKGKSIVCFMKPYGEMLHRPFEVKHTESDLKRLVNQIKTLTEDTRVVMESTGAYHFPVLTYLKDYGIFVSVVNPLVMKKYANMSIRKGKTDKLDAIKIANFGLDHWYHLIDYTPTADVYDELKTLNRQYLNYLSMRINSKQTLTNLLDRTMPGIKTLLWNRSDVPKRDKLCNFVNEYWHFDNITNKSEDEFINSYNEWAKSKGYRASTEKAKKIYALALDSIPTLSSNTPSTKMLVEEAVKVLQMIDSTLVSILARMRELAKTLKEYEVVMAMPGVGEILGPRLIAEVGDVRRFHSAGALIAFAGLDAPPFQSGSFTGTKRSISKRGSSSLRKTGYEIMNYIKIHKPSSDDAVYKYMLKKELEGKAKKVAKIAALNKFLRIYYARVKEVYVAA

SEQ ID NO: 298039 - protein, 311 aa, unidentified
MTQACAAGVDVGRDYFDVGLAPSGRVFRTTNGPQGIETLVARLKREGVGKVVLESIGGYAARLVRALAQAGFEVGVIDPKRIRALRIAEGKRAKTDRLDAKLIARFALIMQDATRPVPDTKAFEIRALSTRRRQLVEMAAMEKVRLKQTLDEAVAVSCRQMIALLTEERTRVESLLRAEVLASAERAGRDRLLQTIPGVGPAVSITLLADLPELGTIDRKAIASLAGLAPHPNQSGTRTGQARIAGGRPCVRAALYMAAVSAARTEKGFKREYLAMRQAGKPAKVALIAIARKIVVAANGIIKSEHPWQKP

SEQ ID NO: 298040 - protein, 408 aa, unidentified
MEVVHPRCCGIDVHQATLAVCVAIKEKGKSEKHKLRCGTTTAELLRLADWLQGYQVTHVGMEATGVYWKPVWHMLEGHFELLLANPTQVQALRGRKTDLKDGERISDFLQHGLLQGSFVPPKPIQQLRDLTRSRTTLKQEQVRIGNRIRKVLEDANIKLSSVMSDVMGVSGRAMLRAIVRGESDAETLARLARKRLRGKIPLLQQAAAGSLNEHRRFLLEQWLAHWDELTERIAKFDERIEEQMRPFAAVVETWNSLPGIDRITAWTMVAEMGADMNQFPTVAHAASWAGLCPGQEESAGKRKSGRTRRGNAWLRRALTQAAWGASMTKGSYFKAFYHRLAAHKGKKRAIVAVAHALLSTGYMLLWTGRTFSDLGEDYFDRLDRERLTKRLLKRLEKLGHRVLIQPVA

SEQ ID NO: 298041 - protein, 448 aa, unidentified
MMEPNAAGVDIGAMEHWVAVAPDRDEQPVRKFGTFTSDLYAIADWLRLCDVKVVAMESTGVYWIPLFEVLVERGFQVDLVDARHTKNVSGRKADVTDCEWIRQLRSYGLLSPAFIPAADMAVIRSYVRHRQMLIQYAAIHVQHMQKALTLMNIQLHHVISDITGVTGMRILEAILHGERDPHRLAEMKDRRIKNDTQTIARALEGHYRQEHLLALKHSYDLYQTYQSKVADCDQQIQQYLKTLESKANPDTLPKSSRKRQRKPQRNEPNYDCRREMYRLTGVDLTRIDGIDAAAAQIIVSEIGRDMSPWTTEKHFAAWTTLAPNHQISGGKILRRRPKRSPNRFALLLRMCAQSLLHSQSALGAYCRRICGRIGTPKGLTATAHKLARLIYRMLKYGDSYVDIGQEQYEKKYKQRLLQNLRKKANEFGFALIERSALPQNSPSPQEVS

SEQ ID NO: 298042 - protein, 342 aa, unidentified
MDHYAGIDTSLEQSSVCVVDAGGRIAREDKVASDPDALIGWFGSLGFGLARIGLEAGPLSQWLYAAMRKAGLTVELLETRHVRDAFKAMPVKSDRNDARGIAQLMRLGWFRPVHCKSIGAQEVRAVLTARKLVQSKLLDVENSLRGILRGFGLKVGQTTHRSFAGRVEELVAEHASLRMIAAALLCVHAVLLRELKTFEKQVRSMARADVKARLLMSVPAVGPIVALTYASAIDDPARFKSSKRVGAHFGLTPKKYQSGETDYTGRISKIGDATVRTALYEAAHILLIKPIKGCSQLKSWAMRIARRSGMKKAKVALARKLAVILHRMLANGTPFNAAAAAA

SEQ ID NO: 298043 - protein, 316 aa, unidentified
MQTPLVCVGIDISKARLDVNVRPSGKSTSVSYDAAGITALIGQLTEVPPTRIVVEATGGLERPLLRALVDAALPVIVVNPRQVRDFAKATGQLAKTDALDAQVLARFAEVIQPALRVLPDAQTQELAALLARRRQVVVMQRAEQNRLDRTPDRVRKRIAVHLRWLRAELARVDAELDALIQHSPLWRAREDLLQSVPGIGPVMSRTMLAELPELGLLNRKQIAALVGVAPFNRDSGRLRGHRTIWGGRAPVRTALYMAALVATRWNPVIRAFYQRLRTAGKAPKVALVAAMRKLLTILNAMVHHGTPWHPVVTANA

SEQ ID NO: 298044 - protein, 396 aa, unidentified
MPRIWAGVDIGKEHHHCVVIDANGERLLSRRVLNDESGLLELIRDVLALDDDAMWAVDVNHGAAALLIGLLVSGDQPVAYLTGLAVHRASGTYRGEGKTDAKDAFVIADQARMRKDLGLLRPGDEIAVDVRTLTTRRTDVVADRTRQINRLRAQLLEICPALERVLDLTNQGPVLLLTGYQTPAAIRQAGAKRVETWLRHRKVRAASTLTTAVVQAAQDQHTVLPGEKLAAAMVARLAKGVIALDQEIAELDALIEARFREHPHAEVILSLPGMGKLLGAEFLAATGGDMDAFGSADRLAGYAGLAPAPRDSGRVSGNLRRPRRFHRGLLRAFYLSSFASLKSCPASKAFYQRKRAEGKGHKQALLALSRRRVNVLWAMIRDGKSYHPSPPVTAAA

SEQ ID NO: 298045 - protein, 360 aa, unidentified
MKSSVATKKRQNVNQLTIGIDLGDRWGHYCILDEHGEVLEEGRVPMTRKALTAHFSGVPARIAMEAGAYSAWISEHLSAMGHEVIVANARELRAISGSNNKNDRVDAEKLARFARVDPKILRPIQHRSLAAQQHLTVIRARAAAVRARSLVVNAVRGLVKPFGCRLTLCSTAAFPSRHHDSLPDELRPALEPLLATITELSVRIKGYDKQIVAMSETLYPDTHRLREVHGVGPLTALTFILTLEDKQRFQVSRDVGCFLGLRPRQYQSGSSDPQLHITKAGDVYLRTLLVECAQHILGPFGTDSAIRRWGLSLVERGGKIAMRRATIAVARKLAVLLHRIWVTDEPYQPFYGMKSEPQTA

SEQ ID NO: 298046 - protein, 370 aa, unidentified
MISVGIDVSKEKSTVCILKPYGEIVRSPYEITHTESQIAELVSMIKCLDDEVRVVMEATGNYHLPVLSFLKEHGIFVAVINPLIMKKYASIILRKGKTDKLDSIKIANYGLDNWFHLINHESSEEIYVQLRLLGRQYGHYIKLRIESKLSLTTMLDYTMPGIKTMLKSRSDKPEKDKLNDFIEEYWHYDNITKKSENQFISNYKNWAKKKGYQQSEAKAIKIYDLAQQGIPTLSSNAPSTKMLVLEAVRVLREIDKTLALILSQMQELAKSLKEYTVVREMAGVGDIIAPRLMAEIGDIRRFHSGKALIAYAGIDAPPYQSGQFTGTRRRISKRGSATLRKTGFEIMKCLKSNKPESDTVYLFVCFKKGS

SEQ ID NO: 298047 - protein, 318 aa, unidentified
MNSKNNQNEINVGVDTGKTQLDIYIRPLDIYFTVSNDEKGINKAIKEIKKYKPKRIVIEATGRLEQAFIIACAKDKLPFVIANPVKIKKFAGAIGQLAKTDKLDAKLIAYYSEALKPELSTLKPATLRLMSDLMSRRCQLMEMRTMEKNRLQIMPKEITSTINPLLTVINNQLIKIDKKLQKLIESCDEYQIKNDIIQSVPGVGNVVAFSLLSNMPELGYITNKEAAALVGVAPINRESGSFKGKRMIRGGRHQIRTAMFMSMMSAMQCNPVFKATYQRLVAVGKPKKIAIIACVRKMIVILNSMVRDGVYWDPKMNQ

SEQ ID NO: 298048 - protein, 355 aa, unidentified
MESVEYIGLDVHQSTISVAVLNAEGKLLMQSVIATQATAVLDLLKGLHGVLQVTFEEGTYSAWLYDVVLRHVARVVVCNPRKNALLKSGNKSDQIDARKLAELLRAGMLSPVYHGEQSTRTLQQLVASYTALTEDTGRAMRRIKALYRSQAIACAGKKPFGKRYRGEWLARLSDSGQRRRAEWLYQELDAVQILRREARHAVMVECHKNQAAKLLRSMPFFGPLRAAVLIARVQTPHRFRTKRQFWTYCGLGLETRSSADYVEKDGQIMRRRKPVYIRGLNWNYSHELKNVFKSAATTASAMDGPFGAFYASRVANGMLPAMARLTLARKMAAIALILWKKGETFAAEHLKLQAA

SEQ ID NO: 298049 - protein, 351 aa, unidentified
MASMPADAVDVVGGVDTHQDLHYAAVVDVVGEVLGTKAFSTTRAGYRAMLAWMRNFGELLRVGVEATGTYGAGITRHLALAGIPVLEVTGPDVAQRRSKGKDDMLDAIAAARAALTGQRVSVAKDRNGQVEALRVLRTTRRTAMKCRRATLQQLHNTIVAAPEELRDQLRNLTRMRLLRTCASWRPDTIGYRDPVIATKIACKSLARRLLNLNDEIAELERLIEPLVSELASSLIALEGVGTECAGEFLVAAGDNPERLRSEAGFAMLCGACPIPASSGKIERHRLNRGGNRQANSALHMVVVCRMRRDPRTKAYVERRLSEGLSKREVMRCLKRYVAREIYGALNFPTGP

SEQ ID NO: 298050 - protein, 343 aa, unidentified
MQTITTIGFDIAKSVFQVHCVDAEGKVILRRQLKRRYVLAFFQKLPPCLVGIEACASAHHWSRELQALGHTVRLMPPAYVKPYVKRHKNDATDAEAICEAVTRPNMRFVPTKTPEQQSCLTLHRTRHLFIRQQTSVINAIRAHLAEFGIVAPVGRNGVEQLLSVAADSNDKRLPKFARACVAALGAQLRMLKAQILQFDRMITAWHRSNEASRRLDAIPGIGPALATALVASIADPKVFRSGRDFSAWIGLVPKQNSSAGKDRLGSISKRGDRYLRSLFTTGALAVIRYAKIHGTRHRPWLTALLTRRPTKVAAIALANKIARMAWAMMAKGERYKEPAALAA

SEQ ID NO: 298051 - protein, 350 aa, unidentified
MIVLGADMHKRSHTLAAVAAGTGELLGDETIAVGERGFAAALDWARGLGDDRVWALEDCRHVSGAFERFLLVHGERVVRVATRLMAGERRAGRDRGKSDRIDAIAVARAALREGVERLPVAELAGVELDIRLLVDHRERLVRMRPALYNDLLWHLHDLWPEQRFPKCALLSKKWSATVGRRLARAEQTARVRIARDELRHVRELSQTVDALEAQIAELVAQAAPQLLAETGVGPLTAGKLIGEIAGAQRFTSDAKLARAGGIAPIPVSSCNTNRHRLDRGGNRQINTAIHRVAITRLRCDPETKAYVARKRAEGKTSTEAIRCLKRHLTRRIWHLLQAPAPEPIKINLLT

SEQ ID NO: 298052 - protein, 331 aa, unidentified
MTPIIGIDIAKDKFDLVLLRAAHEPEAAVFDNTRQGFEQCQRFLKKRQAHPAHACMEATGVYYEDLAHFLHDKGYAVSGVNPLQIKAYAQSQLRRNKTDRLDAAVLADFCRTQTPPLWMPPDPAWSELRALVRHLEDLESDRQRQRNRQDALQHAAQPSRTVLNNLQAQIDFLSQQIETVQQQIQDHLDRHPDLKQQRDLLDTITGIGPLTAGKLLAEYRDMRAFDNVRQVVAFAGLNPQHRPSGSSVRGKTTISKIGHAAIRAALYMPAVNAKRFNPLLRPFVERLEQRGVSQMEIVVAVMRKLLHLAFGVLKSGQPFDPDFLKQTAATA

SEQ ID NO: 298053 - protein, 338 aa, unidentified
MEAYAGIDLHSSNSYIGIIDQEDRRLYGKRLPNSINDILAALDPFKENLEAVVVESTYNWYWLVDGLQAEGYKVHLANPSAIKQYEGLKHTDDKWDSFWLAHMRRLNILPEGYIYPKEERPVRDLSRRRILFVRQRTSQILSLQSAIARNLALRMSGRAIKKLKEEDADNLFDSPSLVLTAKSQLEVIQFLTKTIGAIEKALLSQIKLRKEFRLLKTLPGIGDILGFTIMLEVGDISRFPKVGNYSSYCRCVNSKKLSNGKKKGENNRKNGNRYLSWAYVEAANYAIRFSPDAQKFYQRKMAKTNKIVAIKALSNKLAKASYYVMRDQVPYDPSKLFR

SEQ ID NO: 298054 - protein, 338 aa, unidentified
MYYIGWDVHKNKISGATLNSKGAILNESEFEHSFQGAKSYLEGYPPEHTHIAMESSSQIYKLYDYLIKNKYDVKVAHAKEMHRITKSSKKHDRRDALILAKHLLADDIPESYIPSKEARNKRAIVRARIGFVQERTRFKNKVQSILQQNGYSIKGESFTKKWLEKFSKLEFEEETKHQLGLYVNQVKELSKLVEKYNEKIAKFAKGNKDVKILSSIPGIAELTSSVILTELDNYNRFNHYKQVASYVGIIPTTKASGEKRFHGRLTKDGNKYIKWALIQGAGSAGKTKTQIGRYFRRKLVKKGYQKACVATAHKMLRVVFSLLKKQEMYSDSLVEKSG

SEQ ID NO: 298055 - protein, 419 aa, unidentified
MIHPDAAGIDVGAKEHVVAVPCDRDERPVRTFQAFTPELHELAAWLKRCGIRSVALESTGIYWISLYEVLEQHGFEIRVVNARHVKNVPGRTKTDVLDCQWIQKLHSFGLLNGSFRPDQQIRKLRTYMRLRDNLVVNSTQAVHHMQKALFEMNVQLSNVISDIVGETGLRIIEAIIAGERDPEQLAALCSTRIKASRQTVAKSLHGNWDEALLHCLKTALETYHFNQEQIQHCDGYIHRHLGQFESRAQLPSSPKDLQGQLHRVCGVDLTKIPAIKEQSAQIIISEVGLDMTKWNTEKQFSSFLGLCPNNSISGGKVLRRATRKVYNRAADTLRLCAQSLTHSKSALGAKYRRLRARLGAPKAIVAMAHHLARLVYRMLRYGDKYVEKGIEHYEQKFRLQRIKWLKKEADSLNLQLIAA

SEQ ID NO: 298056 - protein, 343 aa, unidentified
MDIKTLGIDLAKNIFHVHACDAKGRKLYSKKLKREQLASYISNLPICLIGMEACGGAHYWGRKFRNMGHTVKLMSPQFVKPYVKSNKNDWNDAEAIAEAVTRPTMRFVPIKQVGHQDIQSLHRARSQFQKYKISLSNHIRGILQEYGIVIPVGNKYLKDRMSLILEDADNELTMIMREEINSSYEEWKKLEQKVTMYDKQLAKIANENEACKRLLKVEGVGPLSATMLYASISEPLLFKNGRECGAWLGLVPKQHSSGGKDRLLGISKRGDTYLRSLLINGGRSSLNAWKKKPNLTTRCVWALSKDKTIGHNKTCVAIANKIARTAWALLAKGEDYETSRVIK

SEQ ID NO: 298057 - protein, 352 aa, unidentified
MEQGYHIGIDLHKRFSQVAVLNEKGEVLDNRRVDNDPPLLIQHLSPFPKETPVTLEATIGYEWMSDLLAENGFIVNLANPKKVRLIAEATIKTDKVDAVTLAQLERTNFLPTAYLPPKEVRDTRELLRHRIKLVNLRKGLKNRVHAVLAKRGILFYPVKDIFGKAGREFLSSLQLPSIYRKEVDSYLSLIDQIDSIIKQREKDIKNQVVKENKEAQLLLTIPGISYFSALLLVSEIGDIKRFLSPKKLASYTGLTGTISESADKTHLGPLKKDSNKYVRWILIEAVEHAIKKDPGLFAFYRKISYKKGNNKARVAVAHKLLISIYFMLKNNQVYQLRKNLRVSPCPVMVANR

SEQ ID NO: 298058 - protein, 347 aa, unidentified
MGYYVGLDVSLDTISVCIVHETGKVIREQEVPSTPEGIGGFLLGTGLEITKIGLESGNLTHYLTKGLLAMKYEVIVMDSRKMAAILAVTINKTDKNDARGIAEALRVGHYKQCVHRSDDSLETRTLLNGRGTLVDERTHLVSSIKGHLKVYGVKLGKGKDKTFRKKVEASISALKMSVQKTIQALLNVLDVLDVEIKKLDKEVVQLGKHDADVQLLQSIDGIGPITALAFKAEMDNPARFKDSKDAGAYIGLTPSQYSSGETQRQGGISKRGSRRTRSLLVEAATSLLMRSKKWSKLKAWGMKLLKKKGKKKAIVAVARKLAVIMHRMLITKEPFKRTDKPKEEKAA

SEQ ID NO: 298059 - protein, 408 aa, unidentified
MQVLYPRCAGLDVHKDMLMARVRCVSDPPHDEVRSFGTTTSALLELSDWLAEYAVTHVAMEATGVYWKPIWHLLEEHFELVLANAQHIKNVPGRKTDVNDASWIADLLAHGLIRSSFVPPTPIQELRDLTRTRKQLVREISQHSLRIQKTLEDANLKLGSVLSNVLGNSGRAILAALIAGQSDPEKLAELAQGNARKKRAELVEALRGRIRAHHRELLRIHLNLIEALYQALEDVDARVGKTLAPIKDSARLLKSLPGVSDLTAQVMVAEIGVDMSRFATAGHLISWAGLCPRNEESAGKRRSTRVRTGAPWLKVALVTAAWAAVRVKGGYLQAQFLRLKGRRGAKKAILAVAASMLTAAYHMLKNGVEYQDLGADHFSARDRSKTIQRLVRRLGDLGCQVQLTVQTT

SEQ ID NO: 298060 - protein, 386 aa, unidentified
MATSATSRIEQATLPQPTLYLAFELGQNTWKLGFTIGVAQQPRERMIPSGDVERLQQEIARAKQRFGLPEDAHVVSCYEAGRDGFWLHRYLVAHGVQNHVIDSASIEVNRRQRRAKTDRLDVRKLLTMLLRHSAGEKKVWSVVRVPSVDEEDRRQLHRELTTAKQDRTRVINRIKGLLAGHGVPLVLQGNVEAQLDQVHQWDGAPLPAALLRRLKRAWQQVGFLTTHIQKLEAERRALLRHRTDPVIAQVRQLFTLRGIGINSAWLYIMEFFAWRDFQTAKQVGALAGLTPTPYQSGQSRRELGIAKAGNRHIRTMAIEIAWAWRRFQPDSALSQWYERRFGAGSARLRKLGIVALARKLLIALWRFVKTGVLPEGAVLKTAPPSP

SEQ ID NO: 298061 - protein, 340 aa, unidentified
MQVIIGVDPHKASHTAVAIGDDEHELGRIRVRATRAQTSQLLAWAEPFDRRLWAIEGADGLGFLLTQQLIAAGEAVVDVPATLAARTRLLSSNRSHKNDPNDATSVAITALRHASLRRVQPVGDAEQLRLLAKRNDDIGRQRSRVASRLHALLVELVPGGIRREIYATAVDELLARVTPTSAVEQLRVELARELLDDLRRLDTQLRQSHQRLDRMIKASTTSLTDLFGVGPVIAATLIGHSGDIARFRNRDHYAAYNGTAPVEYSSGGRIAHRLSRRGNRTLNAAIHMIAVTQLRHRHSAGRIYFERKVAEGKTNKEALRALKRHVSNAVYRQLVLDAAR

SEQ ID NO: 298062 - protein, 436 aa, unidentified
MHTRIIGVDLAVKAAHTAAIYDPASQTFLTKRMRFRSSPQEIDRVLAKARTGLSGEVRTIVILEATHMSWFEVGQYFHRQQAEVYRVNGRSTKAMRRIESPHAHSDKLDGMTLARLYLVRKHNLVRWTPPGGERLALQRMARELQRIVRQQTAIQQRLQDLTQWTWGGWRQLIPALYQEWAMRNFYDPWTATDLGEEWLRTRLLEDMPKAKTDWIASWLQRAEERKQLYADSAVVGFDYISHFVRRELDAMDWWTQRRSALLKEAFLPLYHQLFPEDVLVTLYGVGERSAAIYHGFILSIERFLNAKRFVQWTGMAPRSFQSGTVQSKRMSLSKQGPNLIKATLYQNAQVARRYDIQLAKVYHDQMVLYGKHHIQAVCAVASHLASRIYALLRDQRPYQLRNLQNQPVSPEQARAYIQENLLVPEDIRKQRKRRQS

SEQ ID NO: 298063 - protein, 419 aa, unidentified
MRDSKTKKVKIINRKTMIATLDIVKGFHYAYFRSPNGNDITPFPFCNSKKDFDKFWTRLHQFQTAHNLEDVIIGFESSGPYAEPLFHYLRKKPVKLVQINPKHSKRIKELTGNSPNKTDKKDPRVIADVISLGHALTLVVPEGAAAQLRRLTQARERTLKKRTAAVNQLHDLVFIIFPEFLSIMKGIATKTAFYILKRYPTPEAIVSLGLESLAAEIKRVSRGRLKRERAEELFNAAQMSIGVSEGKRGILLEIEHLISQIATDDRFISNLERQMGKFLVEIPYSRNILSIKGIGTVTVAGLIGEVGDFRKFNTTSEVMKLAGLDLYEISSGKHKGQHRISKRGRPLIRKLLFFASINAVKSKGIMRKPYQQMLDRGMPKIKALVAISRKLLGLIFALVRDNTVYIENYSNEHHFKLAA

SEQ ID NO: 298064 - protein, 370 aa, unidentified
MLDTTTFVGLDVHARSIKAVSLDVMTGEVRAATFGYDAGAVAEWVRSVDPGARCVHESGVTGFDLQKRLSGLGVDCAVGAVSKMIKPSADRRRKNDRNDAEFLARMLSVGNVVEVWVPDDECEAARDLTRALEDARDDLSRSKQRLSKFLLRHGLVFDERTPTGRRKGNWTRAHWSWIESIRFAEGADNDVLAYYVDAVRRAAEEKARLEGLVEAEARKPRWRKRVDSLRCLKGVDTASAADLVFEAGEFSRFGNARSFASWVGLTPSEHSSGESDRRGAITKAGNKHLRKTLVEAAWHYLTCSGRPKDLAKGQAPDRGARRHAAKGVRRLVERRGALLARGVHNNKANVATARELACWVWAVGLMAEEA

SEQ ID NO: 298065 - protein, 526 aa, unidentified
MTNTQRWARGCKLDNRRWLDTATGGMCVTGHSIGIDLSINGAHDCTVLDATGQLVQRFTFDSSSAGLQKLEQCVRATDPSYGAPVVIMEPTGLAWFLPCLCLRAEHPEVKVVRIKTSKVAALRRYLKQDAKSDRLDSLTLAKMPLVDPEKLYAVDLPPAAVQGLDRMTRQRARLVASLTGRKNRLQALVGGYLPGLMAVAGKPWEPVFRAMLAVSLNPFTLTDQGTTALRKSLQDKRSREALPEARLPRLRIACEQLTRLYRPIIEAGLLTEAFFDDVQDEVARELRLMDVEEQEVKELEAAIARRYQEIVPEDHLRTIKGLGAVTAPTILAAVGTPQRFHSQAAFRGWTGVVAHASQSADSDAKGLPMTKAGPRRVKLALYQAAEIARQWDPQLAKIYYDQMVHKGKPHYKAIGAVMSHLASRIHAVLSEQRDYVLRDTDGREVTPQEARAIILTRYRVPAEIRAERRTRKRRKPDVSTGSHRGSTKRSSRRSSTSSHLHSTRSQEAHQTGAVAISHDGSAVARA

SEQ ID NO: 298066 - protein, 382 aa, unidentified
MMVLGADMHKRSHTIAAVAASTGEMLDTRTVEVGRRGFAAALDWARRLGGDRVWALEDCRHVSGAFERFLLGRGERVVRVAARLTMRERRGGRDRGKSDRIDAISVARAALREGIEQLPVAELAGPELDVRLLVDHRERLVRTRTAIYNDLLRHLHDLWPDQSFPGSALLSKKWTSRIGRRPARAEQTARVRIARDELRHMRELSHTIDALEAEIADLVGQVAPQLLAEPGFGPLTAGKLVGEIAGAHRFSTDAKLARAGGIAPIPVSSANTNRHRLDRGGNRQINTAIHRVAVTRLRCHPETRAYIARKRAEGKNTKEAIRCLKRHLARRLWHLLHTAGPAPSQTLHTINLVDIDGMCRLRPGARVGTSSAQARNGSAQAF

SEQ ID NO: 298067 - protein, 338 aa, unidentified
MLDWTCRCALCIVDEKGSVRLERELPCEIEAIADALADFPNPVARVGFEAGTMSQHLYFGLRDRGFDVVCMEARQVNAALSAMRNKTDRNDARGIAQVLRTGWFSPVHMKSRESHGVRALLSTRRALLSKTIDLANEVRGLLKIFGIRLPSSVSHGRFDEVARGLVEMDEVLAHAMLPLLDARRALYDQFLELDRRVKRAASRDEVCLRMMTVPGVGPIAALTFKAAVDDPARFRKSRTVAAHFGLTPRRYQSGETDNPGRISKAGDRDVRSTLYAAANALLMRTMAGSRIKSWGMRLMRTKGRRRAVVAVARKLAVILHRLWIDGTQFRPTVEEAAT

SEQ ID NO: 298068 - protein, 325 aa, unidentified
MAHIGIDVSKNKLDLCWLRERGKVKTKVFTNHPKHYPALMDWLTRQTGEQAQDLRVYLEATSIYHEPLTEWLHEMGVQVHVVNPAQVHHYAKALGIAGKTDKKDSQLLARYGIDRQPPRWQPEPEPVRRLRRLASRLETVQQDIQREQNRLEKARFNRDTETASSIDLVLLALQSEAKRLREEIKDHIDGNGDLKRDQSLLESIPGIGEVTSVHLMVLLRGKPFRSARQAAAFVGLVPSEWTSGSSVRGRPSLSKKGSSAIRRRLYMAAVVASRHNPVVGAFYARLRQAGKPPMSALGAAMRKLVHIAFGVLNRQTPFQTHPLGG

SEQ ID NO: 298069 - protein, 410 aa, unidentified
MRLFAGDDWAQDHHDVEVMDEAGRVLARRRLPEGPAGIGQFHELVSRFLPEQGTDAQVLVGIETDRGPWVAALIAAGYVVFPVNPLQASRFRARHQVSGAKSDAGDAHVLADMVRTDSHQLRPAAGDSPQAEAVKVLARAHKTLIWERTRAVQRLRHQLREYFPAALAAFEDLDARDALELLARAPDPANAAKLTRAQVSAVLKHAGRRKIAERTEAILGALRSPQLGQPPALTAAYAATVRALIAVIITLNEQVSSLQGQVEEHFGQHPDAEIIVSQPGLGAILGARVLAEFGDDPHRYATAKARKNYGGTSPITRASGKKKIVAARFVHNNRLIDALMAQAFAALTASPGARAFYDAQRAKGREHNDALRRLASRLTGILHGCLKTRTCYDEAIAWGHHDNRCHSAAA

SEQ ID NO: 298070 - protein, 367 aa, unidentified
MNNSTIVVGLDVHKDSIVAAVLPGGAGKVSEVINIGNSSLEIKRLVERITRRGTAEFVYEAGPCGYEIWRQITGMGKMCSVIAPGLTPTKPGDHVKTDRRDAENLARYHRAGELTEVHVPTQLEESVRGLLRAREDLLEDRLRARHRLRNFLLRQGRGYGKSLWGVNHELWLKAQKFDYPALSQTFETYLRTLDEVNAGLAEVDRLILGWAEGEEYRGAVKCLRCFKGIDTLAAITILAEAQDLTRFGSARGFMSYTGLVGSEYSSGERVIRGGITKAGNAHIRRVLVESAWSYRHRNVTSPDLLARRKGCPVEAVKIARKAQARLTAKFWRMMSKGKKQPVIVVAIARELAGFIWSMSRHFPAKAV

SEQ ID NO: 298071 - protein, 313 aa, unidentified
MSELYVGVDVSKEHLDVASSDGTSWRVGNDDVGHQELLTRFSAAPPALVLMEATGGLERALAVQLSAAGVALRIVNARHVRHFAKATGLLAKTDRLDAQALVHFAQTLKPEPRAIQAEQTLALQALIVRRRQLVEMLTMERNRLRTAHRGVRKDLQSSIRWLEKRLAGVDDDIDGALRECGVWREKVELLESVPGIARVISVSLLASLPELGQLNRHQISALAGVAPFNRDSGRWQGRRSIYGGRPLARSALYMAALVGARHNPVLRAFYQRLRAAGKPAKVALTACMRKLLVVLNTMLKNGQRWGDHVQLQA

SEQ ID NO: 298072 - protein, 401 aa, unidentified
MNAVGIDVSKGKSTVSILRPFGEIVYSPFDINHSSSDINALIQLINSVEGESRIVMEYTGRYYEVLAHQLSEANLFVSVVNPKLIKDFDNDSLRKVKSDNADSVKIARYALDKWHKLQQYGDMEELRNQLKTMNRQFGFYMKHKTAMKNNLIGILDQTYPGVNTYFDSPARSDGSQKWVDFASTYWHVDCVRKMSLNAFIEHYQKWCKRRKYNFNKTKAEEIYEKAKELVPVLPKDDITKMIIKQAVDQLNNTSATIEKLRSLMDETASKLPEYPVVMQMKGVGPSLGPQLIAEIGDITRFHKKSSLTAFAGIDPGVNESGSYEQKSVPTTKRGSADLRKTLFQIMDVLIKTAPIDDPVYQFLDKKRSQGKPYYVYMTAGANKFLRVYYGRVTEYLSTLSD

SEQ ID NO: 298073 - protein, 339 aa, unidentified
MKYTPVGVDIAKHLIQVHFINEHTGEVVDKQLRSKDFLTFFSNREPCLIGMEACGGSQHWARELKKLGHEVRLLQARFVKAFVMGNKNDVMDARAIWMAVQQPSKEIAVKTEEQQSVLVLHRSRRQLVKFRTAQINALHGTLLEFGETLHKGRAAMDRELPAALERMKTKLPPYLITVLEDQYTRLSELDMLIDDLEKQFNSVARQSETCKRLMEIPGVGPLIAMAAVATMGKASAFKSGREFAAYVGLVPKQTGSGGKVRMLDISKRGDTYLRTLFIHGARSAALLTKEPDPWITELKKRRPTGVAIVAMANKLARTVWAIVAHDRKYDKNHVSIRLY

SEQ ID NO: 298074 - protein, 394 aa, unidentified
MILVGIDIGKNKHTFSIIDKNSGEILLSPSDFSNNLKGFLFLIQKLSSYTKSELLIGMEDTGHYHFALLKYLLDRRYTVALINPTTTDLTRKLQGGITKNDPLDSLTICDVISSNHRNKPYRVTTLNRFDLYEQKQLTRHHHNLKEELNTYKNRLQKCIDIVFPEFNSLFHSKYGIVYMNILKTFSSAKAIANADIRSIRKCFEFKGQGKRISLSAEQLKLTAKSSIGIPSVAEEIQIRHLVSQIELLEKQLSEIDKRIEEFSLKNNSPILTIPGISHFSGTSIISELGDICNYTKASQIIKFAGVAPYHYESSQFTAQHTAITKKGSKYLRKTLYQIILPVISNNEVFYAYYTKKLNEGKGHRCAQGHCIRKLLRVIYHLLCTRQPFNPKLLL

SEQ ID NO: 298075 - protein, 316 aa, unidentified
MSNVFVGIDIAKRTLDLAVRPSGQVRTLAHDPAEFPALVAQLRQLGPTRIVMEATGGLETLLATTLAAAGLPVAVVNPRAARDFAKASGRLAKTDRVDAQALAHLGEALAPACYQAPSPHAQAFEALLTRRRQLVEMLVAEKNRLAQPHLPAAIQADLTLHRQWLEAHLAQLDEDLRQALEQSPVWRTQDEILRSVPGLGHVTARTLLVQLPELGRLSHKQIAALVGVAPYTQQSGQWRGMSHLHGGRASVRSVLYMATLTAVRCNPVIQAFYHKLKAAGKASKVALTACMHKLLTILNAMLKAQKSWDPKQLSAN

SEQ ID NO: 298076 - protein, 361 aa, unidentified
MFSERTSVGLDVHARSTTAWALDGMTGEIFSDRLVVNTADVVAWVRRLPQPAAVAYEAGPTGFVLARVLQQAGIRCVVAAPSKMERPAGDRVKTDQRDAQRLAKLLRLDELPAVRVPDLEQEAARDLTRARDDVRADLMRARHRVAKLLLRRGIVYTDGRAWTAAHHQWLTGRRFDEFGLRVAYDEALETVLALEARRTRLDAAITELAAQPAWAPVVRRLACMRGVSTFTAFGLAVEIGDWHRFTGSTIGSYLGLVPSEDSSGSQRRQGGITKTGNTHARRLLVEAAWHHRRPYRRPGTGLQARLDHVAAPVRQRAERGNRRLHQRWVNLDARRKRSTISVVAVARELSGWCWSLAIMED

SEQ ID NO: 298077 - protein, 427 aa, unidentified
MSYKIAGIDVHKKMLAVVVSDVEGDGEYQFERRLFGSNPEQLRLLAEWLLDQEVEETVMESTAQYWKPVWGALERFWKPVRQKRDGAGAMSGTLHLAQAQSNRGPQGRKKDFPDAERLVKRLVARELTLSFVPDVEQRLWRTVMRRKYQLTRNRVQLQNRLECLLEEAHIKLSSFVSNLLGVSARRMLKALGEGETNPASLAALADRRLRATPEQLCDALGACMDLNPVYRRLLKMTLEELRLIEEHIGKLDQEMADLLHPYQDQVKRLAEVPGLGVDSAQQILAEVGALAAAFPSAKQLSSWVGACPGDNQSAGVNYNHRSPKGNRAMRRILNQSANAAVKAKGTIFEVVYRRSVSRLGHKQTIGAIAHRQCRLIWKILHEGVRYEERGPAVSKGSKQRRALRMIRELRCLGYRVELENSQQANPA

SEQ ID NO: 298078 - protein, 358 aa, unidentified
MNSCKYVALDVDSANIVAGVFDSKGKAMMECFVKTNSTAVRQFFKLLDGTVHVALEEGTQAGWLYDLIRPLVAEVIVCNPRRNKLLQSGNKGDRIDVGKLAKLLRLGELHSVYHGDQAIVGLKQLVHGYQTLVEDSTRAMNRLRAVFRSRGIKCNSTVYNHDKRQEWIKKLDIKAAQMRVGYLYKELDCLMKLRDEAETAMCRQARTHSPYKLIASVPGIGPVRTAQIIAVVGSPHRFRTKRQLWPYCGLAVVTRSSADYEWVGDRARRRNKPTPTRGLNHNFNRTLKAVFTGAALTAIGSNKEFKQYYQRLKDKGIRPEMARLTVARKLVAITLTLWKKGEKYDPERLNQAAGTGDQ

SEQ ID NO: 298079 - protein, 424 aa, unidentified
MATRRRTNKVDINALVDLYERCAGIDVHKETVTVCVIRPGTDGSAQGEMATYGTTTRELRQLSQWLQECGVTHAVMESTGVYWRPVWQILETGGFRLFLANAKQVRNMPGRKTDQADAVWLATLLRKGLIKGSFIAPPQIRALRDLCRSRASLVHDRTRVVQRIEKVLEEANIKLDTVASDLMGVGPRMMLEELIGGETDTTKIAELALGRMRSKIPQLVGALEGYFRPHQTFLLKQLLSQFDDLCRRIERFEQQIEEYSRPFDKQVARLDSVPGIDRLSAAAILSETGVDMDPFPTPQQFCRWATIAPGNNKTAGKQRSGKIGRGNRWLRGSLTQCAWAATHDKNSYFAAQYHRLLHRGKRRALVGVGHSMIAAIWHMLRRDVEYRELGADYFEKQNLEGLKKTYLKKLERLGFKVSLEPVAA

SEQ ID NO: 298080 - protein, 355 aa, unidentified
MTASYDYHIGVDYHKSYSHLVVQDSSGKTLRSGRVKNDRHSLGGFLERYRANSHAVIEATRNWMVMYDWLDDICDDVVLAHPLKVKAIADAKIKTDKIDATVLAHLLRADLVPEAWAPSEKSRELRVALRERMFYVRLRTMTKNRIVTVFDRYPEQTAQLKKLGDLFGKAGRIQLAEVNVSDIDRVQIDRGLAFIGDINGRIKQSETTIRAMTKANANVKLLKTIPGIGEFFARLIDAEIDDVSRFRNAKKFAAYAGLVPSTYSSGGKTYHGKIIKQGNKWLRWASVEAVAPAIASDAQLRTQYEQLKIRGTNKARVAIARKLLTIAFQILRDQRAYEPRGITTTEGASTISRLS

SEQ ID NO: 298081 - protein, 343 aa, unidentified
MEHYVGLDVSLKQISICVVNQAGSVLREGVVDSDPDAIAAFVRSKAPGVVRIGLETGPTATWLWTELKRLGLPVICIDARHAKAVLKMQINKSDRNDAAGIARIMQTGWFKEVRVKGIESHSVRALLASRALLVKIKRDLENQIRGLLKNLGLVIGRAKFNVFAVRAEELIEDRPELVAAVRPLLEARKAIEQQVGDLDRKVLKLARHDVQVRRFMTAPGVGPITALCFKATIDDPTRFKRSRSVGAYVGLTTRRHASGEVDWSGRISKCGDAMLRTYLFEAANVLLTRVPKWSALKAWGMRLAKRNGLRKAKVAVARKLAVILHRMWVDGTEFNWSTKKAAA

SEQ ID NO: 298082 - protein, 316 aa, unidentified
MKVGIDVSKLTFDASWVVDGKAIHRCFDYTVENVDSFVALLPKEAHVVMEATGVYHSRLALQCYEAGLSTSVVNPVVIKRFGQMLFKRVKSDKADAELIRQYAEAHEPDLWVPSDKAIHDLKQALSWADDLVREGTMANNREEAVRHNAVPSKFVLGEIKDFRKYLKARTKKCENYLKATVKKHFPELYDSLQTIPSVGEKTTIEMIVVTEGFTKFESDKALAAYVGVSPTTYSSGTSVHGRGGINRSSRGRTRQCLYVCSWTARRSNPACAAMYERMKMAGKPPKVIGVALAHKLLRQIFAVGMSGQDYRAECAY

SEQ ID NO: 298083 - protein, 339 aa, unidentified
MSIIGCDLHSRYQVIAMVETDTGEMVTRRLEHESGEARAFYTTLPKPSLIGMEATGYTQWFERLVAELGHELWVGDPAEIRARAVRRQKTDTRDAEHLLDLLLTKRFPRVWVPTPEERDVRQLLKHRNKLVRMQTSVRNQLHFLAMSQGVCRKQKLWSARGRAELEGLSLGPWASQRRKELLELLDGLGPRIAELDQAVKTEAERRPEAVELMKHKGVGPVTALAFVLTVGPVERFANSRKLVSYLGLNPGEDSSGGHQRLGHISKQGNEMLRWLLVEAGHGAAQFDPELRRKYQRLVFRRGRNVAKVALARHLAVRLYWTLRQASSATPPVRTPGSPR

SEQ ID NO: 298084 - protein, 354 aa, unidentified
MDSAKYIGMDVHKESISIAVMNHSGKIVMESVIETKASMILQFIGGLRGDLRVTFEEGTWAAWLYDLLKPHVTEVVVCNPRKTALLKDGSKSDRIDARKLAELLYMNKLNPVYHGEHGIRTLKELARSYLTISKDLTRVMNRLKALYRSWGIPCAGTEVYSPRHRAEWLRKITEIGVRRRAEHYYQQLDSLRLVRQQVRRDLLVESKKHKPWKLLRQIPGIGPIWAALLIALIQTPHRFRTKRQLWTYSGLGLETHDSAQYRVLGGQLQHSKTVTIRGLNKNHNHDLKAIFKGAALRATIAAGPLHNFYEGLLAKGKKPTMARLTLARKIAAITLIIWKKEVRFDAEHLKPQAA

SEQ ID NO: 298085 - protein, 318 aa, unidentified
MSDAVFIGIDVSSQTLEIASSGQAKTWQITNDTSGIEQLVSQVSALAPELIVIEATGGYEFEAACALQAEGLAVAVVNPRTARDFARAMGALAKTDALDARMLAAFARVLHQHPERERFVKPLADAERQRLQALVLRRRQLVQMLTAERQRLRLAHAAARSSIERVIECLKQELGDSEAEAAAHVQRHHAQLAQALASVPGIGSASVAVLLAELPELGKLDRRRIAALVGVAPLNRDSGQRRGHRSIWGGRADVRRTLYMATLTAVRYNPVLKATYQRLLAAGKRKKVALVACMRKLLTILNAIAKHGSTWNPAMPGA

SEQ ID NO: 298086 - protein, 402 aa, unidentified
MNCVGIDVSKGKSMIAVMRPFGEVVVSPFEVRHTANELSELAGLLKSLDGETRVVMESTGNYHAPVAWLLHDAGLHVSVVNAMLVHDYGNNSLRRAKTDKKDAVKLANYGLDHWLTLPRYAPEEDTRLMLKTCYRQYQQYSKVQTMLKNNLISLLDTTFPNANRLFTSPPRADGSEKWVDFVAAFWHCECVCGLSEKAFTAKYQKWCRKHGYNFSEDKALDIYAFACAHFAVMPKTDTAKLLVEQAVSQLRTTSTALAALKHEMKSLAASLPEYPVVMKMFGVGPSLGPQLMAEIGDVRRFHSKKALVAFAGIDAPPYQSGQMDIHSRSISKRGSASLRRTLFLVMGVILQCAPMNEPVYQFMDKKRSEGKPYRVYMMASANKFLRIYYASVKTYLDSLEHD

SEQ ID NO: 298087 - protein, 342 aa, unidentified
MAQTISVLGIDIAKLVFHVVGMDDSGRVVLRKRLARSELLTFIANLPPLRIGMEACGSAHYWARCFREHGHDVRLIAPQFVKAYVKSPKNDARDAEAICEAVTRPTMRFVPIKRVEQQDLQALHRIRERLITARTALVNEIRGLLNEYGIVLPQSIAKFRALIVDKLEADQAKLTALSTEVFWHLYDEFLAVEKRLAYYDEKLAAIGQAHPECQRLQTIPGIGPVTATALIAAIGDVTQFKNGRQLAAWLGLVPREHSTGGKPRLLGISKRGDVYLRKLLVHGARATLRWIDTKHDERSQWLKALIARRGKNRAAVALANKNARIVWALLAHHQEYRSRTAV

SEQ ID NO: 298088 - protein, 316 aa, unidentified
MYLGIDVSKLTIDCCLIADGQNHQKKFQNNKGGFEQLIKWLQSHKVTDKLHCVCEATGTYYEALAEYLYSRYTITVENPRKIKGYAIAELQRSKTDTQDAKLIAQYCQDRKHKLKAWQPPVKEQKQLQEIARYLDYLKQQRATEKAKQHEAPDYIKSHIQTTISNLTAQIQTVKKQLLQFYKDNPSYNNLRKRLKTITGIGEQATAVLLSTYKRHEFKNAKQFTAYLGLDPRKYQSGTSVNGKSRISKIGSSEIRKSLYMPAVVAYRCNAFPEFVGRLKNKGKHIKLILIAIMRKLAVIAFTLLKNGQDFQVERYK

SEQ ID NO: 298089 - protein, 412 aa, unidentified
MNLVYERCAGLDVHKRNVVVCAITPDPSGYRHKERQTFSTMTPDLLRLRTFLKDLGVTHVAMESTASYWKPIFNVLEGHLEVLIVNAQHLKAVPGRKTDIKDAEWIADLLQHGLLRPSFVPPAPQREVRELTRYRISLSEERSRLINRLQKTLEDANIKLASVASDVMGKSARDMLAALLAGEVDPVVLAELARGRMRAKRDLLAQALQGQLKSHHRFLISEQLTDIDELDEAIERMSTEIAERLRPYEHQIQRLSTIPGIKRCLAEVILAEIGPDMNRFPSARHLASWAGMCPGNNESGGKRLSGKTRKGSPWLRSALVEAAHGAIHCKDSYLSAQYQRLVIRRGGKKATIAVGHTLLVIIYHLLLEDKDYEELGGNYFDEWDRLAVQKRLVRRLEKLGYEVKLEPTSPAA

SEQ ID NO: 298090 - protein, 351 aa, unidentified
MIAKTECSHYWSVGIDLHKHTMTVCVYCARCGEVHFRRLHCKCRQQIVEFFTNLPRPHVVAIEAVGFYRWLWQLLEPVVESLLLADATATRALAAGRIKTDEDDAFNVAELLALGRLPVAYAPPEEVQALRDWTRRRNRLSREHARVLHWVKSLMNTNNRPGPARLDSRGLIRYIKAQGPKLPQRHVRLLWYCVDQLTVIERQIDEIERIIAPLLDSPTFREKRDILTSFPGVALVTAATVLAEIGDFTRFDHRKAIARYVGLNPRVYASGSKNRTGHIAKAGPPDVRWVMQQAAWTAIRVDPHIKRMWLKISRSAGRKAAAVAVGRKMLTWMWYAVRANEPYQRPAAKAA

SEQ ID NO: 298091 - protein, 402 aa, unidentified
MNCVGIDVSKGKSMIAVMRPFGEVVVSPFEVRHTANELSELAGLLKSLDGETRVVMESTGNYHAPVAWLLHDAGLYVSVVNAMLVHDYGNNSLRRAKTDKKDAVKLANYGLDHWLTLPRYVPEEDARLMLKTCYRQYQQYSKVQTMLKNNLISLLDTTFPDANRLFTSPPRADGSEKWVDFVATFWHCECVCGLSEKAFTAKYQKWCRKHGYNFSQDKALDIYASACGRFGVMPKTNTAKLLVEQAISQLQTTSAALAALKQEMQSLAASLPEYPVVMGMFGVGPTLGPQLLAEIGDVRRFHSKKALVAFAGIDAPPYQSGQIDVRSRSISKRGSASLRRTLFLVMGVILQHAPMNEPVYQFMNKKRSEGKPYRVYMIASANKFLRIYYASVKAYLDSLEHD

SEQ ID NO: 298092 - protein, 340 aa, unidentified
MSKSEAGKRWYVGIDVSARELVVALRGGDTVTMERVSNDAAGHERLQARLRGLGAPVVICLEASGTYSLDVALALARPSAGWQLSLVNPRVARRFAESLGKRSKTDPVDARVLAEYAERMQPEPWQPPSAQALQLRSITRTIAALVRQSVQHKNRQHALSASAALPALLVRELEAQLAFLDKRIRHLRRQALRRIERQPELLRCWQHLQTIPGVGEASGLAILGELAVLPANLDERQWVAHSGLDPKQHRSGSSVEQKTRISKAGNRYLRAALYMPALVAVQHDPWLSGFYQRLVARGKAKLQALVAVMRKLLHAAWGMFRHDQSYDGEKLCPLTRCQQA

SEQ ID NO: 298093 - protein, 321 aa, unidentified
MTYVGIDVSKATFVVAYSSAKSSETKTFKNTTKGIREFIRTISPEENHCVLEATGNYSMLLVYLLSKAGFTVSLENPLKIKNFARVMLSVVKTDEIDARLIALYGERMQPAPFKLRSDSLLLLKQKRTVLRQLKKQLTANRNLEGSLKILPFIDSKCKKVLEKTIKFLEKQIEEMEEELTSLAEIEYKKQMDLLTSIKGIGATLAAALIIATGGFTYFDNAKQLTRYLGLSPTYQQSGTSVNVKGHINRNGDAYLRSQLYIGAMASLRCNTECKACFKRLRSNGKPGKVAIVAVANKLIRQAFAVVTQEKIYIDGYKSVKP

SEQ ID NO: 298094 - protein, 352 aa, unidentified
MEQITRVGVDLAKRVIQVHAVDASERVVCRRALPRTKFIAWCSRLPAGCVVAMEISSGAHHWARRLAALGLVPKLMSAQLVKPYRSEGSTGKNDANDAAAICEAASRPSMRFVPVKSVEQQSMLCVHRLREGFKAERTACINRIRGLLAEFGLAFAQGPEELRRVLTDALEDASNEMNALARRVIQRAQAHWGELDEHIAWCDERIAQHARDNPAVRSAAQLMGIGVVGASAVVATVDDFSQFKNGAQFGAWCGITPSQNSSGGKTVLGRITRRGDTYLRSLLVQGAKSAVFTAHKRSDPISRWASALRERSGWQVAAVALANKNARILWAVMTKGERYDPNHVSVKPTMTH

SEQ ID NO: 298095 - protein, 348 aa, unidentified
MRVYKTQHSYYCGVDLHARSLFVNVLDDTGKTRLAQDLPASPSVFLDAVKPYRQGIVVGCECMFAWYWLADLCERESIPFVLGHALAMKAIHGGKAKNDKLDAEKIAGLLRGGFFPMAYVYPKDKRETRDLLRRRSFFVRQRAQLIAHIQNTNSQYNHPPFDKKLTYKGNRNTQIADRFEHLSTRLSITADLNLIDSYDTEIASLETHLVKSAKIDDPTTFAFLRTVPGIGPILGLVMLYEIDAISRFAEVGNFLSYSRLVTCTHESAGKVKGVGGRKIGNAHLKWAFSEAASLMLRSFPAAKSWMQRQSKKRGKKKAHAILEAKIGRTVYHIWRKQVAFDAKKFLAS

SEQ ID NO: 298096 - protein, 338 aa, unidentified
MKKKVIVGIDFSKLTMDVSFFHKERPAELYYKQFKNTEYGCISMIKWIKRKFPCMQEWLFCGEYTGIYSMTAAYVLNKENLDIWLEAPLQIKLSSGICREKNDKIDSYQIATYAGRFTDKARLYKISSPVLLKIKELIVYKDRLTKIKHQLLTPVKELMRVWSDWEESKFIDSSSGEIVAAINIRIKGVEEKLRNLLKTDSELNQLYELITSITGVGMQTAIYLIVHTMGFTTFSNSRELACYCGVAPFSKKSGTSLNGKSKVSNIANKKLKTLLHMCALNAIRYDVGLKAYYERKINQGKHKMKVINNVRNKLIQRIWAVTSKQELYNPNFVNKLAA

SEQ ID NO: 298097 - protein, 430 aa, unidentified
MKSNTQNAKIEAITEKTLVLGIDVGSETHYARAFDYRGVEYSKKPFKFSNTEAGFVTFKAWVLDIKEKHGKDKVIPGMEPTGHYWFNLGKFLQDNEMKPVLVNPHHVKKSKELDDNHPTKNDRKDPKVIAGLVREGRYMIPYLPDGVYADLRTASNIRFQLQAELTRIQNRINRWFNIYFPEYKTVYGKPDAKSGILILKEAPLPEDILTLGIDGVNQIWRDAKLRAVGKARAKTLIEAAEHSVGSKEGAVSARMEIRMLLEDYESRNIRLQEVMALIEELVNQIPMAEKLLEIKGVGIKTVSGFLAEVGDIRRFNNPKELQKLAGLALVENSSGKHKGKTTISRRGRKRLRYLLFEVAMSLVAKNPEFRDLHNYYTTRRLNPLKKMQSLMAIAAKLLRVFYAILTKNVGYDPKKMVNDIRRPAAYAQAA

SEQ ID NO: 298098 - protein, 345 aa, unidentified
MKIIGCDFHPSFQQIAMCDLETGELQERKLSHADGQAERFYRELGEPALIGIEATGNSQWFLDLVQRLGHEIRVGDAAKIRASYVRKQSTDKRDAGHLLTLLLEKRFPQLWTPSAAMRDQRQLLRHRDKLVEIRTKVKNSLQHLAMNRGMQKKSRLWTRQGMEQFQQLAMPGWAGVRRYDLLYLLQQLDKQIEPLDQAVKQGARQHPQAQLLMTQPGVGPVTALAFVLTIGDVSRFAGSKQLTSYLGLVPSEHSSGSKRRLGAITKQGNRFLRKLLVEAAQTTVRKEEGFRREYQRRCHHRPKGVAKVAAARKLAVRLYWMLRTNTAYPEIAHVESNPRVALGDT

SEQ ID NO: 298099 - protein, 426 aa, unidentified
MSERDYSKQVARRQRIGSTTLVVGVDIGCASNAVGFMSKEGRVLGSYPNMLNSREGFEQFVKMTEGLKAKHGLNDVLIGLEPTGHYWRKFAYFAKGKGYEVRFVRTTALKHHRELDESSSAKSDQRDALTITNITREGKYIDTVIEDGRMRHLRILVKVREKIQKRNVSVKNSLHAALDDYFPELKRIFWSMHSRGLWALLERCPFPEDVVTFKVSALKEMIGRASRRGAEASQKATALYQAAKESIGLRQIGNADRYRLKMCLEEVKRTELTIKDIEREIKRMLKDIPQAEYLLSIPGIGPISAAVFLGELGNPSSFPGARQVVKYAGYDPQESDSGYRVSRKFISKKGRWLLRKHLFLMSMRVVVLSRYFQEYYQRKLQTKNRVGQLPRKKEILCAVAIKLIKVIFALMRDQRNFVDTITDSVE

SEQ ID NO: 298100 - protein, 356 aa, unidentified
MSHEVKYIGMDVHKEAIVIAVLNGSGKLVMETIVETKASSILQFLHGLRGELHVTWEEGTWAAWLYDLLQPQVQEVVVCNPRRNALLKEGSKSDKVDARKLADLLRTGMLRPVYHGENGLRTLRELGRSYQTISKDLTRVMNRLKALYRGWGIPCAGTQVYAPRYREEWLSKIVQAGVRRRAELLYQQLDGLQGLRRNLRPEFLAESRKHKAAKLLRQIPCIGPIRAARLIALMQTPHRFRSKRQLWTYSGLGIETHDSAQFRFVRGQLQRSQKPQQLRGLNRNHNHEMKEIFKSTATRASCGTGPFHEFYAALLATGMKPEMARLTLARKIAAITLTLWKRGERFDAEQLKTQAA

SEQ ID NO: 298101 - protein, 334 aa, unidentified
MTTERFVGVDLHKKSCVFTELDSKGKILRRGKFGNNIGEVSAFAASLHPGTKLVVEPLLNYLWFLDQVAPYVKSVHPANPHRVRIIAEAKCKTDRYDSYILAELLRTDFLPESHYVPARIRELKDIVRQRFHLVGHNTALKNRMRHLVFLNSSVVGARNITSPKAQRGIKRLHLSESIRASVEQCQRVILGIEPLLEELDREIEVRCSGIKEIEILMSVYGIGPLWAAVIYTEVVDISRFRSRKALISYAGLAPSVRASGDKVSSGGITHQGSSLLRTALVEAGMNAKKVCPELRRLYQRVFYKKGKETARVAVARKMAVIIFALLREKRAFRL

SEQ ID NO: 298102 - protein, 343 aa, unidentified
MEYYAGIDVSLESSSLCVVDATGRIVREAKVASEPETLTAWFNSLGFALSRIGLEAGPMSQWLYAAMKQAGLTVELLETRHVRNAFKIMPVKTDRKDARGIAQLMRLGWFRPVHCKSLPAQEIRSLLGARKLLQGKLHDIELSLRGTLRGFGLKVGKTTPKTFEGRVRSLVTNHPTLTLIAEALLRARAVLLGEFLNLDQKVHTLARQDPRARLLTTAPGVGSMVALTYAAAIDDPARFKSSKTVGALFGLTPKRYQSGETDVTGRISKIGDAAVRTALYEAANIILERPVKGGWLKAWALGVAKRAGMRKAKVALARKLAVVLHRMLVDGTPFRMDRVATTA

SEQ ID NO: 298103 - protein, 357 aa, unidentified
MNKTYRLQEYVVRGKEIFVGLEDSKRTWKLAVRSEKMTIHQVSMEAKYPVLIGYLRNKFPECMIHLIYEAGFKGFNLYDQLTEDGIDCVVIPPHVVTEPKVSRIKTDKRDARRLAKVLEDHDFQDSCYVPDKERREDRQVSRTLIALQKDIVRTRNRIRKLLQFHGIEVGFPDRWGRDEFRALKKLEVSEPLRISLDIFLAQLEELWTHQLSLRAALRKLCHKERYRKAFTIARSLPGIGWFTAIRFVLELGEDLSRFTSGKKIASFVGLTCSEDSTGETEHKGRITGMGSGFIRSTLVENSWMSIAKDPVLLAKFTRVWHASGSRKKAIVAVARMLIVRYRACLMSGTPYVIGVAA

SEQ ID NO: 298104 - protein, 355 aa, unidentified
MSSEKYIGLDVHQATISVAVMDSQGKIIMESILETKASTILEFFAGLHGSLFVTFEEGTSAAWLYDLLKPHVTEVLVCNPRKIPLHKQGNKSDKIDARKLAERLRLHDLKPVYHGETGIRMLRELARSYLTIVKDLTRVMSRLKALYRSWAIPCAGRDVYYRRHRNQWLEKIPEPGTRRRAEQLYEQLDLLQRLRQQSRRELLAESRKHTITAKLRQIPSLGPIRSALAVALIQTPNRFRTKRQLWTYSGLGLETRDSGEYQFVKGQPQRRKKQATIRGLNKDHNHDLKGLFKGAATRASIKPGPFQDFYQRSLVKGIKPTMARLTLARKIAAITLTLWKKGEDFDIHKLNSQAA

SEQ ID NO: 298105 - protein, 433 aa, unidentified
MSKFTNKPVFGIDVAADFSIVAILAPNGDIYRKPFRINHNLKGFNHLISEIEKVEKKFNMKAATFMESTGIYHLSLFHYLIDKGFDAFVINPLIINSNKNSDIRIVKNDKKDALNIAKICKYQNVKISSKFDIDLYTLKSLQREYYKLTDTKSTYKKKLSNDLRIMFPGYCNIFSNVTSKTSLEILQNYPKPDDILSADKNEIINILLTFSKKGIKYAEDKYSRLIKAAEEAKIVGLYQPYLFTKLISDINIIKSFESQIEIILSEIKNLLSAPYFPKNIVNDIELLKTIPGIGELTAITIISEIGDIKNFTKPKLLVAFLGLDPSVNESGKFKGNNNHISKRGTHIGRRALYAVALACIRKKRNGQAINPVLLNYYKTNMNGKSKKVGLVAIMHKIVNYIFAVLRDQKPYEIRDPKLHCKMYLENKSVSKVA

SEQ ID NO: 298106 - protein, 349 aa, unidentified
MTIVGCDLHTRKQQVAVLHPDTGEVVEQELLHAGDAVEEFYRTLPRPVIVGIESTGYALWFHELRQHLGHTLLVGEAAKIRAMVVRKTKTDRRDAQHLLDLLKHDRFPAVWIPDPATRDLRALVTHRVRLVRIRTMVKNGLQAIALNRRLALGSKLWSQRGRAQLVALALPPHTAQRREDSLDLLAWLEAHIAGLDARIAAAAAAHPGARLLLTHPGVGALTALTTVLVLGPTARFPGSKHVVSYVGLAPAVSASADTCHLGQITKQGSTLLRWVLGQAAPLAARADADLHRVYRTLIHRRGRPKARVAVARKLLVRLFIMVRDQIDYAEFRRRGCLSPPRETLLPRRA

SEQ ID NO: 298107 - protein, 347 aa, unidentified
MVTIGIDPHKSSHTAAALEASGETLGELRLRADGATLSRLGAWAVGWPQRVWAIEGAGGLGRLLAQQLVAAGETVVDVPSALTAQVRVLHRGHGRKSDGIDARSVAIVAQHRDDLTRVSADDHSALLRLLSDRRDELTAERRRAVNRLHRLLRELHAGGAPRQLSAQHATRLLATIKPAGLVDTERKAMARGLISDVRRIDRALLENRRRCAQAVAASGSSLTEIFGISEVLAAKLIGHTGDITRFASADHYASYSGTAPIEVSSGEQTRHRLSRAGNRSLNHALHLAARVQTMHAGPGRDHYQRKQTEHKSSAEALRSLKRQLAKVVYRHLRDDQLLQISPTPELT

SEQ ID NO: 298108 - protein, 421 aa, unidentified
MNRLSEESYTAYIGIDWASAKHDICLQVAGSDERSFERIKHTPEAIEEWALALHQSVGGPIAVALELSEGPIVSALEKYDFLVLFPIDPKRLAKYRQAFVPSGAKDDPTDAEFAMDYLMRHPEKLKVLKHESAAIRKLRYLVEARNRIRGDQSRCVNRLIQALKQYYPQAVDWFNDHNTLVFCDFLKQWPTLATVQRARRARLERFFKEHNVRFARIIEDRIQAIRAATPLTHDEAIIEAHRLQVEILVEQLRLTIKAMKCFDEEIIAIATEFPDYGHLFTPLPGAGKVIAPRLLAAFGEDRDRYNCAEQLQKRSGIAPITKRSGNSTSVHWRFQCSKFLRQTFIDFAAQTINKSAWAGAYYRQQRDKGASHHIAVRALAYKWIRVLYRCWQERTPYDESKYLETLRRRGSPLLKQLAEAA

SEQ ID NO: 298109 - protein, 367 aa, unidentified
MSISKFVGLDVHKETIAVALADDGRTGEIRFYGTIPNTQDAIRRLVARLSSPDVALHFCYEAGGCGYGIHRQLVDLGAECSVIAPSVMPRKPADRIKTDRRDAMTLARLLRSGELTAIWVPDEAHEAIRDLIRGRRQAKHDLVAGRQMLLSFLLRHGRKFAGRSNWTKAHWRWLGEQAFDAPHQQFVFGESIRRIEEAQQRCDRLDAMLVEALPYWSLAPLVQALQALRGVGLIVAATLVAEIGDLGRFDTPKQLMGWLGLVPSEASSGARTRRGAITKTGNREARAMLVEAAWSYRLPAREERRYRARVEGLPDEVKAIAWKAQVRLCQRYRMLAASGKPLPKVITAIARELVGFVWDIGRRMQPA

SEQ ID NO: 298110 - protein, 353 aa, unidentified
MISIGVDAHKHVHAAVAVDDAGRELGQWRGPNSKHGWHRLAAWCEEFGPERHWGIEGAWSYGRGLAQHLVSTGETVYEINSRWTAFGRRRGKRADKSDRLDARAVALFVRQEAPALPVVRAEDDTAVLDLLCSEREGLLVDAGRLRNQLHALLMQIDPEYQSQLRRLDSAAGLKVITRYPLPRVDGLPRRRAASVRRLAVRLTVVLMQVDDLAEQIEVLAAGRFTPLTQLCGVSLLTAGTLAGILGPGQRFKSEAQLAAYAGAAPLEASSAGAVRHRLNRGGNRRLNAVLYRIVLTQAHHSADARAYLDRRVSEGKTRREARRALKRYVARAIWRLWQQCEPMTERPSAAAAA

SEQ ID NO: 298111 - protein, 347 aa, unidentified
MEYFAGLDVSLETVNVCIVNAAGDILLEKKIAAEPAAIVHLLKGFGSPFKRIGLEAGPTSSWLYGELRAAGYGAICLECRHVKAGLSAMRNKTDRNDARGIAQLVRLGWFRQVHVKSEEAQRTRTLLVNRQQLLTKALDIENSVRGSLKVFGLRIGVVARRGFEARVLELVADDPILLAVTEPMLRVRQALLEEFERLDRLCQQLARRDPVCRRLMTVPGVGVVVALTYRTGVDAPERFSKSRDVGAHFGLTPKRYSSGQTDYDGRISRCGDEMVRTALYQAANVLLHHGRWSSLRSWAMRIAKRGSVKGAKVALARRLAVVMHRMWTDGTDFRWSDTSRMTAPTAA

SEQ ID NO: 298112 - protein, 466 aa, unidentified
MARTRPHAARRVRPATLPPELRHVHLNAAGIDVGAGSHYVALPPGRDPEGRDVREFGAFTTELHALADWLCRCGIETVAMESTGVYWIPLFELLAERGLAVRLVDPRQLKHVPGRKSDVLDCQWIQQLHTYGLLAAAFRPDAEICVLRSYLRQRAMLVTYAAHHIQHVQKALEQMNIKLTRVVSDVTGVTGLRIIRAILEGQRDPRALARLRDRRCRHDEATIARALEGTWREEHLFALRQAVELLDFYQQQLGACDREIEAVLGRFDDKTGGHPLAAKPRTTASHRTAPAFDARSHLHRLTGVDLTRLDGIDAHTALKIVAETGLDMSRWPTEKHFTSWLSLAPGTKVTGGTQRSGRTKPSANRAAAALRFAAQSLAHSRSALGAFFRRLQARLGTPKALTAAAHKLARLIYRLLKFGTEYVDQGEEYYQERYRSRLVASLTRRAHALGYTLLETADLAQASTES

SEQ ID NO: 298113 - protein, 370 aa, unidentified
MGKSVLYVGLDVHKMSIDVAIAEAGPGAEVRFYGQIGGDLDSLDRVIRKLRATGAQLQFAYEAGPCGYVVYRHLTAQGWSCLVAAPSLIPRRPGDRIKCDRRDALSLARLFRAGELTSVKVPDADDEAMRDLTRAREDAVSVERRAKQRTGALLLRHGRRYPGKTTWGRGHWRWLLQQVMDHPAQQIVLQEYLDAVREASARVQRLTGQIQELLPQWRRAPFVAAYQALRGVSLIVAATVVAELGDLSRFKNPKELMAYLGLVPSEHSSGASVRRGRITKTGNGHARRVLVEAAWAYRLRARITRPLLQRQEGLPENIRQISWQAQVRLCARYRRFLARGKHKNTIVTAIARELAAYIWAIGQAVEPLTA

SEQ ID NO: 298114 - protein, 411 aa, unidentified
MRLFAGDDWAEDHHDIEVMDEAGKVLAKRRLPEGAAGMTQLHALIGRFLPEDAEDAEVVIGIETDRGPWVAALVAAGYTVFPVNPLQASRYRERHGVSGAKSDGGDAHMLADMVRTDSHQLRPAAGDSAEGQGIKVVARAHKTLIWDRTRATQRLRHQLREYFPAALEAFEDLDAPDVLELLAKAPDPERARRLTRAQVAAALKRARRRDIAGKADAILAALRGEHLGQPAALTAAYAATARSLIAVIITLNAQVKIMEEQVREHFGRHPDAEIYQSQPGLGPILGARVPGEFGDDRCRYATARNRKNYGGTSPITRASGKKKVVAARFIHNDRLVDALMSWAFSSLKASPGARALYDEQRAKGHNHSDALRRLANRLVGILHGCLKTRTLYDEATAWGHRENLHQSSVAA

SEQ ID NO: 298115 - protein, 330 aa, unidentified
MNVAGIDVAHKTLGVVLSAEEKAGKAQEFANTASGHQALVKALKAARVERVCLEATGSYHLDLALALEASGLALMVANPKAAKRFAEALLTRTKTDAVDAAVLAQFAQRMPFEPWQRPDNQALALRACARRLEALNRAKTEAKNQLHALTQTQTTPAVVLADVRLTITQCEAQIKDLRTWAEGQIQADAHLKEVFDLLTTVKGIATASAIQLMGEILVLPADMRAKQWVALAGLDPRQSISGTSVHKKPRLSKAGNRYLRLALFMPALSAARHDRHVNGYYRHLIEDRGLKKIQAVCAVMRKLLHAIHGMLKSRQPFDGSRFYTLAETPT

SEQ ID NO: 298116 - protein, 403 aa, unidentified
MNCVGIDVSKGKSMIAVMRPFGEVVVSPFEVRHTANELSELAGLLKSLDGETRVVMESTGNYHAPVAWLLHDAGLYVSVVNAMLVHDYGNNSLRRAKTDKKDAVKLANYGLDHWLTLPRYIPEEDTRLMLKICYRQYQQYSKVQTMLKNNLISLLDTTFPDANRLFTSPPRADGSEKWVDFVATFWHCECVCGRSEKAFTTQYQKWCRKHGYNFSEDKALDIYASACRHFGVIPKTDTAKLLVEQAISQLQTTSSALAALKQEMQSLAASLPEYPVVMGMFGVGPTLGPQLLAEIGDVRRFHSKKALVAFAGIDAPPYQSGQIDVRSRSISKRGSASLRRTLFLVMGVILQHAPMNEPVYQFMDRKRAEGKPYRVYMMASANKFLRIYYATVKAYLESLEHTA

SEQ ID NO: 298117 - protein, 309 aa, unidentified
MTLDSIGIDISKDRLDVFRLSDGVQERFDNSRAGFRKLRRWLGKTPPARVVYEATGAFHSAFERACADHLPLCKVNPLQARRFAQARGTRAKNDAVDARMLALMGAAFALEPDLPVPEEQRELKELQVQHTALVKDRTRLLNRLKIQTLALTRRQTRARLAQVERQLETIRTEIAARLSQTRPRALDILHSIPGIGQVAAAAILIECPEIGTLGNKQIASLAGLAPMTRQSGRWKGKAFIQGGRKFLRDALYMPALVAIRFNPDMKARYDRLRNAGKPAKVAITAVMRKLLELANALIRDGRKWAAKTT

SEQ ID NO: 298118 - protein, 419 aa, unidentified
MNNDNPLFFVGVDWGSQSHCVCVIDRDNRVVGERSFKHSGEGLLNMGEWIIKVAGSAAGKVAAGIEVTRGPVVESLMACGFSVHSINPKQLDRFRDRFSLAGAKDDRRDAMVLASALRTDRRHFRSLEPQCDDTRTLRTLSRRREELVTERTRHINRMGEQLWVYYPQFRELVGNDTIRPWIIELWQLAPTPDAARRIRVSSVQKILERHKIRRVSAEEALGILRSKKINISPSAASDCVWRIQSIVEHFDLVSRQIRETEVLIKEMLDAIISRQRAENAGTARPSDLEILLSMPGVGPVTAATLVGECYDLIRRCDYRALRCVTGTAPVTKQSGKSKYVMRRRTSSCRLQAAICHWARVAVLHDPVSKAQYRSLRARGLRHSRSLRSVGDRLLRIACVLLKKGELFDKNFKELQKEAA

SEQ ID NO: 298119 - protein, 355 aa, unidentified
MNDAKYIGMDVHTATISAAVRDSSGNLVMEATLETKAETILEFVHGLRGSLHVSFEEGTCAAWLHDLLKPHVTEVLVCDSRKNALLRVGNKNDREDARKLSELLFLNKLHPVYHGETGIRTLKELARSYLTITRDLTRVMNRLKAIYRGWGIACAGRQVYAPRYRAEWLAKITEVGVRRRAEIYYQQFDALAALRQEVRRELLAESRKHPAMRLLRQIPSIGPIRAALLIALMQTPHRFRTKRQLWAYCGLALRTYDSGEYRFVGGQLKRSKKAVTIRGLNKNHNHDLKNIFKGAATRAAATAGPLQNFYEARIANGMKPPMARLTLARKIAAITLLVWKKGVRFDAEQLKQQAA

SEQ ID NO: 298120 - protein, 427 aa, unidentified
MNNVTYQPTLCVGADVHLDEIVLRAVDKALGHEVVDRFRVTNNLPGAQLAAATIAAAATDLGYTRIEIACEATGMLWIPFHRYLSTAPPLQSFELELVCFNPKLVAKFKDGLVLRSPKDDDRDAFDVAARLRFGELPISYVPSDFWQGLRRLTRYRYRLSKAMSREKMRFQSHAFLKCSDWKRVKAFSDIFGATSVALLTQFTAAELQEMTHDQLVDLIAHRGHGRFTDPTATARAVRKALRTSYPIDPRTDEMVTATLAAGWDHIRYLNRLMKRLDQLIARYIDLIPNPIITIKGLGAVITAGILAEIVDVLRFPQEKHLAQYMGLTWRKSSSGSFVSENTRLTKVGNVYLRYYFILGANLLRQNNLEYKAYYWRKYQEVSKYQHKRALVLTARKLVRLVHALLTKNEPYVRPRTTRQEQEDDRLQ

SEQ ID NO: 298121 - protein, 344 aa, unidentified
MNISMIGLDTAKSVFQVHAVDQSGKVAMKRKLQRGELIPFFEKHEACTVVLEACGAAHHWARVLTGLGHDVKLIAPEAVRPFVKKGRKNDAADAAAICEAASRPSVKFVSAKSLEQQSVLTLHSARCLLVKQQTMLANALRGLATEFGLTVPKGIGKLEELAALVNADEAFPETARHVLTGLFDHCRATAASIETVEAEIVVQARQDETARRLATIPGIGPITASLIAATVGDIGMFKSARHFPAWLGLVPRQYSTGGRNRLGRITKTGNREIRRLLVLGATSMVYRAPQWKSAAGLWTRAVLERRPVRLVTVALANKMARIAWALMTRKEVYHAKGRAAAAAA

SEQ ID NO: 298122 - protein, 439 aa, unidentified
MCGGTVNGFSLFFQKGVLPVKVVYQTCCGVDVHKSFLVATIIKTTSGVQPSYQKKRFSTFNNSILEFKKWLLDNSCRDVCMESTGKYWVPVFNLLEDELNVTIANPKWVKAVKGNKDDTKDSKWIGDLFRLGLVPGSYIPCKPIRILREFTRYRYKLTSCRSSEKNRFQNALTVCNVALDSVVSDIFGKSATSVIDYLLEQSDNSINHEEISSRLLRSLKKKSESVIESIEGYQMTDAQKYRMRLVHAHMDYITSTLTDIDSMINSLVEPYENAVQLLCTIPGVDRNSAITILSEIGTDMTQFSNSKRLCCWAGLTPGNNESAGKKKSVRITRAGVYLKPALVQVAHAAVKSNKSPYYKAKYERIMKRRGKKRAIIAVARMILTAIYHMLSTGEAWNPTDLYKIDMPKPLKNKQKEKAVKQAMKLLIAEGLIKESQLVS

SEQ ID NO: 298123 - protein, 340 aa, unidentified
MRKYIRIGVDIAKNSFQVHALESEDCSATKRKLSRSGIVKFLAEVEPCAIGMEACGSAHYWARRFRAMGHEVKLTPPIYVKAYVKRGKNDAADAAAICEAMSRPNMRFVAVKSEDQQATLMAHKTRELLIKQRTMSVNALRGHLAEFGVIAAKGIGHVEELIERAAAADLPAMVQATLGVLLAQLRSLDAAIDELERAIAADHRRDPVSRLAASVPGVGALAASAILASAPDPHVFKSGRDFAAWLGATPKQNSTGGKEKLGSITKQGNRYIRRLLVLGAISVLRAAPKRKGALCDWLAALRARKPPKVVAVALANKLARIVWAIITTGEAFRSSIYAKA

SEQ ID NO: 298124 - protein, 362 aa, unidentified
MTTIEAVRQPSIFVGVDTHKDQHHAAVLDPKGTKLGNLEFAATTAGYRNLTSWLATLGEIELVGIEGSGSFGSGLTRFLRERDVDVREINQPHRHLRARVGKTDPIDAEAAARKVLSGAFTVKPKDTTGIVESIRLLSAARNSAVRAKSSAVIQLKCLLVTVPAPLREAIDGKWGVVKRCQALRPDMARLDDPLQSAKYTLRTVARRIRDLEDEIAVHDVQLKALVEQVVPTLLSRVGIGPVHAAQLLVTAGQNLDRLRSDAQFARLCGVAPIPASSGKSSRMRLHKGGHRQANRSLHLIAVVRLRYDPRSKAYMERRMQEGLSKKDVLRCLKRFIAREVFYDLKHDLLTGPTTGGPATHLA

SEQ ID NO: 298125 - protein, 411 aa, unidentified
MEENGVVHAHRRFVGLDVHRRYATVAAVDSKQQVVLTVRRIDFEEFDVWIRKHLRKTDVVTLEATSNAWHLYDKLVPLVASVTVANPMQIALIAKTLVKTDPRDALTLARLLAAGILPSVWVPPVEVRKLRALGGHRRRLIKQRTQARNRLRAVLFAHNLFPPDGEAFGPANRAWWEGLDLPASERLRVRHDLSILDSLEPLIKEVEAELVRQSSIAPWAEQAAFLVQLPGIGVHNAMLLLAAIGDIRRFDAAHKLVGYAGLGARVHSSGEEQYGGRITKKGRRDIRSTMVEAAWVAVGGHPYWKELFERLAVRLGKPKAIIAIARKMLLVVWHVLTKHVADREAVPEKVAGKFLEWSWKLGRANRAGMDSGTFIRQELRRLQLGDNITAISRGKRTFPIAAVVGASQAIS

SEQ ID NO: 298126 - protein, 307 aa, unidentified
MELLYPHCAGLDLHKETVVACIRHMVNHTVTTLVKTFKTTTQELMALSDWLSEEGVTHIAMEATGVYWKPVWHILSDGNFSLVLANAAHVKNVPGRKTDVNDAAWLADLMAHGLIRASFVPEEPTQQMRDLLRTRKQFVRERSSHTQRIQKTLEDANIKLDSVISNVAGVSGRRMIEALIAGQTDPEALAALADGRIRATAAELEAALRGRVTAHHRFMLRLHLDHLDAVDAAIFRIDKEVEGNLEPFRVACEMLTTMPGVGALAAEVMVSEIGIDMSRFKTEGHLISWAGLCPRNDEARASAVRIA

SEQ ID NO: 298127 - protein, 346 aa, unidentified
MKKIYTNEKLFAAFDLHSNNNYLAIIDKEDKRIYKKKLPNSPEMILTTLEPFRDNIAGIVVESTFNWYWLVDLLMDEGYRLHLANPAAIQKYKGLKHSDDNHDAFWLAHMLRLGILPKGYIYPKSERPIRDLLRKRGHLVRLRTSLINSLQGIISRNCGCKLGANKIKAIKEDNVSPLLYGHDDISLSGTVSKETIDYLGCQIRKVENAILGKVKLKKEFVKLLTIAGVGKILSLTIMLETGTIQRFPTVGDFASYCRKVPSRWTSNGKKKGKGNSKNGNKYLAWAFSEAAELSRRFDDQARAFYNRKAAKKNFMVAHSALAHKLSRAAYYVIRDQVAFDPRKLFA

SEQ ID NO: 298128 - protein, 391 aa, unidentified
MVCVGIDVAKDKHDCCILDSEGTTLVDCFTIPNNMDGFKSLLQTIQDCSQKTDKIKVGLEATGHYSYNILGFLLDNDLPVYVMNPLHTNLYRKSLSLRKTKTDRVDAKTIATMLLSDVDLKSYTDTAYHNEELKSLTRYRFDKVQERAKLKQSVSRLVTILFPELEQLVSSIHGTSIYALLSEYPGAKQISEAHLTRLANILVKTSRGHYRKDKATHIRDAARTSIGSVMPAKSLELKHTIKLIQELTSEINEIEDAIRKIMDELKPPILSIPGMGFHSAAMILAEVGDFSNFNSPDKVLAYAGCSPSTYQSGKLTNCYAHMEKRGSRYLRYALYTATKYVCYWNPVFTEYLTKKQAEGKHYNVALSHATKKLVRLIYALQKSGKAYLAVT

SEQ ID NO: 298129 - protein, 389 aa, unidentified
MPAVADRPDAPTAIQTNLAAIFVSLELSRSIWLITSLSPGSAEKMSKHSVRAGDVAALLARVSELKRKASERTGKSFPIVVIQEAGLDGFWLHRVLQSEGIESHVVDPASIATSRRRRRAKTDKIDGEALLRALLAFKRGEPRVCAMVKAPTPEEEDRRRLCRERKVLIAERVKHVNRVKGLLFSQGVSGYEPLRRDRRQRLDELTTGDGRSLPVHLKNQISRELDRLELLLDQIKRAEAERDALLAAQQAAAPAPTGRMLLEFKGIGAEFAAGLWLEALFRHFDNRRQLASYAGLAPTPWQSGSVDREQGVSKAGNPRLRTTLIQLAWLWLRHQPQSALALWFKERVNRNGGRLKKTTIVALARKLLVALWKYVTAGVVIEGAVMKDA

SEQ ID NO: 298130 - protein, 403 aa, unidentified
MWYCGIDWANDHHDALTIDEKGHQAGSIRVAHTPEGLNQLDGYLEGIAGPDHEQMACIVETTHGLLIAHLLEAGWPVYPVNPRTVDRRRAPSGAKTDSIDAYLLAKTGRADFADLHRLNPDSELIQELKTLTRDQEALIQMQTRLVNQLTACLKAYYPVALELFSQLQQPSTIQFLRTYPTPQQAISASVEQFTATLKQSRYPGAKHAAQQIAERLRQPHLTANEITTRTKSRLMLALLAQLEPLLKQIADYDKEIERLFLMHADSELFRALPGAGKRLAPRLLAEIGDDRTRYAAASSLQALAGTSPVLFQSGTYCKAHRRLGCIKPLRNALQQFAWQSCRFEPWAKEYYQRKRAEGKSHSVAIRALANVWVRILFAIWMKREGYQRATFEQARLLHAPRAA

SEQ ID NO: 298131 - protein, 346 aa, unidentified
MKITTIGIDLAKAVFQIHCVDERGKVAVRKQLKRAEMSSYFANLEPCLIGMEACGSAHHWARKLQGYGHTVKLMAPQFVKPYVKTNKNDMADAEAICEAVSRPNMRFVAMKTVEQQAILSVHRARQGFVKARTAQGNQIRGLLSEFGIVIPQGIRSIMKQVPEILEDGENGLPGTMRNLIERLTENLKEMDRQAKELEAQIQVWHRENEASRKLAEIPGLGPITASAIVATVGDAREFKNGRQLAAWMGLVPRQHSSGGKQTLLGISKRGDTYLRTLMIHGARAVIRFAENKAEPESWLRKLMARRNKNVAAVALANKNARVVWALLANDRTFRPDYTPAAVVAGM

SEQ ID NO: 298132 - protein, 398 aa, unidentified
MTESSDDESVQVFIGVDVGKDTHHAVAINRSGKRLFDKALPNDENKLRSLISDLKQHGQILLVVDQPAAIGALPVAVARSEGVLVGYLPGLAMRRIADLHAGEAKTDARDAAIIAEAARTLPHALRTLKLADEQIAELSMLCGFDDDLAAQTTQTSNRIRGLLTQIHPALERVLGSRLDHPAVLDLLQRYPSPEKLASLGEKKLAAQLCKLAPRLGKRLAADIAQALAEQTVVVPGTNAAAVVLPRLALQLITLRKQRDEVALAVEQRVLAHPLYPVLTSMPGVGVRTAARLLTEVACRAFASAAHLAAYAGLAPVTRRSGSSIRGEHPSRRGNKALKRALFLSAFAALRDPISRAYYTRKMSQGKRHNQALIALARRRCDVLFAMMRDGSFYTPQAS

SEQ ID NO: 298133 - protein, 363 aa, unidentified
MSNVTFVGLDVHSESITAAILSPGSDEPQVLKLPADMMKVRQLFIRLAEKAPVRACYEASGAGFVLQRSLAVGGFHCDVIAPSLIPRRAGDHRKTDRLDAIMLARLYRSGHLTPVHVPTEEQEALRRLLRLRRSYQEQFASTKHRISGTLRNHGHIFNGTKSLWTKKHFLWLGKLRQTIQGYLQIALSIDLEHLEYLQSQIRAIDAELEQAARAIPYRPKVEALCCLRGVKSLTALTLLCEIDDVRRFAAPTGLMAYFGLVPSEHSSGNVERRGPITKAGNSHARRLLVEAAWNNRHSAAADLVLSRRRQGQPPAVVAIALKAQHRLHKKFVRLDQRKHRHVAITAVARELCGFVWAILMEMN

SEQ ID NO: 298134 - protein, 397 aa, unidentified
MYIVGIDIAKRKHEAAVIDGEGTVIIKPFSFTNNCSGYNRLLAMLAKAKLPLDEVSFAMEATGHYWLALFTRLQKEGFRVQVINPVQTNSIRSFYIRQAKTDPRDALLIAEVIRFGHFSESTLHPENIYELRELCRGRHAIVSMQADVKRKVVALLDQVFPEYETAFTNMFSDTSMAILQTCPTPKELSEMPLEELCHLIEVSSHKRFRMAKARELQELARNSFGFAMAGDVFSTMIRLYAKHLDFLKQQVREMDRKIAEIMETLDTPITTITGIGPTLGAYILSEIGDISRFSSAAKLAAYAGIDPTMRQSGEYNGVRNRMSKRGSPYLRHAIWLATSSAVLHDPALKLYFQKKRDEGKPYMASVGHACRKMVSIIYAVMRDNKAYTPYIPNEISA

SEQ ID NO: 298135 - protein, 414 aa, unidentified
MALTRWVGRAIGLDVHRDFCVVAICEDGRVRSGTRVPSTPEGLEMLAQSLVKSDRVALEVTGSCWEVARILEPHVERVVVVSPDDTGIAQARAKTDRLDARTLARLLWSGELESVWMPDERCRVLRRRLARREQLVHSRSRAKNEIHAVLQRRLQGKPPCSDLFGVKGRRWLVGLELPLEERESVDAGIRHIEFLDAEIAAVERLIARQALGWPEIRRLMTVPGVNLICAATFIAAVGDPRRFLSSRKLVAYLGLDPKVRQSGDAPARSGRISKRGSAAARWALVEAAWSVVLQPGPLHAFYDRTRARRGHGKAIVATARKLAILFWCMLTRGEDYAHQQPSLTKKKLRRLELTAGAPKYTKAARGIWSSNQAIRQAERELAAQAESSYKRLVTDQRAAAPARKVGAGATPERA

SEQ ID NO: 298136 - protein, 331 aa, unidentified
MNYYIGIDVSKQSLKMFDGVNEYEVPNEKSLKTFKKLLKKKYVKEWTYVKLIYEPTSSYSNYLHEFAFKYGLKVYEVNPKKSSNFTKALGNRSKTDSIDAKMLYRFSILLREEDYNVPAIDRITEELGSYISSYKIIQKARIMLSNHLKSEEYVKRTDSKFENFIDREVERFKEMENSLEKEISSFIERTPSIKEDIENLLSIKGIGIISAVVLLYMFRKYPETNREEITALFGLDPISKDSGFSIHRKKRISKQGNPLPRTILYFPTIGATRCNEQIKIFYKRLIKNHKPPKYAIIACMRKLILIAHHIYVNKEKYNPLYEEEKNYSFCY

SEQ ID NO: 298137 - protein, 355 aa, unidentified
MDSKKYIGMDVHKESISIAVMNGAGKIVMECVIETKASMILQFIDGLRGEVHVTFEEGTSAAWLYDLLKPHVTKLLVCDPRKNASMREGNQSDKIDARRLAELLRLNHLSPVYHGEHGLRSLKELVRSYLTITKDLVRVMTRVKAIYRSWAIPCTGKQVYAPRHRTEWLGKIGELGVRRRAEFYYQQLDALRTVRQEVRRELLAEAKKHQVWKRLCQIPSIGPIRAAVLLGILQTPHRFRTNRQLWSYSGFGIETHSSADHRSVDGQLQRAKKQSSIRGLNRNCNHDLKNLFKGAAIVASSKPGPFQEFYTTLLTKGIRPEMARLTLARKIATIVLIVWKRGACFDAQHLKPQTA

SEQ ID NO: 298138 - protein, 382 aa, unidentified
MFEGSLSNDLIGASEIKQRILDYQETFGFCQIVIGMESTSVYSFHPAMFFYLDEDLKLLPVEVTVENPYRIKQYSRMFDQDKTDKIDAQIIADYLRVDLHTLSPIKEEVYVGLQRLTRSRYQLVTQMVEAKQHFLENLTYKCNTLSKELANEDNKTSIFGASIMNLLTEGITLDEFSEMSLEAAVELLQKLGKGRFKNPEQLVKSIQKAVRSSYRLGKVTKNSIDLVLGIIANEIKFLKKQNKEIEKAITALLETIPEAQCLLSVPGLGAVYTAGLIAEIGQIERFDDQSKLAKYAGLTWTKNQSGNSQSENTPLNRSGNRYFRYYLIEATNRVRSTLPEFKEYYQKKRNEVPKHKHKRALVLTGRKFVRLIDALLRNGQFY

SEQ ID NO: 298139 - protein, 400 aa, unidentified
MRAVFGIDVSKASSEVAILVNGEKVHGYTISNDALGFARLLGDLKTVHKPEIIFEATGVYSRRLQAFLEDNGYAYTRLNPLEAKKQLDSLRVRKTDQIDAEKLAQSQFVLNRKPTYVQEEVYQELRDLSRFYQNLTEDIVRAKNRLHKVLQVTFPELETILSTPTGEQYGNLVVAFPCKDFVLDLSKDELSESIRQSTSKRISDKRVAYLVEKLTALANQSYCAVKKTSPMLEEVRYYTKELLRLSEQRQTILDEMVELAQPLPEYDILLSIPGIAETTATSIIGELGDIRRFQSANQINAFIGIDLKHYESGNFLAKEHITKHGNPYARKILFKCIHNIASASHTNPCHIADFYEKRKKQSQTTSTKPHTIASIHRLIRTMYYLIMHNKLYDYASTQNR

SEQ ID NO: 298140 - protein, 335 aa, unidentified
MFQLGIDVSKNTLDLCLLREGVKGKVKTRKLKNDVRATSAVINWLHKQHCEPVEVHIIMEATGVYHESLAFGLHNAGARVSLANPHRSREFARGMGMLMKNDQVDAYMLACYGALREPLPWAPPPENVRYLSSLLRRRDALVADRTREKNRLEKCRATDCPLVISESIESMLLSLSSELVHLDNLIEEHLEQYPELKKDFDLLTSIKSVGFQLGLHMLVILRGHNFDTAEQAAAFLGVVPVEKSSGSSVNGKPRLSKIGPPEIRAKLYLASLCGLRFNPVMKAMYERLCQRGKAKMCAIGALMRKLVHWCYGVLNTQRPFNPEHLSNARGMCMAT

SEQ ID NO: 298141 - protein, 409 aa, unidentified
MDQQLERCCGLDVHKETIAACVRIGGRSGRAAQHIQTFRTTAAELVVLRDWLAAHGVTHVAMESTGVYWKPVFYALEADFTCLLVNAAHIKQVRGRKTDVQDCVWIAQLLEHGLLRGSFVPPVPIRELRDLTRYRKALIQDRTRVANRLHKALEDAGIKLATVASDILGVSGRAMLEALAQGTTDPEMLAELARGRLRGKLPALRAALAGRFRTHHAFLVGQLLTHLDYLDEAIGTLSTEIESRLVPFSEPLNRLDSIPGINRRTAEVIIAEVGVDMSAFPTAAHLARWAALCPGNNESAGEHKSGKTRKGNHWLRTALIEAAAGASRAKNSALQARFRRVLRHRGPKKAVVALAHALLRIAYHVLAHGTTYRELGGEYYDRHRTQRLTRRAIRLLEGQGYRVTLEPAA

SEQ ID NO: 298142 - protein, 371 aa, unidentified
MADNTEIFVGIDVAKVRNAIAIADGERGGEVRFLGEVDASEESMRRAVKRITAKHDRVYFCYEAGPTGYGLHRLITSLGHSCIVVAPSLIPKKPGDQVKTNRRDAISLAKLLRAGELTAVWVPDEGHEAMRDLVRGRAAAVETLRVHRAQVSAFMLKHGRIFPRKKGWTMRYLRWLQEQKFDHPAHQMVLQEMVEAVRLSKERVERLERTIEEFVPNWSLAPMVRALQALRGVDLIVAVTFVTEIGDVRRFESPRQLMGYLGLVPSERSTGATVRRGGITKAGNGRVRHMLVESAWTYRHPPRIGAKKLYRLAQVPPSVRDIAWKAQTRLAARYRALSGRGKKTTVVCTAIARELVGFMWSVAREAQTASA

SEQ ID NO: 298143 - protein, 411 aa, unidentified
MQVIYELCCGLDVHKRTITACVLKWLGGAWQKEIRQFGTMTKDLLALSDWLVREGCTHVAMESTGVYWKPVYNILEGQFELLVVNAQHLKAVPGRKTDVRDAEWIAELLAHGLLRGSFVPPPSVRELRELTRYRTSLVRDRARTINRLQKVLEAANIKLASVVSDIDGVSARLMLEGLVAGERDTQQLASLAKGRLKEKHAQLVEALSCRLQPHQSFLIAEHLAQIDYLEGAIERLSHEIEERLRPFEQEIGWLDTIPGVNRRTAEVLWAETGGDMGRFASARHLASWAGMCPGNNESAGKRRTGRTRKGSPWLRHCLVEAAHGAAHTKNKYLSSQYHRLAARRGKKKAQVAVGHSILVIAYHLLTRKKAYSDLGANYFDERDRQAVTKRCVNRLQKLGYKVSLEKLSMAA

SEQ ID NO: 298144 - protein, 355 aa, unidentified
MKYYTSTTQFNCGIDLHARQMYVCLMDRDGKKLVHTNIKNNDFEFFLKLVAPYRHDLTVCAECMFGWYWLADACQAAGLSFVLAHALYLRAIHGGKNKNDRIDSEKITHLLRSNLIPPAYVYPADKRPLRALLRQRLFYVWRRAELLARIASHQLAHNRAPIQQTRRVRDDWEEQVLAAETHPLRQLALQNDLAMIGHFDQQITQLEKELQRQAKALAARDYALLQTVPGIGEHLGLTLLCEIGDIARFPTVKDFLSYSRLVKGTVASAGKIKGLRGAKLGNPYLRWAFGEAAVIAKRDPTVIGPLAQRLEARLGGNKFKANTVLAIKLARAVYYMLKSKTVFDPERLVAALARN

SEQ ID NO: 298145 - protein, 323 aa, unidentified
MSSFVGVDVAKNTFDIATHLPNGKHKTKAKLANDSKGFKEFEAWLQKQVEPSALIVMEATSVYHLELAEFVYNKGYRVCVVNPATTHAYAGSELRRIKTDKSDAKLIADFAREKDEKLQLWAPEPLKYRQLKALVRRLDDLQEMERMELNRLEVSDEKVKGSINSVLRHIEKEIAETHKAIKKHIDDDPDMREMRDLIVTIDGIGQKTLERLLAELGDLRKYDDPRKLVAAAGLNPKLQDSGLLKGRTVISKIGSARVRAGLYMPGLVALQHNKAIMAMKDRLKANGKAPKQIICAAMRKLLHFVYGVLKSGQSYDPKLALAR

SEQ ID NO: 298146 - protein, 343 aa, unidentified
MLREKVAQSELNGKSSMLGKYDHYVAVDWSMRIMAIAHMTTRRKVPQVFERPTNLKELKTYLSTLNGRIVLTIEETTTSQWLFLELFGHVDRIIICDPYRNRLLSNGPKTDKIDAGKLCLLLYNGLLSEVFHSTSDLYELRLLVGAYVDHVRAGVRSQNQKSALLRGHQDQSLTALFILRRLDSDIEQYRATKEEFEKHFATIVRKNKLLRNLTCVDGIGKIGATKILACVVDARRFPNRSKYYGYCGLARHEKTSGGRNYGSRRPRFNHMLKDVYKTAASAVIGSTKPLHEYYQALRSKGVPEHNARHAVARYIARVTLAIIKSGQPYDPYRWRQNIIEQDL

SEQ ID NO: 298147 - protein, 309 aa, unidentified
MEIFVGIDVSKERLDVHVRPGGESFAVSRDGKGLEELVGRLRTLSPTLVAVEATGGFETIVAAAVAGAALPLAVVNPAQIRHFAQAVGKRAKTDPIDAGVIAHFAEAVRPVPRALPDEAARLLAELVGRRRQIIEMMVAERQREKHASNIRVRKSLARHIAVLEKELNEIDRDIDTLVRGSPVWRAKEELLASVPGIGKTLARTFLAELPELGTLGRREIASLAGLAPYTRQSGRWRGKSMIGGGRACVRSACFIGALVATRHNPPLKAFYLRLLAAGKSKMVAIIAVARKLLTILNAIVRDSRPWQNA

SEQ ID NO: 298148 - protein, 354 aa, unidentified
MEKFVGIDWATRRARWCAVTPTGIVIDEAWTPADEDGLASLVAHNGPDVLACIEMMSGAAWVRDQLQAAGWTVQIADARKAKAVGSLAAKTDKLDARVLAELARRDLVPQVHVPTFADRELKERLGRRMHMVRLRTSAMNRAHGLLSQFGVTLAFKRLREPDADELLVRRGVPEVWRHSIAEAVAVVDALDERLLPLEKELRPLARADPRVQLLVTIPGIGDLLGLTIASEIGEISRFSSARKLVGYSGLTPRVYQSGQKTRTGKLSKSGSTMLRWSAIEAAQQAWRANNPWHELYREVKERCGGKGNPAKAAVARKVLIASWHVLALQQPFKPSRPRGASAPVLANSSCVLAE

SEQ ID NO: 298149 - protein, 328 aa, unidentified
MEVLTMSKTTVGIDVSKEHLDVVIDREGTKPRHRQFVYTEAGQRKLLKWLAIHDAIGTCVCLEATGRYSIAIASCLYHAGYRVSVENPLRTKKFAESILLRQKTDKVDAIALARYARLISPRKWTPPSHMQSSLQELKRLLDDLQGDRTRVINRLEGLRKQSPARRHLNKQLEQIEKQMKEVEKDLNNLVDDDDALSSKSELLISIPGIGLTTARELLAEIQDWSLYDCADALVAYAGLCPRHFQSGKKKGHTRLSKQGNSHIRKTLYYPALSAMQHNPHLRRFAERLKAVGKEKMVVVAAVMRKLLVLAYAIIKSGIPYDPNYQNAA

SEQ ID NO: 298150 - protein, 313 aa, unidentified
MITLGLDPHPGSHTVVALDNNGASLGHLAVPNTPEGLKQLHEFGSRFSPRRWAVEGAGNHFIAAFVAELLANSESVFSIPPSLTSQYRARRGRKKSDVVDAENVARALLANAQLPPLHAVEHQRELQELTRTQRRLSEQLKASRGALKELAAGSSVREVLQPVIEILVDQLKILRQQIRLRVKDIMPALLDVQGVGPIVAGILLAEVGNPKRFASANHFASYCGAAPVERGSGQNCRMQVNPGGNRRLNWALHIVAMVRLGNDGGRSKTFLDNCRLRGKSQRSALRVLKTYIARELFSVMHHNIRANIEGLST

SEQ ID NO: 298151 - protein, 499 aa, unidentified
MAPCPANRRLVVRGRIEECSSTGHGLCHLSINKSNDITMAKKAKKVKTAKGAELRIVNPDAAGIDIADGIMQVCVPAGRSKDNNRTFGAYTSDLHAISAWLRECGIKTVAMESTGVYWIPLFCRLQEDGLDVVLTNARDVKNITERKTDESDAEWLMLLHQYGLLKASFQPHNDAKRMRTLTRHRDTLSREASSIVLRMQKAMQQMNIKLTLVLSDITGKSGIRIIEAILAGERDPKRLAELADIQCKTPKEEITKALEGNWEEDLMFVLRQNYDTFKHYCIQLGECDAELEKLMENYRAEVAKVEGTSYSPAKKRRDYKKTRHTVGFDVERKAYEMWGVNVFEIPGISHLTALELMSELGHDFTRKFPSSKQFCCWCNISPNTKISGGKRISSHVPHRRNNVGLIFRSIASSLANAKNQLGNFYRRIRSRTGGKAAVIATAHKVAEIFFAMVANQTTYNPEKVGIDEKVLLEKRITRYKRELERITGTHIEIGNACVP

SEQ ID NO: 298152 - protein, 447 aa, unidentified
MLEPNAAGIDVGAREMFVAVPPGADEHPVRVFTTFTEDLHRLADWLAQCGVTTVAMEATGVYWIPLYEILEQRGIRPCLVNARHMKNVPGRRTDWHECQWLQFLHSVGLLRAAFRPEEDICAVRTVLRHRSELVMAATQHVQHMHKALTQMNLQIHHVISDITGATGIAIVDAILAGQRDPAELVKLRDVRIKADPETIRKSLVGNWRPEHLFTLRQSRELYRIYQQQIVECDVQVETMLGKFEPRVDPAEKPLPPDRKRNRTGKKRRKKMGHPNPGFDLRTEAYKLFGVDVTQIPGLEENTLPLFSEVGRDMSRWPTAAHFVSWLALCPDNDISGGKLLWRGMRVVKNRAGHLFRLAAYSLHHSPTPLGNYLRRMKAKLDPRAATTATAHKIAVIFYTMVKNQVEYDETIWAARDAARERRLEAKLKRQAKQLGYQLVPIEQKPAA

SEQ ID NO: 298153 - protein, 354 aa, unidentified
MSQKLNSAIAVIGIDIGKNSFHIVGHDQRGAIVLRQKWSRGQVEARLANLPPCLIGMEACVGAHHLSRKLQMLGHDARLMPAKYVRPYSKGQKNDFRDAEAIAEAVQRPTMKFVATKTADQFDLQALHRVRERLVGQRTGVINQIRAFLLERGIAVRQGLRSLRSELPGILATRTDVLAPRMLRIIEDLAGDWRRLDARIEDLSSEIEALARQDKGCERLMTVPGIGPIISSAMVAAIGTGDVFSKGRDFGAWLGLVPKQISTGDRTILGKISRRGNRYLRVLFVQAAWVVLVKVKCWERYGLKSWIEAAKKRLHHNVLAIALANKLARIAWAVLNKGRAFECVKTNEMASRPA

SEQ ID NO: 298154 - protein, 413 aa, unidentified
MYIVGIDIAKKSHQAAIMKPDGTLVGRSFRFTNTKQGFEFLMDKLAAVDSSLENFEFGMEATGHYWLNLYTWLADNHATVHVINPLQSDALRNLYIRKTKTDSVDAKIIAQVIRIGQYSETKLADDRMLMMRDLCRQRFFLVDMVANLKRKIIVMMDRIFPEYQGFFSDTFGKSSTAILKHCTTPEEITLFGEDNLAQLLQVASNGKFGLKKAQELISLARNSFAARLSSKTLSLLVKQMMDQMELLQNQIGILEKHISSHFKSFGTKITQIPGIGPVLGASILSEIGDISRFANPKKLCAYAGIDPSVKQSGQFLGNENHMSKRGSGYLRRCLWMASFVSVNHCREITIVYKSQVSKGKTHFQSMGFVCHKLLNIIYTVLKNDIDYSPMLCINPAITARTSRRIARAALKAR

SEQ ID NO: 298155 - protein, 387 aa, unidentified
MTVRTVNTLPAATHDERVRCLFAIELSKQSWVIGFNTPLSEKISRRTLSGCDWKGLLELIEDVRARVSREMGRAVAVMSCYEAGYDGFWLHRQLEAHGVRNYVIDPASLQVDRRARRVKTDRIDAERLLRSLMAYLRGEPKVWSVVRVPSVAEEDARRLHRERDRLVLERVQHVNRIKGLCALHGIYDYHPLRPQATARLEQLRTAQGGELPPRLKSEIKRELHRLELVVEMIATLEAERDAIVEDEASTHLNAEKIQNLHKLKAIGPEFAAVLVGEIFHRSFDNRRQLASYVGVTPSPFQSGSMAHEGGISKAGNRKGRTTGIELAWLWLRYQPDSDLSIWFRARVGIMKGRIRRIAIVALTRKLLVALWRYLETGLVPRGAVLKG

SEQ ID NO: 298156 - protein, 379 aa, unidentified
MKRTQATRPDNNTEQAILYIAFELSDKSWKLGFSDGSRERLRGIDADEKESIWEEIERSKEHFGLGDEVRVVSCYEAGRDGFWLHRYLESHGVENLVVDPSSIEVNRRKRRAKTDRLDAKKLLRLLMRYCWGDERAWRVVRVPGVEEEDERHLHRELQSLKKERTMHSNRIRSFLKLHGIRVDNPRRTDFEQYLDSVRLWDGSELGSDLKDRLKREHERLEFVQSQIRFLEKERERLVRLQETDSMRRIGQMMALRGIGIESSWLLEKEFFGWRRFRNRKEVGALSGLSPTPYSSGKSRREQGISKEGNCRVRVMMIEISWSWLRNQPDSKLTKWFNERFAEGGKRMRRIGIVAVARKLLIDIWRFVEHGVVPEGAIVS

SEQ ID NO: 298157 - protein, 331 aa, unidentified
MQFSYFVGVDISKDTLDAALYPAKDRQKDFLHFDNTKKGLGEMMAWLKTLGVKRSDLLICAEYTGVYTNTLIEFADRKGIALSLNSPLDIKRSIGLVRGKNDAVDAARIAEFAYRRRENLRLYEKPCDAIMKMQYLLTERRQYVRQRTALMNLHSAMGPYETPSGRSRNESAILHIEKLIKKVEDQLLSVASEDASIKKNFDLVHSVKGIGLINAINTIVYTNNFKSFESPRKYACYIGVAPFDHTSGTSVKGKTQVSKICRTQQKSELSMAARSAIIHDPGLKRYYQRKIKEKGGGKSAHSIVLNAIKFKLILRMFAVVRSGEPYKVLNY

SEQ ID NO: 298158 - protein, 456 aa, unidentified
MIMKRKKKVLQVPKLESLKQINPNAAGVDVGASELYVCVPEDRDPRPVRVFQTFTSDLHEIAAWLKKCRVTSVAMESTGIYWIPLYELLEEAGFEVKLVNAREAKNMPGRKSDILDCQWIQQLHSYGLLTASFRPPRDIVALRSLVRHRDRLIVARAVHIQHMQKALHLMNLQLDNVLSDITGVTGMRILRALVAGERNLDTLVSYRDPSCKSSTQVIRESLKGNYQEEHLFPLRQSLELYDYHTTMIQQCDREIEQKYRALPSRVDLQRKPLPPSKKQQKKPRKNAPTFDLRSRLYEMAGVDLTAIDGCNAATIQVVLSETGVDMEPWRTCGHFTSWMCLAPHNDISGGKVLRSRAKKTKNRANTALRLAAQALTHSDSWLGAYYRRQRARLGAPKAIIATAHKIARIIYYMLKYQREFVDLGANHYEAQHRKRQINSLTKKAASLGLLLVPAKA

SEQ ID NO: 298159 - protein, 462 aa, unidentified
MSRKSKSKSLAKPQAVPVADWVTLVHPDAAGLDIGASEIWVAVPPDRDPQPVRSFGTFTPDLQALVAWLKACRVTSVAMESTGVYWIPIFELLEANGFEVYLVNAQHIHNVPGRKSDVQDCQWVQRLHTYGLLNASFRPEAEMVVLRAYLRQRAMLIEHRAPHIQHMQKALHQMNVQLTQVLSDISGVTGLAIIRAIVAGERNPVTLAQLADRRCHSSQDEIAKALTGNYRPEHVFALKQALALYDVYTDQLAECDRQLESQYAASKPRFDPDDPQHPLGPDPKPNSHSKNGPEFDVRTPLFKLVGVDLKAVDGFDESIAQTVLAEIGTRMDRFPSVKHFCSWLGLAPHNDITGGKVVRRRTLPTHNRAAQALRLAARAAGNSHSAMGDYFRRLRARLGPKDATTATAHKLARIVYHMLKDRQPYNPLTPEAYSDQLRQRELNYLKRRAAKHGWTVQEPATG

SEQ ID NO: 298160 - protein, 346 aa, unidentified
MLYAGLDLSRKRLDFCLLDQLGEKVEVGAAPPDADGLRGLAARIGRFREPVVAAIESMNGARFVHDQLEQAGWDVAIADAVKVKGLAPLACKTDRIDAWVLAELARRDLVPAIWLPDPEIRAERERARFRLHLVRHRTSLKQRVHAVLLAHGKPCPVSDLFGVAGRDLLERLALPEPWLGTVEATLQLVDQLDRQIVDCERDLQRLGAEHRYVPLLVTVPGIGWVLAYTIAAEIGDISRFATPTKLTGYTGLCPRVYQSGQSDRRGALAKNGPRYLRWALIEATMHACRHPLYRDRYQHTKQRLGRQRGAKVAQIDLARRLAEAIWHMLTRNQPFAPAGAAFRLAA

SEQ ID NO: 298161 - protein, 426 aa, unidentified
MESVHRSCVGLDVHKKSVAACVRRLDSSGKVHKHFRQFGTMTGELEELVAWLKSHEVTHVAMESTGVYWKPIYNLLEERFEVLLVNAQHIKHVSGRKTDMKDCEWIAQLLQHGLLKASFIPERLQRDLRDLTRSRVKCVEQRTGVANRIHKVLQDANIKLSSVATEILGVSGRSMIRAIIAGEEDPEKLANLARQSLRGKIPQLKEALRGKVRDHHRFLLETLFEQLISTEETIEKYSKRIDELLGSEPFVERAEEDKPLPFGEATTLLRTMPGISRVAAHAIIAETGTDMSQFPSAGHLCSWCGISAGNNESGGKQRSAKIPKGNRWLRRILVETALSAGRSKNTYLSAQYRRIASRRGRKKAAVAVAHSMLESIYHMLKRHVEYQDLGPHHFDTLEPDRLTRYLVKRLENLGHKVTLEPRAMSA

SEQ ID NO: 298162 - protein, 345 aa, unidentified
MRVLIGIDPHKATNAVAAIDERGELLEYAVFPTNRSGLRSLERWGKRFPERRWAVEGVRGLGRSVALRLVAAGETVVDVPAKLCSRARLLATGNARKNDRVDAFHVALAALRGERLAEVGDEEHAEVLRMLSERREDLIKERTRTLNRLHGLLRDLLPGGAPKNLSAEKAARVLRGVRPRSGPTRTRRRLAADLLRDVRRLDRQLCELECRIREALKEASTSLTRMFGVGPILAAKIIGRVGNVARFPTKAHFASYTGTAPIEASSGEVVRHRLSRAGNRKLNHVLHMIAICQARHDTEGRAYYRRKLAEGKSEKEALRCLKRRISDAVYKQLQADLAVAIPAAA

SEQ ID NO: 298163 - protein, 425 aa, unidentified
MKKSHQSKLDNQEVIYERCAGIDVHKKAITVCLRIGRNTQVREYGTITRELREMVAWLKENGCEMAAMESTGSYWKPLYNVFELEGIPAMVVNAGHMKAVPGRKTDVKDAEWIAKLLSQGLLKPSFIPDREQRELRELTRFRKSQIEERARNLNRLQKMLEGANIKLSSWLSDISGKSATELLELIIGKEDFTMEDIEQCRHGNMKATTEELFNSLEGVVTPVQRELFKHVMKVIREQSAQIAATEHLISSYMSKAYKTASEAIDAIPGIGRISAQQIIAEIGYDMDRFPSAAHLCNWAGVCPGNNESGGKRKSGKTNYANKTLKSTLTQCAQSVKKKKNSFFKAQYQRLVVRRGKNRATLAVAHSMLIAIYHVLKGAEFRDLGDDYYTRFNKEKKIYSYVNQLKKLGVNVPDCVIRPAVIPEVA

SEQ ID NO: 298164 - protein, 348 aa, unidentified
MVTIGIDPHKQTHTGVAADPLGVQIAQRTVKARRDGFGQLLEWARKLDSERVWVIEDVRHVSGSLERFLIDRGETVVRLPPRLMANAREGVRERGKSDPIDALAIARAALREGVETLPTARLTGVELEIRLLALHRERLVGERTRMINELRWQLHDLWPDWEIPKRVLIRPAWQTKIEHRLRQAQSTVQVQIARDMIARVRELTQTITQLYEQLAGLVTQVASHLLAEKGLGVLIAAKLIGEIAGIDRFTSDAQLARIAGCAPIPVSSGRTDRHRLDSGGNRQLNHAFHMLALTKIMLDPQTAAYLAKQRRAGKTNTEAIRSLKRHLVRRVYHLLRDPNSVPITVCLT

SEQ ID NO: 298165 - protein, 399 aa, unidentified
MLDDGSQPAKLFNADNNQLGAETLVERIYSIAKEHCISDILIGTEATSMYDWHLLEYLAESKLALEFNLKLYRFNAKWIKNFKKSLAPRGKSDPIDSFAIAERLRMGRLPKEYIPDTKYQPLRKLTRFRFHLMQQIAREKNFFLANLFLKASAYSRVSPFGSTFSATSLSVINDFFSVDELAAMPVEELTEFILEKGKSHFSKPAEIADNLKRVARESYRLKPELAPTVNLILASTFNNIRCYNNQVKLVDEAIAENLKAFKHTLESISGIGPVYAAGILAEIGDVHRFLNDSSLAQFTGLTWPKHQSGRFQAEETRMSHAGNQYLRYYLVEAANSVKRCDATYKAFYEKKYAEATKHHHKRALVLTARKLVRLVWTLLTRQVLYQPGYCSFEDLSKIG

SEQ ID NO: 298166 - protein, 323 aa, unidentified
MLTRAQGAEMAEVVEIFVGIDVSKAWLDIAVHESSVEFRVDNNSIGISDLIQRVKKLKPTLIVIEPTGGFEITVVAEMLGAELPVVVMNARRIRNFARATGQLAKTDKLDARVLAHFAAAIRPPLRALPNEEEVQLTALLTRRRQVVEMLTVEKNRLVTVRSKMRADIEAHVEWLKRSLNELDQEIEDFVKDSPVWKEKDALLQSVPGVGPVTSATLLGMLPELGKLNRQEIAALVGLAPINKDSGKKQGKRRVFGGRAAVRNVLYMCAMAAKKFNPVLAKFYEKLLKAGKEKKVALTACMRKLLVILNSMMRTNEPWRKQTA

SEQ ID NO: 298167 - protein, 337 aa, unidentified
MNITTIGLDIAKRVFHVVCCNQQGHLMKKKMLRRAQVHSFFQSHPTCLVALEACATSHYWAREIEKCGHTVKLIPPQHVKAFLIGNKNDFNDAFAIAVAARQAHIKSVGIKSIEQQDNQAQHKARSLAIGQRTALCNQARGLLAEYGVCLPRGVSTIRKNIPILLDDNNEELSGVFKVTLRQLAEQLASLDASIAVFDKAIIQAVKNNDICKRLQSIPGIGPMVSSAYFNEIGNGSAYRKGRDVAASLGLVPKQHSSGGKDVLLGISKKGNNYLRCLMVQGSQSVVTSARKKDDKLSQWLNRLVETRGHNRACVAYANKMARMAWAVTVSGEEYSLS

SEQ ID NO: 298168 - protein, 350 aa, unidentified
MAAILALDLGKNKSVSCLVKNDAEPIFDTHATSPAAFHDLFVEVAPQAVVIEVGSVCGWVCDLCRALGIKVAVANTNDDRWVWRNVKRKTDRDDARKLAEMYLAGKLPEVHMPMPEVRQWRSLIEYRTSLVRRRTAVRNTLHALMLREGRALEGRGAAAWTHQRWRTLSALARPMAECSVHELWRGMLASELRALEQLQELIAQTEMKLDELGAANRNVQLLRTIPGVGPRLSEVVVAVIDDPARFKNVRQVGAYAGLVPRQYESGQLSRQGRITGRGNPLLRALLMEVSWLMRVHNPHFAEVFGKVERGTKARRKIAAVATSRRLLVTCWAMLRDQSPWHGPARRSQAS

SEQ ID NO: 298169 - protein, 397 aa, unidentified
MRMCVGVFRFFHHAVGGPTVEHCIFVGCDLHVKTMLMRVATDAGEPETWRYANRHADRLALLKALGARARALGGARVLLAYETSSLGYVLYDEVVEAGFECSVIATTKMPRTWKHVLEKTDERDAQLLLDLLRSHVLAGTALASVWVPTHQERDDREMIRARLDLVDKLTRVKTQVRSLLCRYDLKCPPDVGKGWTQKFVAWLHSLVGSALRYGASVRLGVLLAEFEALGAELAYVDNQMKALASSERYAPLVSALCEVKGVGLVTALTFLVEMGDLCRFSNRRQVGSYLGLVPRCHESGESSDRKGHITRHGPPRVRRVLGQAVGHWVRWSPGAKARYEHMVGKRPKDKKRLKKIAKVAMMRRLGILLWRRGLEVMVQGAPQPPQDVVTRFCTPAE

SEQ ID NO: 298170 - protein, 316 aa, unidentified
MTSTRFVGIDISKATFDVAFSAESRAVYSNDPAGFTQFRQALADDDHVVMEATGTYFLKLATFLSAQDITVSVINPAVISYFARMRLVRTKTDRVDADIIREYGCLEALSAWTPTEDVFIELNQLDSHLNGLQGDRNRVIGRLEALQQCAKINAYTLEDLQQQLTDLEVRIKQTEKELVVLTQAHFPELLTLLTSIKGIGQKTAIMFIVLTRGFTRFSSPKHFASFLGLSSFIRQSGTSVRGSGGISKMGNPRMRQLLYMAALTARTRNSACKIFAERLAGNGKPPKVVRIAVANKLIRQAFAVCLKGESYSECYV

SEQ ID NO: 298171 - protein, 276 aa, unidentified
MQKYSGIDLHSNNNVLAVSDDADRVLYRRRLPNELGKVLEALEPHRAELVGVVVESTYNWYWLVDGLQAAGYAVQLAHTAAMKRYEGLKHSGDDTDAAQLAHLLRLGILPSGYIYPVAERGLRDLGRRRLQLVRHRTMHVLAVENVQARQTGARITGDRVKRLSAQELQALGLPEDVTLGLQANVAMIGALNEEIAKIEKHLAQRLRPRPEYTLLNTAPGIGRILAPIILLETGSIERFAAVGNYASYARCVDSVRLSNGKKKGEGNVRNGNKYLA

SEQ ID NO: 298172 - protein, 330 aa, unidentified
MKLYGAIDLHSNNNVTVLIDEQDQVVYQKRLPNDLPLIARQLSGYRDRLQGWYWLVDGLMDQGHRVHLANTAAIQQYEGLKYTDDHSDARWLAHILRLGVLPQGYIYPKEERAVRDLLRKRGQMVRQRTANLLSIQNLITRNTGSSISSNRIKTLDSETVDALLPNPDLALAVKANLAMIKCADGQIDILERTVTDRVKLRAEFSFLKTVPGIGQILALTIMLETGEIKRFSTVGDYASYCRCVGSQKLSNGKKKGSGNTKNGNKYLAWAFVEAANFAIRYNARIKSFYQRKKAKSHGVLAIKAVAHKLCRACYYIVRDQVPFDVAKAFA

SEQ ID NO: 298173 - protein, 357 aa, unidentified
MNKRNQDKAAKNNYIYEGKKVYVGLDVHKLSYSLSVKCEGILVKQDRISASPEKLLEYLQKRFLGAEIFSAYEAGFCGFHLHRFLIDAGINNIVVHPASIEISSRDRVKTDKRDSLKIATQLEVGRLRGINVPTKEQENRREITRLRETLVGDRHKVGCRISSFFDRHQDLGWVKSGVMSRKLIKSLEDLQLPTYLQKVIQILASEWMYLDDQIKELEKILSKQAEEDYKTHSIIQSTPGIGLLGARIIANELGDMSQFTNISQLYSFTGLTPSEYSSGENRRQGHITRQGRSILRKILVQAAWTAIRRDLDLSKRYDEIASRAGAKKAIVAIARVLIGRIRACLVKNERYLLTNVA

SEQ ID NO: 298174 - protein, 485 aa, unidentified
MKARRVKASRSSKITGDSKGPIRPAASLPLLNPHASGIDVGSVEHYVCVPEDAVPSGQANVRSFGAYTADLDQLVEWLKACGVQSVALESTGVYWVPLVQKLEAAKIEAVLVNARHLKHVPGRKSDVKDCQWLQQLHSYGLLNGSFRPAQDIGRVRRLMRHRENLIQSCGVEVQHMQQALQLMNIHLHHAVSELGGATGLRILDAILAGERDPKKLVELRDGQCRKTTPEELEKALIGDWQEEHLFVLQQALETYRHLLKQLGECDVQVEKALAAVVIPERAEGEITPPKNPKAKEESGSKKKKRFHHRKTGTCLKRDLTEELRRICGVDLTQVIGLNVLSVLIIISEIGLDMSRWRNAKAFCAWLGLCPGNKISGGRVLSSQTAHVVNRVAILLRTLGPSVGKTDTWLGIFHRRMRARLGPGGANTATARKLAQLIYHLLKYKEEYIDVDHVLLLERIRKQRIGRLRKQAEELGLEVVEKQMAA

SEQ ID NO: 298175 - protein, 411 aa, unidentified
MTVSKNVSTIAPVEFDLFFGLDVDKKSISITILDHTQKIRSLTLPNKSEMIINYTKKHFPDKRILFAYETGPTGYGLYDQLTKAGYPCLVVTPSLVPTQPGKRVKTNRIDSVRLAQTLRGGELKSVRVPSRKYRDLRHLIQVYKTTSKQSTGYKCRIKALLLVEGIAYPNTTTTDHWTNNTIRRLQAMECISSVRFKLDRLLENLLFYRGQLLKIKKEIKRFCRNDSDLSDSMKFLLSLPGIGWVIAPILLARIGDWRNLQDANELAGFIGLTPCEHSTGDDEHKGNITRMGDSYLRNLLIEASWAAIRKDPELAEFYQRVYQRHPRDRAPRKAIVAVARKLTTRIYAVLAQRRVYIPGYREYNLNRKLSNKKRRQFPLAPEDASRLCRVRKYTKRRVKNDSPVLTASLLR

SEQ ID NO: 298176 - protein, 371 aa, unidentified
MNKSITFVGLDVHKNSIEVALADAGREGEVRHYGAIDGDLDSFSRLLRKLVSIGKELHFVYEAGPCGYEIYRHLTSKGFDCAVVAAPAGDPTKGGRKRIKNDRRDAMTLARLHRAGELTYVFVPREDDEAMRDLTRAREDASKAQRVARQQLSGLLLRLGFRYNGKSSWSLQHFRWLSGIKMPTPAQQVVFQECIHAIKESTDRLERLTRQIEVLAPEWRMAPVLQAYQALRGVSLIVAVTVVAELGDITRFDNPRQLMAFLGLVPSEHSSGEKTRKGGITKTGNGHARRVLVEAAHSYRFPARVSRRLFKRQEGLSKTICDIAWKCQVRLCARFRRLMAKGKNRNTVVTATARELIAFMWAIARQTPVSA

SEQ ID NO: 298177 - protein, 401 aa, unidentified
MPFHGGLDWGATSHAACVVDGAGQIVARVEARHDAGGLAELLARLRAVAPPAELPVAIERPSGLIVDALVAAGHPVVPIHPNVVKACRPRYRAAGGKSDPGDAYMLADVLRTDGHRFRPLTPVSDEIKALRALVRARDDLVTQRVALANQLRSLLEGFWPGAAAIFAAIDSPIALAFVGRYPTPESAGRLGEKRLASFMAQHGYCGRRSAAELLARLRAAPTGLAGEAEAEAKGEIARALAGLLERLVAEIAKLSSRTERAVADLPDGRIIMSFPRAGRLCAAQILAEIGDVRERFPTEDQLAAEAGVCPVTHASGKSRGVVFRWACNKNLRRAITCFADNSRHASAWAAAVYGKARARGCQHAHAVRVLARAWIRVLWRAWQSRSPYDPQRHAGATKIAT

SEQ ID NO: 298178 - protein, 338 aa, unidentified
MTVAFIGIDLAKNVFQLHGANADGQAVLKRRIRREGLLAEVAELEPCVIGVEACTGAFYWQRQFEALGHRVKVIAPQYVKPFVKHQKNDQNDAEAICTALMLPNMKFVPTKSEEQQDIQALHRARRRLVNHRTALVSQMRGLLLDRGIPIALSIGRARRAIPEILEDRTNGLSAMSREIIGDLFDFMSQIDARITAFDRRIDTVFKSNADCRRIARICGVGPKTATAVVAAVGDGREFKNGRHLAAWMGLVPRQHSSGDKRLLMGISKRGDRHLRTLLIHGARSVVRVAQRKTDPFSQWVNRLRERRGMNRAIVAVANKNARIIWAMLNRNEEFRAPV

SEQ ID NO: 298179 - protein, 339 aa, unidentified
MQVYAGFDLHANNNYLGVVDESGKKIFKKKLPNEPETILNALDPLKQELVGIVVESTFNWYWLVDLLMDEGYQVHLANPSAIQKYKGLKHSNDVHDAFWLAEMLRLGILPTGYIYPKEERAVRDLLRKRGHLVKLRTSLSLSLKNIVARSYGQSVKQSEIIQLKQDLVTPLFEDNEDLALAGKMSKEVIDCLTNRINHIERFVESKLGLKDSYQYLTTMPGVGLILGLTIMLETGDISRFYNVGNYSSYCRKVPSQWTSNGKVKGKGNKKNGNKYLAWAFSEAAEHARRYSPEVQAYYNRKFQRTNRMVAHTALAHKYTRAAYYIMKDHVPFDPKRLFA

SEQ ID NO: 298180 - protein, 369 aa, unidentified
MGKYSEVFVAFDVAKKKHAVAIAEGGRTGEVRFMGDVENNPAPIERTIKRLANRYDRLHVCFEAGPTGYGLYRQVQALGHDCMVVAPALIPKRAGERIKTNRRDAVTLARLHRAGELTGVWAPDPAHEAVRDLARAREAAGDDLRRKRQQLLSFLLRHSRIYSGGGHWTMAHRRWLAGQKFDHPAQQIVFQEAIDAIEDALQRLRRVEKQLAVIVPEWSMAPVVEAYQAMRGASFVVAVTFAAEIGDVRRFDTPRQLTSFLGLVPAESSTGDTIRRKGLTLAGNRRARRALVEAAWTYRYPARVSETLRARLEGLPKPVRDIAWKAQFRLCARYRRLSATGKKPPVVVAAIAREMAAFLWAIGREVAPA

SEQ ID NO: 298181 - protein, 346 aa, unidentified
MKRNTLTIGLDLGDRKHHACVLDASGDIYAEEVITNTRECVARFAERFPRATYIMETGTHSPWVSRLLEARGLKVIVGNARKLRAISQSQTKSDVEDARMLARLGRADPALLSPVKHRSEQGQRALVRLKVRETLVRSRVNQMNSVRFLLKSLGLPVASGSKAMTFTRRLRPMLDEATRVLVEPLLTMIDLLNARIAEMDKELEAFGRERYPVTERLRQVDGVGPITALAFVLTIEDPGRFPDTRDVGAYLGLVPRRDQSGSADKQLPITKAGNTQLRCLLVNCAHYILGPFGPPSRLREAGERIAARGGKSAKKRAVIAVARKLAVTLLALWKSGADYEALPVAA

SEQ ID NO: 298182 - protein, 349 aa, unidentified
MEHYAGIDVSLDSASVCIVDAQGKILKEAKVACEPEALIAWLATHGAPMARIGLEAGPLSQGLFAGLKAAGLAVELLETRHVRAAFKAMPVKTDRKDARGIAQLMRLGWFRPVHCKSLPAQEVRALLTTRKLLQAKRQDVEMSLRGVLRGFGLKVGPTTPKTFAGRVRDLVAQHDTLRTIADALLKVRAGLEQEFRAIEKRLSALARTNAPTRQLMTTPGVGAIVALTFAAAVDDPARFRSSRRVGAHFGLTPRKHQSGETDVTGRISRIGDHGVRVALYEAANVILRRAVRGSDLKSWALRVAQRAGMKKAKVALARKLAVVLHRMLADGTPFMASQGAGTRAVAGAA

SEQ ID NO: 298183 - protein, 339 aa, unidentified
MGLHCAVDLHGNNGYYGVVDEKGKRLLSKRVPNSLDEVLSVLEPYRDRLEDGVVVESTYNWYWLVDGLSANGYGTRLANPAAMKQYDGLKNTDDETDTFFLTELSRLDILPEGFIYPKEERPVRDLLRRRLLLVRQKTAHTLSFQNLVARERGEQISANAIHKLWPKEVKALFDDERLVLMGQTNIEMIRFLTKQIHKIENTVLAEAKLKPEYEKLLTVPGIGRILALTIMLETGDISRFRKVGNYSSYCRMVKSQRKSNERKKGENNRKNGNRYLCWAYVEAANFIRRYCPEAKKWHQRKAARSKQVVATKALASKICKACYFIMKDQVDFELKRIFG

SEQ ID NO: 298184 - protein, 400 aa, unidentified
MRTVFEIDVSKASSEVAILVNGERVHGYTMPNDIIGFSHLLKGLKTVSNPEIIFEATGVYSRRLQAFLEENSYDYTRLNPLEAKKQLDSLRVRKTDKIDAEKLASSQFVLNRKPTYVQEEVYQNLHDLSRFYQNLTEDIVRTKNRLHKVLQVAFPEIENLLSTPTGEQYWNLVSIFPTKHWVLELSEVELKETIRNSTSKRISENRVGNLAEKLVGLAKQSYSAISKTSPMIEEVKYNAQELIRLTNRREQVLQQLIALAEPLPEYEILLSIPGIAETTATSIIGELGDIRRFKSANQINAFIGIDLKHYESGDFLGQEHITKRGNPYARKIMYKCIHNIASASHTNPCHIADFYEKRKRQSQTTSTKPHTIASIHRLIRTMYYLIMHNKLYDYTLAKSH

SEQ ID NO: 298185 - protein, 356 aa, unidentified
MKYYTSTTEYNCGIDLHARQMYVCVMDRQGQKLVHTNVKNNDFEFFLKLVAPYRHDLTVCCECMFGWYWLSDACQAAGITFVLAHALYLRAIRGGKNKNDRIDSEKITHLLRSNLIPPAYVYPAEKRPLRALLRQRIFYVWSRAELLARINSHQLAHNRTPAKRTCSTRDPWEAALLAAEPEPLRRLALQNDLAMIRHYDHQLTQLEEELKRLTHKTSFRDYALLQTVPGIGENLGLTILHEIGDIQRFPTVKDFLSYCRLVRGTVASAGKIKGLRGAKLGNPYLRWAFGEAAVIAKRNHYRLGPLYQQLEARMNGNKFRANTIVAIKLARAVYFMLKNQTVFDPDRLVAALSKAA

SEQ ID NO: 298186 - protein, 321 aa, unidentified
MKIKNLVGVDTHKDSLACFCNGKFKEFKTNKVGFKQAINWAKSSHWAIEGAYCFGQAFSNFLIKNGCEVYEINPLLTKSWRTALKVASPKNDFGDAKVISIFANMDNMNKVSFETIKLKEKLTTRKALIKQKTQITNHLKMLFYTRGEELPFKTLDTQKAINWMLEQDDVIVKTNGKILESIMAGIKSLEVEIEKEMPEPAKALTKMEGISTITACTIYAETKGKLTRKEQFASYCGVAPIDCSSGQTTRRRNNKGGNRVLNSIFYSLSIAQKRYNEKAKAYYEKKLSEGKSPRHARKCLARQLTNIVFKTLKDATEKRKP

SEQ ID NO: 298187 - protein, 370 aa, unidentified
MLDTTTFIGLDVHARSIKAVSLDVMTGEVRAATFGYDAGAVAEWVRSVDPRARCVYESGVTGFDLQKRLSGLGVDCAVGAVSKMIKPSADRRRKNDRNDAEFLARMLSVGNVVEVWVPDDECEAARDLTRALEDARDDLSRSKQRLSKFLLRHGLVFDERTPTGRRKGNWTRAHWSWIESIRFAERADNDVLAYYVDAVRRAAEEKARLEGLVEAEARKPRWRKRVDSLRCLKGVDTASAADLVFEAGEFSRFRNARSFAAWVGLTPSEHSSGESDRRGAITKAGNKHLRKTLVEAAWHYLTCSGRPKGLAKGQAPDRGARRHAAKGVRRLVERRETLLARGVHGNKANVATARELGCWVWAVGLMAEEA

SEQ ID NO: 298188 - protein, 431 aa, unidentified
MLKINPLSTLYVGIDVSSKSNYVCALDFYKNKYINSSFANNQPGAEELALKILECLKEHPDITTIVAALESTSVYSIHIANYLSSCEELMRFKPYVFVLNPKCTANYKKSYIGLGKSDPIDAFVIADYARAGNIESEPWRGSQFLALKRLTRHRLHLVECMTREKTYLVSNLYLKFSELQMLEGDDQPFCDIYGATSSSVLMEYFSPEEILDSSEEDLIAFLAKKSRNRIKDISKTADLLKKAARDSYRLDKALYEPLNVSIASSFNCIETFKREIKVIDNAIEKEIKGLNPNAFIILQSIDGIGPVFAGGIIAEIGDITAFHSSDALAKYAGLTWKSNQSGDFDGEDTPMIKAGNRYLRYYLGEAANSMRKHNVEYGTYYRKKYNEVPKHQHKRALALTSRKFVRLVYGLLARNQLYSSVSLDTSIKDSN

SEQ ID NO: 298189 - protein, 338 aa, unidentified
MEFKNFIGIDISKVTFDYCLIRNGDLASALSGKTSNDPSGLAKLEEFLHKEGLNMEETLFCMEHTGVYCRLLSGYLTENKYHVWLEMPVQIIRSLGLQRGKNDHVDAMRIAEYACLRKDKAVLWQPPREVLLQINDLLTLRERLIESRKSLKQPIGELLDAGFKDAAKLIESRCIHTLKALDKEIEQIDKDLDDIIKKDSNLKKLYKLATSVSGIGKITALTLLYYTNEFTLFIKAKQLACYCGVAPFEHTSGTSIRGRTRVSSFANKRLKRLLHMVAMSTISSDKQLSQYYRRKVGEGKNRMLVINAIRNKILHRLCAVIKRGTPYEKNYHLEYQFA

SEQ ID NO: 298190 - protein, 381 aa, unidentified
MTTAVTHKTNVHTTEATLFVAFELSEKTWKLGFTMGHGQKPRERNVTARHQERVLDEISLAKHRLGLPETAPVVSCYEAGREGFWLHRFLLAHGITNHVVDSSAIEVSRRQRRAKSDGLDVRKLLSMLIRYEQGEHQVWQVVKVPSAEAEDQRHLHRDLETLKRERASTTTRIQGLLSSQGIQVSTLAKLPEQLDTLRLWDGTPIPPGLRRRVLRVYAHHTFLNEQIAAIEAERRAQLQTSSDASIDQIRQLMMLKGIGINGSWLLVMEFFGWRAFKNRREVGGLAGLTPTPYQSGESAREQGITKSGNPHVRWMITELAWSWVRFQPESALSVWFRERFGDGGKRLRRIGIVAVSRKLLIALWRFLETGVLPEGAVLKEG

SEQ ID NO: 298191 - protein, 448 aa, unidentified
MTKLHVGLDVSQKTVTTCFVLDDGTEPVKRFSFQHNPAGVDKLVARINATAAELGIDQVMIGMETTGLLWWHLSEALRNCESLAHLHPQVYAINAKLVAHFKKAYVEMDKTDPGDAFVIADRLRFGRLPRLAEPDERYLAIQKLTRHRFHLIHSLAAEKNRFLTHLFLKFSAFCQEEPLSDPFGAASSALLTEFLSVDEIAQMPIQDLTDFLAKKGNNRFADPEAVAKAIRRAALNSYRLSKCLADPVNIVLAMTMENIRFFEKQIAAIDKAIARELAAFPGTQVLLSVPGLGPVFVAGIIAEVQDVNRFDTDAQLARFAAIVWKKNQSGAFEADDTPMMHSGNEYLRYYFIEAANSLRMHNEEYAAYYQTKYREASTHHHKRACVLTARKLVRLVHTLLRKGQLYQTPDQRKESRAALPAGMTPGELARHIVRRRQAKGRFTVHLDN

SEQ ID NO: 298192 - protein, 388 aa, unidentified
MYLIGIDISKYKHDCFIATEAGVVVKAFSFDNNRLGFDSFLETLKSLDSAQDIRIGLESTGHYGSNLKQFICASGYTYLEFNPYLTHQFSKALTLRKTKTDKVDAKTISSMLGSVDYKTLHTRFYHINELKQLVRYRHAQMMSRSKVLVEITNILDRIFPEFKPFFNERLAGSALFILKKFKSRTRISKLSTKDYEAIRSYSKGRLSYVRVQKLKSLASSSVGYETKSDRLLLKHSIKHYEDLSHTLESIDEAIGALMQDIPQTLTSIPGLNLMSAAIIIAELGDFNNFTNPAQIVSFAGLDTSVNQSGTMETRGHLVKRGSGLLRMTFWQITFSSLRLNPKLYDYYQKKRHEGKHHKVAMVHCTRKLIRTIYHLGSRHLTFDHSQFR

SEQ ID NO: 298193 - protein, 432 aa, unidentified
MKEVAKTKSALTNDQFILEIVNKQSGAIDVGSTMMMISYTDSEGKHHLIEADAYTDDLTEVAVKLKEAKVETVGMEATGVYWMVLYEILEQHGIGVTLVNPKHFKNVAGQKTDVIDCQWLHQLHAYGILRASHIAPEIYRELRAYIHERNILQKQKSDTLNRIHKLLTKMNIKFQHIISDIEGVSGMRLLRGVACGITNPEDLLAQIDISKLKADRADLIKSLKGVYSPSNICILNKTLESYDFFKRQMKEYEILIESVLKKMLPSDFSKEIKKKTTHVRKNQYSINVKEYLNRIIGVDLTKIEGLDKISILEIISVTGLNLSKWPSADHFTSWLNLSPRKKITGGKVVGHQQRFTNNPATQCFRLAAQSMWRSNSSLGQLYRRLSYQKGSKKAIKAIARKLAVIFYHMVKTNKSMIQSDYKSIAKKIKMLR

SEQ ID NO: 298194 - protein, 476 aa, unidentified
MKMNSGCRKLRTGRSEVESFLVVSTPKSNPNLLHFEHRRLLRIEHVYKTTLLKVHGLPYTLVRKGLVMDAILERCAGLDVHQETIVACVMFGPLDKRAKKEIRTFGTTTKELLQLQDWLAEYNCTDVAMESTGVYWKPVWNILEGSFHLWLANPQRIKNVPGRKTDMKDAVWIAQLLRCGLIEASFVPPEDIRDLRDLTRYRRKLLGDATAEKNRVHRILQDANIKLTTYVSDIFGVSGRALLESLVNGEVLEPHEVERMVKTQLKRKVPQLIDALNGRIRFHHRKMIQKHLKHLAYLEKEIEVLESDITQLLFPYQEAVDLLVTIPGIQKDAAAGILAEIGCDMTMFPSEGHLASWAGVSPGNNESAGKKKSTRTRNGNKGLKSILCQAAWAAAKAKNSRLSSFYHRLVKRRGPKKANMAVSHLLLRIIYQMLLRNEPYSELGWDYLPQKEKSVDYWVQRIKTLGYNVELQPDIA

SEQ ID NO: 298195 - protein, 335 aa, unidentified
MTTYVGVDVHSSQSTIAIITSGQPKPSIITVRGGPEEVKKQLLRIEAPFDLCFEASCGYGKWFETLSSVARSVTVAHPGHLRLIYASKRKNDRVDASKLAKLLSVGAVPAVYVPNVQVREWRGLIRHRGRTVAKCTAVKNSIRALLREQAIKAPRGLWTKKGILWLTQLDLPETTRWRMDEHLEDLELLKQRVSRFTRQLDQIAARHPGVALLRTIPGVGTRTAEAFVAWVDDARRFARTSQIGDYFGLVPRQDASARRNHLGHITKDGPGCVRQLLVEAAWQGIRRNGVIRAKYEQFRRGDKERTKKAIVATAHWLARVMLSMLRSGEVWRQAE

SEQ ID NO: 298196 - protein, 346 aa, unidentified
MHYIGMDCHITTLDFAVVNEGGRLVKAHSIATSVNGFMEFVKTVPPPRTIYIEEGMLAAWALETCVRFREKLVITDAKKNHWIGSSGQKDDSIDALKLAQLARGGYMKEIHHPVGQRRRFRELMIAYHDTVRSTTRIKNKIKARFRQNGIQCTGATVYSETYREEWKGKLPQEATLLLILDGLWRQLEQSEQTEKELLAAARAQAKQYHEIKLFKDIPGIGFIHAATVSAILETPYRFADKRKVWMYAGLGIMTRSSSGKTYSEKLSTDYNRLLKYTLKQAAEAAIQAKDNPFRRKYLDMTLLHGIAPHRAKLTIARDMLATMWAMWRRGEKYSPEIREKAAYKQG

SEQ ID NO: 298197 - protein, 350 aa, unidentified
MSHKTAATVAHTIGIDTGKNTLHLIGLDEKGAIVLREKLARGRIAARLANVPRCLIGIEAGMATHYVARELSALGHDVRQVPPAYAKPFRQGHKNDFRDAHAVAEAVQRPSTRCVPVKTDDQLDLQALHRVRSRLVGQRTAVINQIRGFLLEHGIAIRQGLRFLRQQLPDILAKRDDVLSPRMIRILEDLSGDWRRLDERIEHVTEEIEVLAHSSESCRQLMTAPGIGPLIASAMVAAIGNGAAFAKGRDFAAWLGLVPKQMSTGDRTILGRITKRGNRYLRTLLMQGARVILLRPANWAKHSFGLWLTAAAQRLHHNVLATALANKLARIAWTVLDKSRIRTSSGPPRG

SEQ ID NO: 298198 - protein, 343 aa, unidentified
MAQHMIIGIDLAKHVFQVCMVTPQGTIKTNTTVARGKLLALIARQPPALICMEACGGAHDWARRFGALGHEVRLLAPQYVTPFRRGQKNDPNDALALTEAGQRPNIPTVPIKTIEQQALQALHRVRERLVKHRTAVVNQVRGLLLEYGIIVPQGIARLRKRLPRVLEEADNGLSFLMRDLLQRLQSELSALDTRITEITGQLTRLSHELEACQRLQEMEGIGPLSATALVAALGHGHNFHDGRQVAAWLGLVPRQHSSGGTTRLGGITKGGKSYVRRLLIHGARSVISHVRDKPDAKSAWIRQLVTRIGVNKACVAVANKMARVAWALLHTGEQYRKPVALSI

SEQ ID NO: 298199 - protein, 573 aa, unidentified
MRKGKTADGVPAPPPPIEGRSVEPVHPFGVGVDCHSRFYSVAILVPRGDLLLWQREFGVSQHEMGYAADWVRGVLSDNGHAGEELRYTLESTGNYHIPLILAWQGVPCVVNPLLAGPTRRKTDRLDARMLAYHSLVGLWPPSYLAAGDVLEARMLLRARNDAGKRKRRALSQINSTLLARGHTIAAWGSLSEPSQRCVVESFARTGVVPAHPGIRDAPLSPDAASLILSRYQQYDAYASEESRMMEAARRVVERTRWPTAGEPCPGKRLLGHLMTVPGIGIVGAVSWLAEIGDIRRFESPQKLVAFVGCDPSLKVSAGKVTAHKRRKGNVTLHRVLVQAAQSVISHRTTALGRWGFALARKHRKGGWFKALGATARRIALSCYWVHRNAQDYSERGYHLVPTREDVPARSVFDGLSPRLARLFEEARITDARGVYEWFYERGRPIPGLGAAAIEEVAKWLEETVTEGTPTDSPKARGKSRGSPSGEQFLHASTASSSPHKRGKIDGTYSTESSPGSTSSSSKTGAAKPRCPSDRKSNSQSTCGRSREKAGRQRSVLACVSRGRRINHAYRRDR

SEQ ID NO: 298200 - protein, 382 aa, unidentified
MTGTEPHAWGTGLMDDIIFVGLDVHKATVCIAIAEGSRGGEVRQLGIFENRPEILSKVVSRLSKGGRRLSFCYEAGPCGYGLHRLLTGYGHECVVVAPSLIPMKAGDRVKTDRRDALMLAKLHRAGELTAIWIPDAAHEAMRDLVRARATAVRVLVKARQHLQGFLLRHERIYHGARAWTLAYRRWLSTVRFEHPAQQIVLQDYIHAVQEAETRRDRLTQQIEELLPNWSMAPVVAALQSMRGVALVVAVTVVAEVGDFRRFANPRQLMAYLGLVPSEHSSGSSVRRGGITKAGNALARRVLIEGAWTYRMSARVSRKLHDRLEGLPAAVRDIAWKAQLRLCARYRRMAATGKPKVVVTTAIAREMVGFIWAIARLAQPALV

SEQ ID NO: 298201 - protein, 343 aa, unidentified
MAHYVGLDVSLKQTSICVVSDTGSVVREGVVDSDPEAIAAFVGSRAPDTVRVGLESGPTATWLWTELKRMGVPVICIDARHAKAVLKMQINKSDRNDAVGIARIMQTGWFKEVRVKGLDCHAVKALLTSRALLVKIKRDLENQIRGLLKNLGRVIGRAKFNGFAARAAELIEDRSELVAVVTPLLKAREAIEKQIDDLDRKVLKLARHDAQIRRFMTVPGIGPITALCFKATIDDPARFKRSRSVGAYIGLTSRRHASGEIDWSGRISKCGDAMLRSYLFEAAGVLLTRVPKWSALKAWGMRLAKRNGLRKAKVAVARKLAVILHRMWIDRTEFTWSNKEAAA

SEQ ID NO: 298202 - protein, 487 aa, unidentified
MHPRTTNNPTQTSDVYRFSFESTGVLALDNEYSGFAVSPAHYIAFAERRRAGPGSTIYHFGRNDVKPLPTQPFTAYVGIDWADTKHDICLQMAGNERREFDCIAHQVGCIDEWARALHKRFGGTIAIALELAKGPIVYALQKYDFFVLFPINPSTLAKYRQAFKPSRAKDDPTDAELALDLLLRHPDRFTPLHPQSAAMRTLLSLTEHRRQLVGDKTRLTNRLTNTLKQYYPQALDWFEQRDTILFCDFLTRWPTLAQVKRARQTSLKAFFHAHNGRRPGVIDARLDSIKAAKPLTEDLGVIVPCRLHAQVLVEQLRVTLHAIDRFDHEIAELAPTLPDYSLFQGLPGAGPHLAPRLLAAFGEDRQRFQAADELQKFSGIAPVTERSGKKSWVHWRWQCPTFLRQTFVEWAAQTINKSFWAGAYYQQQREKGCSHQAAVRALAFKWIRILYRCWKTRTSYDESTYLNALRKRGSPLLHNLTLNPQNT

SEQ ID NO: 298203 - protein, 313 aa, unidentified
MSEKQWVGIDVCQKSLDVYIRPSSKLSQVTNDEVGINKLVQTLKNIQPELIVLEATGGMEIDAAEKLTQAGLAVAVINPRQARDFAKATGQLAKTDAIDAKVLAHFADAIRPEVRQISDESSRNLEDLVARRRQLSDMITAEKNRRRGKTNSVKVSINEHIEWLKQQLKEIESQIKSAIATNEDWKKKMNLLTTVPGIGEVVAVTLISSLPELGQISHKSISYLVGVAPLNKDSGKFRGKRKIWGGRAKIRCVLYMATLVAVRFNPLIKAFYERLVGKGKLKKVALTACMHKLLIVLNAMMKNNQAWQAQTTS

SEQ ID NO: 298204 - protein, 421 aa, unidentified
MDRERVDYAAWIGLDWGSDQHALCLQTADRSPVERCTLEQKPEALHHWFMNLQTRFGGRKVAVAIEQTRGAVIHFLLGLDLVHVFRIHPKSLKNYRDALHPSGAKDDPADAQLLLQFVMLHQDKLEPWVPDEPQTRLLIRLVEFRRKIVGKRVRLTNELTQMLKEYFPAALLCAGDLDMVMACDFLAKWPTLEKLQKSRAETMRKFYQEHGSRRSHVIEDRLRLIRSALPLTTDAPVIESSAFMVKTIVPQLHLLIHAVAEFDQKIKEVFQKHPDAHIFSSFPGAGSVLAPRLLAAMGSDRSRFHSSLEVAEYSGIAPVTERSGKSKWVHRRFACSQFVKQSFHEFAAQSILYCHWARGYYDRKKAEGKRHHAVIRALAYRWIRIIYRCWKDRIHYNEDQYVQSLRQRKPAWLESWPLRDT

SEQ ID NO: 298205 - protein, 430 aa, unidentified
MNDETDRLKLFKALKASVRGSERHLLVGIDIAKNKHHAFFGTSNGRTLRKNFVFENTLQEFESLRALAGDLQKQYGLQEVVYGVEPTASYHKPLAEYLIRNQQLVVYVSNVAVARNRAMLDGRWDKNDKKDAANVADLVGQGRCLYYDIPQESLQELRNLIGFRSRLKKEEHALRMRLRNNILAQYFPELDNIAFNSGEPTDMVVSIAQHCLDPRQIAAMPFDDFAALVTSRKVTMAQHRRLRAVWEISGRSAGCQVHDAARWEAQTLVRRFKAVVQDTKDTEKRMAAIAETFPEYGCLLSIPGFGPIVSAMVLAAIGDPSRFVHRKQLLRLAGLDLSASRSGQTSDTVKPVISKQGKAALRYALVQAAMIASAKNSSIRGYFSKMLKGRELECGIMLKMKVKLAAKLLVVAWTLMKTKDNFKASYFAVD

SEQ ID NO: 298206 - protein, 346 aa, unidentified
MEITTIGLDLAKNVFQVHGINSASEVVVKKTLRRVQMRRFFEQLDPCLVGIEACGTSHHWAREITRLGHEVRLMPPAYVKPYVKRGKTDASDAEAICEAVTRPTMRYVAIKSPEQQAALALHRTRNLFVKQRTQLVNMIRSLLAEFGIEFRRGIEQALTLAKRIAAGDVPDIPPLAAKVIAGLAGQVLDLQARLGEIERELLAWLRSNDIAKRLATIPGIGTVCATALAASVTAPHQFRSGRQFAAWLGLTPLQHSSGGKERLGRISKMGDKYLRRLLVVGMTSLIRRAKYKPEAVDPWLADLLSRKPARLVTVALANKAARVVWAIMVRGGVYRMPAGASVTTSL

SEQ ID NO: 298207 - protein, 391 aa, unidentified
MSMYFIGIDISKYKHDCCIISAADQKVVSKVTIKNNKAGFNELLTIIHSLANPADIRIGFESTAHYALNLELFLENSLLTFMEVNPVLISEYKKSKTLRRTKTDSVDCESIARWLMTVEYKPHSKGFYHAYSLKSLTRLRDKLIRHRSFYLIKITNVLDHTFPEFKPFFNERLSKTALYLLENYGSAEKMARMNSASYEKLRSLSRGKFSPQQFLRLKELAANTVGVNNSIFDVELNSLLSLYKSLVKEINTIEKEINKLIEEVHPHYMSVPGIGPLSAAVIYSEYGDISNFTNPGQMLAFAGIEPGINESGTESHGGKMVKRGSSQLRYTLINCCLPLIRFDMTFATYYAKKRGEGKPHRVAITHVAKKLIRVIYALERQDIDFNAQKLR

SEQ ID NO: 298208 - protein, 433 aa, unidentified
MLVQEPDGTKVLAATFAHDERGIGGLCRTLVSLKVGLVAVERPDGLLIERLLDAGIRVMAIHPNQVAAARPRFRTSGGKSDRFDAFVLCELARTDSHRFRVLAPDGDQTKALRALTRAREDLVETRVALANQLRAELERYWPGAAVIFKDIDSPISLAFIKRYPSPSDASGLGAQRLGWFLARHAYSGHKRPDQLIKKLRAAPEGRAGDREIEARRQTVLALVSALEPLVAKISELTSEIGHCVRAHPDGPIFLSLFKGPSVVTAAELLAEIGDCRERYPTADALAADAGMSAVAIESGKRKVASFRWGCDKRLRAAFCVLADTTRRWHPWAGDHYARAIARGHDHPRAIRTLGRAWCRVIWRCWQDRTPYDPARHRGLQQHVLVTIPSSSGPRPDLAATQRMLGATVTGTAARRAEREALDGKPTSANTPGG

SEQ ID NO: 298209 - protein, 337 aa, unidentified
MNITLIGLDLAKNVIQICGVNQAGKAVFNRSVTRHKVLELLSQYPQVPIAMEACSGSNYWGRALQQRGHQVMLLPPQHVKPFVKGNKNDRNDAFAICEAARRPNMTFVPPRTLEQTDISLVHRLRERRIGERTRLINQLRGLLNEYGIVLAGGKETLKQAMPLLLEDASNELTPRARTYCCDILEEWQQLDEAIRCLDKDIEQQCRDNEACARLIDIRGVGAVTATAMVAFVGNGSQYRNARHFSANLGLVPKEHSSGGKQKLGSITKRGNGYLRKLLIQGAWSIIRHLNKATDRLSLWVKQLAERRGKQRAAVATANKLARIIWVMLFRQEHYRAA

SEQ ID NO: 298210 - protein, 332 aa, unidentified
MYIGMDTHDRYSQVAVMRQDGSLVDEFRLSHGTERAELEEFAREYAGSAVAIEATGHYRPIYETLDEHVDVTLVNPSKTRVIADAKVKTDRVDAKMLAHLLRANLVAESYVPPKDVRERRDLVRARKALVEDRTREKNRVRAVLKRTGNQYSRELFGPTGREFLAELTLSGVDRAVLEAHLAVIDTLNEQITKLDKRIEDTAAARHDAQLLMTIPGVSYFTSLLITSELGEINRFSSAKKVISYAGLDPSIRQSGDKEVRGGISKEGSAPLRWALVQCANVAVRFDDYLGQFYNRLKQRKNHNIAIVATARKMLVAMFHMLSREEVYDPPTA

SEQ ID NO: 298211 - protein, 436 aa, unidentified
MRGCRCSMIMGFTKPIEHFNLQRKKVITMNTLYVGIDVSSKSNVVYLMLPNGDKHSNFSVANSHEGSTQLVKRILSALTSHSLDTVLIGLEATSIYGYNLVYFLREDATLAPFNRKIHVLNPKQVKKFHDAYNDLPKNDYVDSFVIADCLRFGRINKEVYMGDYRYKALQNLTRARFFAVQNLVKEKQRFMNVLFKKYSTMTQEKVFSDTFSTTALAVYDEFESAEALANMDLHELTDFIIEKGKNRFPDPDAVAKAIQKAARSSYRLPKTVNDSVNQVLSISITSMKALESQIKEFDKAIKAQMELLPNVLISIPGIGPVYSAGIMAEIGDINRFNSQAALAKYAGLAWKQHQSGGFESEVTRLIPSGNRFLKYYLCEAAFSLVRCDKEYSDFYHLKYKEVNRCQHKRALALTARKFVRLVFRLLKDNRLYCPAK

SEQ ID NO: 298212 - protein, 341 aa, unidentified
MEGDVNYCGIDLHSNNSMVVISDESDRVLYAKRLPNRLSDILAVLEAYRQELAGVVVESTYNWYWLVDGLQEAGYRVHLANTAAIKQYDGLKHRGDESDARQLAHLLRLKLLPQGHIMAKQQRAVRDLARKRMQLVQCRTTQILSVESGVSRHTGAHISSNSVKRLQEADLTALQLGEMPTLGIKANVAVMQALQEQIDGLEKVLIRHCRTEPGYRLLKTVVGIGDALATVILLETGEITRFADVGNYASYCRCVGSKHESNGKKKGEGNTKNGNRYLAWAFVEAANFAVRYCEPARRFYQKKKAKRNSTVAIKAVAHKLARACYHILKNQEAFCVERCFA

SEQ ID NO: 298213 - protein, 342 aa, unidentified
MNYYAGIDVSLECSSVCVVDGTGKIAREAKVASEPEALIAWFGSLGLSLERIGLEAGPLSQWLYAALREAGLAVELLETRHVKAALSAMPVKTDRNDARGIAQLMRLGWFRPVHCKSAEAQEIRALLTARKLVQSRLYDVEMSLRGILRGFGLKVGRTTPKRFAERIGHATLEAVGAALLSVRAVLLREFNGFEKRVRAIARSDGRVRLLMSTPGVGAIVGLTYISAIDDPARFKSSKSVGAHFGLTPTKYQSGETDVTGRISKLGDSSVRTALYEAANVILTRPIKGGGLKSWAMKLAKRAGMKKAKVALARKLAVILHRMLADASKFIAEKASGCVRVAA

SEQ ID NO: 298214 - protein, 340 aa, unidentified
MTAHVCGIDIGKTVFHLIGLSKEGQIVIKKRFTRKQLITHMANMPGCLIGMEACPGAHFLARVLRAQGHEVKLMPAEYVRPFVKSNKNDYVDAEAIAEAVQRPTMRFVPIKSEAQLDLQALHRVRDRWMGRRTAVINQIRGFLLEHGITVAVGPAHLKRQIPFILEDADNLLSPRMRALLIELRDEWEKLETQIENIDREFAQAVKKEENCRRLLTIPGIGPLTATALTAAVGNATAFHKSRDLAAWLGLVPRQHSTGGKARLLGISKRGNPYLRRLFIHGGRAVVARVKRENHTFASWLDQLEARSPRNVVVVAMANKLARIAWAVLTRGQVYCATACT

SEQ ID NO: 298215 - protein, 320 aa, unidentified
MSATNPQRPRHVGIDVSKERLDVCLMPEGEAFALANDQEGIDSLIERLEEAPPELVVLEASGRYERPAAASIAAAGIPVAVVNPRQARDYAKAIGRLAKTDRIDAEILARFAGAVGPKPSVLPDEEALTLQAILARRRQLSAILVAESNRAQMAPEAVARRIRAHVRWLEKEIERTDRDLDEAIGASATFKENEALLRSVPGVGPVLARTLLAELPELGTITHKRLCALVGVAPFNNDSGKRKGKREVWGGRAPVRAALYMGALVATRHNPLIAEFYERLLKAGKPKKVALVACMRKLLSILNAMIRDRTPWHATHLLTP

SEQ ID NO: 298216 - protein, 397 aa, unidentified
MLTLGIDVAKYTHNATLLDAEGHKVFANFSFNNDQSGLDKLLEKIAAGGSTPEQIVIGMEATGHYWILLFEHLVKAGFDVKVINPIVTRARRNITVRGGKTDAADSLLIAGILREGSVKVSAIPEDEVNRLRTLTRLRFDCAKAASSEKLRLIALLDVVFPEYKNHFSDVFGASSRVILSHFPTAAELAKVDIRRLTALLCDASRGRKGREDAVRLKEAARNSFARDLSDRNLALEIRFVVERLNLVVDQIAELDQEIKNYYKDLQTLLKTVPGIADVWAPTILAEVLPVFHPERRNGSDAFVAMAGLDPRHNDSGRSTGRAKMSKRGSKYLRTAVMEASEVAIGWSNDPMFKSIYDRQRAEGKPHMVALSHVANKMLRVIFALLKTKEAYHPVLNN

SEQ ID NO: 298217 - protein, 398 aa, unidentified
MTESSDYESVQIFIGVDVGKDTHHAVAINRSGKRLFDKALPNDENKLRSLISDLKQHGQILLVVDQPATIGALPVAVARSEGVLVRYLPGLAMRRIADLHAGEAKTDARDAAIIAEAARTLPHALRTLKLADEQIAELSMLCGFDDDLAAQTTQASNRIRGLLTQIHPALERVLGPRLEHPAVLDLLQRYPSPEKLASLGEKKLAAQLCKLAPRLGKRLAADIAQALAEQTVVVPGTNAAAVVLPRLALQLITLRKQRDEVALEVEQRVLAHPLYPVLTSMPGVGVRTAARLLTEVACRAFASAAHLAAYAGLAPVTRRSGSSIRGEHPSRRGNKALKRALFLSAFAALRDPLSRAYYTRKMSQGKRHNQALIALARRRCDVLFAMMHDGTFYTPQGS

SEQ ID NO: 298218 - protein, 415 aa, unidentified
MIYVGIDWADESHRVFITDDSAQRLDSFSIENSRSGVEELFERVRHFAKDPKQVLFALETSKGLLISSILDAGYTVYPINPKSVDRYRDRYKVSGHKTDDFDAMVLANILRSDRHNHREILPDSPLTTELKILTREYSQLVRIKTIFINQLTSCLKEYYPVAVELFCKLDQHLTLAFLRTFPTVEDAKKASLQKLCKFLSKNHYPGVAEKANEIHQKLKEPQFQVEPYIANAKSQFMLTLVNQLQLLLPQIESFKKKIEQLLTQHPDREIFNSLPGAGVILSAKMISEFGDNRQRYKNVSSVQAEAGTAPVTESSGNTKFVHFRKSCRKSFRNTLHQFAVCSIKESSWAHQRYQQYIASGKKHTHAIRCLANAWLEIIFPMWKNHTPYSEQQHLLKYVKEQKSVEYRRDFNYLAA

SEQ ID NO: 298219 - protein, 355 aa, unidentified
MERYIGMDVHAASCTLAVISEKGRKLRDFPVETNGQALVEAVRMIPGHKHLVLEEGLQSAWLYETLSPHVDELVVAGITQSQGHKSDKRDAYGLAEKLRVGNLDKSVFKAPRQFTRLREFSRSHMTLVGDVVRGQSRIKSLYRSRGILVSGVNVYGVRHRAQWQQQLCSSAQARAARLYDHLDFLLEQKKQAEVDLLREAKKHPIVRVLETAPGFGPIRAARLVPIVVTPHRFRTKRQFWSYCGLGIVTRSSSDWIQAADGGWIRARVPQTRGLSRQHNHFLKSIFKGAATTVITQLSRDPIHARYERLLDGGTKPTLAKLSLARMIAATVLRMWKDEKEYDPERGDPSTATREG

SEQ ID NO: 298220 - protein, 352 aa, unidentified
MLPGIERQPRKKLEPNPERLLGLLHRWRDEAVRAGRTITRIALAFEAGRDGFWLARWLAARGVEAHVIHPSSVAVSREHRRAKTDRLDTELLKRGFLGWLRGERGHCSMVRVPTLAEEDAKRPNRERECLVKERTRLVNRMKGTLARLGIRNSRPTLRKAAEHLAALYTPEGSPLPPNVAAELERDIARLGLVIGQIKQIEAARRQRLEEEPERGRHAMIRQLARVVGIGIETADMLVNEVLSRPLRDRRAVARYAGLTGAPDESGAKRREQGLAKAGNARVRRGMIPLAWRFLRFQNNSALARWYQARTADRRAGTRKTMIVALARKLLIALWRFVTTGETMEGVVLRPAG

SEQ ID NO: 298221 - protein, 341 aa, unidentified
MEQITTIGLDIAKHVFQAHGADERGRAVFSRKISRAKLLSFFADQPQCVVALEACAGAHHWGRELARLGHDVRLIPPAYVKPFVKRQKNDAADAEAICEAAQRPTMRFVAVKSEVQQASALVFRARDLVVRQRTQLANALRSHMAELGWVAPKGLAHMARLAELVEDPASELPEDARPVLRLMLDMLAGLAAQIAVLDREIARRAREDEAARRLMTVPGIGPVTATALLALAPAPEAFNRGRDFAAWLGLVPRQHSSGGKERLGAITRMGDRTLRRLLILGASAVVRHAGSRGAAEGSWLAGMLARKPRMLVTVALANKTARIAWAVMRKNESYRAPALTA

SEQ ID NO: 298222 - protein, 347 aa, unidentified
MRFLNQTAASYVGVDLHARTLFVCVLDQAGTLRLSRNLPAKPDPFLRAIQPFRPDLLVGCECVHTWYWLADTCREHGIPFALGHAWAMRAVHASKTQSDCQDAEAIARLLRGGNFPLAYAYPHERRGLRDLLRTRLRLVRQRAELYGHIHTVRRQLNLQPIGSDVKSKSKRADVAADIPDEHTRRGVQARLNLLGPLDTEIRRLERDIEVAAEEHYPAELAVLQSIPGVGRIISMTILLEIDTISRFESRQQFCRYARLITPKQQSAGKIVGVGNSRSGNAWLKWAFSEAALLSAQKDERLQKCLAKLQSQHGSGKGLSIFAHKLGRVVYHLLHTKKVFDVDRFVRH

SEQ ID NO: 298223 - protein, 371 aa, unidentified
MESIIYVGMDVHKDSYSVCCYKSNEDRYYYEKKILAESKRVIKYLETVKKELGDETLFICGYEAGPTGFGLYRDLQKAGYSCVVMAPTSLKHPVNHKVKNDKVDARFLAKTLFTKDYSSVHVTTEHEEAINEYCRMRLSIKKELTKAKLVLQSFLLRHDKKYTEGDTWTLKHRAWLKNIHFEEEYLNEAFNEYMISVNTLEQRIKTIENRLKEISQDPDVKEKVDRLVCFCGIETVSAVTIVSRVGDFNRFAKAYHFSNYLGLTCGEDSSGQKEKHLGTKKTGDKEIRRLLAECAKSIKKTNLKGKKSKRLLDRQKDKDPLVIAYADKCRYRLRSKIAHLELKGKSPNVAATAAARELACFIWGMMTNHIA

SEQ ID NO: 298224 - protein, 458 aa, unidentified
MKRKGRRTKGVEEARPFEGMSRVNENAAGVDVGATEIVASVSGSDGMQIVKAFGNYTMDLQAIGKWFGEHGIKMVAMESTGVYWIPLFEELEREGFECLLISSRSIRRVPGRKSDIEDAQWIQTLHSYGLLESSFRPQADLIALRTMLRHRAQMMEHRAPHILHMQKALLQMNIQLSQALSDVTGVSGLAIIRAIVEGVRNAQVLAAFRDPGCKKSEEEIEKALTGTWREEHLFVLKQSLALYDFYTEQIEACDEEVDRLYALTRPDWERGELPVVPEKKKNAHSKNKPKNSLEIRQHLHRINGVDLTVVDGFGASLAQTVTMEVGSNVGEKFPTEKHFCSWLGLAPKHDISGGKVLKNRTIKTKNRAGQAFRMAAQSVKRADNPFGALYRRLRARLGPAQATVATAHAIARVVYKMLKYKVEYDPLSVNEYQKQYEAQQVKYMKKKAAKLGYELVPA

SEQ ID NO: 298225 - protein, 486 aa, unidentified
MAKVASVYERLTAGNRKLRKDLQRRLHSDHPGLEVVHANAAGIDIGNESHFVAVPPAKDAEPVREFGSWTADLERMAAWLQSCGIETVAMQSTGVYWFAVYDVLEKHGLKVFLVNARHTKNLPGRKSDVQESQWLMKLHTYGLLRNSFRPPEDIRPIRAIWRLRDRHVHDAARSVQHMQKALTSMNVHLANAISDISGTSGQAIIRSILAGERNARKLAQLRDQRIQASEEEVARSLEGNWQEDQLFELQHAVDEYDFRLKQIAECDGKLQTYLAVLPTRTAPGADTGVVPPAPAGAAGKKKKRAKKAQGYAPCSFNLAAELIRVSGVNALRIDGINLITFQTVVAELGTDLANWFPTEHHFASWLGLTPRRDISGGKVIRHTREKSRNRVASVLRMAANALLRSDSYLGARYRHLRARLGSPKAIKAMARYLACIIYRLFTKGQAWVDRGAEHFERNRQTRDLARLQAQAGSRGFRLVPVTGEQA

SEQ ID NO: 298226 - protein, 390 aa, unidentified
MPKYQDLSRSLAAFDQNSTLVAVIEMGSEGWLVGALVPGLKKDPRKKLSPDKQSLLALLHRWCAEAAKAGHAIKRVCVAYEAGRDGVWLARWLREQDIDAYVIHPTSIPVSREHRRAKSDRLDLRLLLRAFLGWLRGEPGHCSMVAIATVEEEDGKRPLRERETLTGDVTRLINRMKSLLVTHGIRNFKVTLKKAGEKLAELKTAWGEPLPPESLAELQRSFERLRQAKQQIAEIDKARRRRLEKAPEAGVHPMILILARVYGVGLMTAESLVREVLYRNLRDRRAVARYAGLTGSPDESGKKRREQGLAKAGNGRIRRALIQLAWRLLRHQPESALVKWYRARTGDGRRDTRKVMIVALARKLLVAFWELVTNGTVPEGMRLHPAKVAG

SEQ ID NO: 298227 - protein, 366 aa, unidentified
MSKSSTVVSNRVEIFKDDKLTIGVDLGDRFSHYCILNGAGEVIWEDRLPTTPKGIDEVFRKIPPSRVALETGTHSPWVSRQLARLGHEVIVAHARNVRLIGGSSRKDDRLDARTLARLARIDPGLLGPVRHRSAKAQIHLTVIRARAGLVSARTALVNAARGLTKSYGERLQKCGTQQMNRESAQGLSQELRDALDPLLAEIESLNARIAEYDRRIEQIAKEVYPQVALLKQVKGVGTLIALTYVLTLDDPHRFRRSRDAGCFVGLRPGRRNSGMSQPQLHISKEGDRYLRTMLVQGAHYILGPFGEDSDLRRWGMRLAERGGKNAKKRAVVAVARKLAVLLHKLWVSGEVYEPLRNSHKVIGRVA

SEQ ID NO: 298228 - protein, 453 aa, unidentified
MPIIRPNAIRIKRFRDLKADLRTRRDRLLVGIDIAKAQHVAQVRLAHTQVLDGKVDIPNTQAGFATFWAHLQRRQRETGVPEIVCAVEPTGTYHEALAQFLEAQGADVVLVSNHVAHHNRRTLDGTWGKSDPKDAHNLCELLERGLVLFYSRPDGPIAALRRLVRLLRSARVELAAGKARFRNPLLPLLGPAGEPLPAALAASLPAPLLVLLPRAARGGGPAVGGPRPPALTFELTDLAARLVSVRARLAQIEAECVRVAHPLPAYARLRTIPGVGPTVAAILLAEIGDITWYTQFSQLRKLAGLDIQRVQTGQWAGTARISKAGRPLLRWALYQAALGACRTPGWRARRAALLAKRAGDRHAFFKATVELAAKLLRLVWGVWRSGRPYAPARVDGAPAAELAIAPGMARAGRRRAPPAAQGQAEITPPRGSQAGRSSATRPLSRGKGTSRRV

SEQ ID NO: 298229 - protein, 334 aa, unidentified
MTMTKTMAPPPPAYIGIDVSATQLDVAVWPTGGHWCSPYPTAPHDPALTTVVRRIQAQAPALVVLEATGGWEVPLHTALTAAGLAVAVVNPRLVRDFARASGRLAKTDALDAQVLAQFAAQMQPPVRVTPAPAIQALRALVRRRQQVVAMLVAETNARRLTRGAVQASIDRHRTYLQAEREALDTAIAEAIAADATLREQAAPLQSAPGVGPVLAATLLAELPELGTLDRREVAALAGVAPLNRDSGRRHGPRRCWGGRATLRPALYMATRTAVRHNPLRRPLYARLRAAGKPDKVAIVACMRKLLIILNAMTRDQRRFHLPPSPSPASPGGVP

SEQ ID NO: 298230 - protein, 349 aa, unidentified
MTDRHIDYSGQKVFIGIDVHLRQYTVTCRCDGRIAKRCRIVADPVALVDFIGKYFKGAEVQTAYEAGFSGFGLHRVLEGNGIKSIVVHAASIEVSQKKIKTDKRDSLKIAEQLEAGRLKGIRVPSEAEEVGRVIARTRDQLVRAHTRVLNQMRMRFHQFGLLRYDEERRMNEALAKEVLESIKAPELRYSIESMLAVRAALSGEVKNLDKRLKEQALHDAFEETYRKVPGIGPLAARILSNELGDMSQFANEKVLFSFTGLTPSEDTSDQARHLGHITRQGNSRLRHVLVEAAWVAVRKDPALKAAFDRIAAKAGKKRAIVAIARKLIGRARALFRSKEDYKRGLNLAA

SEQ ID NO: 298231 - protein, 349 aa, unidentified
MQSKSQIQSIGIDLGKTTFHLVALGSRCPVVVRKKFSGQPRLWYTANLPASWMGMEAGVGSHVLGRALREPGHEVRLIPAPLVRAFVKSNQNDSRDAEAIAEAGEREHMGFVPIKTEDQLDLQALHRVRERLVSRRTSVINQIRAFLLERGISFAKGPARLRREMPEILEKADEKLSARLRRRLDFLGQEWKPLPWQSESLREDWEKIADRDAACPRLPPIPGVGPLVATAVVSALGNGAAFPQGREFAAWLGLVPGQWSTGGKTKLLGISKRGNPYLRKMFIHGARAAVLRVKREGSYLGQWMGGLESRAARNVVIVATANKLARISSAVLSSGNDYRPMHPAVDCSS

SEQ ID NO: 298232 - protein, 367 aa, unidentified
MKKVSTVAAKASRNISQPQLTIGLDLGDRDSWYCVLDEAGQIQREQRVRTTAKALGEVFGAMPRSRIVLETGTHSPWISRLLTELGHEVIVANARKVRLIGESRKKDDRLDAQTLARLARIDPALLSPVKHRSAQAQADLTMIRARAGLVRARTGLVNTARGVAKSYGERLRGCNVRNMNPEKAAGLSPELQRALEPLLSAIEELSERITEYNDRIEVLAQESYPQVALLKQIKGVGTLIALTFLLTLEDPHRFRKSRDVGCYLGLQPGRRNSGQSEPQMHISKEGDPYLRTLLVQGAQHILGPFGIDCDLRRWGLKLAERGGRNGKKRAIVATARKLAVLLHHLWVSGEVYEPLRNSSRTIVAATA

SEQ ID NO: 298233 - protein, 419 aa, unidentified
MSFKILKFNCCGLDVHKTWIYACIGITDSNNRTEYKQARFSSFTKGLNELCDWLAKYNCKDVCMESTGKYWIPVFNILEQHNLWVTLSHPKYTKPMKGNKTDRKDAKWICDLYMCGMVKPSFIPPADIRELRDLVRYRYKLTCMITGEKNRAQNCLTVSNLKLDDVFSDVFGKSSRSITEQILQHPGEKFDVALFVHGRCKTPIEEIQAAVDGAISKEQAVKLRQCLDHIDELNRHISEVEQEILRLSDKYEAALNLIRTVPGFDKNPMTAVQVLSEIGGDMSVFPTAKHLVSWAGCCPRNDQSNQKIKSTRISRAGSYFKPVLVQVANALIKSKKHLEFSNRYKRIKARRGHKKAIIAVCHMILTAIWHILSDLKPYTPEGFLESRPVKEKKVLSTSQALNLLKQRGYIIKDEPLAVS

SEQ ID NO: 298234 - protein, 408 aa, unidentified
MTVVGIDVSKGKSMVAAMKPGGKLVAAPYEVRHSDIELSRLALDVLCMEPDTRVVMEATGRYHEPVAALLHSEGIFVSILNPLLIKQSGAGSLRKVKSDPKDALKIAKYGLDNWSTLREYTPTEAIRQQLKLCERQCDLYSKNIVMLTNNLISLSDKTFPGVNELFSSPEKADGHLKWVDFYRTFWHCDCINRMSPDAFEERYKKWCKKKGYHFSADATNALYAASCGLYTTLPRDNNAKLLVTVAADQLIALRENQSKLEAEMLNLCKQLPEYETVMAMYGVGKSTGPHLMAELGDIRRFPHRSSIVAFAGVDPGVVGSGKMQLSSVATSKRGSPQLRKALFQVVSTYVKRKPKNEAVYQFYAKKRDEGKPFFVCTTAAANKFLRIYYARVKECLNAAESAVQTEEG

SEQ ID NO: 298235 - protein, 334 aa, unidentified
MSYTIGIDVSKDRLDCAGRNDIDQVKTTRHHSINTPQGFSSLLIWAKKISGQCAKDLTFIIEPTSIYHDKLVAFMYACGATVYLANPARVRKFAEGIGILSKNDVIDADLLSHYGLAAKKLIVFKPLSQDICTLTSFMNRIRSLAKDHRREQNRQEKSGKASVFSKLEEQSIQRLVKQRKNEIKRFEEAIRKLIKQSDLLRKDYELLLSIPGVGEKTAWIMLIVLKSQSFASAKEAAKFLGLNPIEKRSGKKAYRRPRLSKAGNGFYRQALYFPAIVATTKNPDIQAQYERLLANDKTKMCAIGAAMRKLVHICYGVLKSQRPYESQRQVVKRS

SEQ ID NO: 298236 - protein, 343 aa, unidentified
MGGSQIYVGVDVHKNFSFVCAMKESGEVILEKKVRTEELENYLGDIPGNKTIVLEPTTTAINLARKLRKNNKILLSHPYKTKLIAESKKKTDKVDAKVLADLARANFLPTAYLPPDEIMELREIIRERIRLKKLSTSIKNRIHSILTKNGIKYDGNLFTSEGREFLCSLNNDWINRYLRILSSIENEIKEIDREIRQKCMENEETMLLTSIPGIGFFSALLIYAEIGDIKRFPNSKKLCSYAGLVPSIRQSGNKTITGKITKEGNKLLRWVLVQCAFVAIRNDERFRNFYERVKQRKGSQKAIVATARKLLTVVYAVLRDRKPYISYSQAYYGEGCTPVTNWA

SEQ ID NO: 298237 - protein, 411 aa, unidentified
MDVYCGIDWAEDHHDIALVNRDGQLLARRRISDDAAGLAQLLDLLAEHGDTAEDLIPVAIETPRGLLVACLRATGRTVYPNPMAVARYRDRHTVSGGKSDHGDSVVLASILRTDIGFHRPLPADSELAQAIAVLARAQQDAVWDRTTAHNKLRSHLREYFPGFLAAFAEAKHGILRPEARTILAAAATPGDAAKLTAAQLRALLKKAGRSRGIDAEAARLRDAFRAPQMRQLPLVEQAMGRQTLALLGQLNAACAAADDLEHAATESFNQHPDAGIITSFPGLGALTGARVLAEIGDDRSRFQHAKGLKAYAGAAPITRASGKTKSVTHRKVKNNRLAAAGYNWAFSALTASPGARAHYDRRRDDGDRHAAAQRNLFGRLLGCLHRCLTTGQHYDENIAFPGTPEKLSQAA

SEQ ID NO: 298238 - protein, 323 aa, unidentified
MTKDNIVCAGIDTSKRKLDVALEGRSDQLQVDNTPDGHRALSAWLRRHRVERIGIEASGGYEQAIVVQLRQDGFLVILFQPAQVRAYARFHLQRAKNDKLDAALIAACAAASKKIHAPADPRLAPFAQHLTFVEQITDQIARLKTCRESSRDPRIRCIWSDEIARLKRLERLELKQLAAAIRQHRDLAERLELIASVDGVGLRTAVAILVRLPEIGRVSREHVAALAGLAPFDDDSGDQIGARHIAGGRERLRASLYCAALPAAFHWNRQLIVIYRRLIAAGKSHKVALVACARKLLIYVNTVVARGTPWVKTPPITSALATG

SEQ ID NO: 298239 - protein, 343 aa, unidentified
MRTITTIGLDIAKSVFQVRGVDADGDVVLRRQLKRRYVLSFFQKLPPCLIGIEACASSHYWSRELQALGHTVRLMPPAYVKPYVKRQKNDAADAEAICEAVTRPNMRFVPTKTPEQQSCLMLHRTRHLFIRQQTALINSIRAHLAEFGIVAPVGRNGVEQLLEVVADANDARLPEIARACVAALGSQLQALKAQILAFDRCIMAWHRSNETSKRLDAIPGVGPALATALVASVADPKAFRSGRDFSTWIGLVPKQNSSGGKDKLGSISKQGDRYLRSLFTAGALAVIRYAKLHGTKHRPWLTALLARRPTKVAAIALANKMTRMAWAMMTRGERYKEPVALAA

SEQ ID NO: 298240 - protein, 341 aa, unidentified
MEEVSTIGLDLAKHVFQAHGASASGAVLFRKRLRREQVLSFFASQPCCRVAMEACASGHYWARAISDLGHEVRLIPPAYVKPFVKRQKNDMADAEAICEAAQRPTMRFVAVKSEAKQAAAVIFRARDLLVGQRTQIINALRGHLAEYGLIAPQGPSHIERVIAQIEDPVSDVPELARSCLERLVGMFRHLQDEIAALDREIAARAKSDDVARRLMTIPGIGPLCATAIEALAPPFETFRSGRDFAAWIGLTPVQRSTGGKERLGRTSRKGERALRRLLIFAASAVVRWAKRKGIPPGSWLARMLARKPPMLVIVALANKNARVAWALMTKGGIYRAPAVAA

SEQ ID NO: 298241 - protein, 319 aa, unidentified
MNLGIDVSKDTLDCCLISDGIFFERQFKNNKAGFEQLKSWLKKSGATSALHCCCEATGKYYEAAADYLAGSYVMSVENPRKIKGYGNAKLQRSKTDRLDARLIAQYCRDMKPRAWQKPSEAQTKLKELNQYCQRLKAQKAAEQTKLHTAPDYLAPLIEDTIRHLQKQIKAVQEKIGKFHQDHPDYKANRNRLKTITGVGDNTADTLLTVLAEQDRFENQRQFTAYLGLDPKQFKSGTSVKGRERISKVGSSRLRTALYMPAMHAYRSRTFAPFVSRLKANGKRPKQIIVALMRKLAVIAYNLIKTGKDFEPERYMSKNQ

SEQ ID NO: 298242 - protein, 365 aa, unidentified
MTQSIWIGLDVHAESTTAAILVGDSKDAEIVTLPGDLTKIRRLFRRLEKQGAPRACYEASGAGFVLQRALAKDGFHCDVIAPSLIPRSPGDHRKTDRRDAVMLAKLYRSGHLTAVHVPSEHHEALRRLLRLRITYQRQCKATKHRISGILRNQGIVFREGKTYWTKTHRAWLARQRDELKGPLQTALAVELQHLEYLETQRGALDGELELYASAEPYRRQVEALCCLRGIKVLTALALLCEIDDVRRFGSPKALMAYFGLVPMEHSSGSRERRGPITKAGNTHARSLLTEAAWNNRHRPAATLLLQRRRQGQSPEVVGIAVKAQHRLARKFRRLDARKHRHVAITAVARELCGFVWAVLNAVPQS

SEQ ID NO: 298243 - protein, 344 aa, unidentified
MPIVGGLDIHRKQITFDYLEVETGQVWCGQIVPADRVHLAGWLEERFAGRGDVEFAVEGCTGWRYVAEEFARAGLVAHLAEPADTAALRGRKRHAKTDRTDSRHLRQVLTDGRLPECWIPPGHVLECRALLELYRALRVEHTAWVQRIHAVLFHQGVAPGGDLRTVQGRDALRVVAAAQLSPAGQLQIATALAMLTALEGHLDAMHRRLLRAARHLNGAKVLTDRLYGVGPITALALTCWLAGAGRFSSARKAVRFTGLDVTVYSSAGKRSPGHLSRQGPAVLRWCVYEAGKAHARGTAPDHSYYAQVKDRLGGKRAAISEARKIVRRACHILTELGDDALTTI

SEQ ID NO: 298244 - protein, 371 aa, unidentified
MKSILYVGMDVHKENYTLSCYSFDEDKLQYQQTITPDYKMVLKYLEQIRGSYSGEVEFVCCYEAGCLGYVLYHQLTEHGVKCVILAPTTMAITNKNRVRTDKRDAGNIARCLAFRTYSEVYVPTDEDNAVKEYIRMRDDQKKALKVIKQQILALVLRYGYRFIDGKNYWTIKHVEWLKSLDLGRILQESLSEYLVTYNYLTEKIVRLDKRIEELAGGERYQEKVKKLSCLIGVKTHTALSVIVEIGDFNRFAKAEKLAAFVGLIPSEDSSGEKQQRGGITKAGNTHVRRLLVESAQSYTRGAIGHKSKDLKRRQNGNMPQIIAYADKANERLRRKFYRMTLKNKTNRNIAATAIARELACFMWGLLTDNIA

SEQ ID NO: 298245 - protein, 449 aa, unidentified
MMMPQEIEDEEHERVLGRVAAVDVAKASGMVCIRVPHPSRPGKRRTRVWEAAATTGTVLGLAEQLAGEGVEMVTLEATSDYGRIWFYLLEAAGLSVQLVNARDVKNVPGRSKSDKLDSVWLAKLTERGMLRPSFVPPAEIRQLRDYTRLRTDLTRDRTRYFSRLEKLLEDSLIKVSSVASSLDTKSVRDMIEALIAGERDPGVLAGLARGKMKAKHAALVEALTGRFDDHHGELARMLLDQTGALTAQIERLTGRAGELIAGIPAARGVDAGGATGPGAGEGQDAAVRPAIARLDEVPGISRRTAQVILAGTGLDMSRFPAAGHLVSWAKLSPRTIQSGAKSTPGKTGKGSPYLKGALGEAAAAAARTGTFPGERYRRIVKRRGKLRALVAAARSILVIVWHLLADPAARFRDLGPGHYASRTDTGRKTRNHVRQLEALGFTVTLAHAA

SEQ ID NO: 298246 - protein, 359 aa, unidentified
MRNAGIHANSLLEVRRMYNAVGIDVSKGKSTVAVLQPGGTVIRKTFDVSHTSQNLNELADYLSSLDGTTKIVMECTGRYHEPMVKALSEAGLFISIVNPHLIKNFGNNSLRKVKSDPADARKIARYTLDNWTELRQYSGMDNTRTQLKTLNSQFSFFMKQKVAAKANLIALLDNTYPGVNKLFDSPTREDGSEKWVDYAYSFWHADCVRKIGLKAFTERYMSFCKKHHYIFQQDRPEKLFNASKELVAVFPKEKTYKLLIQQSIQQLNLASEHVERFRREINELASTLPEYSTVMGIYGVGKTYGPQLIAEIGDVSRFTHREALTAFAGVGPGVDESGQHKSKSNRASKVGSARHCFRS

SEQ ID NO: 298247 - protein, 521 aa, unidentified
MAVAPKTKRRTSLPTLTPRKGGLGSRVEAVGPERFGIVAVDCAKNSSRWRLADFYGRCLIPPSTLAHRAVDFDAAVNAIKKASQEQNLGDLIVVVERTGRYHLVVKRAFEKAGFEVRVIDPLATHQFRKPVHAGNKTDDTDLEAIHDAAAHGLGLVPVVWSPVFLELQDWARHRRDLVEKTTRVRCQFREHLHAVMPGYAELFDNIFNVEIGLFVALNHTAATLRVARPDQLAAAAREAGVRCLRSTLETILAWARNAPEPDDRPALHQAVLADLIADLRAKQAQIARAELALARLLSGTPYLVLLSTTGLNVVTVAEFAAEAGPITAYTHARAITGRAGLYPSRYQSGPVDRSDGPLVPKGNRRLRQAILRIADTLMRCNDHFSLLARSLQLRDMPGPKVHIAIGNRFVRIAYRMVAGGQVYRHPSGLHRDYIVQKLIKFYIQHNVNINDTLSALQVAVEHLPADSRPDEARSLTEDQARIAGKHGAGAKRLGAILPPVLARLTTHGLESTPSGELSQPV

SEQ ID NO: 298248 - protein, 409 aa, unidentified
MDVLIERGAGIDVHKKLLVVCFLIGQGNRIRKVQKRFGTFKANLIELRDWLVSEGCTHVVMESTSVYWMPVYEILEGHVSIVVGNAQHIKNVPGRKTDTSDAEWLAKLLRFGLVRSSYVPPKSLRELRQLTRYRTKATQTLTREKNRVQGLLETANIKLASVASDIFGASGRDMLEALIQNKSTPEKMALLARNKMKKKIPELTLALDGTMNDHHRALLRIQLGLIDKIDASIAELELAIEHKTAPYAKIIARLDKIPGIDCTAAVGLLAEMGPDMSVWRSDGHLTAWAGLCPGNHESAGRKKKIGSRKGNPYLKCLMVQVATAAVKTNGTYYQAKYQRLAKRRGHKRAIVAIARMILVTIYHMLTRDTHYKEITAAALERRDHNTQLRHLTRRFAQIGFDVALTPISA

SEQ ID NO: 298249 - protein, 402 aa, unidentified
MNAVGIDVSKGKSMVAIMRPFGEIVSTPFEIKHTASDIRSLVELINSVEGESRIVMEHTGRYYEVLAHQLSEANLFVSAINPKLIKDFDNDSLRKVKSDKADSVKIARYALDKWQNLKQYNVMDELRNQLKTMNRQFGFYIKHKTAMKNNLIGILDQTYPGVNTYFDSPARSDGSQKWVDFASTYWHVDCVRKMSLNAFIDHYQNWCKRKKYNFSQSKAEEIYGKAKELVPVLPKDDITKLIIKQAVDQLNSASITVESLRTLMNETASKLPEYPVVMAMKGVGTSLGPQLMAEIGDVSRFTHKGAITAFAGVDPGVNESGSYEQKSVPTSKRGSSDLRKTLFQVMDVLIKTHPQDDPVYQFLDKKRAQKKPYYVYMTAGANKFLRIYYGRVKEYLASLPES

SEQ ID NO: 298250 - protein, 349 aa, unidentified
MLHAGLDLSRRSLEVHLLAENGSTVSTMSVPPDLDGLRGLVRKAALLPGGRQVLAVIESMNGARFVHDTLELEGWQVEIADAAKVKGLAPLACKTDRIDAWVLAELSRRDLVPSIWLPDPATRSARELARWRLHLVRHRTALKNRVHATLVTFGYPCPVADLFGLKGRDLLRRLQFPEPWLGDLEAALRLIDTLNFEIATLENELKAEGADHPYVRLLLSVPGISWVLAYTIASEIGDISRFASPVKLCGYTGLCPRVYQSGQSDHRGALSKNGPKYLRWALIEAATHAASHPLYAERYQYMARRLGRQRGKKVARVDLARRLAEAIWHMLTTGEVFAPAGLKASKAAA

SEQ ID NO: 298251 - protein, 394 aa, unidentified
MKLVGIDVGKNSHHFCVMNKETGEFNVAPSSFSNNKEGFDFLINSLKTYSKKSILIGMEDTGHYHVALLKFLLSNGYPVALINPKTTDLTRKMEGGITKNDKLDTITICDVLDTPERKKQYRITKVDRFDLYEQRQLTRHHHNLKEELNVYCNRLQKSIDLVFPEFNTLFSSKYSIVYMNLLKTFGSAEAIASTDIRTIRKCFEIKGRGNRISLTPEKLKECAKNSIGISSEVETIQIKHLVSQITLIKEQIAEIDKKIEEFSITNNSPILSIPGISHFSGTSILAELGDIGNYSKPSQIIKFAGVAPYHYESSQYNAQHTGITKKGSKYLRKTLYQIILTVINNNPVFKKYYLLKISQGKGHRCAQGHCIRKLLRIIYHLLETGQSFDPALLR

SEQ ID NO: 298252 - protein, 353 aa, unidentified
MISIGVDAHKGVHVALALDEAGHELNQWQGLNNAAGWRAISQWAASLRSPRQWGIEGAWGYGRNLAQHLVAAGETVYEVNPRWTAMGRRSARKPGKTDRLDARAVALLVRQETSALPRVHAEDDTAVLDLLTSEREAAIAESTRLRNQIHALLSQTDPEYRAYLPTLKSQAALAALESYTAVGSNPLQAQRAAAIRRLSQRLRLALSQAEELAQQIKDLARRRFSPLTNLCGVNLITAGTLAGILGPGDRFATDAQLAAYAGVAPLEASSAGLVRHRLNRGGNRRLNCVLYRIVLTQAHHLPAAKAYIDRRLSEGKTRREAHRALRRFVIRAIWRLWQECQPAQIAASAERAA

SEQ ID NO: 298253 - protein, 423 aa, unidentified
MMKLKYSICCGLDVHKNVIVATIVTTNKDGISEYLQKSFSTINSDIQRFHNWLIENNCYHVCMESTGKYWIPIFNYLENDIDVCLTHPKYVKAIKCKKTDKKDSKWIADLYKFDLVRCSFIPPKDFRQLRELSRYRFKLVCMKSSEKNRIQNCMTISNVGIASVLSDPFGKTATEIISYLLEHTADSMDEKAVRKLIKKGAKSKSDEIIEAIKGYTIETDQAKKLELARGHLEYLDDMITQTEVELYVRIKPYYEFVEFVSTMPGMTELSSTIVLAETGVDMDIFDDAKHLCSWCGLSPANNESAGKKKSVRIAKAGDYLKPMMVQCALAAIKSKKQPYFAIKYGRIKKRRGHKKAIIAIARMMMVCIYHMVSEKKPFTPTDYEELMNPQNHVERVVLNENNVFAYLESLGYDSSKLVKRNDN

SEQ ID NO: 298254 - protein, 309 aa, unidentified
MSSSVGIDVSSTTLAVHIRPEDVNFNVSNDLNGFKQLVEKISDYSLSQVLLEATGGYECAALRALQQAGIPVCRVNPSRARSFAVSMGRLAKTDPIDAAVLAHFAEVLPLQRCIEMTAERALLRELLLQRDRFVQQRDDDKRRLKQAQSPSVCASLERHIAYLKLEIKALEQAIEQQGAELDDDRLLRLMQVKGIGMITAAKLVALLPELGEVDSKEIAALVGVAPFNQDSGKHSGKRSIWGGRSRVRQALYMACWSVIRHNKDFNARYSALRAQGKCAKVAVVACMRVLIVRLNAMLKSGAAWREQLA

SEQ ID NO: 298255 - protein, 346 aa, unidentified
MKKVYNKKRLFGAFDLHSNNNHLAIIDGEDNRVYRKKLPNQPDVILAELEPYRDCLTGIVVESTFNWYWLVDLLMDEGYRMHLANPAGIQKYKGLKHADDNHDAFWLAHLLRLGILPEGYIYPKEERPVRDLLRKRGHLVRLRTSLINSLQDIIYRNCGCKMGVNSIKAVKENKVEPLFDGQDDLALSGAVSKDTIDYLGRQIRQVENAVLDKVKLREEYTKLLSINGVGKILALTIMLETGTIKRFPKVGNYASYCRKVPSHWTSNGKKKGKGNDKNGNTYLAWAFSEAAEMTRRYDEHARRFFNKKAAKTNRMVAHKALAHKLSRATYYIIRDRVDYDPLKLFA

SEQ ID NO: 298256 - protein, 345 aa, unidentified
MKKIIIGIDFSKETFDATLLDCRNSELSEAVQSAVHEKFTNKKEGFKAFVTWIKSSVKKINADELLLCGEKTGKYSLPLSNFLYAKGYSIWLDSGLRIKRSLGISRGKSDKADSLKIALYAYRYQDMAVCYVPLSKNVSRLKELFLFRQHLVSQMKAMAVRKNITDDFKKELGDVRFIVDSSTKIIKQIKAIIKKCEEKMQELIEEDEELKTTHDSITSVKGISLINAAAFIAYTNNFKDFGGNAKKIATYWGVVAFAQESGTSVHKVARVSKIANKMLKSLLTQAARIAVRWEPKFRQYFEHLISRGKHQGVALNNVKNKLIHVITALAVSKEKYNPEYECINR

SEQ ID NO: 298257 - protein, 449 aa, unidentified
MSNCAGVDWASDKHDVLVEDEAGVPLLAATYEHTEAGIGGLCRALVRLAVERVAVERPDGLLIERLVEAGLCVLALHPNQVKAARARFRASGGKSDRFDAFVLCELARTDHHRFRVLAPDRDETKALRAMTRAREDLIGARVALANQLRSELERFWPGALRIFADIDSPIALAFLERYPSPADARALGHKRLAGFLARQHYSGRRSPDQLLARLRTAPVGRAGQAETEARRGVVLALVATLKPLVEQIAQLTREIAHAVRSHPDGPIFLSFFRRPDSVICAATLLAEIGDCRARYPTGDALAADAGHAAIAIESGKRKVAGFRYACDHRLRDALSVLADSTRHWHPWAADRYAAARARGHDHPRAIRTLGRAWCRVLWRCWQDHTPYDPARHRGLQDHIAVTIPDTSSPRLDVTATQRMLGAAVTHRAGRRPEREALDGKPTTATPLGG

SEQ ID NO: 298258 - protein, 336 aa, unidentified
MVIIKQSVGIDISKDTFEVTFKEKNEKGISIKGVKKFEMSATGFSHFLEWCSKRERSENIIYVMEATGIYHEDLLYFLYQNGKHVSVELPQRIKHYTKSKGVKTKNDKIDSGIIADFGLERELRMWQAPSPEFKLLRDLSREHNHITQSKVASQNRLHAARYAHEKIPKLLELMQEQLNFYAQMLEAIEIEIKKVVKEDTKLNAKVEKISSIKGIGVLTVVKILAETGGFYLFNNINQLISYAGLDVIEDQSGKHIGKTRISKKGNSNLRTALYMPALSAIRYCEKMKEFNERLMETHSYKKQGIVAVMRKLLILVYTLWKKDEEYNPNYVWGKVD

SEQ ID NO: 298259 - protein, 392 aa, unidentified
MIYVGIDAAKRKHDCCILDPQGKPYPVFSFSNSHDGFQSFFQKLFSICSDKGQIKIGLEATGPYSENLFNALVDRSLPVLRINPLLVKNFKSSMSLRRTKTDKVDAQAIAQMVKEKGDSLQTYSTSLYHMEELKSLTRYRSKLVNERSKLLVSISRLITILFPELESLVSSLHLASIQALLMEWPGHQQLADCSLRRLTSLLKKHSRGQFGKPKAIAIQQAARQSIGKVSPSKSLELRQTLKKVAYVQQDIAEVDAQIKEMVDSLHSPILDIPGIGYTTGAMILAEVGDFNRFANADKLLAFAGMSPSKYESGEFKGTTGKMEKRGSSYLRYALYTAAKLVSQFAPQFKSYYQKKRAEQKPYNVALSHVAKKLTRVLYKLGTTGEAYQPQAA

SEQ ID NO: 298260 - protein, 343 aa, unidentified
MQAITTIGLDIAKSVFQVHGVDAAGQVVVRRQLKRRYVLAFFEKLSPCLVGIEACASSHHWSRELQALGHTVRLMPPAYVKPYVKRQKNDMADAEAICEAVTRANMRFVPTKTPEQQSGLMLHRARHLFIRQQTAVINAIRAHLGEFGIVAPVGRNGVEELLEVVADPSDKRVPEIVRACLAALGAQLRRLKEQILEFDRMIRAWHRSSEMSLRLDDCPGIGPVLATALAATVADPKAFRSGRNFSAWIGLVPKQHSSGGKNRLGGISKQGDRYLRGLFVAGALAVIRYAKIHGTKHRPWLRALLARRPTKVAAIALANKIARMAWAMMAKGERYKEPVALAA

SEQ ID NO: 298261 - protein, 411 aa, unidentified
MEQIHGRVAGLDVHRDQVAVCVRTPGPRGGVQTQKARFDTTTGGLAALAEWLAGRAVTLAAMEATGVYWKPVYYALEDRFLVWLCNAHHVKNVPGRKTDMSDAEWLADVAAHGMVRPSFVPPPPVRELRELTRYRKTQADARAAEIARLEKVLQDAGIKLTSVASKVLTQSGRAMVEALIAGERDPAALAELAKGKLRPKIPQLTAALHGHFGAHHAIAASRILAHLDFLDQTIAALSGQIAARVAARYQSAARLLAEVPGLERASVEVIIAETGADMSCFPSPAHLASWAGLCPGNHESAGKRRKVATTPGNPWLRRTMIESARAAARAKDSYFGAQYRQIARRRGPNKAAVAVAHSLLDVIWHMLTTGEVFTDLGADYFTSRQDKEHQTRRLVSQLEKLGYTVQLAAAT

SEQ ID NO: 298262 - protein, 410 aa, unidentified
MKVAGIDVHKKVLMVVVVDATAPEEKPTRRRFVTMPSELHRLLTWLREQAVEEAVMESTAQYWRSVWLELEPHMRLHLAQAFSNRAPRGRKHDFKDAERLVRRLIADELILSFVPSGEQRIWRSLTRMKLQLTRDRVRLQNQIECLLEEMRIKLSIVVSNLLGASGLRILHALANGETDPKRLAQLGGERLQCTEEQLVDALTGRAQPVHGAMLALQLERLQLIDQQMERLNSMIAAAMKPQQDAVMRLAEVPGLGVDSAQQIIAEVGAQAGTFASAAELTSWVGTCPGKEESAEQNHSSRSAKGNKYMRRVLNQAAHAAAAKKGSHFQIVFRRLLPRLGYQSAIWAVAHRLCRLVWKILHEGVRFIEKGAEVHPREKKKRAQMLARALRKLGYEVTITPLNQLVPKPAV

SEQ ID NO: 298263 - protein, 405 aa, unidentified
MTFILALDVSKGESYKVVYHGTHCLSEGKIKHNQVGFQQLLQEINSLSETPEIVFEATGVYSRPLEKFCQDNHFAYCLLNPLEAKKQMEEGSLRSWKTDKIDAHKLAQTHQKNQREATRHQPAPYFELRDLSRFYQEIEVKISQVRMDLHNGLQLTFPELEQFFSSRMTSYALSLIELFPHPAYVLASSRTKIKNRLMKMTRKRISENRAWQKADQILDYAVTSYPAVEMDSIHCQKVTYYAKLLQDLLEQKEQLMAQMIEVAQTLEEFELFQSIPGIGATTAALLIGELGDIRRFATSNKLNAFVGIDIRRFQSGKYSGKDHINKRGNPRGRKILYFTIRNMIRQQRAAPNHLVDSYYKLKKQPTPKKEKVATVACMNKLLKCMHSMVRNHTTYAYAYTASNDQ

SEQ ID NO: 298264 - protein, 322 aa, unidentified
MSVSVLGIDIAKQKFDVALLVDGKTKHKACKNSAEGFENLMLWLEKQGIQKVHACLEATGNYGEDLAIYLHEAGHIVSIVNPARIKGFGQSELIRTKTDRIDAALIARFCLAMKPEPWIPPSPEIRTLRALVRRADSLIDMRSQEKNRISTAHESVTFLIKEHIAYLDQEIEKIRKQIAELIEHDPNLKQKKDLLDSIPGLGKVTIPTILAELDDLEKFTHVREVVAFIGLAPKETLSGSSIKGKPRLCKIGHTRLRKALYMPALVSIQCNPVMIAFYNRLKEKGKNGKVIVCAIMRKLVHIIFAILKSGKKYDPNYKPASA

SEQ ID NO: 298265 - protein, 353 aa, unidentified
MQKSKSLQFQDQSFFIGSDVHANNWKITIRNNGMHLKQFSMNSSPRELYNYMHKNYPGGTYFSVYEAGFCGYWIHRELTNLGFHNIIVNPSDVPTKHKEKDQRRDKIDSNKLSRELNNGSLEGIYIPTKEQEALRCFSRLWYQLTKRNTQIKNRIKAFLYYHGIELPRNCEILHWTGRFIAYLNSIHFENEMNNIVLKEHLKEFEHIRLKRLHYLTKMREYGRQQPIIKLLRTVPGIGIITSFVLYAELLDINRFPNEDCLASFVGLVPSVESSNDKDTIKGITARHCRYLRYLLVEASWQAVRVDPALTNTFNQHIRRMKKNRAIIRIAKKLLKRIRSVWINKKAYVLSTVQ

SEQ ID NO: 298266 - protein, 347 aa, unidentified
MTIVEDARAITGGVDTHADIHVAAALDPIGGLLGVREFPATAAGYAELPGWLRSSGTVALAGVEGTGSYGAGLARYLAAAGVRVVEADRPDRQDRARQGKSDPLDAVSAARAALSGRASGAPRGGDGAVEAIRALMVAKRSARQERTRAVNQARALIMTGPEELRARFARHSPAQLIAAIAALRPRPGDVPGHATRVALREPVRRARFLDGQLDRLDELIGPLVTARAPGLLALHGVGPDTAAMLLVAAGDNPERLRSESSRAHLCGVAPIPASSGKTAGRHRLNRGGGRQASSALWRIVIVRLRSHPATRAYADRRSKEGLPKTEIIRCLKRYVAREVYRQLRDDA

SEQ ID NO: 298267 - protein, 357 aa, unidentified
MPSSNVKYIGLDVHTEATTVAVRNAAGKLVMESIVETKARTLLDLLEGMRGELHVTLEEGTWAEWLYDVLKPHVQEIVICNPRRNALLKEGSKDDRVDARKLSELLRTGMLRAVYHGQHGLRALRELVRSYEAVSKDVRRVMNRVKAIYRGWGIPCRGTQVYSRRHREQWLEKIQETGVRRRAELFYQQLDALRDLRHTVRGELLVESRKHHAVKLLRQIPFIGPLRAAQLVALMQTPHRFRSKRQLWTYSGLAVVTHDSGQYRYVNGQLQRSKKPQQVRGLNQNHNHMMKEIFKSAAESASRRAAPFQDFYEGLLAKGMEPELARLTLARKIAAITLTVWKKGESFDPRYVKPQAA

SEQ ID NO: 298268 - protein, 459 aa, unidentified
MNHGHRNKAVNEPRDWSLNLEVVHPNAAGIDIGNESHYVAVSPDRDPAPVRQFACFTEDLRRLADWLKSRGIVTVAMQSTGVYWLPVYEILTEEGLEVFLVNARHTKNLPGRKTDVQECQWLLQLHTFGLLNNSFRPPEEICVLRAYWRQRGEHVASASACIQRMQKVLTEMNVQLANVISDISGLTGMAIIQAILDGERDRYKLADLAHARIHATREEIARSLEGNWRKELLFILQQERNLYLIYQQQIAECDTALAAHLQSLDNKSKPGSQPPATRASKRAGSNAPTGFDLRGELYRISGTDLTQIEGINIMNAQTIISEVGIDMSRFPSEAHFASFLGLCPDNQITGGKVLRRGTRHVENRASTALRMAASSLSRSKTYLGAKFRRLRARLGAPKAITAMAHMLARLVYRMLKYGEQYVDKGMNYYEEKYREHEIRSIQKKAKELGLEVTLNPAVA

SEQ ID NO: 298269 - protein, 355 aa, unidentified
MTALADKVDGVIGVDTHRDTLSAAAVTAVGGLLGQLVVAADAVGYRRLLAFARIHVPGRRCFAIEGAGSYGAGLARMLVDGGEWVVEVDRPTRPARRSGKTDALDAVRAAREVLVQERPAVPRRRGDREALRVLLATRHGALVARTCAINQLKALIVGAPQELRAELRSRSTSGQVAYCAALRDRPARSLEHRMTARALRATAQRTRALATEAAELHDDIGRLVQAVAPWLLELPGLGPISAARVLVIWSHAGRLRSEAAFAALAGVSPIPASSGQVTRHRLNRGGDRRLNRALHTVALVRLRDDPTTRAYAARRRAEGKSPREIRRCVKRAVARHLFKLLCRYDRPEVEIVRTC

SEQ ID NO: 298270 - protein, 410 aa, unidentified
MQVLYPCCCGLDIHKKFVVACLLTTNAEGHVQKESRTFSTMTHDLLAMLDWLQAAGCTHVAMESTSSYWRPIYNLLEGQFILLVGNAYHMKTVPGRKTDVKDAEWIADLLRHGLIRGSFIPTPAQRQLRDLTRYRTHLVEERARLTNRLQTVLEDANVKLASVVTDIRGASARAILSALIAGETNPTALAELAKGRMRSKREILAQAVVGHFTPPHAFLITEHLSQLDYLEESIARVSAEIAQRLADDQAALELLDTIPGVGQRAAEIILAEVGTDLTRFPSAKHLASWAGICPGHKESGGKRLSGKTRKGNIWLRHVLFEVAHAASKTKDTYLSAQYRRLAARRGKQRALIALGHSILVSAYHILTRRVPYRELGPLYFDALDRQRVQQRLVQRLERLGYTVTLQPLAA

SEQ ID NO: 298271 - protein, 404 aa, unidentified
MQDRTGGIDLASEEHRLVVVDADGRDREERRYAHSEGGLDALMRRLVALGVARVAIEQPNGVVVDRLLDAGISVVAVHPNQLAASRDRYRAGGGKSDGFDAYVLAELARTDMHRFHLLVPDSDETKALRALTRTREDMVEQKVALANQLRAQLDAFWPGARRIFADVDSPICLAFLERYPSPADAQSLGESRLAGFLARNGYCGRKTPTELLTRLRSAPEGRAGEAELEARRAVVLALVASLKPLVEQIKLLTSHIAGAVRAHDDGGIFLSLFRHPKSVVTAAELLAEIGDRRERHPTSASLEAIAGQAPVAVQSGKKKVARFRYACNKNLRTAISVLADSSRHHNPWAKDIYQRARARGHDHPHAIRILGRAWLRVIWRLWQDHSTYDPARHGSLNRLLTAEG

SEQ ID NO: 298272 - protein, 337 aa, unidentified
MHNRQNYLYVGVDLHKEHHTAVIINCWQEKLGEIQFENKPSAFSKFLLEVETYVSAGVSVVFGLEDVGGYGRALAKYLVDHEQVVKEVNPVLSFLERKSHVTTQKSDSWDAECVARILINKLNQLPDAKPNDLFWSIQQLVSRRNALVKAQSALKNQLHIQLNHHYPSYKKFFSELDGKTALAFWQQYPSPSCLEGTNIKQLTAFLLDVSNNTCSVKKASDILKLVKEDGHTMKEYQETRDFLVRSIVRDIEFKKKEMKYIERELKQLVNLLDYQLETMPGIELVTASALIAEIGDVRRFSNANKLARFAGIAPVYFGSGGKGKTHKSKQGTTRFIL

SEQ ID NO: 298273 - protein, 340 aa, unidentified
MNTFYVGLDLGSTFCYQCVMDPGGSIVRSRPVPTSEKHLRSAFEGLDGDLLVHTEAGELVNWVVDVISPLVRRVVVSHPRTLAWIAKDALKNDKLDARKLADLMRSNLVHEVYLPQHNRRTFKQIVRHYDEATRAQAKCKAKLKARLRCQGIIRRDAKVFDENERKTVLADITDNYLQQMFRQFYATLDALIEDRAEAKRLMIETAKQFPEVELLKTAPGVGIIGACRFVAYIQTPARFANKRKLWRYCRLGITRRSSDGKLLAHPRLDINGCGALKDVSRKAFDAAMRCKQDNSFKRAFEQTLSNTNDKVHARLTVQRKIVACLRAMWLNKQPYREDLP

SEQ ID NO: 298274 - protein, 346 aa, unidentified
MLYAGLDLSRRRLDFHLLDGEGATVEVGAAPPDADGLLGLTRRLDRHREPIQAAIESMNGARFVHDRLELQGWQVEIADAQKVKGLAPLACKTDRIDAWVLAELTRRDLVPAIWLPDPMVRAERERARWRLHLVRHRSSLKQRVHAVLLTHGKPCPVSDLFGVRGRQLLAKLGLPEPWQGTIEASLRLIDELDREISECERELRRLGADHRYVPLLLTVPGIGWVLAYTIAAELGDISRFASPRKLAGYTGLCPRVYQSGERDLRGPLSKQGPRYLRWALVEAATHACTHPVYRDRYQQTKTRIGKQRGAKVAQIDLARRLSEAIWHMLSRGEAFAPKGATDPLAA

SEQ ID NO: 298275 - protein, 329 aa, unidentified
MSEVVVGLDVHLKSTQVTVMKLNGEIVKRERVNTSRAELRRCLASVPKGSRVALESVGFCWPWIDFLRELEFEVLLANPLKVKLRAEDVKNDKVDSRTLAHLTRMNWLPTCYVPPAELRWLRSLLRHRAFRTRLSTGVKNRTKSEFRKRDIALKVDLKTKKGRKAASELSVFEVNQNVELLDLMDRQSKEIEAMLKRKYGQLKPVQLLMTIPGIGFVSALTLYAEICDIKRFSNPEKLAHYAGLVPKVRQSGEHTGMGRESKGDKWLKWILIEASWSHVRYCSEGRLAQVFWDTYRRKGNKKDAIKVVARKLVNVVWAVWTYEKEFMVK

SEQ ID NO: 298276 - protein, 338 aa, unidentified
MEREDIQTQVARQRRIEHAPDAIRAALRGCDADTPVAVEATGNWYWIVSEIEQAGLRPLLVHPRKAKLMMGLINKTDKLDVHGLNRLQRNGTLPTVWIPPADLRDLRELTRTRLMLSAQRTRLKNRLTATLAKYGRQHSEFTDAYGPRARTELRQRLEALPTQTRFVSELLLQQLDFVQQQIQTIEQRLQQLVQITPEMQLLQTLPGIGVILAATIALELGQIERFASAAHLASYAGTTPRVHASGDKTRYGALRTDINQYLKWAFVEAANSALSASCIGASACARAMAKPLGRSLATWPRRRFTYAVGGKRIGNRQKVDPRQCKRDPLMSRPGGLDR

SEQ ID NO: 298277 - protein, 458 aa, unidentified
MPNKSSNKAKSQRSRERALLQKVHLNAAGIDIGADAHWVAVPEDRDGYPVRSFGVFTRDLTALCDWLKRCQVETIVMESTGVYWIPLYQMLERKGFEVRLVNAHHVKNVPGRKTDVKDCQWLQQLHTFGMLGGSFRPQAQMCVVRSYLRLRDTLSKDCNSLVQRMQKALTEMNVQLHRVISDITGVTGMSILRAILAGERDCLKLAQLKHPQIKSSAQDIAKALEGDYCQEHLFALETALELYDSYQLKIMACDRHVQDALSAFEPKASAPVPDLNRMRSAEKRQEALRRHHLEEMTGADLTKLPGLDLLAVERILSEIGLDMSRWPSEKHFCAWLNVAPNNRISGGKILSSKPRKNANRAAAALRLAAQSAMQSKSAIGAFIRRIKSRLGAPTAINAGAHKLARLVYRMLKFGKAYVETGQEAYEKLFKERTLRNLQRKARQLGFQVIPITAAVLVS

SEQ ID NO: 298278 - protein, 402 aa, unidentified
MNCVGIDVSKGKSMIAVMRPFGEVVVSPFEVRHTASELSELARLLKNLDGETRVVMESTGNYHAPVAWLLHDAGLYVSVVNAMLVHDYGNNSLRRGKTDKKDAVKLANYGLDHWLTLPRYVPEEDTRLMLKTCYRQYQQYSKVQTMLKNNLISLLDTAFPDANRLFTSPPRADGSEKWVDFVATFWHCECVCGLSKKAFTAKYQKWCRKHGYNFSQDKALDIYASACGRFGVMPKTNTAKLLVEQAISQLQTTSAALAALKQEMQSLAASLPEYPVVMEMFGVGPTLGPQLIAEIGDVRRFHSKKALVAFAGIDAPPYQSGQIDVRSRSISKRGSASLRRTLFLVMGVLLQCAPMDEPVYQFMNKKRSEGKPYRVYMMASANKFLRIYYASVKAYLDSLEHD

SEQ ID NO: 298279 - protein, 408 aa, unidentified
MNQLYVGIDVGSAKNAAYLMMPDGSKHSSFSVQNNLGGAKLLTEKIVSALTERDLSSVTIGMEATSVYGDTLVYALREDGRLGRFERKIHVLNPKQVSKFKEAYPDLPKNDDVDAFVIADHLRFGRVNREVYMDDYRYKALQTLTRARFGVVQALTREKQHFANYLFLKCSGLAQDGDITNTSATTLALMERFATVDELAYADLVELTAFIQTTGRGRFANPEATAKAVQAAARGSYRLPKTVNDSVNQAMSVSIATMRALEAQIKTLDKAIEQQFEIIPNTLTSIPGIGKVYSAGIIAEIGDVNRFQSQASVAKYAGLVWTQHQSGNFEAQHTRLIKSGNRYLRYYLLEAANSVRRCDSEFRRYYDLKFKEVNQYQHKRALALTARKLVRLIFRLLKDNRLYKRPEG

SEQ ID NO: 298280 - protein, 364 aa, unidentified
MAIVGGLDIHRRQITYDWIDADSGETCRGQLSPAARVELRAWLARFTGQQADFAVGATTGRRFVAEELGRAGFRAHLAEPADTRALRGPKRRAKTDRTDARHLRELLRAGTLPESWPPPAHVADARTQVRLRRALVGEHTGWYQRIHAILFHHGLPDRSGLLTADGRAWLARVELPPVARQAVDLALRMIDQLEVELDLLDTQLARIARGQPGCQALQRRYGVGWLTAVAIWAEFGDVRRFANSRQAVRFTGLDVTIRSPTASAPAATSPARAPRCCAGHCTRRPCAPRALAPPTTPTTSRSNSGWAASAPRCRWPASSPARPTTPYASSATRRWSLPNSQPPPELATIARTWAPPSLMGVARL

SEQ ID NO: 298281 - protein, 445 aa, unidentified
MSDATLSTKIAEPEWAALVAIDWADQKHFWRLALTDSGQQEHGELENTPEAVDTWAAELNIRFGGRPIAVCLEQSRGSLVYMLAKYPHLVLFPVHPKTAAQYRETFCPSGAKSDPSDTASLLDLLQRHRERLRQLQPDTSETRLLQLLVETRRCWVNEKTRQKNRLTACLKRYFPQVLQWFDKVDSALVGALLQRWPNLTELQRAHPGTLKKFFHEHNCRDEERIQERIAGIQAATPATVDAAILEGEAFNARGLVGVMATLRSHIDELDQRIAQLVAEHPEGSLFGSLPGAGAALVPRLIVAFGTRRERYDSAYQIQCYSGIAPVTEASGKSQWVHFRRACPRFLRQTFHEFASHSIRYSEWARAFYDSQIDKKKSHHAAVRALAYRWIRIIFRCWKDGKPYDEQTYQRSLQRRGSPLIGSFAPATGAGWKTVAGFQKLSQENS

SEQ ID NO: 298282 - protein, 300 aa, unidentified
MSNSYKIPANPENLYQHIRNRYNNQRVICAYEVGVTGYHLHDYLTSQNIRCLMVPPQSVPKASNDRTKNNRLDSDRISQHLKNGDMESIRIPDYDYRELRQLLRSREEYVDLRKVSKQRIKSLLLFAYLHTLLKDTTQYWSYAHIKRIKELPYSPATRKRLDLLLNDLDYSRNQTVIIIKELKSFSDQNASLKRNIHYLRSVPGIGFITAITILASIGDPQRLRNPRELSAFVGLVPSEYSTGERITRGRITHLGSSVLRSLLIEAAWRILLKMHACASFTTVSALSTIHRLARVRSLLR

SEQ ID NO: 298283 - protein, 341 aa, unidentified
MDQISTIGLDIAKSVFQVHAISQAGEVVVRRQLKRRQVLQFFAGLRPCLVGLEACATAHHWARELMKLGHEVRLMPPRYVKPYVKRNKNDAADAEAICEAVTRPTMRFVPIKTVEQQSVLMLHRTRQLFIRQRTTLINSIRAHLAEFGIVAGIGRNGVEALLQLIAKGEEDSIPTEARSCLMALATQLELVKRQILEMDRRVLAWHRASSLSRQLEGIPGIGPLVATALVASVPDPAVFRSGRDLSAWIGLVPKQSSTGGKEKLGSISKAGNRYLRQLLVVGALAVIRRAKQLGYTRHPWLVRLMERRSVKVAAIALANKMARTAWAMMARGEPYRASLPA

SEQ ID NO: 298284 - protein, 416 aa, unidentified
MEEVTDEPLYRDRVCGIDIGKAGLVATIRVPSDANPVRRASETRSFGTTRREVLALADWLRSWQVPAVVMEATGDYWKGPFYRLEAEGFECVLADARQVKNRPGRPKRDPADSRWLAACFERDRRDLTEERTRDKQRAEKLLESAAIKLSSVVTDLHGVTGRDIMDHLIAGERNPKVLAQLARTAARRKISQLQEALEGAEFFTEDHAALLATMLGRIDRVNADIDQLTAVIEQLLAPYEEQLHQAGSMPGWGHRAAQDALAETGADMARFPTGAHLASWAGRTPVDHQSGTRKGRARAKKGNRYLAGITGETAVAAGRTQTREGARYRRLARRRGKAKAQVALGNTQLKVYHKLLSSPGMRYQDLGADYYERQASTRRQIAHHVGKLGALGFEVTLCRIPEPDPDPGQTDSPQAA

SEQ ID NO: 298285 - protein, 362 aa, unidentified
MKYIALDCHKQYDYATMIDTETGEIKNRKLAHIKEEYREFIGDRDGTRMVIESCRDWSKSYELSEDLIEEIILAHPLKVKAIASARIKTDKIDSQILARLLIADLIPQAHLRKRDNRVKQGVIRHRAFWIVMRTRVKCRIHDLVDSQLLPPEVLKAKPRSLFSKKGMKWLTSLQWAREEDKKMLESCLRVMESINKEISVSNEMVKDIYQKDKNAQLLATIPGIGVTLATLISTEIDDIERFPSVSKLCSYAGLVPSTHSSGGRTYHGKITSEGNRWLRWALVEAAVPASYADAEIKERLDTFRKRKGANVAKTTIARWLLKVVYHVLKERRPYITAYNKLARNRSRLLFRLANLQMVDCAV

SEQ ID NO: 298286 - protein, 439 aa, unidentified
MEKYYLGIDASKGYADFVLISENRRFIEKGFRLNDTFDGHNKLFEIISRYIDYEINAGIESTGGYENNWYHMLKKVRRNINIKVARINPYAVHHSAKANMRRVTTDKISAMNIAEYMIAHKNTLRFENQDPFGSLRKQWKYVALLNKQRTQIINQLHSLLYTSHPQLIKHCRGVIDQWILKLLIQYPTANKLSRARISTLAKIPYLSERKAASLVNDAKQTVASSTDNISAQLVKSISLKLLDVESEISEQFKLMRSNCDLPEVELLTTFVGIGEKAALGLIMEIGAIERFSSAKKMASFFGLHPIFKVSGDGMGGVRMSKHGRKEPRKILFLVSLSAIQSNDYIRSIYLSSLDKGMSKMAAIGKIMHKIMRIIYGMLKTQMPYDPAIDQFNRNKEITVKQDINNWEDYRYQVADNDAPISNRQYKKRKRQKESQLVNQ

SEQ ID NO: 298287 - protein, 330 aa, unidentified
MRLYIGVDFHPHRQTVCWMDEETGELRTKELLHNTEEVKGFYKAMRPSVVGIEASSQATWFEDLIFENGHELVTGDAALIRKRAVSRHKSDKRDAEHILTLLMNGEFPALWRRPRESVDLLEMIRLRHSFVRQRTQVRNRLQAMAHEVGIRKGIIRTARFQKLLLEAEMNEVQAMRRDHLFRLTESLNVQIGEFDEWLKAKAEEADKVKLLLTQRGVGYLTALCMVHTLGDVHRFTRTRQITAFIGLDPLERSSGSRVRFGRISKAGSSLLRFLLGQSANIASRHDSRLKSFYKRLAKKKPKAVAKTAAARKLAVKLSIMLRDSRPCRGV

SEQ ID NO: 298288 - protein, 344 aa, unidentified
MKNSNVIGIDLAKNILQVCKVSKHGELIVNKAISPGKLKELLATSSPSIVAMEGCGSCHYWGRLAKEFGHEVRVINPKKVKAFLQGQKTDANDALAIAMAATQFGVRFSLVKSEEQQMLQTLETSRKFLDKELTALNNHIRAYLYEYGITMNKGRKSLRETVALVLHHLDTRLPLCLKNTLKLLWERYQLTLTQLKETKAAKAALVKQVEPCKRLLALESVGEVCAAMLYANIGDGKEFKNGREASACIGLTPKQHSSGGKTHMMGIDKKGGNKELRAALYQGALSVISRLPDEAQTVKQAWLQELVKRVGVKRACIALANKTVRTAWALLATGESYQPVLLNR

SEQ ID NO: 298289 - protein, 390 aa, unidentified
MGYAVEKKKYYGTEPQPRRQVMKKHITFIGLDVHKNSISVALADGDRNGDVRYYGTIGGTLADIDRLVKKLTSSSRELRFVYEAGPCGYDIFRSLTEKGYVCAVVSPSYIPKKPTDRIKTDRRDAMMLARLHRAGELTYVFVPRAEDEAMRDLTRARQDAVKAQRLARQHLGGMLLRLGFRYQGKTAWTPAHFGWLAAQKMPRPSQQVVFQEYINAIEETTKRVERLTQQIEDLMPSWRMAPVVKALHALRGVSRIVAATMIAELGDLTRFENPGKLMAFLGLVPSEHSSSQKRRQGAITKTGNGHALRVLVEAGQAYSYQARITPPLLKRQEGASQEVKDISWKCQVRLCARFRRLTAAGKNRNTVVTAIARELAAFMWAIAKQIPISA

SEQ ID NO: 298290 - protein, 338 aa, unidentified
MMNVVTVGLDLAKNVFQVHGVDADGRVGVRRKLRRAEVLRFFSALPRCLVGMEACASSHYWAREIGRLGHEVKLMPPAYVKPYVKRGKTDASDAEAICEAVTRPTMRFVAVKTEDQQAVLMLHKARELLVRQRTMLTNALRAHLAELGMVAAQGPEGLSSLKGHFHSVRDGLPDHAVVALSALVCQADDLAEQVDILERKILDWHRSSDASRRLTTIPGIGPITASAIAANVPDASLFRSARQFAAWLGLTPRAHSSGGKDRQTGISKQGDGYIRRLLVSGATAVLRFTRQGDPGKAWLLQLKERKRPKVVAVAQANKTARIAWALLRRNEIYAAPAP

SEQ ID NO: 298291 - protein, 344 aa, unidentified
MDHFAGLDVSVKETSICIVDDTGKIAREVKVASEPDALLAVLTNPAYHFKRIGLEAGPLSQWLYSALAEADLPVVCVETRHMQAILKAQINKTDRNDARGIAQMMRVGLYRPVHVKTLRSQKLRMLLTHRKLLQSKAIAIENDLRGTLRNFGLKVGMVGKAKFEARIKELVENHPDLTILVEPLLIVRRALREQIVILHRRLLTIVRDDAVCRRLMTTPGVGPVVALTYRATVDVPARFRKSKSVGAVFGLTCSKYQSGEIDRNGRISRCGDEMMRVMLYEAAQSMLHSKKWSWLKAWAMQIARRRGMKKAIVALARRLAVIMHRIWVDGTEFRWTREQAAAAA

SEQ ID NO: 298292 - protein, 343 aa, unidentified
MKVTTIGFDLAKNVFQVHGVDERGHVVVRKQLRRDQVASFFANLPPCLVGMEACGSAHHWARKLQGFGHRVRLMSPQFVKPYVKSNKNDAADAEAICEAVARPNMRFVPTKTMEQQAVLSVHRVRQGFVKARTAQANQIRGLLTEFGLVLPQGISNVMRGVPQLIDAATDLPASMRQLIARLLENMKALDRQVKELEAQIKAWHQGSELSRKLEKIPGVGPLAASALVASIADARSFKNGRQLAAWLGLVPKQDSSGGKPKLLGMSKRGDTYLRTLLIHGARSAIVAAQRKGKPNVWLSRLLARRHPNVAAVALANKNARTIWALLAHEREFRPDYVPRLATA

SEQ ID NO: 298293 - protein, 462 aa, unidentified
MALTLGIDVAVRAAHQATLVRDGTTVWRGCKFSTRPTDLERLWSALDLADPGDLTVVVEPTRNAWIVLAEWFRRRGTRVVMVPTTQSADLRKYYSKHTKNDRIDSELLAGLPLLHPEGLREYSGQGPADPLRRLVKQRSTMVKRRVAVYARLDALVELLGPAWYAVLGSNYGIAALEFLARYADPNVVVRLGQGRLSRFLSARSRGAWREDHAAGLIVAAKETLALWGSEGMNFAELAEDIAHEAEQALYLTRQIKQIDERVANLYADADPDGIVASAPGVGPVISAVIAGRIGDPHRFTSLAAIRAYTGLIPKISQSGLSKIESSITKAGDPLLREMLCTAADQARKVDPQIAAKYQRLMTGDRHHDSAICHLATMLVTRIATCMRAGQPYQLRDVDGTAITESEARAIVKQRYQLDPRQRDHVRHKLMRERRKRPARSHRSRQALQHPIPLNASLRRAPN

SEQ ID NO: 298294 - protein, 350 aa, unidentified
MKKIVKQVVGIDVAQKLLVVCLGRMYDDWSPELYANKVFANTTKGIAALVLWVKKQTDPHLAVRFVMEATGVYHEVLAYFLEEKGYEISIVLPNKISNYMRTLDVKTVTDSTASQAITMFGLERKLDIWKRPKEIYRKLRQLTRERDQLIGERTMVKNQLHAEQTEAYPNKSSVKRIKDRIKMLDKQEKEIMKEVAAMIAQDNELRKMIVIICSLPGIGLLTAAVVLAETNGFDLIMNRRQLASYAGFDVIEKQSGTSVNGKPRISKRGNKYLRKAMHCPALTAIRHNERFKAIFARLVAKHGIKMKAAVAVQRKLLEMIFILYKTGKRFDKDYLIKTKTQKSEPELINN

SEQ ID NO: 298295 - protein, 377 aa, unidentified
MKRIKFVGLDVHAETISVAVAEQDGEIRPLGMIANREESIRKLVKKLGPVEELWFCYEAGPTGYVLYWQLTRMGAKCEVVAPTLVPVKAGDRVKTDRRDALKLARNYRAGELTAVWVPDAAHEALRDLVRAREAAKQDELRARHRLSKFLLRHGRRAPMGVKAWTMKYLEWVKREVHFEQMAQEATLLDYLHEVEHGAARIARLDNAITEAVKSAPPQMRAVIEALQALRGIAHVSAVTVVAEVGELSRFARATQLMAYGGIVPSEDSSGERTRRGNITKTGNAHLRRVVVEAAWAYRHRPSVGAKLRKRQAHVSEEIKEISWKAQQRLHQRYRKLLAKGKSKGVVMTAVGRELLGFIWAIGIQAETAQKDPLRRAA

SEQ ID NO: 298296 - protein, 344 aa, unidentified
MEHFAGLDVSVKETSVCIVDEAGRITREVKVASTPEALMQVLRAPAYHLKRVGLEAGPLSQWLFGALAEANVPVICVETRHMRAVLKAQINKTDRNDARGIAQMMRAGLYRPVHVKTLRSQKLRMLLTHRKLLQSKAIAIENDLRATLRNFGLKVGVVGTAKFEARIKELVGDDPDLVLMVEPMLIVRRVLREQLAILHRHLLALARDDGVCRRLMTVPGVGPVVALTFRATVDVPARFQNSRAVGAVFGLTPCKHQSGESDYTGGISKCGDEMMRMMLYEAAQILLIRATKWSWLKSWAMQIAKRRGVKKAIVALARRLAVIMHRIWIDGTEFCWIRQKAVAA

SEQ ID NO: 298297 - protein, 344 aa, unidentified
MKITTVGIDLAKNVFQVHAVNEVGKKVFNKQLRREQMAEVFAQLPPCLVGMEACGSAHHWARKLTSFGHTVRLMAPQFVKPYVKSNKNDMADAEAICEAVARPNMRFVPIKDVEQQSVITLHRVRQGFVKDRTACSNRIRGLMAEFGLVIPQGIANVAKRVPELIEDASNELTGMFRQMIDRLLQHMLALDRQVDETEALIKAWHRQSKASRKLEAIPGIGPITASALVASIGDANNFDNAKQLAAWLGLVPRQHSSGGKNNLLGISKRGDAYLRTLLIHGARSVIYARQKSPEKAGWLDQLLERKKLNVTAVALANKNARIVWALLTKGRAFQLEYQRAQVLA

SEQ ID NO: 298298 - protein, 361 aa, unidentified
MNHLGIDVGKRKCRTAIKDDRGKILDEFFFGNDKNGIDNLLSRIQANETSHTITTTTTQAVLESTGNMWIRIHDTLEENGIDTLLANPYKTKIIAEAKIKSDKLDARILSDLLRTDLIYESYVPKQEDRDKRSLVRHRITLSRTKTKLINKVHSILDKYDYKTGLTDIFGISGIEWLKSLLSMVSPIDRIILTTSIESIQTINQQIDVVSKEISKYACRKDKDVKVLLSITGIDIFSAMLISSEIVDVKRFSTPWKLVSYAGLAPSTRESAGKTITGRITKQGSPWLRWILVQCALTAVKYDAHLRTFYDRIKNRKGHGKAIVATAKELLVIIWYMLTRNELYRYMNKQRYQQKLRKLEHH

SEQ ID NO: 298299 - protein, 345 aa, unidentified
MELHTIGIDLGKTVFHLVGLNQRGEVVVRKKFSRKQLLHFTANLQVKLIGMEACGGAHFLGPALKEQGHEVRLMPAQYVKPYVKTNKSDYIDAEAIAEAVERPKMRFVPIKSDDQLDLQSLHRVRERWVMRRTAVINQIRGLLLERGITLRQGRRHVDAALPGILEDASAKLSGAVRVLLMQLKLELDHLQIRIDEADAMINKAAAESDACRRLVAIPGIGPVTATAIIAAIGNGAAFKKGRGFSAWLGIVPGEYTTGGKQKLLGISKRGNSYLRRLLVQGARAVLQQSAKQSSGLSAWLTQLTARTHSNVAAVALANKLARMAWAVLAKNEPYRPPMLADAATT

SEQ ID NO: 298300 - protein, 442 aa, unidentified
MQDILTCAMGLDVHRDIIVACLVKGAVDAEPEAETRTFSTLIPEMQKLRDWVIESECRNIAMESTGIYWQPIYEMLESCFDGEISILVVNARHMKNVPGRKTDMKDAQWIATLLRAGLLKGSFIPDKAFRELRHLTRYRKSVVHDITAQKNRIDKFLQSSGFRFTAFLSDTFGASGRNIIRHLIEHGSIDREALDKCLKTKTRNRIDEILVALNGSLSEHQRRFLNMVFRHLEDLEAHKHTVEDEITEEVLKHTDALNLLCSIPGIDVTAAAAIIAEIGTDMSSFPDSQHICSWAGLSPGNNESAGKRKSVHINKGNPYLKSMLCEVAWIMASHRKLYLSGWYWKVKQRKGAKRATIALARKILSIIYTMLKTGTPYNEECFEQRRLRCERKRANRLVNELQKLGYVVVAGSTRLMLTPILLRQRQARPAAICAVNLSSMRR

SEQ ID NO: 298301 - protein, 376 aa, unidentified
MSKIQCVGLDVHAETIAVAVAETEGEVRSIGTIPNRLESIRKLIHKLGPVEHLRACYEAGPTGYVLYWQLTQLGVACEVIAPSLIPTKAGDRVKTDRRDAERLARCYRAGELTAVWVPDADHEALRDLVRAREAAKKDQLKARHRLGKFLLRHGRRPEGLKAWTKKYLEWIKTHVHFDQPALEVTLADYLEEVDHVAARIVKLEKAIDEAVQKAPSEIRAVIEALQALRGVAQTTAATIVSELGSLSRFRSPSKLMGYSGLVAREHSSGNRVQRGGITKTGNSHLRRVLVEAAWAYQHRPNVTGFLLRRQKNLALSEEVKKIAWKAQQRLHKRYQAFAARGKNKNQIVTALGRELLGFIWAIAMETEKQHKQVKAA

SEQ ID NO: 298302 - protein, 355 aa, unidentified
MPSKADTAVARTIGIDTGKNTLHIIGLDERGAIVLREKISRARIAARFVNLPPCLVGIEAGMASHYVARELVALGHEVKQVPPAYSKPFRHGHKNDFRDAHAVAEAVERHSTRCVPIKTDGQLDLQALHRVRSRLIGNRTAVINQIRGFLLEHGIPVRQGHHFLRKQLPLILATRTDVLSPRMIRIIGDLMADWKYLDERIERVTDEIEALAHADEGCQQLITVPGIGPIISSAMVAAIGNGAAFCKGRDFAAWLGLVPKEMSTGDRTVLGRITKLGNRYLRMLFIQGARAVLLRPASWVKHSFGSWLTAATRRLHRNVLAVALANKLARIAWTVLAQGRRYEARVEPRVEPAAA

SEQ ID NO: 298303 - protein, 355 aa, unidentified
MESVKYVGLDVHQSTISAAVLNSEGKLMMQSVIATKATAVMDLLKGLRGVLHVTFEEGTYSAWLYDLIVRQVARVVVCNPRKNALLKSGNKSDQIDARKLAELLRAGMLSPVYHGEQSTRTLQQLVASYTALTEDTGRAMRRIKALYRSQAIACAGKKPFGKRHRGEWLARLSDSGQRRRAEWLYQELDAVQILRREARQAVMVECQKNPAAKILRSLPFFGPLRAAVLIARVQTPHRFRTKRQFWTYCGLGLDTRSSADYVEQDGQIMRRRKPVYIRGLNWNYSHELKNVFKSAATTASVMDGPFRAFYESRIANGMLPAMARLTLARKMAAIALILWKKGEAFEAEHLKPQTA

SEQ ID NO: 298304 - protein, 353 aa, unidentified
MDSKKYIGMDVHKESISLAVRNDAGKIVMECVIETRANAILDFIHGLRGELQITFEEGTWATWLYDLLKPHVSKLVVCDPRKNSREGNKNDRIDARELSDRLYMNKLSSVYHGGAGVRTFRELARSYLTISKDLEPVMSRVKAIYRSWGIPCAGKQVYAPRHRAEWLAKISEAGVRRRAEFYDQQLDALRPLRHEVRRELLSESKKHPATKLLRQIPWIGPIRAALLIALIQTPQRFRSKRPLWKYSGFGIEMHSSADYCKVQGQLQRSRKQVSVRGLNRDCNHDLKDLFKSAATIASVKPGPFQEFYAALLTQGMRPEMARLTLARKMATIVWTVWKRGVSFDAKYLKPQTA

SEQ ID NO: 298305 - protein, 403 aa, unidentified
MQYTAGLDWGSVGHAACVIDEQGTVTARLDIQHTAEGLKKLLADLARIAPPQELPIAIERPSGLVVDTLVEAGHPVVPIHPNVLKACRPRYHAARCKSDPGDAYILADVLRTDGHRFRALRPASDEIKALRTMTRTRDDLVAERVVVANQLRSLLDAFWPGAVAIFADIDSPIALDFLDRYPTPASTRHLGPKRLAAFMARNAYCGRRSPEELLARLHSAPNGLAGEAEEEAKGYMVKALVAVLRTLVEQIRCVTAAVEHAVAQLPAGQVVMSLPRAGKVNAAQILAELGEDPERFQTEDQLAAEAGVAPVTHESGKHRAVVFRFACNKRLRQALVTWADNSRHASPWANHVYALARAKGFRHPHAIRVLARAWVRVLWRCWRNNKPYEAALHGAAKPFLETA

SEQ ID NO: 298306 - protein, 347 aa, unidentified
MTEAYDGRQVVGIDLHRQRSVIVRMTEDGRKLETVRITNSPAALRAVIARAGKNPKVVIEATYGWYWAVDVLEEAGAEVHLAHPLGVRAFSYRRVKNDERDAADLADLLRMGRLPEAWIAPPEIRELRELTRYRHKLVKARTSVKDQVHGVLAKLGIPVAHSDIFGVHGQAWLDELKLPQPYAGKVASLRQLAGGLTAEIGLLEQVLGDLLAGHEGYAAIQQLPGIGPVLAAVIVAEIGDIRRFPGPGQLGSWAGLTPRHYESDTKVIRGHITKQGSRMLRWAVTEAIQRQPAGTRPRQVKDGIIARRGKEAKNIAKVAAARELLTLVFYGMRDGHVRRALQRGQAA

SEQ ID NO: 298307 - protein, 363 aa, unidentified
MTKYRRKVEKSKFKEACSGISEKDEVYIGLDVHKNSVHSAVRINGQVFTTVMPAEIESIIATLDPVRSACRKIVYEAGPTGFGLMRELERRAWPAEVIAPGKTPTPANAGSKTDRLDCRMLAEYCEKDLLRKIAVPTEQEEADRQVTRLRDQLVKKQRRTKQQIKSFLLMYGIKAPPGLECWTRRSVNDLGKIDLCQELRFTLDILLEELAHLGDLLRRVKEEIRRLAKEKRFSQKHARLRTHPGVGETVAMKYITEIFRPRRFGGSEEITSFVGLAPRIMQSGQTRREGPLQKSGQGDLRAMLIQAAWQWVRRDKGAAAVYRRLVRNTGCAQKAITGMARRMAINLWCMLIRDQDYHSFIAG

SEQ ID NO: 298308 - protein, 330 aa, unidentified
MQAIGIDMSKDTFHAAFDDRKVLKFANTPAGIEEFMTTLEDDDFPITDTRIGVEATGAYHLLFAVTLTEHSWDVVVINPLESHRMITQGLRTVKTDRLDALKIRTMTGMGKGYLFTDTKDVLALKALVVERQALVEMRKMTKQRRDVHRLKEAATGFAFYDSFTTVLEALSEEIKHIERSMRGYETETQELLRSIPGVGSITAAILVAFIGDINRFATPEKLVAYIGLDCRVYQSGTSVHGKGYISKRGNGYLRHMLFNAAFVARQRNPDLKSYHEQKMREGKHYFSALCAVERKLVHLIYAVWKRGTPFVRRSQTKTAGEFSPAVDKVT

SEQ ID NO: 298309 - protein, 347 aa, unidentified
MRFYTQTRPYYCGIDLHARSLYVCIIDHNGELCVHKEVKAAPEPLLRLITPYLGQIVVGVECMHCWYWVADFCEDHKVEFILGHALYMKAIHGGKAKNDRIDSHKIARLMRGGNFPLAYVYPKAMRATRDLLRRRTKMVRYSAQFKAHVSNTSTQYNLAPPAKGALRKASGRAEMSTVFDDPSVQRNVDLDLQLVGFFDQEIGQIERYIEREVKNDNLRDLKLLKTIHGVGRILALTILYEIGDIHRFETVQQFASYARLVKCKAESAGKSYGTQGNKIGNAHLKWAFSEAAVTHLKGNPKAQAYLERLQRRMTKAKALSVLAHKLGRCAYFMLNNGKVFDEKRFLG

SEQ ID NO: 298310 - protein, 458 aa, unidentified
MYRELQPFREALSHELKASLFPAVAGVDANKLLETYLDRLTMYTGVDVADQTFTALALDAGREILGSLEGCPNEPAGFERFMAWARDLRDRHGLHIIAVAGETTGIYYWALWDFLGEQADVARVLYNPRTTEHMGEVLSKKVRNELVDALLLAEQLRLGSTPEVICSDDADLLTARYYSRAARDLAQQINRNKNQLRALLRAYCPPVCKVFPGEKLHHPAVYALLQEYVFPAEFIQAGPETLTAILSAHCRDTFGSTEAEQLLAASRQAITRPIDQEAISSLVRAHIQDITTFQERKALYLKAGYALIQDRQETKLLRTVKGAGVSNTLALVSEVGDVARFSSGEHLASFLGLTTSKHISGATLFQSKHITKQGSPNGRYAAVNVAYHLARWVPRYHDMYQRIKDRKPPRQGHFIALVAVARDFVSNVLYDMWHNQRPFFVEVSDYRAYRQKLLHSND

SEQ ID NO: 298311 - protein, 348 aa, unidentified
MTTMVEDARVITGGVDTHAGMHVAAALDSIGGLLGVQEFPATAAGYASLLSWLRSFGTLAVAGVEGTGSYGAGLARHLAAAGVRVVEVDRPDRQDRARQGKSDPLDAVSAARAALSGRASGAPRGRDGAVEAIRALMVAKRSARQERTQAINQARALIMTGPEELRARFVRRSPAQLIEAIAALRPRPGDVPGYATRVALRELGRRGQFLDAQLDRLDELIGPLVTARAPGLLALHGVGPDTAAMLLVAAGDHPERLRSESSWAHLCGVAPIPASSGKTAGRYRLNRGGDRQANSALWRIVIVRMSSHPATRAYADRRTKEGLSKREIIRCLKRYVAREVYRQLRDGA

SEQ ID NO: 298312 - protein, 325 aa, unidentified
MSAFVGVDVSKATLDIVVLIDTKQTHQKISNTPQEIATLINWLDTFETIECVCLEATGRYGDALAEALYLADFCVSVENPLRIKSFAQSLLSRNKTDKYDAFVIALYAQRMRPDPWKPPSTAIKQLKQRTRLRHSLEQTRQSYRNRLKSGLDDEFTIELIQSFIQELDSRIETLSKDIINFIKQDAYLNQQRKLIISIPGLADKTASVLLAEIGDIDKFDSPRALASYVGITPKIRQSGSSVRGRTHISKQGNKRLRTALYFPAISAKRWNPICRDFAHILEQGGLAKKAIIIAVMRKLLHQVYGILKSQHPFDPHFQQKIKIAT

SEQ ID NO: 298313 - protein, 337 aa, unidentified
MKFSGIDLHSNNSVVLISDEADRIVYQKRLPNDLAQILAALEPHRDELVGVVIESTYNWYWLVDGLMDAGYRVHLANPSGIRKYEGLKYSGDVADAAYLAHLLRLGLLAEGYIYPREERGARDLARKRLQLVRYRTAQILSIEGILMRQTGARMKSESVKGLTAEQVEAFGFAPDVALAVEANRAVSQTLGQQIEVLEQRLQERVRLRAEFKLLKTAPGIGETLATTIMLETGTIARFAQVGNFSSYCRCVDSLRESNGKKKGEGNTKNGNKYLAWAFVEAANFAVRYCPQAKSFYEHKKRKTNRIVAIKALAHKLARACYHMLREQKPFDVNRCFA

SEQ ID NO: 298314 - protein, 351 aa, unidentified
MENIALIGIDLGKNSFHIHCQDHRGKAVYRKKFTRPKLIEFLATCPATTIAMEACGGSHFMARKLEELGHFPKLISPQFVRPFVKSNKNDFVDAEAICEAASRPSMRFVQPRTESQQAMRALHRVRESLVQDKVKTTNQMHAFLLEFGISVPRGAAVISRLSTLLEDSSLPLYLSQLLLKLQQHYHYLVEQIKDLESQLKRKLDEDEVGQRLLSIPCVGTLTASTISTEIGDGKQYASSRDFAAATGLVPRQYSTGGRTTLLGISKRGNKKIRTLLVQCARVFIQKLEHQSGKLADWVRELLCRKSNCRHLCSGKQAGQNSLGTDGATANLRSIKAEIHQFKQSFIWFCEY

SEQ ID NO: 298315 - protein, 355 aa, unidentified
MTITKYIGMDVHKESISIAVMNSAGKFVMECVIETKGSMLLQFIDGLRGDVRITFEEGTWAAWLYDLLKPHVSEVVVCNPRKNALLKDGSKSDRIDARKLAELLRGNHLKPVYHGEQGLRTLKELARSYLNISKDVTRVMNRLKALYRSWGIACVGTKVYARRHRSEWLGRISEAGVRRRAEHCYQQLDALRLLHQQVRRDLLLESKKHQAWRLLGLIPGIGPIRAALLIALIQTPHRFRTKRQLWTYSGLGLETHDSAQYRVVEGQLQRSKKPVTLRGLNQDHNHDLKDIFKGAATRASSSRGPFHDFYEHLLAQGRKPTMARLTLARKIAAITLIVWKKEVRFDASYLKSQAA

SEQ ID NO: 298316 - protein, 339 aa, unidentified
MISVGIDVSKGKSTVCLLKPYGEIICKPFEVQHTEKDLEELANLLQKLDGEIKIVMEATGIYHLPILTFLLEKGFFVSFMMKRFASDNSLRGAKNDRLDSVMIASYGIEKWHKLKKYEVNDGIYPELRFLGRQYHRFMQTHVKHVQELTHLLDHTAPGLKAMFNSWNEHSNRDKLSDFVERFWHFDLITSLSREEFVEQYLLWAKEKKYHQSRSKAEKIYDLASNGIPTLSSRTPSTQMIIQEAINVLRIVNNSLYRILSRMKELAKSLPEYATVRSMGGVGDALAPQLIAEIGDVRRLHNGHALVALAGIDPPPYESGQFVGTHRKISKRGSPILRKI

SEQ ID NO: 298317 - protein, 393 aa, unidentified
MYLVGIDIGKLKHSFCLLEKETGEILVEPVFFKNNRDGFNALLSSFKHLPQKDILIGMEDTGHYNLALLKFLLDRNYQVALINPVATDLTRKMQGGISKNDKLDTLTICDVLASNQRVKSYRVSKYNSFDLYEQKQLTREHHNLKEELNQYTNRLQKSIDIVFPEFNSLFKSKYGNVYMNILKEFGSAYVIAHADIRTLRKYFDTGRGKHISLTAEELKEAARNSVGFPSTAEVIQIKHLVAQIELIKEQIAEIDKKIEEFSIQNNSPILSIPGISHFSGTSILAELGDIHNYSKPSQIIKFAGVAPLTYESSQFTAQHTAITKKGCKYLRKTLYQIITAVIQYNPVFKKFYLLKIAQGKGHRCAQGHCVRKLMRVIYHLLSTGAQFDPALLR

SEQ ID NO: 298318 - protein, 356 aa, unidentified
MRILALDVGKSKSVAYEVDTRTGECGFTKVVTRPAELRRLFVRRRSDRLVMEIGPMAGWIGDLARVSGIRQVQVANVAHEAWRWRNVRRKTDRDDAVKLADLSMAGRLPQVHVPEAATRQWRQVIGYRAKLVGRRTAVKNRIRAILASVGETLPPSQRGWTRQALAQLRSLARPLVETGPQDLWRGELALELETLERLDAQIATVEARLDALAEADGRVARLRTIPGVGPRLAELLVALIDQAHRFRRANQIGSYLGLVPRQFQSGAMDRHGRITRRGNRLARSLLVEASWVALRYNPHLRAIYERVHRGSRTRRKVAIVAVARRLAVIAWAMLRDGTTWQPDRVGVPAEASAACH

SEQ ID NO: 298319 - protein, 344 aa, unidentified
MEITTVGLDLAKNVFQVHAISSTGEVVVRRALRRAQVIPFFSKLPPCLIGMEACGTSHHWARELVSLGHQVRLMPPAYVKPYVKRGKTDAGDAEAICEAVTRPTMRFVSIKSVEQQAALALHRTRDLLVRQRTQLVNMIRGLLAEFGIDIPKGITHALAFVRRAVAGQADDVPDLAAKVIGALAEQAIEVQGRIRQLERDLLAWYRSNEVARRIATVPGVGLLGATALAATVTDPARFRSGRQFAAWLGLTPLNNSSGGKERLGRISKMGDQYLRRLLVTGMTSLVRRNRHHPSSADPRINALLARKPLRLATIAMANRAARAIWAIMVRGEVYRAPALGSAAA

SEQ ID NO: 298320 - protein, 413 aa, unidentified
MPKIVYPVCCGIDVHKSFVVACIATTDKKLVTTYKRKRFSTFTGDMRRLSDWLSQNNCRDVCMESTGKYWIPVFNILETTCHVVLAHPKYVKAIKGKKTDKRDAKWIADIFKHDLLNGSFIPPADIRQLRDLVRYHFKLTCYTTGEKNRAKDCLTVSNIKLDDVFSDLFGKAASAITDRLLESNEPFDVAPYLTKNIKASPEEIQAAVDGAMCANQAEKLRIIRSHMDSLNFCKANLESEILSIAEKFLPQINLVLTVPGIQTFAAVAVIGEIGVDMSVFETSRHLCSWAGLAPQNDQSAGKKKTTRISRAGVYIKPLLVQCALCAIRSKKNPEIANRYNAIKKRRGHKKAIIAIARMLLTAIYNILKKNEPYNAELYRQSDKPPVQREVTVEQAIFILQRQGYLVSQVTAVP

SEQ ID NO: 298321 - protein, 339 aa, unidentified
MFYVGLDVSVARTAVCIMDAAGQVVREQSVASTPEAIAAAIRASGKEVERAGLEAGINSAWIARGLIEAKLPVIVIDATHAAAALKTGFRNKTDKNDARGIADLMRVNKFRAVSVKSVAAQRDRALLTVREQLRQQSLDARNVIWSILQVEGLRPPKLTSPAFQALVVQSLDDEALAPLLRPLVAVVEHLDSQVAGLDKVIAARAKASTACKRLMTVPGVGPLVALTYAAGVNDPARFSDSRTVGAHFGLTPRRFQSGEMDWSGGISRAGDAGVRRALYQAANVLIHHSRGWCALKSWAVRAAKRRGLGKAKVALARKLAVVLHKMWTTGEDYRLKAAA

SEQ ID NO: 298322 - protein, 311 aa, unidentified
MNSPDRFIGMDVSKDTLEVAVQPKGERMTFANQEDGISLMVDFIQSFSPRLIVLEATGGLEKAVVCVLAVRELPVVVVNPRQVRDFARSKGILAKTDKIDAGVIAQFAEAIRPEVRPLKTEEAQKLDALLSRRRQILQMLTAEKNRLQSAPVWTQKDIQKHIHWLEKNLDQFNQDLDRMVKESPIWRAKDEILQSAKGVGPVLSVTLISQLPELGTLQGKKIAALVGVAPLNRDSGKFRGRRTIWGGRAEVRSVLLMATRIAIRFNPVIRAFYERLEKAGKVRKVAETACMRKLLMILNAMLKNNTCWQKA

SEQ ID NO: 298323 - protein, 343 aa, unidentified
MGEVSTVGLDIAKSVFQVHGVDADGAVVMRKRIGRAKLLEFFAALPPCVVGIEACPSAHHWSRKLRALGHTVRLMPPSYVKAYLKRSKNDANDAAAICEAVTRPSMRFVPIKTQEQQTGLMLHRTRQLLVRQRTMLSNAIRGHMAELGIISAKGRNGTAELLQIVGDVADGRIPPVARFCLELLARQYLTLNAEVYAVDKRIHAWHRSCEESRRLEEIPGVGPIVATALVAEIGDWRTFRSGRSLAAWIGLVPKQHSTGGKERLGSITKQGNRYLRWLLVTGAMAVIRYARAHGTKRPWLTRIMDRRPAKVAAVALANKIARMAWAIMVRAERYKEPKLLLAA

SEQ ID NO: 298324 - protein, 319 aa, unidentified
MTITIGIDISKLKFDATFLDSDNTQTHRTFDNNQAGFEVFCRDLRNPAETRVALEATGVYGESLCQFLYDLGCTVYLLNPASTQFYSKSMLRRCKTDKSDGALIAQFLNHHAHELKAWHPKSEEQQHLQRLQGCLDDLQADRLRVLGRLEGCHHACGFGRHEVTLHYTDQLAFLDQKLLAIEQEMLTIVKIHSELRKRFVTLISIEGIGEKTALGLLAYLPDLMYFKTAKSLSAFAGLNPCVKQSGSSVRGKGTISKMGAKKLRTLLYMPAVVAKGHNKVLKPFADALIERGKPKKVVTVAVMRKLLHYIFAVLKKGKG

SEQ ID NO: 298325 - protein, 339 aa, unidentified
MKLYSAIDLHSNNSVLVILDENDKVVYERRHPNELPIILTELALYKKKIQAIAVESTYNWYWLVDGLMEAGYSVKLVNTAAVKVYEGLKYTGDEHDARHLAHLLRLGVLPTGHIHPKADRAVRDLLRKRAQLVRCRTTQVLSIQGLISRNSGKRIPGDGVYKLNDATIGQFCGGDSVLALAIQSNLTVLRCLDEQISGLEKVVLKQAKLKPEFKKLLTVDGIWHILGMTIMYEAGSMERFKKVGNFASYARCVDSTRWSNGKKKGAGNRKNGNKYLAWAFVEAAHYAVRYNERIRSFYQRKLAKTNKFVAAKAVAHKLARACYHMLKDQTLFDETRAFS

SEQ ID NO: 298326 - protein, 358 aa, unidentified
MQTITIEQKVSQKRAPVEAGVTVKFGLDVHAAQITVCRQIDGQVPQPAQKFGWSECAEWIEAHVKAGAVVHSCYEAGPCGYGLHRQLTKLGVTNHVVVPQRWDEQNQRVKTDARDARELCDRLDRYERGNPTAFSVVRVPTPEQEQRRALGRQRDTLVRERQRCVVRGHGLMLAQGVRAPEDWWQPKLWEKFRLDLPEWLRPQILVWQEAALRLEAEVNLWTHQVVAHAPDQLIPKGVGALTHALLAGEVLDWHRFKNRRQVASYTGLCPSEHTSDKKRHQGGITKHGNPRVRHQLVEAVWRLLRWQPDYPPLKKLRAATGQRTRKRLAVAAARRLAIDLWRINTGQCTAEKLGLKLA

SEQ ID NO: 298327 - protein, 302 aa, unidentified
MNRTTYGLDIAKNVMQLHWVEAETGEIGRKKLARAKLSAYFAELKPVRIVMEACGSAHHWARVFTGLGHQVELLPAAQVRPFVRSNKDDAADARAIWLAAQQSDIRRVPQKSVQQQAVLALHRTRQHWVSVRTATVNSLRGLLYEFGVVLRGGRKAGLKALAEQRALIDEQIPEAMRALLDGQLQTLGQIGERIDALERQIAALQEQLEGARELDQVPGIGVLGSTALAATLGDGKAWRSGREFSASLGLVPAHAGTGGKVRIGHLSKRGDPYLRTLLIHGARAVIEHACCRSSNPTTCLSG

SEQ ID NO: 298328 - protein, 351 aa, unidentified
MRTSQKTSKPISTIGIDVGKNTFHLVGVDKRGAIVLQQKVTRHQLGRRLSNIPRCLIGMEACCGTHFIARQVTALGHDVRLIPAQYVKPFLKGHKNDYRDAEAIAEAVQRPTMRFVSIKTPEQMDLLALHRVRSRLVRQRTGTANQIRGFLLERGITVRKGLMPLRKALPEILSSKSDVLSPRMINLIGDLVQDWRRLDERIAHVSTEIEALAKRDENCQRLMSVPGVGPIVSSAVVAAIGNGTGFKQGRDFAAWLGLIPKQESTGDRTILGKISKRGNKYVRTLFVQAAHVVLERRPRTAKQGLWPWIEQASKRLHRNMLAIALANKLARIAWAVLARGRAYQPRITAHA

SEQ ID NO: 298329 - protein, 355 aa, unidentified
MGELIRIGLDTSKSVFQLHGVDEAEQPVLRRKLRRRDMLTFFSKLSPTRIGMEACGASHYWARELRALGHEVSLIPPQYVRPYVDRGKNDAADAEAICEAMSRPKVEKRFVTVKTVEQQARQMLIGVRESLLKRRTQVSNTIRGYAAEFGFVAPKGLAQLERLVERIEQDRTLPELVRQMFAMLVGQYRHASAQIREIEARLIELHRANPLSRRLAQAPTIGPVIAVTLTAKVADPKVFRSGRDFSAWLGLTPKDHSTGGKARQGRITRAGDETLRSLFICGATAVIQQVRRGKAGAPPWLVSLVERKPPKLAAVALANKAARIAWKMMVTGEPYDPRRLAATRPAGADPLAEAA

SEQ ID NO: 298330 - protein, 325 aa, unidentified
MAIIFAEGLAEIYPRVVNEFKNTVSGFKQLVKWVGQNSNDIDQSLWLFCGENTGDYSKPLCNHLYGKGYDMWLENAKCIKDSSGIRRLKSDRADASMIAEYAMRNHDKAVMYEPLSEALAQLRELFLYRQMVIRHRCSFQVRRGEKKLTMEKSSVKTMISQSGRHIVSELNKEIEKIDKRIASLIDSDAELTQVFNIVTTIPGIGTQNAVCLMVYTDNFRKFNYDSRKIACYYGIAPFGRDSGTSVHTDPHVHYMANRQIKAMLTQAALAAVNFNQDIASYYSRLIARGKKKQVALNNVKNKLVHIATAMVKNKQVFDKNYKISA

SEQ ID NO: 298331 - protein, 462 aa, unidentified
MPGRDEIASSGKSRGQLASLPIIRGNVAGIDLGSERHWVCAPTQDRSGREVASFGATTAELLRMAEWLKARQIESVAMESTGVYWIAPHEVLEAQGLQLLLVDTRQLAQVPGRDKKSDPTDCEWIQRLHSCGLLRGSFRPEEAVCKLRTLVRDKASLVAESGDWLRRMQKSLDQMNVRVHRAVSDIDGVTGMAILRAIAGGERDAQKLAKLRDRRCSKTEQEIGEQLRGHWREDHVFSLQQAPKMYDAVQERIAEYEQEILRKLGEMERKEPHEPTAAPLQNANKARTIRNRGQEAKRQALYRMSGVDMTQIDAIGVETVEVVVSEYGSDLSRFPTEKQFVSHVTLAPRVPKSGGKPVRKKKRNSASTRVAAALRMAALSLRHSQTALGAYYRKIAQRRGGDIAVFATARKLACLIYRLLRRGQPYVDEGAAAYENRYRQHRIGRLAAIAKELGYQLTPVTA

SEQ ID NO: 298332 - protein, 338 aa, unidentified
METCIWLGIDVGKQEFHASIATQALHGREWLKLPCQGFEHSPAGMKALLKWLRDQGTAPSQLAGVCVESTGRLSQHFADLAKGRLGSVSIINPARAKFFAQSQGSHHKNDAVDARLLAHFGWQSRPRPRPQRPEHADALKLRELVRAYGALQADLLAQRQRLDDGPGAKEVRAAHGRLIRAIEKELENLKAAIEDLIESNPSLKEDAARISSIPGIGPRVTQLLLAEFGDLREYNRDEVVSLAGLYPREFTSGTSVHKKPKIAKGGKANVRAALYMAAMSARRCNPVMKAFADRLAANGKPPMQIIVAVMRKLLMLAHALVVTGKDFDPTHHQVKSQS

SEQ ID NO: 298333 - protein, 413 aa, unidentified
MDPHSEVHVAAALDSVGGLLGTREFPARAAGYAGLLGWLSGFGDLALVGVEGTGSYGAGLARYLAAHGVRVVEVDRADRQDRRRKGKSDPLDAVSAARAALSGRAAGAPKGRDGAVEAIRALMVAKRSARNERTQAINQARALILTGPDELRARFAGHRASALAAGIAALRPRPGDAAEYAVRIALRELGRRVEFPGAQIERLDGLIIPLVTVRAPGLLSLYGVGPDTAALLLIAAGDRPERLRSEAAWAHMCAVAPIPASSGKTRRHRLNRGGNREANHALWRIVITRMSAHLATRAYVERRTAEGLSPARPRWPPRAPGTSPCWLSARRHLSVDQRQLVRGRVVLDHMMMSSGRPMPQPISSASKVRSSICCPSAPETSRTLRPDSSRTQSASGISARSTARRGRAGGSTA

SEQ ID NO: 298334 - protein, 409 aa, unidentified
MRLFVGLDVSSFDMKVCILNGEGEKLNAFTVTNDLPGATLLKERLLDCIGDQEVDVLKIGLESTSVYSFHPSMFLHHDEDLKVFGAKVFVMNPKQIANFKKSYSDMNKTDEIDAFIIADYLRFGRNQMSVVKESQYVALQQLTRSRYQLIRMMTKEKQHFLQHLSYKCNTFSQEVDSSVFGSAMMELFLEKYSLEELAHLPLEELAAFLQEKGKNRFGDPKCVATSIQKAVRSSYRLDKVVEDSMDVILGTSIEVIRTFQKQIKEIDKAIKKLMAGLTHTLESIPGIGPVFAAGIIAEIGQIDRFDDETKVAKYAGLYWRKHQSGRFTAEDTSLSRNGNHYLRYYLVEAANSVRRQVPDYRDYYVKKYSEVPKHQHKRALVLTARKLVRLVDALLRSHQLFTPERGVKI

SEQ ID NO: 298335 - protein, 401 aa, unidentified
MNAVGIDVSKGKSKIAIIRPFGEIVAKPFDVAHYPDQLAELAKYIHSLPGESRVVMEYTGKYSEPIANFLCAAGIFVCMVNAKLIHDYGGDTIRRDKTDKLDALKIAGFCLDKWIKLSRYNPVDENRKTLKTYNRQLSEYNKIKTMLKNNLISLLDQTFPGANDLFTSPARESDGHEKWIDFVAAFPHCHSVAMLSRQVFTTKYEKWCRKNEYYFCSNKAEQIYSAALNCLPTLPNNDFTKTLIAQTVNQLNNLCQTVAAVKSEMNKIASQLPEYETVLAMHGVGKTLAPQLIAEIGDIRCFPKRSSLARFAGIEPPENQSGTYNQHSRRISKQGSPHLRRTLFLVMCCVLQLKNSDEPTFQFVDKKRSEGKPYKVYMIAGANKFLRIYYARVKECFAQMA

SEQ ID NO: 298336 - protein, 306 aa, unidentified
MTSDKYIGLDVHQATISVAVMDSEGKVVMESILETKASTLLEFFAGLRGSLFVTFEEGTWAAWLYDLLKPHVTEVLVCNPRKIPLLKQGNKSDKIDARKLAERLRLHDLKPVYHGETGIRMLRELARSYLTVVKDLSRVMNRLKALYRSWAIPCAGRDVYYRRHRSAWLDKIPEAGTRHRAEQLYQQLDLLQHLRQQARRELLAESRKHAIAAKLRKIPSLGPIRSALAVALIQTPHRFRSKRQLWTYSGLGLETRDSGEYHYVRGQVRRRKKQATIRGLNKDYNHDLKSLFKGAATRASVKPGPF

SEQ ID NO: 298337 - protein, 398 aa, unidentified
MSRIWVGIDSGKGHHHGLALDTDGKTLLSRRVANDEPELLKLIGDVLDLADGRHVTWAIDMTGGEPALLLALLVSHGQEILYMSGRLVNRASDGYRGEGKTDARDAYVIADQARMRRDLRPIRPGDEATIELKLLTGRRADLVEDRTRSVNRLRGTLLSMFPALERALDLTNTGPLKLLTGYQTPAAIRRTGTARLTTWLANRKVRNARALAEAAVEAAERQHTAVPGEKTIAKLVHTLAGEVMTLNEQISELDKLIEGRFREHELADILLSVPGIGATLGAEFLAAIGGGLDEFDSPDSLAAFAGVAPAPHDSGKVSGNLHRPMTYHRRLQRVFYTSALVSVRYDPNSRKFYDRKRAEGKKHIQSVLALARRRVNVIWALIRDRRCYEVTPPVTNAA

SEQ ID NO: 298338 - protein, 334 aa, unidentified
MKSDIVHIGVDVSKEKLDIYVPAKKEGSRPLTKEVDNSVAGFRELRDLARKAKATVCVEPTGGYELELIAFMHKFNVSVAYTDALRVRQFARAEGSLSKNDTIDAALISRFADKIGVRVLEAQEVEAVELKRKAKFRQTMVDSRTAMINRLETEIDPEMKALLKEQIRLAGRIIDKAERLCLDTVKKNDRMNSLKERFTAIGGVGDITAISILSSLPEIGTLSDGKLNRLVGIAPEEKQSGTKEWQRRIWGGRKDVRNALYMAAVASIKWNAILGNYYHKKRAEGHPHKWAIVPTMRKLLSLLNRIAKDPGFIPMPEPESTKQNANVGRRKKAA

SEQ ID NO: 298339 - protein, 339 aa, unidentified
MRFFTQQHAYYCGIDLHAKTMYLCILNQAGDVLLHRNIKSDPEAFLHVIASYRTDLVVCVECIFTWYWIADLCARENLPFVLGHALYMKAIHGGKTKNDRIDAAKIAHLLRGGYIPMAYVYPTAMRATRDLLRRRMHLMRQRAQLLAHIRNTNSQYNLPPIGRKIAYKANREGVADHFPDEAVRQSMEVNLQLIDFYDPLLTQLELNWVSTAKIHDPQAFHLLRSIRGVGKILALVLLYEIHDIHRFPRVQNFCSYCRLIQGAHQSAGKTYCHSGKEIGNAHWKWAFSAAAALLIRCCPAVQKYKPKNLPSSPTNWDAVPTTYSNESSRLTKNACYPVE

SEQ ID NO: 298340 - protein, 347 aa, unidentified
MRFYTETHKHYCGIDLHTKNLYVCLIDQEGEILVHKNIKARPQALMKLINPYRDDLVIGVECMFSWYWMADFCEDNGIDFVLGHALYMKAIHGGKAKNDRIDSLKLATLLRGGMFPMAYVYPRTMRPTRDLMRRRMHMMRKRAELLAHIQNTNSQYNLPEIGKNLRYAFNRDGIAERFEHPSTQKSIDLDLNLIGFYDEQLSKVEWHINRCAKEVDYQSLMILKSVPGIGQILSLVILYEIHDITRFPRVQEFLSYCRLVKCKKESAGKSYGTSGAKIGNAYLKWAFSEAAVLFLRQNPHAQAWLEKRANRHNKAKALSILAQKLARAIYFMLKRNTVFNQKRFLTA

SEQ ID NO: 298341 - protein, 434 aa, unidentified
MRSIGLDVHKRFAEIAILDGKDPPIGRRIGTTTSELRAFARTLRPDDELVLEATMNTWAIADLLRESGARVVISNPLRTRAIAEAKVKTDKVDALTLAQLLAADFVPEVWTPDADTRRLRREVAGRAALVRQRTQVRNRIHAVLLRCLVDSPVTDLFGVAGQAWLKEVALPEDERALIAAALRVHEAIEAEIALLERRLATVALADERVERLMTIPGMGAVSALALVAVVGNVVRFRRPGKLVSYLGLDPRVHQSGEREAYTGHISRAGHAHARGLLIEAAHKAVGAPGPLRAFFRRVERRRGFQIALVAVARKLAVLAWHILSTGERYRFERTMVTRDKRRRLLRAAGQTIERRRRAAAGERTVAMLREQELAVLAEAEAEYKAEVAARMTKDAAATKGEATVRPSKGHDAWRSLRPQRPALLTGSTASKERG

SEQ ID NO: 298342 - protein, 342 aa, unidentified
MYYIGLDVHKKTISYCVKDAAGMIQSEGKIGSTRRELDAWIKTLPQPRMMAMEATIFTGWIYDHLLPHAEKVKVAHPLMLRAIAAAKRKNDKIDASKIADCLRCDFLPECYMTSTEIRDRRRTLRYRGLLVKQMVQMKNRISGLLMETGVSYNKQRLHKVGYFTELMSGNEEIDCVRPLLKLSRETIDRSQKLDYALVSSLERDPLLAERLKRLRTVPGVGPITALTWVLEVGDVVRFQSIKQAISYCGLCGAEKRSADKVVRTPISKQRNKHIQQVLVEAAKLAPRYSHELSLIHEKEKQRGDRNRATLAVARKMVAWMVAVERRKQNFVPAEERGGTAAA

SEQ ID NO: 298343 - protein, 360 aa, unidentified
MFCERTSVGLDVHARSVVAAAIDGRSGEVFRARLTPSHADVIEWVGKLPGPCAVVYEAGPTGFGLARALSATGLRCQVAASSKLLRPAGDRVKTDARDALNLARLLRLDEVVPVRIPSAAEEAARDLVRTREAARADLMRARHRLSKLLLRHGIVYYDGKAWTERHDRWLHHQRFDAAPTQSAFEDVYEAVVLATARRARLDEKITALAADSEFSPLTRRLACLRGISTLTGFALAVEIGDWDRFTGASIGAYLGLVPSEYSSGTSRTQGAITKTGNTHVRRLLVEAAWHHRSTYRPGPVLRHRWDQAPAAARARAHAGNQRLHARWVGLNLRRKPAVIANVAVARELAGWCWSLAVLPD

SEQ ID NO: 298344 - protein, 440 aa, unidentified
MGSYAGVDWASEKHDVRVADAAGEKLLAATFAHDEQGLRSLCRQLVRLEVELVAIERPDGLLVERLLDAGLRVLALHPNQVAAARDRFRVSGGKSDGFDAFVLCELARTDNHRFRVLEPDSDQTKALRALTRGREDLVGMRTALTNQLRAELERFWPGPLGLFTDLHGRISLAFLERYPSPADARGLGEARLAGFLARERYSGRQKPAELLAKLRGAAAARVGELELSTRRQLVLGLVAMIKSLNAQIKELERQLATTLGEHPDGEIFRSLFRDPRSVICAAELLAEIGDCRGRYPSRDALAADAGQAAVAIESGKRKAACFRWGCNKRLRAAFATLADSTRHWHPWAQDVYAAALARGHDHPRALRTLGRAWCRVVWQCWQKRTPYDPARHRALQQHITVTIPTASGPVVDQLATESMAAGLFATNAPTSRQQQVTAAQ

SEQ ID NO: 298345 - protein, 371 aa, unidentified
MKQQSKSSNITVGLDLGDRRHRFCALDERGEVVEEGSICNERDSLRKLAGGYHGALGVMEAGAHSPWISRFLEALGWRVVVSNPRKVRAIYQHERKSDQRDALMLARIGRMDLALLYPVRHGTAEAQQDFLRIKLRDSLVRARVAVINSVRFTLKSLGYRVRNPSSARFHKVVMEEVPELVREMITPSVQALAELTARIKMLELEINTLAQMKYPQSAQLQQIPGVGPITALYFVLKIEDPNRFAHVRDVGAYAGLCPRRDQSGESDPQLRISKRGDAYLRRLLVSAAHYILGPFGPQSALRAYGLMLAADGTARAKKRATVAVARKLAVLLLSLWKSQQPYQPFPGARLNGQQEDRRSGTIALHRMEATD

SEQ ID NO: 298346 - protein, 310 aa, unidentified
MSGEEGDFIGIDVSKANLDVACDGRGTIARHINDVQGCAALADELRDAGLVVVEATGGYELEIVRALQSAGAPVAVVNPRRVRDFARASGRLAKTDRLDALVIAQFGRAMRPAQTPHIEAGRMALGDLVTRRRQVIEMVVAEENRLEHASPAVAVLIKEHVAQLKDQLANIDTAIALAVRANDALSRRKAILESVPGVGEITAAVLIAELPELGAIDDKKIAALVGVAPVAHDSGTLRGQRHIAGGRGSVRCALYMATLSAVRSNPSIKTFHRRLRDNGKRPKVALVAAMRKLVILLNTLVRRDQLWKTG

SEQ ID NO: 298347 - protein, 320 aa, unidentified
MTRIICGLDISSSSLEARIGRSGASASVPNNTEGISALAAFCCTHQVELVAMEATGGYEQQALAQLSEHGLGVAILNPRAVRKFAESMGRLEKTDAIDAGMIAWYAEVKQSQPVCLAPRTQQQLRALVTRLRQLTDIRTAQMNQQRLITEAVVQSSFNELLALIAGQIRDLERRITELIETDPLWRELNQAFRTIKGVADRTVARLMAEMPEIGTLSNKTISKLAGVAPLARDSGKHQGKRAVRGGRAAVREILFIVASVVGRYEPDFTAFQQRLRSAGKPPKVVRIALAHKLLVRLNAKARQVRQRLAQPSLNLSPCTR

SEQ ID NO: 298348 - protein, 408 aa, unidentified
MLFVGGDWAEDHHDVEVQDATGRRLGKARLPEGIGGITQLHALLGVLLPEAAEPDQVVIGIETDRGPWVQTLVAAGYQVVAVNPLQVARSRERHGTSGAKSDAGDAHTLADMVRTDHHQLRRIAGDSDLAAAVKIVARAHQTLIWDRQRHLLRLRSVLRESFPAALVAFEDLTAPDVLELLGKAPDPASAARLGTAQIAAALTRAHRRNVADKAAAIRAALAAEQLGQPPVVAAAYAVAVRAQVAVLAALNAEIERLQAQVSAYFGRHPDAEVYRSQPGLGDVLAARVLGEFGDDADRYAGARARKNYAGTSPITQASGKKKVVLARYARNDRLTDALHQQAFSALQASAGSRAYYDALRARGIGHHAALRQLGNRLVGILHGCLKTRKPYDEATAWPQHADTDQAAA

SEQ ID NO: 298349 - protein, 344 aa, unidentified
MDHIGIDLHKRESQICIVTEEGELIERTIRTTRDRFTAVLAERARARILLEASTESEWVAQCVEALGHEVIVADPNYAPMYPERRRRVKTNRRDARTLATACRLGAYRPAHRVSVAQRRIRQQLSVRDVLVRTRTRAIAMTGALVRSEGLRVRSGEPEQFIRRLDDVSLPAALSATLAPTVALLKTLEAELRDANRAIEQIAVDDPIVMRLTTAPGIGPLTAAAYVATLDRVDRFAGAHQVESYFGLVPSEHSSADYRRRGHITKAGDPRMRWLLVQAAWAVWHSKQADAQPLRAWARRIADRRGRSVAIIALARRLAGILYAMWRDEKPFDRARLERSAAVVH

SEQ ID NO: 298350 - protein, 415 aa, unidentified
MDVVHPRCAGVDISKRDAKVCVRIQGAGRARARSTVTTWEAVTNRILALRDHLIAEEVTLVVMEATSDYWKPFYYLLEDAPFEVMLVNARHTKGIPGRKTDVSDAAWLAELGAHGLVRGSFVPPEPIRQLRDLTRTRTAITRERGREVQRLEKLLEDAGIKLSSVASDITGVSGRAMLEALIAGDRDPARLADLAKRRMRSKIPELTEALTGRFGEHHSFLARLHLDLIDGHSRAIEELDERIEEAMQPFRATRDLIVTIPGISTVVADVIIAETGGDMSRFPSAGHLASWAGTCPGSNESAGRVKSTHTRPGNPYLKGALGTAAMSVAHSKNTYLAAKFRRIASRRGPVKALVALEHAMLVAIWNMCSTGTYYADPGEDFFTRLHPDRARDRALEQLHRMGYAVTLEPLPAQAG

SEQ ID NO: 298351 - protein, 324 aa, unidentified
MELYAGIDLHSNNSVVTVLDEQDRTVFARRLTNDLAAIIAALRSCAGTVRGVAVESTYNWYWLVDGLQDAGFTVHLVNTAAVKQYDGLKHGGDFSDARHLAHLLRLGILPTGYIYPREQRAVRDLLRKRSQLVRQRSAQILSIGNLIARNLGTHAGGNEIKRWQPEHIDAMPLLAEQKQALQANLAVMRCLDSQIDALERSILAKAKLREDYQALKTVSGIGEVLALTIALETGEVGRFDSPGHFASYARTVDSRRESNGKKKGEGNAKCGNKHLAWAFIEAAHFAVRYDAAIKRWYQVAHKLARACWHVMKDGKPFEVSRAFG

SEQ ID NO: 298352 - protein, 342 aa, unidentified
MSRELYIGVDVSKNWLDLAYYDGVSVDWNHGHIRVDNKQSGYNRISKWLKRLGTDKSSVLFCMEHTGLYCHDFRLWLEQEDYIYGMVQPRKMHRFEPDLGEQERALDRIKTDEADSYRIAMYCEKHCRKIRSSPSKLPGEAFFKLKRLLAERKQYAKHTVLYKQQLHDISTYDTDGSRERKQRELEHLKKMIAQTDAEIHQILKEDSRLHRNYELLYSVRGIGLVVALETIILTENFTSITNPRKYACYIGIAPAKKESGISVRGGEHVSKKGFTQAKADLSIACLTALTRDPNIKAYWERRKAEGKKTGVVLNAIKFKIILRMFAVIKRQKPYIEIDGYRK

SEQ ID NO: 298353 - protein, 307 aa, unidentified
MFIGIDVAKDRLDVHLRPGGEAFTIARDGEGVEALSAQLLELKPVLVVLEATGGFETVVAAGLAAAGVPLAVVNPRQIRDFARATGRLAKTDPIDAGVIAHFAEAVRPPVRPVASAEAQMLGELVARRRQLLEMMTAERNRRRQLTTKRLIKGIDHILAALQAQLSELEKDIGDAVRGTPAWREKEDLLISVPGIGHKIARTLIAELPELGSLGRREVAALVGVAPFNRDSGKWRSRRIIAGGRAVVRSALYMSVLVSIRRKLPLVATYNRLRAAGKPAKVAIVACMRKLATILNAILRDKNPWQIA

SEQ ID NO: 298354 - protein, 342 aa, unidentified
MKATTIGIDLAKHLFQLHGVDQHGKTVLKRQLKRDQMLSFFTNLPPSLIGMEACGSAHYWANKLQGMGHTVKLMAPQFVKPYVKTNKNDAADAEAICEAVTRPNMRFVPIKNGEQLAVLALHRARQGFVKARTAQANQIRGLLAEHGIIVPKGIAHISLRLPKLLEDAENNLPGTFRQLIERLGEHLKELAKQVNELEEQIWCWHKKNSASQKLAKMPGIGPLTASALVASIGDAKQFENGRQLAAWLGLVPKQHSSGGKQTLLGISKRGDIYLRTLLIHGARSVLRVAERKTEYAGSWLAGVMERRNHNVTVVALANKNARIIWALLAHEREYDADHAVAA

SEQ ID NO: 298355 - protein, 438 aa, unidentified
MLTAGNHHRKRATQPKLRSPTWPHKISIFCTNRKETRSTHLTANISIPQKNFIAIDLHSDNAVICVRRNALNKAGELVGKNIWCGRVSIRDGLDNFIKVLVPHCQDFDHVAVVESTYNWYCLADAFEERGWLLRVADPSTVSQANLKSSDDRTDAQYLAERLRVGSLKHYLPLNYSSRALRDLCRYRMAMVQDCASLKIKLINLYRNQLSKNVRVADLLERCQPHMQPNYRFNSDILEEFKDPNIRLRVAFEISRIAMLEEMIEECNAEIQKQCKDQELVKLCKTIPGCGPVLSAVICTEIGTIQRFKSAGDFVSYCRLCSTSKLSNGKSKGLGNAKNGNAYLSWAFTEVAQYASRNPVIREILQRLLRKYGGLRVKAIRTLAAKIARVTFYVLKNKQPFNAAKCFGMELTKSIVKKLPHKPLREDAAVVLPTVAGQA

SEQ ID NO: 298356 - protein, 340 aa, unidentified
MGEVGIIGLDLAKNVFQVHGAGADGSVVFRRKLSRLQLLRFLAEQPPCMVAMEACASAHHWGRKIGELGHMVRLIAPAYVKPFVKRQKNDAADAEAIAEAASRPTMRFVAVKSVTKQAAGLTFKTRDLLVRQRTQAISALRGHLAEYGLIAPQGPAHPARLKDALGQSGSELPEAVIEIGMELLSHIEALEVRINGLSARLRAEARRDETARRLMTIPGVGPVCAVALAALAPPVSSFSKGRDFAARIGLVPRQNSSGGKARLGRTSKMGQRDLRRLLIIGAASVVRWQARHGAPAGSWMARMPATKPKMLVAVALANKIARVAWALMRGDGVYRAPATA

SEQ ID NO: 298357 - protein, 408 aa, unidentified
MKLFVGIDVSSESLDVCYLASNQKVLNQMTVDNSLVGAKLIQSSILRYADNQNYDQIIIGLESTSVYSFHPATFLHQDEALQALNLTVSVINPTKIHRFKKMFDEDKTDRVDAYRIADFLRLEIHQNSLIKEEQYMALQRLTRSRYQLVTQLTECKQHFIENLYYKCNTLKQGVDTSIFGTTMMALLTEDVSLDEVAEMPLEDLSDFLHTKGKGRFADSEKLAKSIQKAIRSAYRLGAVMADSVDQVLGTYAMLIKTYTKQIKLLEKSIANVLETIPEAKSLLSIPGIGPTYTAGILAEIGQIESFDDQAKLAKYAGLYWKKNQSGNFTAQNTPITKSGNHYLRYYLIEAANSVRNNIPTFSEYYQKKKAEVPKHQHKRALVLTARKFVRLVDVLLRNHQLYMPERSV

SEQ ID NO: 298358 - protein, 349 aa, unidentified
MRHFQPPANTRFYGGVDLHARSLFLAILDHDGQERFARNLPAAPEPFLRAVQPFREGLVVGCECMHCWYWLADTCREHAIAFVLGHAWAMKAVHGSKTKCDRHDAQAIARLLRGGNFPLAYAYPKERRGLRDLLRARLRLVRQRAELYGHVHTARRQANLLPVSSDVKYKSKRAGLTTDITDPFVRRRVETHLALLEPLDVTIRRLEAEIEDAAREIFPTELAVLQSTPGVGPVLSLTILLEIDTIDRFETRQQFCSYARLCGAVQESAGQRTGAGNRKAGNAWLKWAFSEAAVLSAQKDERIGRLLERLASKLGKAKALSALAHKLGRAFYHVLHTKEVFDVNRFVRR

SEQ ID NO: 298359 - protein, 456 aa, unidentified
MKSNKRGKTRQPLSTVHAGAAGLDVGSTFHVVAVPPDRAEDSVRTFRSFTGDLHQLADWLKEVGVTTIAMESTGVYWIPVFEILEARGFEVLLVNARFVKNVPGRKTDVNDAQWLQQLHEHGLLRGSFRPQDRVVRLRAILRHRTRLIEQAAMHIQHMQKALMQMNVQLHHVVTDITGATGMKIIRGIIGGDRDPATLARHRDVRCKESAETISYALTGNYRPEHVLALRHALELYDFLQTKVAECDVEIHAVLRVLNEDCKPPETPMPSVRHAAGKNEPKFDVRGSLYKLLGADLSQIHGLGPYTVLQLVGECGDDMRKWPTSKHFTSWLTLAPGNKISGGRVLSSRTRRSSNRAAVLLRIAAVNVGRTQTALGAFYRRLAARGGKAKAVTATARKLAVLFYNALRFGMAYADPGANHYEERYRKRVLHNLQRRARELGYALVEGKPAEPVGGVS

SEQ ID NO: 298360 - protein, 318 aa, unidentified
MNIAIDLGKRRSYVVMEDNDIILKEGYTETSKDGFSTFFGPVNNPNIIVEASSTVNRIANIFDGYDITVAHPARVRLIAESVKKTDKIDAHTILDLYKKDYLPRSWLPPKITRDERDLCRDRAFLGRQKTTLKNKIRYNSYCLGIEFKYFNKKNMKMLKDNPKLRLLTEELENTLSKIEEYEKLIGKSVELNHYAKLIDTVPGIGRYSALAIASEIGNVNRFKTEQKLLSYAGLVPVTYQSGDKEWKGHIAKGNTFIKTVLVECVGIHIIKRKDSKITYMYNEIKDRRGRKVAKIAAAKRLLRIIYWMLKRNEEYHDR

SEQ ID NO: 298361 - protein, 362 aa, unidentified
MAESTTFVAFDQHAATTVAAVLLPGQRTPALHPMTSDLGEVRRFVRRLGGPPALRCCYEAGPCGFDLQRALAADGVPCDVIAPALIPRRPGSRIKTDRRDAAQLAILYRAGALTAIHIPTEQEEAARDLLRCREDIRADLLRARHRLSKFLLRHGRRFTGTKKAWSQRHEAWLRAQTWPIVALDQTHRAYLRTVDEAVARLRTVEDDLRALLDLEPLRARVTRLRCFRGIDDLTALTIAAELGDPRRFSTAPATMAFVGLVPSEHSSGSTRAQGAITKTGNAHLRRVLVEAAWHYRHHPFVGRALRQRQVAAPPDVVARSWTAQLRLHRKYARLAARGKPKQHVVTAVARELTGFVWAALTQ

SEQ ID NO: 298362 - protein, 373 aa, unidentified
MPKYSTAFGMDVHLRSTTVCALDADTGEAVTRRFPGNPWGEIAGWMDGFPGPSLAAYESGYLGFAPQRELAGLGVECVVAAVSKIPRSAADSASKNDRNDAARMAKAILAHDISPVWVPSPEVEGIRDLAGAYDGATARLATAKQRLLAFLARRGFVYGGTTPAGNPRKYWTYDFLRWLDKVRPEDDGGVRTLAALRNEVEAAAEARADLLSEYRAAVDASPIAAEVAALQSIKGCAFALAAAFSAEVGDFTRFRSGRQVTAYFGLAPSQRSSGDSVRLGGISGAGSALVRKLAVEGSWCYAAARHQPKLMPRDTGAPLEIRMHGRKGSERLLRRREEMLARDMPAAKANAATAAELVRWLWALGMMCREGAE

SEQ ID NO: 298363 - protein, 428 aa, unidentified
MGTKIPNQGRKEAKREAEGNKGHKKGETRMEGPCIAIDVSKDESHIQGYMTLGEPIGGAASIGHDKEGFTRLEELGKELTMRAGRPPAAVFEATGIYHRGLQSYLESIKMTYYIVNPLLAAKCRKQELRTKKTDIRDCKNLAKVYYTTELRETTMADEKYYRMRQLSRYYEDLLNHLRKCKVGFTEALDVVHPSYRDVFDDPYTATSFALLKTYPHPSALERRKPETVARILEKQGDHGVVWCFEKAEQAIRHAQSCVSGCKATDVNVDILLGELEQVEAYQKRTAEVLKQIVEQAKTLPEFRLLTSVPGIGENLAARIMAEVGDIKRFARSKQLAAYAGLDPIVYQSGQMDGLHLRISKKGNKRLRCLVYLAARCGLAQRTTNVIKDFYNKKTRQAHPLCAKAASVACAHKLLRIIHGMCVTGIQFR

SEQ ID NO: 298364 - protein, 383 aa, unidentified
MKMAQETLSAINNTKESVLYTAFELSNTKWKLAFSDGNKFRLVSIESGDLPRLRIELENAKKRFKLDEDIRVVSCYEAGRDGFWLHRYLASRGIENLIVDSASIEVDRRKRRAKTDRIDASKLLRMLMRYHGGEKKLWAIVRVPSVEDEDARNIGRERDVLKRERTSIRNRIKGLLIQQGLRVNNPSNKKFLQELTSLRTWDGREVSSDLKARIEMEYKRLRLVEDQIGILEKEKKERLKEPNTESLRKVNQLLLLRGIGSVSSWNFVMEFFGWREFNNRKEVGALAGLTPTPYDSGGSIHEQGISKAGNKRIRALSVEIAWAWLRFQPNSKLSHWYMKKFGHGGKRLKRIGIVALARQLLIALWRYLENGIVPEGAYIKPIE

SEQ ID NO: 298365 - protein, 411 aa, unidentified
MDVIVQRPGALDVHKAQVTACVRVPGADGARNPEVREFSTTVGGLLVLRDWLAAHRVTHVAMEATSVYWKPVWAILEDDFECLLVNARHVKNLPGRKTDVKDAEWLCQLLEAGLLKASFVPPKPIRSLRALTRYRKAQIKERQREANRLHKALEDTGIKLDCVASDILGVSGRAMLDALVSGTTDPEILADLARGKLRAKIPALREALEGRFDELHALLIGSILAHLDFLDEQVERLSDAIEVQLRPFEPAVRLLCTIPGVEQRTAQNILAEIGTDMSVFPTAGHLASWAGVCPGNDQSAGKRRSGRTRKGSKWLDLALKEAAMSAVNTNGSYLQAQYRRLKPRLGHGRALGAVKHSMLCAIWHMLQTGELYNDLGSDYFRKRNPQRQTRRPVAQLEALGHTVTLQEAAAA

SEQ ID NO: 298366 - protein, 312 aa, unidentified
MLTPSVYLGADVSKQTIDLGCPGLTLPASIPNRPAGFKALLKVLGKSPGLIQVVCEATGPYHKALVAALHQAGLPVSVVNPRLPRDFARARGKLAKTDKIDALMLADYGRTMRPAPTPRPEAQMTLLDDLVTRRAQLVEDRAREKTRLQQTTRAETVASLKLHLRHLDGQIEKLLARIAEVVESTPALRAKVARLVQVQGVATLTASALLAALPELGTLSKNEVTALAGLAPFNRDSGAFRGTRSIRGGRFDVRIALYMAALSASRCNPVLKAVYRRLRAAGKAHKVALTAVMRKLLVYLNSLLKSLPSSPA

SEQ ID NO: 298367 - protein, 389 aa, unidentified
MEARTVNNLPPAGIHDDAICCVLAIELSKKSWMVAVNTPLSDKISRHSLKPCDGKELLDLCERIRTRVARETKQRAEIVSCYEAGYDGFWLHRLLEAHGIRNYVIDPASLQVDRRARRAKTDRVDVERLLRSLMAYLRGEPKVWSVVRVPSVAEEDDRRLHRERGRLINERIQHVNRIKGLLAIHGIYDYQPLRRDRAQRLEQLHTANGRTLPPRLKAEILRELQRLELVIGMIKTIEAERDAIALVNTETERRGAKKIQHLAKIKSIGPEFATTLVGEVFYRSFDNRKQLASYVGLTPTHFQSGAMSRDQGISKAGNAKARTVMIELAWLWLRHQPDSPLSVWFRDRVGKLKGRIRRIAIVAVARKLLIALWRYLETGLVPKGAAPKV

SEQ ID NO: 298368 - protein, 422 aa, unidentified
MNVKPNVYEPEFAAFIGLDWGDASHAVALAAANGTEVEKAKLVHSAETMHAWLQNLKGRFGGRSVALAIETSKGPLIHLFSDVPWLVIYPIHPATSARYRKAFSPSGAKDDQPDALVLLDLLMHHRHKLRPLTVDDTPTTLLGRLCELRRKTVDRRTQLTNTMRAVLKDYFPQALQLVGEVLYSPLALDFLERWPDLLSLKVARPTTLTRFYYSHNVRRPEAIRERLELIARAVALTTDDAIVKVGIRQLERLIQELRIVQKHILEDEQQIAALFKEHPDAPVFRDLPGAGAALAPRLLAGFGTDRTRYQSATEFLRYSGVAPVKEKSGGRVWIHWRWNAPRFLRQSLIEWAGQTIFYCPWAQAYYHHQKAKGKRHWMILRALAFKWVRILWKCWTTRQPYDEARYLQSLIRHKSPFVPHAI

SEQ ID NO: 298369 - protein, 393 aa, unidentified
MDSLLVGIDVGCRCHRVAIGTPDGVLVDQFDMEHRSGSFANFFSRVEEYAHKLHLSVSVGMEGYGGWARPLDTMVVDKGWKLLNVNNLKLARFKEIFPSPAKTDAIDARKIVELMRLQPMLPQAKAVLSNVVEISKVNHELKLLTRRRNSLVDEKVRIIGRMHSDLQAITPGLVEITGSVDNMWFLSFLTSRDNFNALVRMHKSSLMKIKGVGSKYAKAIRNWQKHSFLSKDSDIIGEMVIDDANRMLALIEKIKKIELRIESLISQSQLAKTIQSIPGFGIICSAELAGEIGTIKRFSKEDSLARYIGMAPLDNSSGQYTGAKGGKQVNRRAKTAMMTAAARHYACVSQSKTYYDKKRGEGKKHNQAVRSLGRHLSKVIWSLVKHEREYTIQ

SEQ ID NO: 298370 - protein, 398 aa, unidentified
MENPCITLDVSKGKSYFQGFISIDKPFSKAKQIEHTKTGFDFMMATAKNLKKEGDVTFIFESTGIYHKGLQKYLDDHEEKYIILNPLEAAKIRKSQLRSTKTDQRDCKNIAVAYFSRDYRIHQRQDDIYERLQQMNRDYGFIVQQLRMLKVAYRNTLDVVYPHFDQLYEDVYSDIAMAVIEINSHPDEILKKRIETLSKQLEKNTKHHKNYCMKQAQAIKTYAQNVQSGVSSNDYEVSELNHYREATKAQIIEVEIHLEQMIRVSKDIPLFKQLVTIPGIGENLAARLIAEIGDISRFSNKRQLVAYAGIDPRVYQSGQVSGQHLHITKKGNKQLRTLLYLAVSSSLRLKKPSVIRDFYNKKRQQTNPLSHKAALIACANKLLRIIYGMSRNGSTFLI

SEQ ID NO: 298371 - protein, 344 aa, unidentified
MQITTIGIDLAKTVFQLHAVDADGTTVIRKRLRRAEVLSFVSGLEPCLIGMEACATSHYWARELAKFGHTVKLMPPAYVKPYVKRGKNDATDAEAICEAVTRPNMRFVPVKSADQQAVLVLHRARALLIRQQTMLANAFRAHLAEFGIVIPQGIRHVRALIERVFGEGEDPIDLPALARTALRPLVAQLMELRLQIKTIEKELLAWHRTSQESRRLETIPGVGFITATAIAATVADPSHFRSSREFSAWLGLTPRQNSSGGKDRLGRVSKMGNGYLRSLIVVGATAMIRYAREKGAVSARWINALLEKKPARLVSVAVANKTARIAWALLVRKEDYRVPVPVAA

SEQ ID NO: 298372 - protein, 436 aa, unidentified
MVELLVARCAGLDVAKDEVVACVRVPDGGGGRAQEVRTFLTFTSGLEALAGWLAAEGVTQVVMEATGQYWKPVWYLLEEAGFELLLVNARHVKILPGRKTDVCDAAWLAELLEHGLLRGSFVPPAPIRELRDLTRYRKRLIQAHASEGQRVQKTLEDAGIKLDSVAADVLGVSGRAMLTALVAGERDPQVLAELAKGRLRAKLPQLRQALRGRFGDHHALLVRLALAHLEHLEGAIATLDTEVDRVLAPFARARDQLATITGVGKRAAETIIAEIGVDMTVFPTAGHLASWAGRCPGNNRTGGKRRSGKPTKGNRWLGEVLTRVRLGGRPQPRQLPVGPVLAAGQTHRQQEGRGRGRALDPGHRLAPAHRQLRLPGPGRRLLRPARYRSPATTGRCPTPGPRLPRRPRTRDGVTPGDSRFRMRALVQVQPGPQIGL

SEQ ID NO: 298373 - protein, 345 aa, unidentified
MKHYAGLDVSVKETSLCILDETGKVCRELKVTSHPDDLAQVLRDPAWRLERVGLEAGPLSQWLYSGLAMAGLPVICIETRHTKAFLKAQVNKTDRNDARGIAQMMRVNLFRPVHVTTLTSQNRRALLTARKLLQEKAIAIENDIRGLLRNFGLKVGIIGKVRFEDRIRELVAGLPELAEIMACLLEARQSLRERFAILHRKVLVTVRDDDVCRRLMTIPGVGPVVSLAFSATIDIPARFKTSKAVGPALGLTPVLNQSGESNRIGRVSLCGDAMMRTLLYEAAQVLLTRVQKWSWLKAWAMAVARRRGLPKAIVALARRLAVIMHRLWSDGTEFRWTRESAVATA

SEQ ID NO: 298374 - protein, 341 aa, unidentified
MNLKRVGLDTSKAIFTVHGVDQDERAVLRHNLKRAGMEAFFAKLPPTLVALEACGGSHHWGRRLAALGHTVRLIPPQYVKPFVRRGKNDRNDAEAIADAASRPGMPCVPVRAAEQQAEAIVLSVRELLVRQRTQLVNAVRGHAAEFGVVAAKNISHLSGLLETVAAEEAVPSTAKEMLAFLGAQVAQLDERIAELERRMKQQHKASAVSQLLAEVPGIGPISALTLALKIEPGRFTSGRHFAAWLGLTPKEHSTGGRQRLGGISRAGNERLRQLLVVGAMAVIRYAKPGSKTASAWLLALLERKPRKLAAVALANKMARIAWAMMATGEAYRGSKGAAAAA

SEQ ID NO: 298375 - protein, 351 aa, unidentified
MTNSTLHDLVTTIGLDLGKNSFHLIGMDKHGKILWRQKLARGQLEERLANRPPCLIGLEACAGAHHVGRRLAALGHEVRLIPAQYVKPFLKGHKNDYRDAEAIAEAVQRPTMRFVPLKSSEQLELQALHRVRSRLVGQRTAVINQIRGFLLEHGIAVRQGATRLRQALPTILAQRDDVLTPRMVHLLEDLCGDWRQLDTRIEAITSQIEELARQDPSCQRLMGIPGVGPLVASAMVAAIGNGAAFARGRDFGAWLGLVPKQISTGDRTILAGLSKRGNRYPRQLFVQGARAVLQQQGSWTKHRFGHWLTGAAARLHGNVLAAALANKLARIAWGVLYRARDYAPGVPMQPA

SEQ ID NO: 298376 - protein, 315 aa, unidentified
MLIHYIDIAKRNFVIAVSSLSKTKTETNNPKGIAHTIEYLKKHKVALVVTESTGGLEIPAAKAIRRAGIAVIIANPRQTHQFAQSQPLTKTDAKDAKMPAFFAQMTAQKEDSQTMPYQPPTEAEEVLEALVNRRNQLVDMRTAEKNRLHQVHETQVGSVKQLIAHFDRLIDELDKQIDDHTHTHFDGKAQVAEQIKGIGSITTATLMAMLPELRRLSHKRIAGLAGIAPHPRESGETKFKSRCFGGRSAVRKALHMATVAATRFEPLIRDFYQRLLSEGKPYKVAVTACMRKLLTISNARMRDYFAENDTAENGI

SEQ ID NO: 298377 - protein, 408 aa, unidentified
MNYELITVVGIDVSKGKSTVAVRRPGGEVVLTPFCVEHNSQELKELVEKIRSIGGNIRIVMEHTGMYWRPIALALQQAGFFVSVVNAILIHRFIDNSLRNVKTDKADSLKIANYGLTFWEELREYSAEDETRQMLKTQCRLYERTLGTSVTLRNGLISLLDQTFPKINNVLHSDYRNTRGHFKWVDFVKRFWHRDCVAGLSKHSFEETYQKWCKKEGYCFRTVDVEKIYDCAQNAVATFPKSESTKILITQAVNSLNAVYDALQILRGEMVRLASLLPEYEVVMEMQGAGEITGPMLMAEIGDVRRFTNKNALVAFAGVDAPPYQSGMFDAKTRHVSKRGSPHLRKTLFQITTILLRKSNSENPVYLFMDRKRTEGKHFYVYMVAGAAKFLRIYYAKVKNYLDALETA

SEQ ID NO: 298378 - protein, 412 aa, unidentified
MKVVYEICCGIDVHAKMLVACLILADGKKETQTFSTMTDDLLRLSDWLVKAQCTHVAIESTGVYWKPVFNIVEGVVTVILINPDHARALRGRKTDVKDAEWLADLLRHGLLKASFIPPLEIRELRELTRYRQSLVQEQTAVANRIQKVIESANIKLAQVASDALGRSGRAILWALARGETDAEKLASMALGKLKEKRWQLERALTGRLTPNQRFVLRESLLHWEELERAEGRVSKEIDSYLNDRPKLSQARDNLDSIPGLAKRAAENILAEIGVEMEVNFPSDAHLASWAGMCPGNKSTGGKRLSGRTRKGNTYLRSALVQAAWGATMKKNCYLSSQYTRLAKRLGRKKALVAVGHSLLIIIYHILQSGQSYTELGGDYFDRNHVEHQRDYFIRRLQMLGLKVTVEESAAAA

SEQ ID NO: 298379 - protein, 385 aa, unidentified
MAIHNNGEKVHGYTMSNDAFGFARLLGDLRTVHKPEIIFEATGVYSRRLQAFLDEHGYAYTRLNPLEAKKQLDSLRVRKTDQIDAEKLAQSQFVLNRKPTYVQEEVYQNLRALSRFYQNLTEDIVRAKNRLHKVLQVTFPELETILSTPSGQQYWNLVIDFPCKDFVLDLSKNELSKSIRLSTSKRISDKRVAYLAEKLIALANQSYCAVKKTSPILEEVRYYAKELLRLYEQRQAVLDEMVELAQPLPEYDILLSIPGIAETTATSIIGELGDIRRFQSANQINAFIGIDLRHYESGNFLAKEHITKRGNPYARKILFKCIHNIASASHTNPCHIADFYEKRKRQSQTTSTKPHTIASIHRLIRTMYYLIMHNKLYDYTSTQNR

SEQ ID NO: 298380 - protein, 465 aa, unidentified
MRTDTKLWRNRKAKQELARRLQSENPGLEVVQPHAAGIDVGNSAHYAAVRPDRDSQPVRRFECFTADLYRLADWLQNCGVKTVALQSTGVYWIPLYDILEERGFQVYLVNARHTKNLPGRKSDVQESQWLLKLHTYGLLNNSFQPPSKIRILRTYWRQRLQHVTGAATCVQRMQKALTQMNIQLANVISDLSGVTGQLIVRAIVAGERDPWKLAELSHPRIQASREEIAKSLEGNWRQELIFVLQQEIQMYDTYQQRVAECDQELQKHLSAFADTVSPPVKEELPPKKKKKQNKNNPQFHLAAELQRISGVDLTRIDGVDVMVAQTLVSEVGLDMSRWKTEAHFASWLGLCPDNRISGDKVLSRGTRHVLNRAATALRLGASTLLKSQTYLGAQYRRLRSRLGAPKAITAMAHRLARLVYRMLKYGQHYVDKGAEYYERRNRQQQIEFVRKKAAQLGLKVTPAHA

SEQ ID NO: 298381 - protein, 427 aa, unidentified
MAKVEHTSDARVLVGIDISKHRHEILIAVPGKMRRRRLTITNSTDDFQRLIGILREYNMPVRVGFEATGNYHRVLMYHLGIAGFDLKLVSSIALARTREALHNSWDKNDPKDAQVILHMLQIGAVQIFQDPMVADTNDIQELSKTHDAVSRAKTELWHRILTHYLPLYFPEADRFHRSSRTDWFLAFLEMFPSPHMISAMTKEQFIQSAWDVVGRKVEKSLMLSDIYETAKVSAGLPVSPDADAIRMFRLMLAEGRSLIRQRNSIEDRAVELLGHRPDYQLLRTIPGIGPINALTILAETGDLRRFRHHRQFLKFCGMDLATVQSGMFRGRSKISKYGNARLRRTLWLAGQTAVLKKANSFRDKFERYIAQDRHNPDLRRKAYTAIAAKMARTVHAVIKSGEPYRPFFEGTSPGGRTPLCRAVEAGS

SEQ ID NO: 298382 - protein, 403 aa, unidentified
MNMNAVGIDVSKGKSMVAILRPFGEIVSTPFEVKHTVSGIRSLIEHIKAIDGESRIVMEHTGRYYEPLVRELSQADLFVSAVNPKLIKDFGDNSLRKVKSDKADAVKIARYTLDSWTELRQYSLMDEIRNQLKTMNRQFDFYMKHKTAMKNNLIGVLDQTYPGANTYFDSPAREDGSQKWVDFATTYWHVDCVRKLSLNAFINHYQKWCKRRKYNFSQSKAVEIYEASKEIVSVLPKDDLTELIIKQAVEQLNMASRTVEQLRTMMNDAASKLPEYPVVMAMKGVGKSLGPQLMAEIGDVSRFTHKGAITAFAGVDPGVNESGSYEQKSVPASKRGSGTLRKTLFQVMDALIKTKPQDDPVYLFMDKKRSQGKPYYVYMTAGANKFLRIYYGRVKEYLSSLPK

SEQ ID NO: 298383 - protein, 408 aa, unidentified
MGRAAEVMAPSSSTRTDGDCPVAQVNDLSRSLTAFDPISTLVVVVEMSKASWLVSGVVPGIERQPLKKLEPDATALLRLIERWRNEARRAGRPISRIALAYEAGRDGFWLARWLTTRGIEAHVIHSASVAVSRERKRAKTDRLDAAMLMRVFLGWLRGERGHCGMVAIPTMEEEAARRPSRERESLVNERSRITNRMKSALARLGIRGFKPHLRKAPERLAGLRTAEGTGLPANVIEEFRRDMARLALVREQISSIEKTRADRLERAPDTGPHAMVRLLARVIGIGIETADMLVREILSRKLRDRRAVARYAGLTGSPDESGLKRREKGLAKAGNARVRRGLIQLAWRFLMFQKDSALARWYRTRTEGPSGARKTTMIVALARKLLIALWRLVTTGEVPDGVELRPAA

SEQ ID NO: 298384 - protein, 343 aa, unidentified
MKLSRVGIDLAKNVYQLHGVDRSGKTVWKRRLKRHQWLQVLLDTAGPECEIGMEACAGAHHWGRELQSRGYTVKLIPPQFVKPYVKSNKSDAKDAEAICEAMSRPNMRFVTVKRVEQQDIQATHRIRAELMTQRTAKANQIRGLVAEYGLVAPKHLSSLRAAIPCWLEDAQNGLTGDFRALLQGVWEDLRLLDDRVGEMDQLIKRLADNNEDCVRLQQLRGIGPMTATAMIATVGDARQYHKSRQMAAAIGITPKQHSSGDRDRLLGISKRGDVYLRTLMIHGARAVVARATHKDDRLSRWVTHIANKKHPNVAAVALANKTARMAWAMLRNETDYDPDYAIS

SEQ ID NO: 298385 - protein, 336 aa, unidentified
MLGSAGLDVHKDSVQACAVNNEGVGLLQKRFTTTDAGLEALYNSVKDYDCVMEASTACFRVYDYLKDRGVKVKVCHPKRVKAICSAKIKTDKVDAETLAQLNRADFIPLAYIPSKEIRQQQDIIREHVQLTKQKTRIINQTKAFLLRNRIKTDYLPLTNKGIKLIETSTLPFNIKIKLTNAKQQFDLIKKQLKQINNTINELAKQNPDAKLLETIPGVGTLSAMIITLQIDGIQRFETLDQLISYAGLCPNIHQSANTISQTKITHDNCHLLRWILIQDAWQAARYGARFKKIFNKKAKKKGKHKAIIIVAKKLLTIMYFMLRNKTPYNPKTGGRS

SEQ ID NO: 298386 - protein, 415 aa, unidentified
MNAISVGIDVSKGQSMVAAMRFPGEMVWNPRKVMHTAAALETLAYEIKALGYNGPDVRVVMEATGRYHEPVAQELHEVGNFVSVVNPKLIKDFGNNTLRKVKTDKADAKKIARYGLQNWNDLREYTPVEAARLKLKQFSRQYNLYSKMKVQLKNNLIALLDQVFPGANELHDSPVRADGHEKWVDFVTTFWHCECIADMSEAAFIERYRKWCKRLDYHFSELKAADLYICSLGHITTLPKNINTKMLITEAAKQLTGISRMVEMFRAEMLRLAQMMPEYEVVMGLYGVGPTIGPQLMGEIGDVRDFANRRALVGFAGVDPGSDQSGKRNSGGESTSKRGSALLRKVLFLAVETYVMRKPADEPVYQFYVKKRAEGKEYYVCTTACANKFLRIYYARVKEHLDKTLPEEDRFPCQG

SEQ ID NO: 298387 - protein, 372 aa, unidentified
MKKTTPPSVVTNLTSTPAPAVPGGWTLGLDLGDRAHHVCVLDAAGRIVREGALANTRPALAKLLADFPGATVAMEAGTHSPWISRYLTGLGAKVMVANPRQLHAITRSERKCDRRDAQMLARLARVDPALLHPIQHGTAQAQHDLLGLKLRDALVRTRVNLINAVRFTLKSLGYSVRNPSSESFHKTALADVPADGLAVVQPVLTVLAHVTEQIKGLERDLVQRGKTDYPATQRLQQIAGVGPLTALCFVLKIGDPQRFGRSRDVGAYLGLCPRRDQSGGTDKQLRISKCGDGLLRRLLVSAAHYVLGPFGPPCALREHGQRLTGAGSAREKKRAVVAVARKLAVLLLSLWKHGTDYEPRATARPALGVMPA

SEQ ID NO: 298388 - protein, 408 aa, unidentified
MNEKRKRYIGLDVHKHYLVALGVDADLNVVLPMRRVELSNLESWMKKNLTKQDEVVLEMTTNTWQLYDELSEYAGLVTVVHPPHVALITRSQVMNDKIAASILARLLAKGLLVGVWVPPQEVRELRGLVAQRQKMTRLATQAKNRLHAVLQRHHLKPPAGNPFAKANNNWWQALRLGKLEKMNMQSDLETLQFAEGQEGRVEKEMTMIAAEDEKIGRLMHITSFGVITAVTVFAAIGEIARFSEPKKLVGYAGLGARVHDSGMTTRTGKITKAGRRDLRVALVEAAHIAAQYHPHWKAELARLQPRLGYNKAIIAIARKLLITVWFVLQGKPDKYAEPQAVAQKMLKFAYAVGKAKRPKGQTAAQFARLRMDALGLGSELTSIPWGSKKPIPLPPSKLKERSDVPNLS

SEQ ID NO: 298389 - protein, 316 aa, unidentified
MAEVINQTNVGIDVSKDWLDIVALPSGESWCIENKEAAIRELIKKLEQLKPERIVLEATGGYEQMLAVQLYLAGLPLCRVNPKRSRYFARSLGQLAKTDKLDGQVLALFGERVKPLLTRLPSEKEQLLSALITRREQISNFLVAERNRLHTAPKKLHASLNEHITWLKHELKQLECAIDDFVNDDPDFKEKSDLLVEVQGVGKKTAAKLIADVPELGDCDRKQIAALVGVAPYNRDSGRKTGQRYISGGRPDVRSILYMATLTATRCNPVIREMYQRLLKVGKKKKVAIVACMRKLLTILNAIIRDRSHWNLAFSA

SEQ ID NO: 298390 - protein, 348 aa, unidentified
MTSLTDVVDVVIGVDTHVATHSAAAVDARTGGVRGEITVEATAAGYARLVAFADEHAVLRAWAIEGTSSHGAGLTRLLSGRQEMVVELDRPQRAQRRGGAKSDPLDAVRAAREAMARPRLGTPRASGDRQALSVLLAARRSAVNASTDAQRQLFALVIAAPEPIRARFRGQRLPAMIATAAALRVRTAADTETTTTITALRALARRARTLAAEAEQHQKAILAIVTSWRPDLLTQSGIGPIVAATILCAWSHNGRIHSEAAFAMIAGTAPIPASSGQITRHRLNRYGDRQLNRALHTIALTRIRYDQNTRDYVARRTSEGKTRREITRCLKRYIARDIYRLLQHPATT

SEQ ID NO: 298391 - protein, 364 aa, unidentified
MTNSESQITNTTIIGVDISKNYFDIYVLTSGKTMRFDNNTRGIKKFIKYIAPLNPTIVAMEYTGGLERKVFFALQNNNIPCCCLKPINIKNFSKTIDAKAKTDPISAKLIAHYTFLYKPAPQPKPDEKLLLLKDLASRHLQLTQFLSSEKNRLSSSTFAKTKSQINKSIKVVEKLIEDNRKQLKELICLDTELKAKVELLDTMPGVGEHSAMMLAVLLPELGTISGKQIASLCGVAPFVNQSGKATGKASIRGGRDKIRQILYMVALVAIVYNPTIKEYYNRLIQKGKPAKVALVACIRKIIRILNAMIKNNNPFIPDYYETYVREQNNITKLILTKNNEVEQDNYLVLSDTNFLREPDLKNIT

SEQ ID NO: 298392 - protein, 310 aa, unidentified
MDAIVIGIDVSKDKLDVHVLPAAQAFTVARNGAGIEELAARLAALAPAVVAIEATGGFETIVAAGLAGAGLPLVVVNPAQIRAYAKAIKQRAKTDPIDAAVIAKFARATRPEVRPLPDEVTRQLADLVARRRQIVEMMAAEGQRGRRVDHKRVARSIARVRKTLEAELAEVDQEIGDQVRGSPLWREKEDLLVSVPGVGPVVARTLLAELPELGRLERREIAALAGLAPFTRQSGRWRGRSFIGGGRATVRTVLFLAAMTAARHNPTLKAFRDRLVAARKPKMVALIATARKLLTILNAIIRDNRPWQNA

SEQ ID NO: 298393 - protein, 316 aa, unidentified
MSAQELWIGVDVAKAWLDVTGTSEETVRRFANDEPGIAALVADLAARGPRLVVLEATGGYETAVTAALAAAGLAVAVVNPRQVRDFARATGRLAKTDALDAQILARFAQRVQPPARPLPDATTQELASLLARRRQLIEMRTAERNRRPGLPPRLQPGLDEHLALLERQIAALDDELDQTLRDSPVWREKEALLRSIPGIGPVVARTLLGELPELGTLSRQEAAALAGVAPLNHDSGQRRGARRIWGGRAPVRAALYMAVVSATRFNPAIRALHDRLRRAGKPPKVAFVACMRKLLTIANAVLRDGTPWTPHPVPSA

SEQ ID NO: 298394 - protein, 271 aa, unidentified
MLVLGMDIGKREVFVQLQDAAGTSLGQRGPLANTPAGLQQLSDWARKWAELAELHVVMEATHVYRERCAHHFQSLGCVVSVVNPTQIKYFARSVLRRGKTDAMDAELIARYGVVMHPGSWTPPSTALSDLKQLTREREAVLVRRTQEQNHLQALQDAHRASETVVKLTQQRFDLMVGQVGEIEAAMRALMEADETLSQQLKLLLSVPGFAFVAAATIVAETVGFAHLDTGRAISAAAGMAPSPHQSGSKRGQGRISKTGNARLRRIAYLSA

SEQ ID NO: 298395 - protein, 393 aa, unidentified
MVSTVSRADAVTNGCAFREGTVLTIVTDRRARPGRARPAAGAVPTAWVIGVDTHTDSHAATLIDALGAVVAQTQVAATPDGYAELQDWAQALLPAGQRAFWAVEGTRSHGHGLTRHLLAAGHRVIEAVKPEQGRRRRRGKSDALDATHAARAALATEHEPGARHAEPRADGTREALRMLLVTHRHDTDMRTATVNVFKSLLLGAGNLRETLRGLTTARQARAAAALPEDPTADVETRVRVQILRRAAATIIELDKAIAATGKQLHTLTKQACPGLLDLPGVGPITAATLLTVWSHPGRVHSEAAFAALGGISPIPASSGRHQRHRLNRGGDRALNAALHTIVTTRRRIGHPPTSAYIARRTTEGLSSKEILRCLKRYAIRQLYRFLQTNAVTT

SEQ ID NO: 298396 - protein, 396 aa, unidentified
MDLPVILLAQTQKYQTYHIQGGVIRASIIYVGMDVHTTNFTFCCYTADSDRGFAVAQTEPDYRQVIKYMERVQKQRGEECKFVCGYEAGCLGYSLYHQLTRCGVDCVILAPSTMHQEKGKRIKTDRRDAENIARCLAFSLYSPVYVPTTEDDAVKEYIHMRDDIKADLKRVKQQIIAFTTRHGFAFDGKSYWTQKHLKWLETLVFEHPLYKETLQEYLILYYMLDEKVAVYDTRIEEMSHLEHYEENVQKLCCFRGVAAHTALSLLVEVGDFQRFRSAKHFAAYLGLVPGEHSSSDKQIRTSITKAGNTHLRRLLVEAAQSYNRGAIGKKSAALKARQGGNPAEVIAYADKANERMQRKYYRIAFKSRHNIAKTAIARELACFVWGMMTGNISNAA

SEQ ID NO: 298397 - protein, 387 aa, unidentified
MLPTSASIQTIALDYDKTLVLAIELSNASRVLAAQIPGLPRVKARRSVKPTAEALMAAIDAYRERAHEVGHDVERVIAIYEAGWSGFWLARWLEQRNVEVHVVQPSSIPVDRRARRPKSDGIDAELLLRSLLAWLRGEPRVCSMVPIPAEADEDARRCVRERAELVSERVSLVNRIGAILVTLGVSNFNPLLRNRRQCLDELRTGLGTPLPPHARGKAVRMIDRLELVLEQISELDRERDAVLEEEAPDQAGRMIQELVKLRGIGVQSATVLVHEAFVREFANGKALGSYAGLTATPYSSGGREREQGIDKAGNRRLRTTMVELAWLWQRYQPGSAPVRWFRGRTGGTGARMRKVMVVALARKLLIALWRFATQGVVPEGAIMKPAS

SEQ ID NO: 298398 - protein, 415 aa, unidentified
MQEEAYAIYVGVDWASEAHQVAIVDAACDLRIQERVPHTGADLNQLAEELGHRAGGEPGRVAVAIEVPRGPVVETLLERGLHVYALNPKPLDRFRDRYSMAGAKDDRRDARVLAEALRTDRPAFRRLQIDEPAVIRLRELARLDAELQQERTRLANRLREQLQRFYPQLLAFCPAADEPWLWTLLDLAPTPAAGRRVSPAQLGRVLRTHRIRRLTADALHAQLQTPALRVAPGTAEAASEYLALLLPRLRLVHAQHRACEQRLDRVLAELAEPAPGQPTEHRDVTILRSLPGVGRGVAATMLAEATPLLATRDSHGLRTQMGLAPVTRQSGKHVEVSMRYACNQRLRYAAYHWGRTSVQCDPHSRAHYAQLRQRGHAHARALRGVVDRLLRVLVVMLDTRTPYDPARRRPLEQTA

SEQ ID NO: 298399 - protein, 333 aa, unidentified
MSSVVLSKFQVVMTKDRKIYGIDISKSVFDIYNQDTGHYQLKNDEKGFKKLLKSLSKDALVVMEATGYYHYRLAQFLYKKGILVSVVNPLSVKRFIQMKLAKVKTDKSDAKSICEYGIFNDVPLYNALTDVQAECLQLFRLLDSYVKKSTATKNKLHGEETLGIPSKTVYRSLKRDLNHLKKEILILEKRLLELVKQDQQEQLTLLQTIPGIGLKTALFLIVVTDGFKKFESASQLCSYVGITPTIRESGSSVRGRSRISKVGNKKLRNLVFLAAFSAYKYNRSCKALFDRIVAKGKSAKLALIAVANKLLKQAFAIAKSGLPYDENYVSKFV

SEQ ID NO: 298400 - protein, 314 aa, unidentified
MDETKHFVGIDVSKAALDVHVLPVGKSQRFPNDGDGHAALEGWLSSHPVERVVLEATGGYERKAVQALQQQGYHVCVVNPARPRDFAKAGSRLAKTDRLDAAVLAHYAQVFDPPSAPCPGEAEAKLARYASARDSFVAEKTRLRNQLGLNDDADLERMHRDILETIEAKLAELDRMIQSCIREKAEVSQRYDQLRAVPGIGPVAAVSLLAFLPELGQVSRRAIAALVGVAPFARDSGMMRGQRRIAGGRAKVRRMLFMASLSAARHNPIIKTFYERLIKGGTGKKQAIIACSRKLLTILNAMVRDNREWQPMTT

SEQ ID NO: 298401 - protein, 358 aa, unidentified
MSNLKYSIGIDVSKKDFHCCLSVIDTEQFVKVKSTHKFTNSTSGFKLLIEWVRRNRKEDLQVFYVMEATGVYHEQLAWYLHNKDFSVSILLPNKAKKYLQANGAKSKNDKIDARGQAQIGAEKKLDLWIPPSRKLYNLRSCTRQHQSLSEMHSAINNQLEAITHSQFQSKDIIRQMKKTMRLLEQQINEMDKIIEEIVKKDEVLNFHYKNISEIKGIAMLSFAVIAAETNGFVLFKDAGSLISYAGYDVVENQSGNHIGRTKISKKGNSRIRRILHMPALCAVREDQPQFKNLYERVYKRKGIKMKGYVAVQKKLLVMAYYLWRKKMKYQADFDYSEKIIAPEKSEATHDKIPEGRFH

SEQ ID NO: 298402 - protein, 343 aa, unidentified
MVIAIVGIDLGKNSCSVAALDGNGAVALRRRMSRAKLVEFVERLPACVVAMEACCGAHHLGRVFEAQGHAVRLMSPEYVQPYVKAQKNDDRDAEAIAEAATRPTMRFVAMKQEAQLDMQTLHRARSRLVNSRTRLINQMRAILLERGITVAKGRRALAVALEPLLDSEDTGLSSRMRMLLADMRVEWEALDTRIATLDREFVETARHSAPERRLATIPGIGALNATALVAAVGEADGFAHGRDLAAWLGLTPRQMTTGGKPRLGGITKRGNVYLRTMLIHGARAALPGLSRSDTPLGAWLRELMARSHVNVAVVALAAKLARIAWAVLRSGADYDRRAGAAAT

SEQ ID NO: 298403 - protein, 341 aa, unidentified
MHRSQITYDWIDPDTGQRQRGQLAPAHREHLRVWLEQFAGRQAAFAVEGCTGWRYVVEELQRVGIQAHLAEPADTSAARGPKRRAKTDQLDARHLRELLACGRLPESWIPPAQVLEVRTQVRCYKALADEHTAWLQRVQATLFHHGVPAQRNLLAADRRARLERGSGLSPAASQQVTVALRTLDHLDGELDRLRGELVGLARRQPGCRALDALYGIGPVTAVAIWVELGEVGRFTSSRHAVRHTGLDVTVYASDGKRTPGHLARQSPPVLCWALFEAATCAARASSPDHAYYTQVKQRLGGNRATLSVARKLTRRCYHTLGALGEQAYAPPCHPHDLEQVA

SEQ ID NO: 298404 - protein, 448 aa, unidentified
MEIIYHRCAGLDVHKKTVVACRMRTGEHGQVEWETKTFGTKTVELLALLDWLSEWELSHVALESTGDYWKPIYNLQEGNFEVVLVNAKHVHHVPGRKTDVNDSEWLAELMRYGLLKGSFIPPQTQRDLRDLTRYRTRLVRERSRLVNRVQKLLEGANIKLASVVSDIMGKSGRAMLEALVAGETDAAVMAELAKGRLRTKLSELEKALTGLVRPHHRFLLAQQLSHIDFLDEQIEALSQAIERHMAESETAGPAGSPSSETVDPTTGEVQEQAPTPETKPPVSFSQAVALLDTIPGVNHRLAEIIVAELGTDMSRFPTAKHAAAWAGVAPGNNESAGKRYSGKTREGNQALQDALSEAAWAASRTKESYLAALYHRLAGRRGKKRAIVALAHSILVSSYYMLARHEPYRDLGRNYFDERKKETVINRLLHRLEKLGFSVTIEPAAVPA

SEQ ID NO: 298405 - protein, 348 aa, unidentified
MSTILGLDLGKFKSLACTYDTETTAARFTTAPTDPPGLRALLQAERPALVVFETCTVAGWVADLCAELGLPYAVANPMHEAWSWRKVRRKTDRDDALKLARMAALGELPTVPMPSRAAREYRALVKYRDRLVGRRTAAQNRIRALCQRHGALLPSGHRAWTKAGLALIATLARPLAGCGPEDLWRGELALELRELGSLTGLVEEAEGRLDALGAADERVRLLRTIPGVGPRTAEVIVAHLGDATRFRTAREVSAYAGLVPRQFQSGEMDRRGRITRRGPALLRKALVEAAWLMQRYNGWAARTLARISKGQRTRRKQALVAVARKLLVRCWGMLKHGTAWDEHLAAAG

SEQ ID NO: 298406 - protein, 456 aa, unidentified
MPRGRRRVTRPVTMPILRPNAAGIDIGATEIYVCVPLDRDPQPIRRFGTFTEDLHALTDWLTRCGVTSVAMEATGVYWIPLYQILETRGFEVCLVNARHVKHVPGRKSDVQDCQWLQYLHAVGLLRASFRPPEAVCAVRSLLRHRDALVQLAACHTQHIQKALNQMNLQIHHVISDITGVTGLAILDAILAGERDPQVLARHRDRRIKASPETIAKALVGDYRSEHLFTLHQALDSYRHYQRLIAQCDLEIQRRLGAFASTIDPAQHPLPPAPASRRKTRGTAPGFDLRTELYRILGTDLTQVPGLQTPTVYTLFSELGADLSKFPAGDHFASWLGLCPDNRISGGEVLSVKTRHVKHRVAQALRVAAQSLYRSRSVLGAYFRRMRAKLGAPKAITATAHKLARIVYHLLTTREPYEESRLAAAEADHRRRTESRLRAQARALGFQLVPVPEQSVS

SEQ ID NO: 298407 - protein, 348 aa, unidentified
MTKLARIGIDTSKSVFQLHGVDEKEQAVLRKQLRRRQFVVFFAKLEPTVVGLEACGASHHWARELQQLGHQVMLIPPQYVKPYVGRNKNDKTDAEAVCEAMSRPKVQERLVAIKSVEQSAAQMLLGVRESLVKRRTQLTNTIRGHAAEFGLVAAKGLDKIEPLLARIAADAGLPALTKEMFAVLGREYAELGPRIAQIDNKMLAFHRSNEVARRLMEVPAIGPIGACLLVTKIVDPHAFRSARRCAAWIGLTPKDHSTAGKQRLGGITRAGDERLRAVLVSGATTCIQHARNRRGRPSPWLVELLKRKPPKVAAVALANKTARIAWKIMTSGERYDPNRCEARRGLAA

SEQ ID NO: 298408 - protein, 428 aa, unidentified
MNYTQNRKIKQVKIETLVVGVDIAKKTNFAKAQDYRGIQYGKAFKFKNDKLGFKNFLYWIKVMMEENDKTEVRVGMEPTGHYWLNLGEHLKNKKMKFVLVNPAHVKKTKTLDDNSPTKTDKKDARVIAQLVKDGRYSEPNMLEGLYAELRVAMTHRERLNKDLMRIKAKVHQWIDKYFPEFLDVFSKWEGKASISTLREIPLPDQVNKLKIEEIVKVFKKGAKRAVGKKKAKKLKVAAKRTVGIKKGLKMAKIEIKNLIIQYKMLNTQKEELEKEIEEMVIDLPGAKEMESIKGVGIMTVAGFISEIGDIRNYDHPRQIRKLAGLNLVENSSGKHKGKTKISKRGRPKLRSILYRVTWPLVGQNKEFRQLHEYYTTRDKNPLKKKQSLIVMACKLIRVFYALGKKRVKYDGEKLMKDIKRNKHVEKVA

SEQ ID NO: 298409 - protein, 429 aa, unidentified
MQESASTAPVEGVAAYVGIDWADQKHDVALRSASEPGKVEHRLIAHEPEALMDWLGELQQRFGEKGKILVCLEQSRGALIYHLMGYEFLELYPVNPSQLASFRETFSPGGAKDDQPDAELLCELLYCHRDRLKAWKPDDELTRKLAFLNEGRRKAVDQRTQLANEIKSRLKVYFPLALQVLDNDTSTALAADLLLQWPTLDGLQKQSAHKLRKFFYAHNCRNEQKLLERLELIKVAKPLTRDPAVIEPAALRMQLLAQQLKSLLPYIARYEKWIAELFDAHPDSFLFRDLPGAGPALGPRLLTAFGTDRGRFEHSINFSSLSGIGPIRRASGKKTGKNASVHFRHACPKFLRQSLHEFGLHSIRSCPWAKALYQSLRARGKGHHAAVRAVTFKWIRILFCCWKNRVPYNPERYLQALQTRGSVYAEAAG

SEQ ID NO: 298410 - protein, 343 aa, unidentified
MKLSRIGIDLAKNVFQLHGVDRHGMALWKRRLKRDQWLKAVLNKAEPGCEIGMEACTGAHHWARQLQSRGYTVRMMPPQFVKPYVKSNKNDANDAEAICEAMNRPNMRFVAVKSVEQQDIQATHRIRAELKDQRNAKANQIRGLVAEYGLVAPLTLRALRAAIPCWLEDAENGLSDHFRSLLHGLWVDLLALDDRLAELDRQIERLANSNEITKRLQQLRGVGPMVATALVATVGNGEQYHKGRQMAASLGLTPRQHSSGDKYRLLGITKRGDVYLRTLLIHGARAVVSQAKHRDDRLSRWVTGIAKRRHPNVAAVALANKTARMAWAMLRNETNYDPDFAIR

SEQ ID NO: 298411 - protein, 393 aa, unidentified
MRKPKKQKKPLNDLSRSPTPFDPNRTLIVVIELGKESWLVAGIVPGVERQPLKKLAADENELLKLLERWRAEAEKAGHKIDRITVAFEAGRDGFWLARWLRARGIETHVIHAASVAVPREHRRAKTDRLDTEHLKRAFLDWLRGERNHCKMCAIPTAAEEDAKRPHRERETLVGEQTTTINRIKATLARLGIRNFNPKLKKAAERPEHLRTPEGEPIPPNTLAELSRDMARKQLVAEQIKQIEKTRLEQLKEAPKAGPNLMVLILVRVIGIGIETADMLVREILSRNLRDRRAVARYGGPTGSPDESGKTRREKGLARSGNARVRRGMIQLAWRFLDYQKESALAKWFEARTANARGSRKKMIVALARKLLIALWHFVRDGVVPEGVILRPAH

SEQ ID NO: 298412 - protein, 368 aa, unidentified
MNDRDHSRLEQFRQLRKEVRGSTEYLIIGIDIAKEKHHVFFGTATGKTLLRRLVFENSVNGFEKLMAYAEAIKTKHALGKMVFGLEPTDNYHKPLAEYLIKCGYNVVLVSGVAVVRNRELLDGRWDKNDDKDSANVADLISQGKCLYYDYPAMPLKDLRNLLSLKRRLKKQEHGTKVRIRNHLLAQYFPEFDKYFEKGGAASLAVVKWCLKPSKIWNMEFEEFIQLVAPRIRRGDQEKRLRDIWEVAIESIGCEAGDELDFEARLMVEDLEQIRESLKKVDEHIEEVCLGFPEYEYLRSIPGFGPDVASNVIAAIGDPFRFENGRQVLKLAGFDLSAVRSGNTSEKAVPVISKKGMHILDMPFTRRPL

SEQ ID NO: 298413 - protein, 324 aa, unidentified
MSTVVGIDIAKHTFDIATLQANGKHRTKAKLSNDPKGFDVLLQWLGKHAEPQAWIVMEATGIYHEALAEWLYEHDYKICVLNPAQIAHYARCQLQRVKTDKVDAKLIADYGHRHQHKLRAWKPEQPEIKRLKALNHRLKDLQELERMEQNRLDVTRDVKVAASIRSVLEHIRQQIAETLKAIKQHYDDNDDLRGQRDLLKSINGIADRTATLLLAELGDMQRFGDSRDVTAFAGLNPKLQDSGKHKGHVRISRMGSSVLRAGLYLPAVVSLTHNAAIRAMAKRLKARGKAGKQIVCAAMRKLLCIAYGVLKSGKPFDPQLAIAR

SEQ ID NO: 298414 - protein, 336 aa, unidentified
MQHEPIAVADAALPDAALPDAALPVAGVDLSKDKLDLYVDTVGLRLTVANDDAGVATLLAALRRHKARLVVLEATGRYHRRAAATLLDAGVEVAVVNPAHARDFARACGRLEKTDRVDAELLARFGRAVNPRAAAASPGHRAVLADLVSRRRGLVQVRVAEANRSHDRLPKLAAAQSRKLLRLVDQQVEDLDREIARLVEADDDWRGKAELIDSVPGIGPGTANQLVVALPELGTLNRQQIAKLVGVAPLNCDSGHYRGQRKIRGGRADVRACLYMAAFNARQRCDRFRRHFEGLIARGKLYQVAMTASIRKLVVTLNQMVKNNTHWNQSFNGATA

SEQ ID NO: 298415 - protein, 477 aa, unidentified
MSEKTRQQEVRGSGGPIPAKSKRNKQPNRPGQPDRPVFEPNAAGIDIGAREIYVAVPADRDEHPVRKCETFTGDPHRMAEWLVCCGVTTAAMESTGVYWIPVYDALEQHGIKPCLVNPRNMKNVPGKRTDFHECQWIQHLHSLGLLHAAFRPDAEVCAVRSLMRHRNDLVRMASEHIQHMQKALTQMNVQFQHVINDVTGLTGLAILDAVLAGERDPAVLAKLRDPRIQADEETIRKSLEGNWRAEHILALKQRLSLYRSHRDLIDECDREIEKLVAAFEPRVDPDKKPMPEDRKQKQRKRKKKSGHPDFNMRAEAYKLFGVDLTQIPGLMTLVLMLFSEVGRDMSRWPTAAHFVSWLGLCPDNDISGGKVLWRGARRTKNRAGTLFRLAAHSLHHDQTLMGDYLRRMKAKLGPAAAPTATAHKIAILFYTMVSKQVEYDASLWAKRDEMREKRLEGRLKKQAAQRGYKLVPLEPAA

SEQ ID NO: 298416 - protein, 343 aa, unidentified
MYNAVGIDVSKGKSTVAVLQPGGTVIRKTFDVSHTSQNLNELADYLSSLDGTTKIVMECTGRYHEPMVKALSEAGLFISIVNPHLIKNFGNNSLRKVKSDPADARKIARYTLDNWTELRQYSGMDNTRTQLKTLNSQFSFFMKQKVAAKANLIALLDNTYPGVNKLFDSPTREDGSEKWVDYAYSFWHADCVRKIGLKAFTERYMSFCKKHHYIFQQDRPEKLFNASKELVAVFPKEKTYKLLIQQSIQQLNLASEHVERFRREINELASTLPEYSTVMGIYGVGKTYGPQLIAEIGDVSRFTHREALTAFAGVGPGVDESGQHKSKSNRASKVGSARHCFRS

SEQ ID NO: 298417 - protein, 338 aa, unidentified
MFVIGIDLHKGSHVAAVLDPAERVVDQVRVRADGQQRDRLLAFAARFEPRCWGVEGAAGVGALLAQQLVAVGEHVVDVPAKLSARVRVLDTECSDKTDSHDARSAAIVALRHPRLRIVQREDHSVVLRLLAKRHHELVAQRTRAICRLHAVLGHFVAGGLPRRLSAARAAQELRRIRPVDAVGIERRRQALELLTEIRRADSDLVQLKDRITDAVAASDTTVTGVHGVGPIIAAYLIGYTGDACRFPTAAHYARYNATAPIAASSGPNPRHRLNPRGNRQLNHAIHMAAVTQVRNDTAGRAYYLRKQAEGKSRKEAMRALKRRISDAVYRQLRADATH

SEQ ID NO: 298418 - protein, 355 aa, unidentified
MDSVKYIGMDVHKEAISIAVLNSSGKLVMESTIETKALTILEFLKGLRGDLHVTLEEGTWAAWLYDLLKPHVSVLVVCNPRRNALLKEGSKSDRIDARKLAELLRANLLRPVYHGEQGVRTRKELARSYLTISKDLIRVMTRVKAIYRSWGIPCAGKQVYATGYRAAWLEKITEAGVRRRAEFYYQQLDFLRPLRKEVRSELLAEAKKHSAWKLLRGIPFIGPIRAALIIAFLQTPHRFRTKRQLWTYSGFGIETYSSAEHRCVNGELKRAKKPVSIRGLNRNHNHDLKNLCKGAATVAAAKPGPFQDFYNALVAQGIRPEMARLTLARKIAAITLIVWKKGVCCDAKHLKPQTA

SEQ ID NO: 298419 - protein, 406 aa, unidentified
MKQIVSVGIDVSKGKSTVCAMIHPNTIIKESFEVLHTVEEMSMLADYIGSLDGEIRIVMESTGHYHLPVAQFLYQKGFFVCVENAYIIRQFSRIMLHGAKTDPLDAKKLAKYGLAYWSELKPYKFHPSCYTELSLLSKQYQTYIKLLIAAKQNVIHLMDEMLPGFKEALDTANSVQFSKVKYVDFAKEFYHVDMIKSMGKEIFRENYKQWCKEKGYRFQSEKADELFHLAEDGIPTLPTEFPSTRLCMEVATEQVSQLGYALEQILSQMQNLAKTLPEYQTIRQMGGMGEKLCVRFIADIGDVRRFHNGKALVAYAGIDAPPYQSGQYTGTKRRISKRGNSALRKTGYEVMKSLKSHPPKTDTRVYDFIIKKENEGKSKKQAKIAGLNKFLQIYYARVMEIYKNIV

SEQ ID NO: 298420 - protein, 337 aa, unidentified
MTTVATLGIDLAKNVFQLHGVDSDGQTVLRKRVIRDQLGAVLANLPPCVIGMETCGGAHHFARVAQKFGHTARLMSAQYVKPYVKSQKNDCADAEAICEAVGRPNMRFVPVKTPAQQDVLAIHRVRAQLMKWRTMLTNQARGLAAERGLVAPQGCAGFRNALPRWLENAEMTAVLSELLTDLRERLGELDDRIRQLDAQIERAVHADERAKRLLAVEGIGPLTASALTAALGDPASFKNGRHVSAWLGLVPRQDSSGGKPRLLGLSKRGDRYLRTLLIHGARSAIMRCATKADARSRWLQDLRARAGVNKAACPLANKNARIAWAMLARGQTYRAPI

SEQ ID NO: 298421 - protein, 348 aa, unidentified
MVLIGSDFHPSWQQVSWLKKETGEAGDVKLMHEPGAVEKFYRQFPAGSRIGMEATGNCQWFVELMASLGHELLVGDAAKIRASDARQQKHDKRDARLLVQLLAEDRFPEIWVPSKEQKDLRQLLIHRYKLVRIRAQVKNGLQHLAMNQGVLKKHKLWSKVGQQALCELPLAPWASRRRKDLLKMMSELDAKIDLLDQAVTEAAEKNEKARLLMTQPGVGPITSLAFVLTIGDVSRFPRGKQVASYLGLIPREYSSGGHQRLGSISKQGNTFLRMLLVEAAQGAVRYDPGFRNEYLHRCHSKPKGVAKVAAARKLAIRLYWMLRSNTKYPEIVRVESSSRVPVVVRHGG

SEQ ID NO: 298422 - protein, 435 aa, unidentified
MSSMKKCCCGVDVHKSFIIAVVAKFKNEEVTFTKYERFSTFTKGLREFKEWLRYHDCHDVCMESTGKYYIPVYRIVSDESFHVDVVHPKYVRAPKGKKNDKRDAKRIADMYMRDHIAEYSIIPPAEILAIRDLTRYRRKTVYTITAEKNRMSNCLTVSCIKLDEVLTDMYCKTGLALIEQIIERGECNFDPAPYIDKRVKATVEDFKSALDGNVTPATLIKMKLIQERLKYLNNQKAELESNMESLSKDFSRQLEILVSVPGIDTLSAISIISEIGVDMQLFNSIKTFLSWIGLVPQNDESAGKKKSTRIGKGNKWLKPVVIQCANAAIKDKKHPEIREKYLALKKRRGHGKAIVAIAKRLMTAVYYMLLKDEMYKPSSGIDPAPKRGKLNINNLIKYYQAKGYTILTADGEILDLGQNSQLTEKDNVVHESEVA

SEQ ID NO: 298423 - protein, 438 aa, unidentified
MSNNVIFNFDELFISVGIDVGADFSWMSIVLPNQQFVGKPYKILHNSMNSLALAVSKIKEAEELYSLESRIFLESTGIYHYPLFCYLRDKGFNCSVINPIITKNSTNINIRKVHNDRFDSKKAALVGLKPDLKVSLMPSDLALNCRNLCREYYDLMDNRSAYVNKLQGELRMAFPQYLSIFSKVTINTSLTLLETYTSPSAFLEADKQEIIDIIKSTARFGLTYAQNKYNAIIQAATDANQFGYIIESNIKRIRLYISFIRKYDEEINDILESLHKLVDSNEDTKFVKQVHLIETFKGAGFLSAATIMGEIGDFSAFSKPKQLFAYFGLDPAVKQSGKFEGTKVQMSKRGSSIARRVIHTLSLQSISISRNGKAKNPVLREYYLQKCDSKPKLVAMGAVSHKVCNMIFAILRDNKPFEIITPQEHIKQYNAAKCDIAA

SEQ ID NO: 298424 - protein, 416 aa, unidentified
MFAVGVDVANGRSRVAVLDGMRNMVAKPFEVVHTAQGFAALVEKLRQLDGEVRIVMEHTGRYYESFAMSMHRAGFFVSAVNPLLIKNYQGGINVRKVKTDKADAQKIAQFALDKWTILPHYTPMDTIRYNLKTLHRQFQLASKTKTALSNNLIALLEQSYPGANRYFDSPVRADGRQKWVDFVDTFWHVDCVARSSEHAFVERYRKWCKRHGYIFSEQQAIQLHADARQKFPLVPKSDTCKLLVREAVSQLNAVSRTVETYRAEMDRLASQLPEYETVMGMTGVGKSMGPQLMAEIGDLRCFAHQKSLVGFAGTDPIKEESGDKVSQSAPSSKRGSPYLRKTLFVIMTILLQLQPQEDPVYQFLDKKRSEGKPYYVYMTAGGTKFLRVYYGKVRDCLKAKGLWEVPASASQEVNPG

SEQ ID NO: 298425 - protein, 311 aa, unidentified
MNAFVGIDVSKARLDVAVHGGQGFAVENTEVEVSQLCEQLQTLAPVLVVLEASGGYERLCVAKLAHAGLPVALVNARQVREFARATGVLAKTDRLDARVLAHFAAAVQPAVRPLPDAQHQALDELLARRRQIVAALVAEKNRLGLARTRLVKRTLREAVATYERLLGLLDGELDELIKESPLWREKEDLLRSFKGIGPVSARTLLAELPELGLLNRRQIAALVGVAPIARDSGTWRGHRRIWGGRAQVRATLYMATVTAMRSNVQIRTFYQRLRQVGKPGKVALIACMRKLLTILNTMVRTNTRWQPPVVA

SEQ ID NO: 298426 - protein, 387 aa, unidentified
MIYVGIDIAKFNHYASAMSSDGEVLLEPFKFTNDNDGFCFLVSRLSSFDMDQIIIGLESTAHYGNNLLSFLVPKGYKVCLINPIQTSTMRKNNIRKTKTDKVDTFIICKTLMMHPHRFVTLYDIGLMQLKNLGRFRQKIVKQRTRLKIQLTSYVDQVFPELQYFFKSGIHQKGCYALLKEAPSPDAVASMHLTHLTHLLRLASHGHFQKETAVELRVLAQKSVGSSDKSLSIQITQSIEQIELLDRQLEMIESEMKDIVSSLDSVIMTIPGIGYVNGGMILGEIGDIHRFSSPCKLLAFAGLDPSVYQSGNFEAKHTRMSKCGSRSLRYALINAAHNVVKNNATFRDYYNQKMSEGRSHYNALGHCAGKLVRIIYKMLSDDVPFNLA

SEQ ID NO: 298427 - protein, 314 aa, unidentified
MNTVSYSAGIDVAKGHLDLYLRPSGHAERFSNDAPGHRKLINVLRKHRVSLIVLEATGGYERAAVKAMVAADLPVHVAQPQTIRAFAKSLNLRAKNDQIDSNVNAQFAEERAGKLKVIESIDPVQEQLAALAVRRSQLVEMQTMEQNRVQQVADKRAIKNIKQTLKFLAKQIKDVEKQMDDIIKENEKLREKSAKLQETKGVGPQTARLLLACLPELGKTSSKRLNALVGVAPYDNESGEHKGHRFIAGGRKLVRNGLYMACMSAAHSNDVIKPYYVKLVARGLAHKSAMMACIRKLLNYLNEQLQPDKSPKTA

SEQ ID NO: 298428 - protein, 396 aa, unidentified
MFFLGIDIGKNTHVASLLNEDGKPVFRAFSFANTSDGGESLLSKLSTLGIAPSDLGIGLEATGHYWLSVYSYLHDRGYTLHVINPIQTDGWRKGVEIRRRKTDVIDSVLIAELVRYGDFIETRLPSEETLSLKNLTRFRSYLVDSISDLKRKVICVLDQVFPEYQSVFSNVFGKTSKEILLQFSSPAELEHVSADTLAELLASLSRKKLGSDVAEKLSTAASTSFGVTFCRDSFTFQLRMLIEQIKFIESQVKDVEAEVEAIMANLQSPIMTIPGIGKVLGAVILGEIGEVDRFDTPAKLVAYAGIDATIRQSGEFNGTNSRMSKRGSPYLRRALYQAALVAATGSNPDPTLRAFYLKKRDEGKHHSTSVGAVSRKLCYIVHAVLKENRPFEVRNT

SEQ ID NO: 298429 - protein, 403 aa, unidentified
MRHVIAFDISMGKSYMVIYNAQKQCIFEKEIKHSKSEFEELQKKIHELTNETGKSPEIVFEATGIYSRQLERFMQDNQYTYCLLNPLEAKLQCDSLRIHKTDRSDAHRLAITHFTVTRRVSHGTNHLFHQLKSLSRFYSELDGELSMIRSRIHKVIQLTFPELEKMFTSKSDLFLNFVQLFPHPDCVLSLSKTIIKNRIRANTNKKISTIMAEKKAIQILEIAKNSYPAVSQNDVLCDQLKVYARRYQELLHQKERCINNMVHLAEQRAEYSIILSLPGIGPNTAVRLMAEIGDIIRFANNKQLNAYAGIDIRRFQSGKTFYKDKINKRGNKHLRKLLFLIIQNMIKQRRYGRNHIIEYYDKLKTQPYNKCHKVASIACVNKLLKLLFHLITHDIHYDYRLTA

SEQ ID NO: 298430 - protein, 441 aa, unidentified
MAVINPNACGIDVGSKMHYVATGQGSEEVKSFGVYTKDHQAMVAYLQNKGVTTIAMESTGNYWQTLFAALEKAGFEVFLVCGNQTKNVKGRKTDVQDCQWIQWLHSVGMLSNSFIPNEFVSHLRIYSRQRLKYIQVQSRLINQIQRDLRAMNLRLEVALNDITGKSGRAIIEAILSGERNPKSLAGLADYRVKKSKEEIALSLEGNWHEGYLFVLRQHYSEYVQNLDRIQACENEIEKILKESLECSEIAPQDAPNHKKALKKNKNKPVIDFQIYSFQYFGGVDLFAVEGINQNTVLSLMAEVGTDITKFHSAKAFSNWLHVCPNPKVTGGKVISNHTKGGSNPLSQAIKSAANSIGNLKTVTHLTRFFKKIAYKKGRKEAITATTHKLAFIIYNMLTKYEPYKPFVREVNEQAERIKKLKEVEKIVKSHNFKIEDINFSY

SEQ ID NO: 298431 - protein, 312 aa, unidentified
MDGIFVGLDISKDAVDVHVQPTGEYFVAGTDEAALATVVQRVQAMAPTLVVLEATGGYEIPVAAALATAGLPVAVVNPRQIRDFARATGHLAKTDALDARVIARFAEAVQPAVRPLPTAQAQMLSDLVARRRQVVDRLGAELNRHRQARAAQLQHRIAGHVAWLRQALGELDRDIAQLIRSSPVWRAQETRLTSMPGIGDVTAQALIADLPELGQLDRRRIAALVGLAPFNRDSGQWRGRRMIGGGRPAVRRALYMATIVAIQYNPAIAAGYPRLVSGGRPKKVALVAAMRKLLTTLNAMLRDQRPWEARIA

SEQ ID NO: 298432 - protein, 357 aa, unidentified
MDGFKQLLQTIRDCTKKSDKIKVGLEATGHYSYNILGFLLDNGLPTYVINPLHTNLYRKSLSLRKTKTDRVDARTIATMLLSDVDLKSYTDTAYHNEELKSLTRYRFDKVRERAKLKQSVSRLVTILFPELEKIVPSLHIASVYALLSEYPGAKQISEIHLTKLTNLLATASKGRYGKDKAIQIRDAARTSIGSVMPAKFLELKHTIKLIRELTSEIDEIEVSIQKIMDELNPPILSIPGVGIQSAAMILAEIGDFSNFESPDKILAYAGCSPSTYQSGKLTNCYAHMEKRGSRYLRYALYNATKYVCHWNPVFAEYLAKKRAEGKHYNVALSHATKKLVRLIYALQKSGKAYLVAA

SEQ ID NO: 298433 - protein, 359 aa, unidentified
MKIVGCDFHPSYQQIAVLDTETGEVQEKKLIHANGEAEKFYRELESPTLVGMEATGNARWFELMVEKFGHQLWIGDAAKIRASYVRKQKTDKRDAGHILTLLVEKRFPRLWVADAQQRDIRQLLTHRHKLVGVRTRLKTELQHLAFNQGIQKKRQLWNERGRALLESLPLQGWTQQRRKDLLQLLAVVEPQIEQLDKAVEQVAKANPQAVLLMSQPGVGPITSLAFAVTIGEVSRFAHSKQVSSYLGLIPSERSSGSKRRLGSISKQGNVFLRTLLVESAQSVVRCDPQFRKEYQHRCHHKAKGIAKVAAARKLAVRLYWMLKSNKPYPEVLLIGGSPRHPVAAQAKAVQLNGHPRISH

SEQ ID NO: 298434 - protein, 342 aa, unidentified
MDEYDGRQFVGIDLHRQRSVIVRQSESGEQLSAVRIVNDPVALKLQLEEAGADPEVVLEATYGWYWAVDVLHACGARVHLAHPLGVKGFRYRRVKNDVRDAADLADLLRMGRLPEAWIAPPETRELRELVRYRAKLVAIRSGLKAQIHAVLAKAGVLIAVSDVFGVTGRQRLAKVPLGPAYAQRIRSLLELIDILDSHEARFAAMIAERLDTHRGYQAIQQVPGIGPTLAAVFVAEIGDVHRFTDPAHLCSWAGLTPRHRESDTVVHRGHITKQGSKAVRWAAIEAVQRHPTTAKISADKQRIEARRGKNIAKVAAARKLLTLVYYGLRDGQIRALHRARAA

SEQ ID NO: 298435 - protein, 342 aa, unidentified
MGEVSTIGLDIAKSIFQIHGVDADGAVVIRKRISRAKLLEFFAALPACLVGIEACPSAHYWSRRLEALGHTVKLMPPSYVKAYLKRSKNDANDAAAICEAVTRPSMRFVARKSEQQQCGLMLHRSRQLLVCQRTMLSNAIRGHMAELGVIAAKGRNGTAELLKIIADERDARIPAAARFSLDILARQYAAIRTEIVAIEKRIHAWHRSSEESRRLEEIPGVGPIVATALVAEVGDWKEFTSGRSLAAWIGLVPRQYSTGGKERLGGISKQGNRHLRWLLVAGAMAVIRYARQHGTKRPWLARLMERRPIKVAAVALANKIARMAWAMMVRGERFKEPKLLPA

SEQ ID NO: 298436 - protein, 410 aa, unidentified
MGDKMEQQRIGRVYVGIDIHRLKHFVSILTESFLKESESDWRKVGSFCIENDIKSYRELESAIIKEAADVNDVLVAIDHTGGHYCEPLVFFLTGKGYHVYHLESKAVKAARERLLDEESKSDHLDASCAAYLLYLSDLHNISLRIPRIEPALRRDSDILNHLILQRDIYKKLITQCTNRLHQLLLATFPEGERRNFGSLLRVIPHYPTPFDIVQSDNLKGVKYLRQGYREELVQLANNTVGSPCAIYRDLILDLSQQRCEYIEKRTGIERLIESQVDKHPYGEILRSFPFISHITAATIISVIKDIERWPNKKKLKKAMGIYAFTKQSGSSVASRRRGREGNRRARCALYLVALCMMGFKGGDNDFKNYYTRRVASGKPKKQALFATAGKITEIIYHCLKNGEKYSYQGK

SEQ ID NO: 298437 - protein, 417 aa, unidentified
MGLKIVYPVCCGIDVHKSFVVACIAATDDKGVTTYKRRRFSTFTGDLRLLAQWLTDNGCRDVCMESTGKYWIPVYNMLESTCTVVLAHPKYVKAIRGKKTDARDAKWIADIFKHDLVSGSFIPPIEIRQLRDLMRYRVKLTSFSVGEKNRAQNCLTVSNIKLDDVFSDVFGKSASAITDQLLLQPDGSFDVMPFIDRRCKASPEKIQAAIDGLMCSEQVEKLKIIRSHMDSLDLCKTNLESVILSLAEQFRPQIELLLTVPGIQLFSAISIIAEISLDMSVFPTAKHLCSWAGLVPQNNESAGKKKSTRINRAGVYIKPLLVQCALTVCNSDKHPEIKSRYLALKKRRGHKKAIIAICRMLLTAIYAILKKSEAYNPNLYRKVLSIPTNRALTIEQAVAFVQRHGFLVVDSDGALAS

SEQ ID NO: 298438 - protein, 388 aa, unidentified
MQDVADQSATPTTIGADLCAIFVSLELSRSTWLATSLSPGRGEKMSKHSVSAGDIAALLARFSELRRKACARTGKSFPIIVIQEAGLDGFWIHRVLLSEGIESHVVDAASIATSRRRRRAKTDRIDGETLLRALLAHKRGEPRVCSMVRAPTPEDEDRRRICRERKVLIMERVQHVNRIKGLLFSQGASGYEPLRRDRRARLEALQTGDGRRLPQHLKAQVCRELDRLELLLEQIKAVEAERDALLNAEQTKVSAPPPMLLGVHGVGPEFASVLWSEGLSRHFDNRRQVAAYAGLAPTPWQSGSVNREQGISQSGNRRLRTTMIQLAWLWLRHQPRSALTLWFQDRIERNGGRRRKTTIVALARKLLVALWKYVSAGVVIEGAMIRPA

SEQ ID NO: 298439 - protein, 414 aa, unidentified
MLKIVYRICCGMDIHKSFVVACIASTNEQGVTTYKSKRFSTFTGDLRRCADWLSENNCKDVCMESTGKYWIPVYNILEPTCNIVLAHPKYVKAIRGKKTDKRDAKWIADIFKHDLVSGSFIPPADIRQLRDLFRYRWKLTNFTTGEKNRAQNCLTVSNFKLDDVFSDVFGKAASAITAWILEHPTEKITDISAFRTKGMKATDERVLSAVDGEMCEEQAEKLRIIRSHMSSLQLCKLDLESLILSTAEKYLPQLNLVMTAPGIQSFAAIGIISEIGVDMSVFPTSKHLCSWAGLTPQNNESAGKKKTTRISRAGAYIKPLLVQCALCAIRAKQFPEVRNRYLALKKRRGNKKAIIAIARMLLTAIYNMLKKNEPYNPELYRKADRPPAHREVSVDEAIFILQRQGYLVTAPSTT

SEQ ID NO: 298440 - protein, 353 aa, unidentified
MEQFIGCDAHKKYSVFVTMDEKGQAGEAMRVAHDRELYREFLARLPQSSMIAVEASGHYSWLVDEMERLGHHPKLANPLEAKRRMALTKKTDKLDARGLAILLRNGTLPEVWIPPSELRDQRELLRLRIFLVRLRTRVKNRIHGTLARHNVQIPGADLFGVAARLKLGARLPELPIHSREAVEQELATLDFLEIQIESAEQRLEAIMNVSVEADLLKTLPCVGKILSMVLMLEIGRVDRFPTAAHLASYAGLVPRVHSSGGRTRMGQVCGNVNRNLKWAFVEIGNLIVINQTRLAGTHVVRLYQRIKCAKNHQKAVVAVARHLAEAAWWLLTKQEVYREPQGPRQRTLSSTLG

SEQ ID NO: 298441 - protein, 317 aa, unidentified
MSVPISTVGIDVSKAYLDICTYPEITTLRIEYTKEGLQHLIDQLQKWAPELVVFEATGGLEIELGCWLHDAEFPFAVLNPRQARDFAKATGRLAKTDSIDAQLLAQYGHVLKPEPRPMRDAQARLLGELVTRRRQLKGMCTAESNRLKQTRSSTIKEAIAAHLEVMREELAMLEKEINAHIKADEGLKKDRKILQSAPGVGPVLAMTLLAQLPELGHLNRKEIAKLVGVAPLNRDSGRYRGKRTTWGGRSAVRRVLYMGALSASRSCHELKNFYERLVSNGKPKKVALVAVMRKLLTALNAMLRDQKTWAPQMVLPR

SEQ ID NO: 298442 - protein, 344 aa, unidentified
MGEVSTVGLDIAKSVFQVHGVDVDGAVVIRKRVSRVKVLEFFAALPPCLVGIEACPTAHHWSRKLQALGHTVRLMPPSYVKAYVKRSKNDANDAAAICEAVTRPSMRFVPTKSEQQQSALMLHRSRQLLVRQRTMLSNAIRGHVAELGIISAKGRNGTAELLEIIANPDDDRIPAVARLSLAILARQYAAVTTEIRAIEKQIYAWHRSCEESRRLEEIPGIGPIVATALVAEVGDWTAFSSGRSLAAWIGLVPRQHSTGGKERLGRISKQGNRHLRWLLVAGAMAVIRYARQHGTKRLWLVRLMGRRPVKVAAVALANKIARMAWAMMVRGERFNEPKLLPVAA

SEQ ID NO: 298443 - protein, 355 aa, unidentified
MEGTKYIGMDVHKDSISIAVLNSSGKLVMERIIETKAITILEFVHGLRGSLHLTFEEGTWAAWLYDLLKPHVTKLVVCDPRRNGYLKQGSKSDRNDARKLAELLRSNMLRPVYHGEHGVRSLKELARSYLTITKDQARVMTRVKAIYRSWAIPCVGKQVYGQRHRLEWLGKIEEPGVRRRAEFYYAELDALRSLRLVVLRELLLESKKHSVSTLLSQIPSIGPIRAALLIALLQTPDRFRTKRQLWAYSGLAIETHDSAENQYVNGQLQRSKKKQSIRGLNSNHNHDLKNIFKGASAVAAVKSGPFQRFYAAQISKGIRPEIARLSLARKIAAIILTVWKKGASFDASYLNPQTA

SEQ ID NO: 298444 - protein, 474 aa, unidentified
MTTNRRPDLQPIPILAHETLYVGVDIGKKTHVAGFISTTLLNRHQRFEMCPALSFPNRREGFRSLIDRISAYVPLTQVYVVLEATGHYHRALLQYLQELDVPVYVMHVQKRQEGLLKTDKRDALSLGNLLFNQLERGIQVGDPMQAVRRLAPPTEAASQLRSMVQHRQELITESTRRKNKLTAICDEIFPEFTQILKDPNLPTALAMRKRFPTPAALATAGLSTLQEVRGKARQISDVKLLELSHLASQSIGSKDPARLRGLMCEQEQLIEELELIQKHLAQLETGIVQVVEHCREGRILTSIPGIGPIQAAAIIASIGNIANFDHASQLKSYFGWVPKVSQSGYTLDQARLSPRGQRQIKQTMYLVVWQAIQLKDCEWSKIYERLVPIKCSFNEKTRQYAGRGKVIGRIAGQIISVIYVLLKSDQETLSKLPAGTKPPDPVLYDPEIHRRHRAGQYRTSTQQKPGKLLQLPPH

SEQ ID NO: 298445 - protein, 351 aa, unidentified
MQVSTIGVDLAKNVFQVHGVDNAGKVIITRQLRRKQVIDFLSKIPACLVGMEACGTAHYWAREISKLGHTVRLMPPSYVKGYVKRSKNDAADAAAICEAATRPSMRFVPIKSADQQALLMLHRTRDLLIRQRTQLINALRAHLAEFGLVAETGREGLAQLAEIITDESNREALPSAMKQALQAIVDQLAALGLQIEALDRAIHAHHRANDMSCRIETVPGIGVIAATAIASTVTDPSNFKSGRDFAAWIGLVPRQHSTGGKERLGGISKQGDRYLRRLLVIGATSVVQHARRHPQKHPWIIRLLARKPAKLVAVAVANKMARIAWAIMAKGGYYRAPELAAATRRGLAMGA

SEQ ID NO: 298446 - protein, 354 aa, unidentified
MTTKNYLGIDLHKRFAYWHLINVDGKLLWQGKVPTTKEATEKQLKKCSIPLRHTISAIESVESYGWYADMLVELGVGEVKLANPWKLRLIAENPLKSDKEDARIIAQYLRSGTLPESYLAPKETRDLRELVRTREYLVRARTSAKIRIRSALAKHGLIGPFKDVDSAKCIEWLSRQELPKTYADEIEILLKFIAHLRNDIERYEREMKKQEKKYPEIKILKTLPGIGSVRALVMVAEIGNFSRFSHPNKLASFAGLVPRSHSSGGKERLGHITKRGSSVLRAAMVGAAQQARPSWGDLHTFFESVKQRHDGTGAAKVALARKLLTISWHLVRKNEPFQARSIVEPIGSVNCMNV

SEQ ID NO: 298447 - protein, 367 aa, unidentified
MQNTIIHHEGAASLEVVGSRIKPGRAVIKIGLDVHARIYVAVAQYDHLLPKAARRFAPNEFVPWVEGLLRAGHTVHVVYEACGFGFGLYRQLVAAGARCYVIAPRKLDEQSTGVKTDPRDATTLCQRLSRYCDGNTRELAVIRIPSEEEEQARHVSRQREQLVHHRQKLEAQGRSLLINHALPSPAHWWKNQTWKRLGQFLPDWIKTRLEVYRPALFALQEQITALGDQLEAAAPAAIPVGIGKLTTVVLTREICDWHRFNNRRAISSYTGLCPGERSSGSKRIPGSVTKRGNPRVRAALVECAWRMVRFQSQYPPVQKRLAVLAKGSRALGAVRKKAIVAVARRLAVDLWRLHTGRCSAKQLGLTL

SEQ ID NO: 298448 - protein, 345 aa, unidentified
MSMVSGVVGSVDTYADVHVAAAIDANGAVFGIESFPVNAGGYRRLTEWLCGFGPVILVGVEGTGSYGVGLTRHLHREGIEVVEVDRPNRQTRHKFGKSDPIDAEAAARAALSGTATVIPKRRDGSVEQIRVLMVARRSARMQRNQTLNQLRQVVFTGPDEIRCRFKDRPKAGLVVEAARMRPRKGSDPVMFTTNIVIRGLARRIQDLNDEMSIIDDALTELIDATAPSLLELHGVGVVTAATLLVTAGDNPDRLHSERSWAHLCGTSPVPTGSGKTSGRVRLNYGGDRQANAALYQIVLTRMSSDPETRNYVRRRRAERLSTREIMRCLKRYVARQTFRHLQRAA

SEQ ID NO: 298449 - protein, 304 aa, unidentified
MQAPRHIGIDLHRDKFTCCVRWENGRNYLTDWKLADLPAFVKKLRPSDEIAVEVTGNTRLFRDAVAPHVKRVVAVDPNQFKVISHSVKKTDPNDARNLALYVAKDLLPEVRMKDKTRAQLASLTQTRDTLVKLRTALKNKINNILSAHGHNLEKEALSSAKTLNEILVVRFDPMVKLELEVMVEEIRSLNQRIAKLEKAIADEGKLAAYFGIVPRVSKSNETEHTGRITKRGSKLGRTALVQCALIAQRYSSYLRRYYEKIKARRGTGKAIIALPRKLLGIIYRTLKNKWVFEDFPNFVLAEAA

SEQ ID NO: 298450 - protein, 352 aa, unidentified
MGIVVALDVHRKQITYKALDRDTGEVRRGRIAPAARADVRAWLAQFAGSEAEFALEGTTGWRFVVEEIERAGHHAHLADPAETAAKRGRKRRAKTDNADCDLQLRLLLAGELPESWIPPAQILELRTRVRMRKTLIDQRTAWQQRVHAQLFHQGVPAGLRLRTQAGREALRRAELSPAGRELVTLGLRMLDSFDLELAPLDRELRAFARHQPGCRALMERLYGVGPVSATAIVAELGDARRFSSSDDAVRHAGLDVTVYQSDEKRAPGHLSHEGPAVLRWALFEAAQSAARAGSPDRSYYLQVAERIDHNRACLSVARKLCRRSYHILRELGDEALAPIEQPADEEAIAAAA

SEQ ID NO: 298451 - protein, 410 aa, unidentified
METVVERPAALDVHKEQVTACVRVPASVGREQHVAEFSTTVAGLLTLRDWLAAHGVQQVTMEATGVYWKPVWAILEDEFECLLVNARHVKQVPGRKTDVSDAAWLCQLAEAGLLKASFVPPKPIRALRNLTRYRKTQIQERQREANRLHKALEDTGIKLDCVASNILGVSGRAMLDALVQGTTDPDVLAELAKGRLRAKIPALREALEGRFDRLHVVWVGAILSHIDFLDEQIEHLTEAIGEQIAPFEPAVELLCTIPGVQRRAAEAIIGEIGVDMSVFATAKHLASWAGQCPGNHQSAGKRRSGRTRNGSKWLDWTLEETALAAIRTKDVYLAAQYARLRPRRGHKKALGAVKHSIICACWHMLSTGELYNDLGGDYFRQRDPERTTKRLIAQLEALGHTVALQGATAA

SEQ ID NO: 298452 - protein, 345 aa, unidentified
MTIVEAARLVTGGVDTHLDVHVAAALDPVGGLLGVESFPASPVGYRRLHAWLSSFGDLRRVGVEGTGAYGAGLARFLAGQGLEVIEVDRPNRQARRSHGKSDPVDAIEAARAALSRRATGLAKSRDGTVEAMRALLVVKRSARDARIATVNQLRHLCITGPDDLRERFGGLSAIMLPRATAAMRPRDSGDPVAYATRLSLQMLGRRMLLLDDQIKQVERRLGELVKQTSPGLLAVYGVGPDTGASLLVAAGDNPERLRSEAAWAHLCGVAPIQASSGKVARYRLNRGGDRMANAALWGIVFARIVSHQPTQVYLERRLKEGRSKREIVRCLKRYVAREVYPHLRG

SEQ ID NO: 298453 - protein, 369 aa, unidentified
MWYVGLDVHQDTVAISIRNARGVLVNRRVVATVRAALKRAFADLHGKVRVACESGPLAAWVRETLETRFREVVVCDRRRTRLSTSGAKTDRIDADKLSELLWKDAVHHVYLPRAESSVLRRFATHYTRMVRDRTRVLHRLRALFAEAGIRILTRGAKSGRPPVHRLRDRGSRQVARAYLQQLDMATQLVADARVQLVQSAQLRPVFELLQTIPYVGEIRAAELIAVIDEPGRFRSLRRFWAYGGLAVVQRVSCEHRIENGRAVRDEQRRGIHLSQVGQPMLKKVLRDVALHASLGKGVLRTVYDAYIARGKAPGIARVALARKIAAIILAVWRSGQSFDPAVVLQTKIRGEHHEGRLAASERELRRPCV

SEQ ID NO: 298454 - protein, 373 aa, unidentified
MRKEPVVNQGITHVGLDAHQAKIHAAILLPGTEGALEETFANTPEGIRRFVRRLRRRAPGEILCGYEAGPLGYGLQRTLIVLGLGCIVVAPSLIPVRPGARIKTDRRDARKLAELLRGELLAEVHAPTPEQEAVRDLCRAREAAKADQKRIRHRLSKLLLRRGIRYTAGRKAWTRAHRAWLRGQRLDHPADQAILDDHLLALEQIEGRLAALDAQLESWAQEPPYAEPVGWLRCFRGLDTLTALSIVAELHDWRRFDSPRRLMAYLGMVPSEHSSGGQERRGALTKAGNRRLRRLLIEAAWHYRHRPAVGYKLGKRRQGQPARVVAVADQAQQRLHRRYRRLLERGKPHNKIVAAVGRELVGFLWAALRPQEG

SEQ ID NO: 298455 - protein, 310 aa, unidentified
MRQVSACGIIHLHPLGRSFRVTNDTAGLRRLKRELDALDQMPRSALHIVMEATGKWHRAVQRSLHADGFYVSVVDPLRARLFAKACGFLAKTDRLDARLLAIMGEALKPAQTPPQDQALEALQELVNARSAANGERTALSNRMKTAVTAFLRKELTRRLAALDTHIARLDAEIERSIGAEPEMRRRLDILISIPGIGAVTAASLIAGLCELGACSGKQAAMLAGLAPLACESGERAGHRAIRGGRPAPRNAIYMAALSASRHNPDLAHFAERLKKAGKPNKVVLVAVMRKLIVLANTLITKNRIWTPNPP

SEQ ID NO: 298456 - protein, 367 aa, unidentified
MMGWMAPLRHLSAKLLSDRISSEWEPSMGEVTTIGLDLAKHVFQVHGVDAEGATVLRKQLRRAQVLAFFSRLPLCLVGLEACATAHYWARELRALGHEVRLMPAQYVKAYVKRNKHDAADAEAICEAVQRPTMRFVPVKTADQQAAVLLHRGRERLVRQRTGLVNALRGHLAEFGVIAPQGLRNVGKLIAIVRDEGDARLPELARQVLQVLAAQIEQLEAAVAAIEKQLMAWHKSNPVSQRLASVPGIGPIIATAIAATVVEPSGFRSGREFVAWLGLVPRQNSTGGKHRLGGISKRGNQYLRRLLINGASANLLRSKATNADPWVIGLRQRRPSLVVAVALANKTARIAWAVMHRHENYQRVAAAA

SEQ ID NO: 298457 - protein, 313 aa, unidentified
MVVIAGIDVSKNSLEVSVAEGRTRAFRNTAPGIGKLRAFLGEQSATRVVCEPTGGYERRLVRLLREADLPVQLAHPNRVRAFARVCGYEAKTDLLDAQILARYGRMFPEPEARPAEPERQGLQDLLRRRQQLVAQRVQERNRMRQELEASVLQSTQRHIAWLDQEIAQLDQEYQDRLRQHATLGQQAALFRTVPGVGPITAATLVAELPELGHWDNKALIALVGLAPWARDSGQRQGHRSIRGGRGVVRRILYLAALSAIRTDATLSDFYQRLRQRGKAGKVALVAVMRKLLLRLNAVARRGTPWRPEPLPTT

SEQ ID NO: 298458 - protein, 344 aa, unidentified
MDHFAGLDVSVKETSVCILDDAGKIVKEAKVASEPQALLKLLGNPAYCFKRIGLEAGPLSQWLFSALAEAELPVICVETRHMQAVLKAQINKTDRNDARGIAQMMRVGMYRPVHVKTLRSQKLRMLLTHRKLLQSKAIAIENDLRGTLRNFGLKVGVVGTVRFEARIRELVETIPDLAVLVESLLVVRRALREQLVILHRRLLAIVRDDEVCRRLMTTPGVGPVVALTYRATVDVPARFRKSKSVGAVFGLTCSRYQSGEIDWSGRISRCGDEMMRVMLYEAAQSMLRSKKWSWLKAWAMQIARRRGMKKAIVALARRLAVIMHRIWVDGTEFRWTREPTAAAA

SEQ ID NO: 298459 - protein, 413 aa, unidentified
MNATVSQRWAAVDWGDSSHTVCIVEADGKQIASFTVEHNAEQLEQMVLEIKKHAPIAGVAVETDHGLLIHQLVEADLTVYPINPKLSDQWRAARSVAGAKSDAADSFTLADGLRMHQAQLHPLKPDDPLTRELRGFCHHEVQLIQELTAEVQKLKAALKEYYPEALPWFDSWTCPAAWDFITTFPTPDHLREAKTGKFLALLKHHRMHYTPQWQQMVADRCKRAAWLGDPVVTHVQSHVALDAVAKLRTIHSAIKQCRKHIDELFAKHPDADIFKSLPGAGKKLAPRLLADIGSQRDRYQSPLAIQQLSGTAPVTRSSGKSRKVKIRWACRKGFRHDLYWLASCSRKKAAWAQAFYDQARARGDSHALALRKLGYKLLRIIFRLWQDRQVYNEQRYLLSLQRHGSPLAAAGSA

SEQ ID NO: 298460 - protein, 327 aa, unidentified
MIFVGVDWAEAHHDVCVLDGEGQVLGKRRITEGVTGLADLHALVADHAEDPEEVVVGIETDRGLLVSALIASGFAVYAINPMAASRYRDRHHVSGAKSDPGDAKMLADLVRTDRHNHRRVAGDSDLAEAIKVLARAHQSTIWARQRQSNALRSALREYYPAAIEAFGTDLTSTDALGVLGVAPTPELGRQLSRSKLAAALRRAGRQRNVETRAEAIQAALRTDQLGQPAVLSGAYGHVTSSSVRMITQFNVEIAELEGALAEHFEQHPDAKIIRSLPGLGTILGARVLAEFGDDRTRYADGKSRRNYAGTSPITRASGKRLMSPQVV

SEQ ID NO: 298461 - protein, 349 aa, unidentified
MTTYYAGLDVSMKTTSVAIADVKGKICFETICETDPAILAQQLKEAGYACEKIGIEAGCISHWLVGELKNLGLPAICIESRQMSAIISLKINKTDRNDARAIANVMRCGMYKEVFQRSRESIDLGLQMGARRILLDTRTKLKNAMRGLLKTYGIRLGDVSHAKFPEKVRTKLEAFDASIRQAMEGLLKAFEETCKSIEKAEEALKSLCKKDPVIALFESIPGVGTITALTYKAVIDNPNRFADPRNVGAYLGLTPKQYSSGEVTQQGKISKRGSNELRALLIECGVVVLTRTKVWTKLKAWGLKIMKRSGIKKAAAAVARKLAIIMLRMWQKGEGFIWGNPKEQKCAAA

SEQ ID NO: 298462 - protein, 397 aa, unidentified
MECRVSPRPPALLASTLAGMEPDEMVSSLSLYGVVMRLRIDAKHLLRSERRQEETMNKSMTVGIDLAKAIFFVVVLDPSGKQVHRKKLRRQQVLAFLANYPQAVVAMEACSGSHYWAREIEAAGHQVKLLPPQHIKAYLRRQKNDYNDAEAIAEAAQYGRVRAVAVKTVEQQLDQSLQRMRQALLADQIGLINRTRALLAEHGIVMPEGKANFRKTVVALLEDPENGLPWRLRELVNRQYQQYCIWEQELEWYTQQIEIRANQDEVCQNLMSIPGYGEIVSSAFRCWIGDGHQFKNGRDASAAMGLVPKQYSTGGKIILGRISKCGDKRMRALLVHGARAFARVASKRNDRLSRWVCNLIERRGYNKAVIALANKLVRIGWAVVTRCEPYRAINISQ

SEQ ID NO: 298463 - protein, 418 aa, unidentified
MAMKIVRFNCCGMDVHKNLVVATIGITDRKTNVTEYFQRSFSTLNSDLYRLKDWLKSHHCSDVCMESTGKYWIPIFNILEDEINVRLTHPKYVKAIKDKKTDKKDSKWICDLFKHDLIKFSFIPPKEIRELREIARYRYKLVCMRSSERNRYQNCMTVSNIGLASVISDPFGKTASNIMKEVMKSNVIDDDKILKLVHRNCKNRDKILDSLHGYHIESDQRFKMEKSLDHMEYLDQLIDSCEVELIKRAYPLRRSFQHITQIKGISALSAILIISEIGIDMSQFESDKQLVSWAGLSPANNESAGKKKSVRISKAGQYLKPLLVQCALSAIKDKASYFGRKYSNIKKRRGHKKAIIAIARMMLVSIYHMILTGEEFQPCDYESFMDPKPNANPSLTVEKALNFLKQSGIDISSIPINL

SEQ ID NO: 298464 - protein, 453 aa, unidentified
MTKVQKKNRRSSSKKKKAVLEKVKLNAAGIDIGTEKFYAAIIDQEVREFKTFTSGIKEALSYLKSYDITSVALEATGIYWFPIYEALEEAGIEVYVVNGAHVKNVPGKKSDVLDSEWLRELHSYGLLRSSFVPQTHIRKLRYYIRLRDDFIRDGACHIQHIQKNFDAMNIKLHNVISDIMGESGQKIICAILKGERNPHELVKLCKAEMQKAKGADIIQSLEGNYREEYLFGIKQAYEMWQTYQQKIAECDIEIEKHLKEITKDNDEPGNLSKPKPINHHKPEIQDFHYLMMKMTGNKDATKIAGINDYSLLKLVSETGLDLSSYWPTEKHFVSWCGLSPSVSKSGKTNKKSRKMRKKPNVAGQIFKQIALNVGNGKHCALSGFYRRIKSRNGALVANKATARKIAVYYYNLMTKGFEFVDEGLKKYEERYNTQRMKALEKRASEMGMKLVSE

SEQ ID NO: 298465 - protein, 356 aa, unidentified
MSEGSWVGLDVHARSVVAGVIDMGSGEVRSLRVPPGSEATVAWLKTLPAPVRVVYEAGPTGYGLARLCAEAGISCVVAAPSKIGPAADRVKTDRRDAERLARLLRLGEITPVRVPGPVEEAARDLVRAREDARGDLMRARHRLSKLLLRHGAVYDATAWTRAHDAWLRKQRFQDGPLAIVFDECYSRMIDAKTRRDTLDKAIAELAASEPYVDVVERLVCLRGVSTLTAFALTVELGDWNRFRPESLAPFLGLTPSESSSGERRRQGGITKTGNTHARRLLIEAAWHQRSAPRLSVTLERRRTGKSLAVRAQADSSARRLHGRWNALEARGKPRLIVVVAVARELAGHCWALATME

SEQ ID NO: 298466 - protein, 403 aa, unidentified
MNNVAGIDVSKGKSMVSVLRPFGEVVAKPFSIGHTGSELKELADYLKSLDGETRVVMEHTGRYYEPVARFLHEEGVFVSAVNPKLIKDYGNNTLRKVKTDKADARKIARYGIDNWAELRQHTPMDTIRMQLKTLNRQQSLYAKTKTMMKNNLIALLDQTYPGVNALFDSPVREDGSQKWVDFATAFWHVDCVRNMSLTAFAERYRKWCKRHGYNFSQSKAVEVHTGAQDLIAMLPKDALTKTMVRQAIDALNAVSASLERLKAEMQALAAQLPEYPVVMAMHGVGDSLGPQLMAELGDVARFTHRNAITAFAGVDPGADQSGTHEAKSTRVSKSGPPELRRALFLVMDCLLKTQPQDDPVYRFMDKKRAEGKPYLVYMTAGANKFLRIYYGRVKEYLASLEEN

SEQ ID NO: 298467 - protein, 449 aa, unidentified
MKASFVLGIDPGKSFFAATLVHSTGERVWKARQFDMSREGFESLKSVLPEGDLTIGIEASGRIDDNLIAWLGEWKLTCQDRNIRLIRVNPGQSARFGGPNPRRDQTDGSDSDHVAEFTRVYERRLEAFDYDPKAQAMTRVISERQRLVQDLTATKNRIHEQVLVCFPEFTRVFADPFAKLARAVLSEIPTARRAARRQALSLARVKSGRRGRSLGVERAHQLILLAKQSIASAGEDDDAEAMVFLLDQLELLEKRLAHIERTLVAYVQQAKAETATPEEGVSAARQVELLDSIPGIAIVSAATLVLGTRGLARFVSGEALSAQWASCPERTQTGTSLNKTHLTARGDHKQRAMLYLVTQTACNFDPAFAFHKWRMIQRGLCPQQAVCAEMNRMAHVIWALVARNQMYDVNRMIEQIRIHHAGLWKTFVRQHKENRALWKKVDPKLKKIA

SEQ ID NO: 298468 - protein, 350 aa, unidentified
MRTKPVPETAAFGIDIGKKVFHVVALDASGAPIQRAKFSRDTLMAFFEAEPKVLIGMEACPGSQWLARRLVAMGHDARIIPARFVKPYVKSNKTDTVDAAAIAEAVTRPTMRFVEVRTPEQVDLQALHRIRDRLVGQRTALMNQARAFCLEYGLAMRVGAGGFHADIRRHLANAGNDLTPAMRVLLEELLDDLAYTEGRIKAVNASVEAYAREHEAVSRLVTIPGIGPLGATAIIAAAGDGRQFRKARDLAAWLGLVPAEHSTGGKQTLLGISKRGNCYVRRLIIHGARSCFLHLNRANHALGGWLSALEARTHRNKAVVALANKLTRIVWAILTRPGTVYLQSRGAAAR

SEQ ID NO: 298469 - protein, 326 aa, unidentified
MQGKELSEQATAAKSSVGIDVSKSWLDIHVLPSAQTLRVPNTGEGIRKLKRWLARFEVNLVVVEATGKWHRQVHRSLIAGGIAVAATDPFRVRAFAKAKGILAKTDRIDARVLALFAALMAPDIRPPASQALEELAELVAARDSAVAEQTALKNQLTAACGSFLKRQLERRCARIAKDIEVIEGEIARHIAADEGLARRYVVLTSIPGFGPIVAATLIACLAELGACNRKQIALLAGAAPIADQSGKREGVRVVWGGRPAVRRALYLAALSAAAHNPGMKAFYQRLIAKGKTAKQALIAVARKLIVLANTLIAEDRTWQPSPPKQA

SEQ ID NO: 298470 - protein, 367 aa, unidentified
MRNPAACSVDYSTPEFDRLCSARVWGKVENRTIMPSILGIDVSKATLSCALRDTETHNILWESIVPNNPVGVQKLLSKICPQAAWVVEPTGRYSLPAVKGATDAGRTVLLAPPRQAKMYLKSLPVRAKTDKLDSRGLALFGMSRKLSIYPIKEPALEEIDQLMSARRGLAKSISKLQLQQQELPHAKQYLTEAIADLKRQQNALDKEIKERSAKEPAMQAASRLLQVPGIGPVTAAAVTARLSAKSFAHPDQFVAYIGLDVAVAESGTHKGRGRLTHQGDAELRRLLYVCAQANRRVKNSPFAAQYERERAKGLSSTAALCAVARKLARLCWSLHKHGTSYDAARVNQQPAQLNNETPKVVLDPQPS

SEQ ID NO: 298471 - protein, 322 aa, unidentified
MHPFQLGIDVAKAKLDCALRLTSGKFRHKVVDNTPAGFKTLDDWLAKEGAAPLQVCMEATGIYWEAVAEHLAARQETTVSVVNPAQIKAFGASRMVRTKTDKIDAKLIAQFCAERTPEPWQAPTPAEKTLRALVLRLDALQAMRTQESNRLEVARESVAEGIAKHLKWLDDEIARLTKAIREHIDNDPTLKDKHRLLDSIPGLGERTTAVLLAFLAEPARFENARQAVAFAGLDPRQHESGSSVRGKPRLSKVGHSFLRKALYMPAMVALYRTDWGKLFRERLASKGKPPMLIIGAMMRKLVQVSFGVLKSGQTFQPELHGA

SEQ ID NO: 298472 - protein, 392 aa, unidentified
MRISVGIDIAKEMHWVTAIDADGAVQIDRKLPNTPADIATLSDELTALRGTVRIGLDVIGGIAGLAQAMLAEAGFALVHVPGIAVNRARQGTVGGENKSDPRDARTIADQVRTRPDLRPIEPATELDLEIRLLVSRRGDIVQAQTQRLSRMRDLLVGVFPGLEACLDLKTKGPLHLLTKFVTPAELRAAGKKRLVRHLQAAGGLPKVEDLAGLVLTVAAEQTVAVPAERMTARLIRELAIEALASRTRLSELDRELEALLQRHPDAALIRSLPGMGAVLTAEFIAEAGSLSRFRSADALASAAGMAPVLRQSGRTRFLRRPSGGNKGLKRVFYQSAFCSLNHDDSRAFYERKRREGKRHHQAVIALARRRVNVLWAVLNSRTPFQTRFKAAP

SEQ ID NO: 298473 - protein, 338 aa, unidentified
MAIVFVGIDLAKNVFAVHGVDEAGKAALVRPAVPRGRLLELVAMLPPCTIGMEACSGAHHWARQMQAHGHTVRLMAPKFVAPYRLSGKRGKNDAADAAAICEAVQRPNMRFVPPKSVEQQARLMVHRARQGFVEARTATLNRIRGLLSELGIVLPLKASTVRSQAAERLEELPGWANTVIGDLLGEVKRLDQRIEEYDRHITGMARQDDRVARLMRLSGIGPTTATALIATIGNGHEFRNGRQLSAWLGLVPGQYSSGGKARLGRITKAGDAYLRSLLVLGARAVLNAAVGKTDSLSRWAQALVQRRGYWKAVVAMAAKNARMAWAVLSRGESFELPG

SEQ ID NO: 298474 - protein, 385 aa, unidentified
MAQFEDLSRCLAAFDQNSTLVMVVEMSQSSWLVAGLVPGVARQPLKKLEPDGAALLRLVQRWRSEAVKAGRMIDRIVLAYEAGRDGFWLARWLRSHGIESYVIHPTSIPVSREHRRAKTDRLDAAMLLRALLGWLRGEPKHCAMAAIPTIEEEDAKRPGRERESLVSERTRIVNRMKGALARLGIRGFKPELRKAAQHLGGLRTPESTPIPPNTLGEFRRGMARLAVIHEQIKAIEVARLEHLEQAPDSGPPAMVRLLARVLGIGVETADMLVYEILYRKLRDTKAVARYAGITGSPDESGAKRREKGLAKAGNARVRRGLIQLAWRLLLFQPDSALVQWYRARIAGGARKTSMIVALARKLLIALWRMVNTGEIPDGFVLRPAV

SEQ ID NO: 298475 - protein, 400 aa, unidentified
MRAVFGIDVSKTSSEVAILVNGEKVHGYTILNDTIGFNRLLGDLKTVHNPEIIFEATGVYSRRLQAFLEEYSYAYTRLNPLEAKKQLDSLRVRKTDKIDAEKLDKSQLVHNRKPTYVQEEVYQHLRDLSRFYQNMTEDLVRTKNRLHKVLQVTFPELENLLSTPTGEQYWNLVMAFPCKEFVLSLSQSNLCEIIRQSTSKRISEKRIAYLTDKLIKLAKQSFCAVKKTSPMLEEVRYYAQELLRLSERRQVVLNDMVALAQPLPEYDILRSIPGIAEATATSIIGELGDIRRFQSTNQINAFIGIDLRHYESGNFLAKEHITKRGNPYARKILFKCIHNIASASHTNPCHIADFYEKRKRQSTIASTKPHTIASIHRLIRTMYYLITHNKLYDYSLTQNR

SEQ ID NO: 298476 - protein, 340 aa, unidentified
MTITTVGIDLAKNVFAVHCVDQNGKTVLVKSRVTRAALPGLIAGLPPCVIGMEACSGAHYWARLFRQYGHEPRLMAAKFVSPYRIAGKSGKNDAADAQAICEAVRRPHMRFVPVKDKSQQAMQCLHRTLQGFIEEKTATYNRLRGLISEFGVIAPQSTDALRHIVFEQKNSLPLQVQQCVDDLLEHVARIEDNIAEYDRILSRMAKTDHRSQRLMELKGVGPTTACALVASIGNAHDFKNGRQLAAWLGLTPSQYSSGGKSKLGRITKAGDSYLRTLLVQGARSVLIGAEKRTDLFSRWVCSLVERRGYWRAVVAIAAKNARLCWASLHYGDDFRLYSAS

SEQ ID NO: 298477 - protein, 351 aa, unidentified
MMIIGVDYHPSFQAIAFLMEETGECGEQELNHSDGQAEKFYRDLKQRGISVRIGMEATGYSRWFERLLAELGFELWIGDPAEIKAKRVKKLKYDRYDARLLRRLMLENNFPRIWVPDPENRDLRQLLWHRHRLVQMRTRIMNQLQALAMNEGYRWKKKLFSEQGRAQLEKLALAPWASRRRQELLELLDRMNPTIEELTAAVEREARKRPEVQRLMTHPGVGPLTALAYVLIIGTPTRFQRGKQVGTYVGMIPSEDSSAHKQRLGHISKQGNSLLRFLLVEAAQAAARCNPEWRRRYMHLAMRRHRSIAKVAMGRRLGVRLYWMWRNGCEYSPKFEFGSYAGQLGTGHGVK

SEQ ID NO: 298478 - protein, 343 aa, unidentified
MKIHALGIDLGKTVFHLVGLDASGQVVVRKRCSRTQLLAFTANLQVGLIGMEACSGAHFLGRALRAQGHEVRLMPAQYVKPYVKTNKSDYIDAEAIAEAVQRPRMRFVPIKTEEQLDLQALHRVRERWVMRRTAVVNQIRSLLLERGLTLPKGRSHLDEQLPRILEDAELNLSDSFRVLLAQLKLELEQLAGRIEEMDRVIQKTARENEACQRLTEIPGVGPVTATALIGAVGNASAFGKGRNLSAWMGIVPGEYSTGGKQKLLGISKRGNKYLRRLFVQGARSVLQQRHKQAPGLREWLAQLLARTHQNVVVVALANKLVRMSWAVLCKNERYRAPVFAGTT

SEQ ID NO: 298479 - protein, 355 aa, unidentified
MESTKYVGLDVHKEATTIAVMNSAGKLIMESIVETKAITIRQFIQGLHGDLHVTFEEGTWSAWLYDLLKPYVTKVVVCDPRKNTLLKVGNKSDRIDPKKLAELLRNGSLSEVYHGENGVRTLKELARSYLTISKDLGRVMNRVKALYRSWAIPCAGTQVYALCHRSEWLSKITEAGVRRRAEHYYQQLDALQSLRREVRKDLLLESRKHNATKLLRQVPCIGPIRAAQLVALMQTPHRFRTKRQLWTYSGLGLETRDSAQYCYVEGQLQRSKKPQQLRGLNSNHNHDLKNIFKGAATTASVSAGPFHDFYQALLTKGRRPTMARLTLARKIAAITLIVWKKGARFDPQHLKQQAP

SEQ ID NO: 298480 - protein, 406 aa, unidentified
MSAYRFYVGLDWATEAHRVVVQDAERQGVAERTVPHEGGALEAFAAWLSELAAGVPRDVAVALESPRGAVVDILLANGFHVFALNPKQLDRFRDRYTVAGAKDDRRDATVLATALATDQPAFRRLAPEHPLVIELRELSRLEDELQQELQRLTNRLREQLHRYFPQLLQLVPAANEPWLWALLDRAPTPSAAQHLSRAALRTLLTRHRIRRVDADAVRTLLQHPALPVAPGTVQAAQRHLAVLLPRLRLAHQQRAECATLIEDILERLGEQQEHRDVPILRSLPGVGRVVAATMLAEASRLLAARDYHGLRTHTGVAPVTKQSGKHWVVIRRSACNRRLRDAVHYWGQSVVRHDPRSRAHYDRLRARGHSHGRALRGVVDRLLRVLIAMLTTQTLYDSNRRLPIAA

SEQ ID NO: 298481 - protein, 375 aa, unidentified
MTKIIRIGLDTSKSVFVLHGVDEAERPVLRKKLRRKQVLEFFSELEPTKVGMEACGGAHYWARELGALGHEVVLLPPQYVKPYLKRGKNDDRDAEAICEAMSRPTMRFVPVKTAEQQAALMLAGMRDGLIRRRTQVTNMIRGYAAEFGLTASRGLAWIEPLLERIAADSGVPDLAKELFATTGKDFVRLQLEIRKIEAKLMAWHKQNALSREVAKIPGVGPVGAALAVMKVHDAKAFRCGRDFSAWIGLTPKDHSTAGRTRLGVITRAGDEALRSALVVGATSVIQKVKRGQGRRSSPWLIDLVGRKPPKLAAIALANKNARIMWKLMASGEPYDPAHAGPSRSTPSSPPATRVAPCSRRQGRCAPPAAVPCGQP

SEQ ID NO: 298482 - protein, 458 aa, unidentified
MNRNKSKAKIDHTMPMVHPNAAAIDIGATMHMAAVRADRTPEPVRSFGTFTTDLHRLVDWFKECGVETVVMESTSVYWIPIFELLDARGFTVFLVNARDAKHVPGRKTDVSDAQWLQRLHSFGLLRASFRPKGQIAELRAYMRQRERLLEYAASHIQHMQKALTEMNVQLHHVVADITGATGLRIIRAILAGERDPKVLTRLRDYRCHSSAETIEKALTGSYRAEHLFALEQALALYDVYHEKASACDARIESVLKELSIDRGRRSDPLPSSGRPRSDQANALAFDVRAALFALLGKDITQIDGLGPYLSLKLIAECGDDLSAWPSAKHFTSWLGLAPSNKISGGKILSSRTRRCGSRASALLRLAAVSVGRTDTALGAFFRRLSARIGKAKAVTATARKIAVLFYNAVRHGMEYVDPGASYYETRYRTRVVNNLHRRAKAFGFVLQPMEPPPGVVVS

SEQ ID NO: 298483 - protein, 389 aa, unidentified
MERPMQKLNDLSRSPSPLDPDGTLIAVIELSLSSWLVAGIVPGVERQPLKKLAVDESALLKLLHRWREEAAKAGHRIKRIAVAFEAGRDGFWLARWLSAHHIEAHVIHASSVAVSREHRRAKTDRLDTELLKRSFLGWLRGERDHCKMVAIPTTKDEDAKRPNREHESLVGEQSRIVNRMKATLIRLGIRGFNPKLKKAAERLDGLRTPEGEPIPPNTLAELRRDMVRRRLVRDQIRQIEDARLERLKQAPSDGPHAMVRLLARVIGVGVETADMLVQEVLSRSMRDRRAVARYAGLTGSPDESGRKRREKGLTRSGNARVRRGMIQLAWRFLMFQKDSTLAQWFRARTESARGTRKTMIVALARKLLIALWRLVREGVVPDGVVLRPA

SEQ ID NO: 298484 - protein, 353 aa, unidentified
MSQVTTIGLDIAKSIFQVHGVDAAGQSVLRQRLSRSRVLEFFGKLPRCLVGLEACASSHYWARELIRLGHEVKLMPAQYVKPYVKRGKNDAADAEAICEAVVRPTMRFVGVKTTEQQSIMMLHRVRRILMRQRTQLSNALRSHLAEFGIVSPIGREGLDRLLKIVADTDDRRVPAEARAPLEMLAAQLEGVKAKILENDRRIIASARATEVGRRLLEVPGIGPVLASAFVASVADPAIFKSGRDLAAWIGLVPRQNSSGGKERLGGITKAGNGYLRQMLMVGAMAVIRYAQRNSTRRPWLVQLMGRRPAKVAAIALANKTARTVWALMTSGERYRDPQAIPAAVSANGMETPD

SEQ ID NO: 298485 - protein, 430 aa, unidentified
MSYKIAGIDVHKKMLAVVVSDVEVDGEYHFEQQRFGSNPEQLRSLAAWLLEQEVEEVVMESTAQYWQPVWAALERYWKPIREKQQGASRKSGTLHLAQAQSNRGRRGRKKDFPDAERLVKRLVARELILSFVPGAEQRLWRTVTRRKYQLTRDKVRLQNQLESLLEEAHIKLSSLVSDLLGASARRMLKALADGETNPGALAALADQNLRATPEQLCDALGACTDLQPVYRRLLKMALEQLQFLEQQIGQLDQEMAKLLSQHQDAVQRLAEVPGLGVDSAQQIIAEVGATAATFPSEKCLSSWVGACPGDDESAGVNYSHRSPQGNRHMRRLLNQSANAAARTKGSIFEIVYRRSVPRLGHNQAIGAIAHRQCRLIWLILHQGVRYEERGPAVTKRSKQKRTARMIRQLRSLGYGVEPINSQLATPGLAR

SEQ ID NO: 298486 - protein, 452 aa, unidentified
MKKRIYRRMPVNDFQPQSISPADLGGKLVFAIDVAKVDMVAAVAAADGHVLHTVCWKAPQQNSTVLSILRGFRAAGITVEAVMEPSGTYGDVLRRQLEKDVFPVFMVSGKRTYDAKEIFDGVPSLHDAKSAAIIARLHADGLSTRLPDEVPERRQLKAALAILELYQERYLQLVHRLESWLARHWPELPTLIELTSSSLMALLARIGGPADVAANPELATKLLRGISHRLLPDDKIAAIIASANSSVGVPLVGLERDALMAIAADAYRAHRAFATARTKVAQLADTTPAATLAPVVGPTTAAAIFAEVGDARSFPCARAFLKAMGLNLKEKSSGTVQGQIKITKRGPSRVRQLLWLAVFRWIQTDPIANAWYQSKKQRDGGRASRAAVALMRKLAKGLYHVGRGGTFDSSKLFDTRRLQVASAGFPKGDLPLHRLSATRKSDGCLEAPCGTF

SEQ ID NO: 298487 - protein, 352 aa, unidentified
MSTRYYVGVDIGKKKCNVAMMNQSGLIDDEFAFSNNHEGIEWFSKKLSMDDRVVMESTGSFWTNLYNHLDSKHIPVILANPLKTKAIAWARIKSDEVDARILAHLLRSDLIAESYVPPYNLREIRALIRHRLSIVKIRTMVKNKIHSLIDKNGIETELENNIFSKRGIDWLKSLQFQSSLDRLMLDNYLEHLESLQHQIKTVDQEILLKASEDEDVRLLLSLTGVSIYTALLLKSEIGDIKRFPNYKKLVSWAGLAPSMHQSGSVEYYGSITKQGSKMIRWIMVESARVAVNHDPRLKSFYERIKYRRGDQKAIVATASKMLKIIWTMLSRSESYESRNEKSYEKKLNLIDE

SEQ ID NO: 298488 - protein, 341 aa, unidentified
MDKTLFCGIDLHSNNAVYVITDEQDRQLLRKRLPNDLTVVLGTLAPYRDRLKAVAVESTYNWYWLVDGLQDAGYPVCLANPAKMEQYDGIKEANDLTDAAFVTHLLRLGVLPTGYIYPREDRPVRDLLRRRTLLVRYRTSLKQSLQNMVVRQTGRSLGWRKVRDLGAEARAELLGDEDCLPFVAGQQVELIALLDERIQRFERKVLEHTHLRPAYECLLTMPGVGVILGLTIMLETGEIGRFRRVGDYTSYCRCVRATRNSNGKKKGSNNSRNGNAYLSWAFVEAVHHAIRSCPAARTFYDRKVATRNGALATKALAAKWTKAAYYMLTRQEPFDLTRVFG

SEQ ID NO: 298489 - protein, 406 aa, unidentified
MAAVMIGVDPHKGSHTAVAIGSAGEPLGELRVRASAAQAGQLVAWAADWPERTWAAGGAGGLGHLLAQQLVAAGERVLDVQPKLGARVRLLTAGDTNKNDPNDARSVAVAALRSAARREVSADDHAAVLKVWSKRHRDLGRTRTQVACRLHAVLCELTPGGFSKAITAGQATRVLAAIQPADAVGAARCELAAEFLGDLRRIDAQMRDTRKRLNAAVKASGTTVTEIFGVGPVIAAIVIGCVAGASRFASRDHFASYNGTAPIEVSSGNRKIHRLSRRGNRRLNHAIHMAAVTQIRHRHSDGRAYYDRKLAEGKTSKEALRSLKRRVSDAIFGRLQADARQPAAASPEGPGGQPGNDSVASAAGLHPEHRLFGQATPGPGSTLRPATARNCTVTPERTPKNTQKTP

SEQ ID NO: 298490 - protein, 350 aa, unidentified
MNSNKYVGMDVHTATISVAVREAAGKLIMESVIEAKASTILQFIQGLRGNLYVTFEEGTWAAWLYDLIKPYVCDPRRNALLKEGSRCDRIDARKLAELLRVNLLRPVYHGEKGLRTLKELARAYLTISKDLTRVMNRVKAIYRSWGIPCAGKSVYNPRHREVWLSKITQASVGRRAELYYEQLDALIRLRKQARQELLAESKKHQAWKLLRSIPALGPIRAAVLMAIVQTPHRFRNKRLLWKYSGFGVVTHTSADHRYVKGQLERSKKPVSVRGLDRDHNHHLKDLFKSAAIQASTRKGPFQEFYEALVAKGMRPEMARLTLARKIAVIALTVWKKGGAFDAKYLKPQTV

SEQ ID NO: 298491 - protein, 356 aa, unidentified
MSIVGGLDVHRNQITFDWVDQRTGEFGRGRVAPAERDVFRSWLLQLPPGDAAFAVEACTGWRFVAEELTAEGFTAHLAEPADTSTLRGRKKRAKTDRADARLLRELLEQGRLPESWVPPAHILDLRELVRLRKTLSDQRVQWQQRIHAVLFHHGLPRPPHALSADATRGWLDGLPLPAPSRLLVDTGLAQIDAAAAQAVPIDRWLAGYVRRQPGCRALAGQLFGVGPVTAATIVAELGDARRFRNGDAVVRHTGLDVTVYSSDGKRSPGHLSRQGPEVLRWALFESAKCASRTAAPDHPYYSQVRDRLTSNRATLSVARKLVRRARHILAALGDDALAPVDPAVLPPLLPALQLAA

SEQ ID NO: 298492 - protein, 336 aa, unidentified
MQLQKYYIGVDVSKHTLDFAMISEGEQLIHEQIANTVKSIQKLFKMWQKQFGFELSECLICMENTGVYCFRLLEFLEGTEAKTCVENAYALKRSQGLQRGKNDKVDAQRIALYAWKNRDFIKSYNPPKETIKKLKRLYSLRKNIAYTKMKFTTSLQETISFVDKETGSMLKKGCKRTVTALEKDKLDLEIKMKEIIFADPELKHLYDLIITVDGVGPMTAIMFIITTNGFTTFENAKKYACFAGVVPFENTSGISIKGKARVSHMANKDAKVMLHLCAMIMSKFKGDLGDYYRRKIAEGKSKMSVLNALRNKIVLRVFACVREDRPYIKNYQKNTA

SEQ ID NO: 298493 - protein, 310 aa, unidentified
MDVFVGIDVSKDRLDICVRPSGEIFVVARDHEDLEHLVERLRALSPALIALEATGGYETVVASALAAAHLPLAVVNPRQIRDFARSTGKLAKTDRLDAAAIAHFAEAIRPPARPVADAEARALGELVARRRQVIEMIVAEKNRRRLAGQPRVLKAIDRHVDLLQAELSELDGDIDGAIRKSPAWQADADLLASVPGVGKATLRTLIAELPELGRLDRRKIASLVGVAPINRDSGALRGRKTIAGGRAPVRTALYMAALVASRSNPVIAAHYQKLRAAGKAAKQALTACIRKLLVILNAILRDRKPWLLPA

SEQ ID NO: 298494 - protein, 425 aa, unidentified
MTYRIAGIDVHKKMLAVVVADVAGEGEFQFQRLLFSTTPEQLKALAQWCVDHEVQEVVMESTAQYWKPVWETLERYWQPVGRKQTGASPMTGSLHLAQAQSNRARGGRKNDFVDAERLVRRYVAQELVLSFVPSADQHLWRTVTRQKQQRVGARVRLRNQMEAFLEEAHIKLSSLVSDLLGQSGRRILEALGEGKTDPQEIALQADRRLRATQAQLCDALSAARELNPVYRKLLKQSLEELGLLDRQIQELDREIARLLAQHEDAVQRLAEVPGLGPDSAQQIIAEVGPAAAVFPTAKNLASWVGVCPGDNISAGESHSTKSPKGNRNMRRILNQAAHAAVKAKGSIFEVMFQRLRRSLCYKEAIWAIAHRLCRLIWVLLHKTVRYEERGPTVSAASKRVRTSRMMRELRRMGYRVDPPTELQDA

SEQ ID NO: 298495 - protein, 321 aa, unidentified
MSVPCAVTVGIDVAKAHVDVSVLGANLDIRRFNNDAEGHSALAVALQPLNVQLVVMEATGGYETELACALQGAGLPVAVVNPRQARDFARSMGRLAKTDAIDARMLAELASVLLRRDDLSRLLRPVPDERQQWLAALVTRRRQLLTMLLSERQRLQITPVGLHPSLLAIIAAIQAQLDDIDAQMVAHVRQHFGELDLLLQPTHGIGPVSSACLIAELPELGRLNRRQIAALVGVAPIACDSGLRNGRRRVQGGRFAIRRVLYMATLTATRYNPAIRAFYQRLKAAGKLSKVALVACMRKLLTMLNAMVKANTPWDDSLHRA

SEQ ID NO: 298496 - protein, 427 aa, unidentified
MNGIEFNSIDCFRQFKKEIRGSKEHLIVGLDIAKRKHHGFFGDANGRTLLKGLIVENSAEGFRHLLTQVRFYMDREGLRQLVFGLEPTSVYHKPLAEHLIEQGHLVVYATNEAIKKNRSLIDGRWDKNDTKDSANVADLVAQGKCHYYDLPELRLRDLRSLLLFRKRLKKQLHSCRVRIRNNLVAQYFPELDRFWNNAEAENLAIVHWFLDPGSIRQLSCEQFIAKVTTHNGGLRQQRRLRHIWEAAGQSIGCRPGPAMALEAELVVEMLQWVQAQLGRVEHAIQKIAKGFDEYGYLKSIPGFGPYVSAMALAAIGNPHRFENRAQLIRLAGFDLSASRSGEKSKTAVPVISKKGKADLRYALYQAALVASSLTSHFRAYYSRLLDGRQREQGIRTKMLVKIAAKMLVIAWTLMKRKEPFNPAHIQA

SEQ ID NO: 298497 - protein, 462 aa, unidentified
MARRKRKNTSSSDALPPQLTTVNLHAAGIDVGAEEHWAAVPPCDDPQPVRRFGANTADLEALADWLWGCDVTTVALESTGVYWIPLFELLETRGFQVLLVDPSKLPRSGRPKTDVHDCQWLQRLHTYGLLSACFRPEEQVVVLRSYLRQRATLLADAARDIQHMQKALTQMNIKLQHVVSDITGVTGLAIIRAILAGERDPLQLARWRDPRCKQDEAAIAAALHGTWRVEHLFVLQQALERYEFQHRQLAACDARIAAHVETFADQSHGAPLPPKRGQRRRHRNRPAFDPREPLYRMTGVDLTRIEGIDETTALIVISEIGLDMSKWPSEKHFTSWLGVSPQRRISGGKVLSSRTRPTTNRAAAALRLAAASLHHSQSALGAYFRRMKSRLGTSKAITATAHKLARLLYSMLKHGTAYVAQGLEAYEQQYHERVVKHLSRKARKLGYALVKPGEATVETSLA

SEQ ID NO: 298498 - protein, 304 aa, unidentified
MFGIGIDVSGENLDVAVHEQAFRQFKNNKRGWASLIKWLQQWPAKQVVLEASGGYEQKALDALHGAGLPMVRINPGRGRSFASATGKQAKTDRIDAMVLAHMADALKLTRYVPPAAWQRRLGELCQRRRHLVQMRVSEHQRMRAFSEPSLISMLNQHLREIHRSIKQLDSIIAALLAEQDGWRDFAKLKGAGPVLMATLACELPELGRLSGKAISALVGVAPMSRESGTWKGRRSITGGRAVVREALYMAALTAKRYEPRLKEFFESLVNQGKPGKVALVAVMRKMLVILNARKRDAEAQMASA

SEQ ID NO: 298499 - protein, 347 aa, unidentified
MSAHGQSVMGIDTHKHTHVVVILDGLGRHQGTLAFPASDAGAAQLLAWATQHDSPITAGVEGTGSYGYQLARALQRAGITVFEVNRPDRANRRRKGKSDPVDAEAAARAVLAGQATAVPKNREGAVEALRALTIARNSAIKATTTASNQIKAILVGADQQLRDQMRVQSLLQLAIRCSELRALNGQHAALGSLGRRWLSLHQEVIELDTMIRAQVRRTAPKLIERPGIGIHSAAQLLITAGGNPERLHSDAAFAALCGVSPVQASSGLTNRHRLSRGGDRAANNALWTIANNRMIHDVRTRDFAERRQTMGDSRNDTLRVLKRYIARETFALIRSALREEAALTDAA

SEQ ID NO: 298500 - protein, 418 aa, unidentified
MKKHNNSGKKSEPTSKPTKSRGPVQRDTKEVLAELVGKLKEKLDPKKVAATSAGEKLQSGELRPNLDRLTVGVDLGDQWSHYCILGLEGETLAEGQLRTTQQHITEFFQALNAARVVFEVGTHSPWVREVICGCGHEVLVANPRLMEGSKRRKRKNDRIDANKLARLGRVDPQSLHPMQHRSREVRQDLVVLRARDALVAARTELINATRGLVKSMGSRLPKCSSPSFAQKAEETVPVEIREALLPLVRMAATLSDCIQGYDEKIEKLGREKYGHTALLRQVKGVGPITALAYVLTLENPDRFVKSRDVGPYLGLVPKQEDSGESQPQLGISKAGDTMMRRLLVGSAHYILGPFGPDTDLRRYGLRLCERGGKNAKKRAAVAVARKLAVLLHCLWVSGEVYEPLRQGMSATIAPAVAA

SEQ ID NO: 298501 - protein, 336 aa, unidentified
MKNYVLFTGIDVSKDKLDICYVDKNGNVLGSKVIDYKPKNIKSIVKDLEKLGYNLTQTLICFENTGVYSIKLGEVLSELNAYYSEVSALEINKSKGITRGKDDKTDAKMIALYALRNIDKIVLSKVTDEAIQELKLLFAEREKIQKSITSLKMTQENEGRVNSKAYESVQKINQQTRAALKNSLKAIENEIERVFKEHPELKKNRDLLKSIKGIGTIISAYLVMITHNFTKFKNSRKFACYSGIAPFEHSSGKSVRGKTQVNHFANKKVKALLSMAVQSAKKYNSQIKAYFEKKKEQGKHILLISNNIKFKLVNIAFAVIKRGTPYVDIYKYATVA

SEQ ID NO: 298502 - protein, 473 aa, unidentified
MGKGNGMTRGDRRRNARREQLRGMLPRDGAVIGIDLADEKQALAVIDHDVRVLARKTVRVKAFRLGEALDWAVAQARAKGFTSVTVACEPTGPRWLQVQRLCAERGLRLVCVQPLVSHIARQQQDYTAHKTDEADCVMIARLAVELHCYVPEELDEVWADLRHLGRRRAALITSETASVQRIRDFLSVAWPVVPEACAQPFESMTWLAALQAVTSRCGGQPGELAVIGLQAFTALVRDALPGWGGQRIHGPICRAVFAALTSTEGVVRGHRRGLLRRVAAELGDLQRARAQRQETEAAMIAALGDLGLARLGDIPGLSATGAAAILAETGDPKRYDTSSSVVKHAGLSPSDNASGAFDGEAHISRRGRPGLRLTVWRAVWAVLIHNPVMAAKYAAMTQAADQAAADARAGSSGHATSAAEAARRRRAKARVACAAALLRWIYSMVVHGTCWDPGVAAGRKDALAAPFCLPEAA

SEQ ID NO: 298503 - protein, 334 aa, unidentified
MDKVTTVGIDLAKRVFALHGVDGAGRAGLRKTVRREQLMQTVAALPPCLIGMEACSGAHEWARRFQELGHTVRLMAPVFVAPYRKSGKNDGNDAEAICEAVARPNMRFVPIKSTEQQAVLSLHRVRQGWIEERTATINRLRAVLTEFGVVLPNRAQYVRRGARAAAEALPELARRAVEDLRAHLGVLDERIAAYDRELEAQARASEAAQRLMCIRGIGALTAVAMVATVGCARDFRSGRQFAAWLGLTPRQHSSGGKPRLGHISRRGDAYLRCLLVQGARSVLYTAMRHRDRLSRWVCTLRARRGDHKTLVAIAAKNARIAWALLAKNQTLQTV

SEQ ID NO: 298504 - protein, 359 aa, unidentified
MFTERTSVGLDVHARSVVATAIDTKTGELFKQRLVPANEVVIDWLHTLPGPVAVTYEAGPTGFGLARAMATAGIRCEVAAPSKLSRPAGDRVKTDVRDSLQLARLLRVDDITSVRVPTVTQEAARDLVRAREDVRGDLMRARHRVSKLLLRHGHVYYGGQTWSAKHHAWLHRIRFADLGTRCAYEADLEAIDFAVARRDRLDATIAELAADSEFTDLTRRLCCLRGVSTLTGFALAVEIGEWQRFNGHSIGAYLGLVPSEHSSGQSRRQGSITKTGNSHARRLLIEAAWHHKPRYVVGPVLRARWEQAPEPARARAHIGNQRLHDRWNSYTRRHKKHTVANTAIARELAGWCWSLATLE

SEQ ID NO: 298505 - protein, 342 aa, unidentified
MEIAVLGIDLGKTTCSVAGLDEGGAVVLRKRFQRHRLLAFLSGLSPCIVAMEACGGAHYVGHFCVEQGHEPRLMSPLYVRPYVKVYKTDDRDAEAIAEAATRPAMSFVTLKAPEQLDLQAIHRARERLVQNRTRLVNQARGFLMERGIRIGAGRHVFQRELTRQLEEDDVSLRPGMVRILSDMAAELAETNDRVAGLDAEIRAHARHDADMQRLMEIPGVGPTIATALVAAIGDGSSFNRARDLSAWLGLVPRQITTGGKARLIGISKHGNSYLRKLFIHGARTVLHLVRDRSTPLARWVDALKDRAHANVAGVAMANKLARIAWAVLTKGERYRPSALETA

SEQ ID NO: 298506 - protein, 337 aa, unidentified
MNIMRIGLDLAKNVFEVYGVDAQEKEVQRKTLKRKEVLMFFCQLEPCIVGMESCGGAHYWARELKKLGHEVRMMAPQFVAPYRKGSKNDRNDAEAICEAAGRPNMRFVPVKTEEQQAVLTVHRARSLMVGERTALVNQIRGFLTEYGIVLPQGRSQVRSQLPRILEDAENAVPYLAREVFADQYARLCELDRIILGYDHKIDALAKAQEDTQRLMQLEGIGPLTATALVATVGDIRQFKNGRQFAAWLGLVPRQWSSGGKPRHGRITKRGDVYLRTLLIHGARTVMRYLDRKSGRKSDWVKAVKERRGFNKAAVALAAKHARILWAMLSKGVDYRYV

SEQ ID NO: 298507 - protein, 345 aa, unidentified
MAIVEVTRPVTGGVDTHLDTHVAAVLDGTGGVLGVESFPATPAGFTELHDWMIRFGDIERVGVEGTGAYGAGLARFLRGCGLEVIEVDRPNRQARRQAGKSDPADAVEAARAVLSGRATGIAKTGDGAVEAMRALLIAKRSGREARISCLNQLRHLGFCGPDDLREAFRGVPRTALGARAAALRPRVGGDDVAHATKIAMRTLGRRVLALDADNDELDALLAGLVHTTAPDLLGVYGVGVDTAAILLVAAGDNADRIRSEAAWAHLCGVAPLPASSGKITRHRLNRGGNRQANHALWRIVFTRLGSEPRTRDYLERRLAEGLSKREIIRILKRYVAREVYRHLPR

SEQ ID NO: 298508 - protein, 370 aa, unidentified
MENRSMFVGLDVHKETIDISTAEGERHGEVRHYGVIASDLEPLDKVVRALRAPDRRLHFVYEAGPCGFGIYRHLTNRGEECAVVSPSMIPKRSGDRVKTDRRDSQMLARLHRAGELRAIYVPDATDEAMRDLVRAREDAVVVGSQAKYRLKAFLLRQGRRYTGRDGWTLPYRRWLSDLSFPSAAQHIALQEYRDAIAETEQRIARLTDQLRQLAPTWRWAPVVAALQALRGVSFITAVALVAELGDLTRFRHPRELMAYLGLVPSEYSSGPQVRRGAITKAGNPHVRRLLAESAWAYQGIPRIGRKHADRQEALPKVVCDIAWKAQLRLTARFRRLVARGKAKPKVATAIARELSGFVWAIAREVSPTSR

SEQ ID NO: 298509 - protein, 394 aa, unidentified
MKRKSKIAIGIDVHKEKCAAYATRKDGKKDKTGKLDEFNEQFRRFPSKYEGMKAFEQFWGHEDYEIHILIENSTKSHDVYWMLTNLGYRVVVAHATDLYRITKSTRKNDDHDARELAGYMRRRLNGEDEFRESFIPDAEWSKKRALCRFLATQKNQLARTKQQARSYLLLNGISSLDGFNDVSSAKALRVFTDTREVIPKLMAESMNRNRKLIGFTEKTVLQEFSDNRIFEILLSIPGVGLHTAAYLTAEIVDMDRFQTKEGFSSYFGVRPSQHDSADSRNKGHISHRGDELARRLGFQATFVHIFHCPDSFISQKYRRLVSHGKHHRVAVIACENSMFMMMFAMIKNDTVYKSDPSVLAKAREMADNLDLNEDDEDDEQLTEELLKNGPEEGD

SEQ ID NO: 298510 - protein, 338 aa, unidentified
MQTGQTVLTYTLFVGVDIAAQTAMVATQRPGAKASRSFTIEQTPEGYTSLLHQLQATGIVPGQVLVVMEATGSYWISLATRLVHEGFAVSVMNPAQAHHCAKALLKRAKTDAIDAQTLAQLAMILQPEPWTPPPQIYSALQQRLAQRDDLLNLRQQVRNQLHALVQHPEVIAEVRARMERLLATFASQLTEVESEITAALSQDSAWAAAATRLQSIKGVGWVTAAWTLVTTLNFTSCDTVDSLTAYAGLAPMPRQSGSSVWHRPSIGHTGNGRLRTAFYMATLSAAQHNPVIKAFYTRLREVGKPEKVARCAAARKLLHIAWAVVTKDQPFDPNYALG

SEQ ID NO: 298511 - protein, 343 aa, unidentified
MSTITIGLDLGDRYSRFCELRPEGVVLTEGRLPTTRTALARQFEAHPACRIVCEVGTHSPWVSRLLASWGHEVLVANARQVRLIYAAHRKSDRIDAATLARLGRLDPELLRPIRHRGADAQAALAQLRARDALVRVRTVLINHVRGAVKAMGERLPASSAVAFARTAGPAVPLALQPALTPLLPMIETLTNQIRAVDRELETLALTRYPETARLRQVSGVGLLIALAFVLTVEDPGRFAKSREIGPYLGLCPRQADSGRSQPQLRISKRGDALLRRLLVNGAQYILGPFGPECTLRRKGLALAAHGGKNAKKRAVVATARRLAVLLHRLWVSGAAYEPDRQAA

SEQ ID NO: 298512 - protein, 354 aa, unidentified
MSEKHNSVIAVIGIDIGKNSFHVVGLDGRGAIALRQKWSRGQVETRLANMPACLIGMEACVGAHHLSRRLRLLGHDARLMPAKYVRAYSKGQKNDFRDAAAIAEAVQRPTMKFVATKSADQLDLQALHRVRERLVSQRTGVINQIRAFLLERGVAVRQGRHFLRAELPGILATGCAVLSARMVHLIEDLAGDWRRLDERIEGLSGEIAAFARQDAGCERLMSVPGIGPIISSAMVAAIGAGDTFTKGRDFAAWLGLVPKQFSTGDRTVLGKISKRGNRYLRVLFVQAAWVVLIRSKNWERYGLKPWIEAAKKRLHRNVLAIALANKLARIAWSVLAHGRNFEASKLAEAAIQPA

SEQ ID NO: 298513 - protein, 347 aa, unidentified
MDHVGMDLGKRESQLAILTEDGELINMRIRTERHRLVEMFGRRPKARILVEASTESEWVARCLEDLGHEVIVADPNYAPMYAQRTRRVKTDRRDAHALAHACRAGTYRPAHRTSTERCELRARLAVREAVVRTRAAWITRIQSLVRREGCRLRTGAPETFLTRVEELALPPALTTVIAPLLELLDPINKQIEALDEELERIVAADEVPRHLTTVPGVGPVTATAFVATVDDVTRFRGAHQVEAYLGLIPCEWSSSEVQRRGHITKAGNGRMRWLLVQAAWCILRRRRRPETAALRDWAERIAGRRGRCIAAVALARRLAGILFAIWRDGTVYDATKVRGPLPARRAA

SEQ ID NO: 298514 - protein, 430 aa, unidentified
MPYRITGIDVHKKMLAVVVSDVEVEGEYHFERRRFGSNPEQLRSLAAWLLEQEVEEVVMESTAQYWKPVWEALERHWKPLRQKQEGASRRSGTLHLAQAQSNRGRRGRKRDFPDAERLVKRLVARELILSFVPDTEQRLWRTVTRRKYQLTRDRVRLQNQLESLLEEVHIKLSCLVSDLLGVSAQRMLKALADGETNPAALAALADRKLRATPEQLCDALGACTDLKPVYRRLLKMVLEQLQSLDQQIGQLDQEMAMLLNQHQDAVTRLAEVPGLGVDSAQQIIAEVGPTATTFPSAKCLSSWVGACPGDDESAGVNYSHRSPKGNRHMRRVLNQTANAAARTKGSIFEIVYRRCVPRLGHNQAIGAIAHRQCRLIWLILRQGVRYEEQGPAVTKQSKQRRTARMVRQLRALGYRIELPNPQHSSSAQVQ

SEQ ID NO: 298515 - protein, 338 aa, unidentified
MQLYCGIDLHAKNSYLAIIDEQRQRIFKRNVANDRQTILSFLAAYKAELAGIVIESTFNWYWLVDALMEEGYTVHLANPCAIQQYAGLKYIDDKHDAFWLAELLSLGILKEGYIYPKEERPVRDLLRKRGHLMKLRTSLLVSLHNTMANACGMKIPSHHVLGKEDRVSVHLCQHESLALMGRVSKASIDALTLQIKMIEAHVEKQYKIEPAYAGLLSLPGVGKILGLTILLETGPISRFPAVGNYVSYCRKAESIWKSSEKVKGKGNRKNGNRYLSWAFAEAANHARRFDTASRNFYNRKVHERNSPVAHGALANKLARAAYYIMRDQVPYEEAKLFG

SEQ ID NO: 298516 - protein, 362 aa, unidentified
MSIKTRFQSALSVFQTREHFGQTKIASKASLVIKYVQRLQKEQPESEVLCGYEAGPTGFGLYRELEKTGIPCVLMAPTSLPKAPGNRVKTDRLDAQELAQHLAWGTYSAVHIPTSENEAVKDYTRMRNARVLALKKAKQNLLSFLLRIGRTFTEGKSYWTQIHFNWLRKQEFIDSLTQETHLEYLQEVFDQQEKVDRYNSQIEEIANQDEYRERVSRLRCFRGIETHTALSLVAEIGDFSRFISPSQFSSFLGLVPSEESSGQRERRGGITKAGNTRLRLLLIEGAKASLRSGVYVKKSKRLQVRQRGNDAQVIAYADRANRRLHRVYSNLTSRGVHNNKATVAVSRELSCFIWGMMNNKIE

SEQ ID NO: 298517 - protein, 393 aa, unidentified
MDSPPPRHHSATVAFEEANGSEGETMKKHSSKQESLSSTDVELCTTICVDLAKQVFQLAGEDATGRVIYEDRIKSRQAFHDFLLKLPATVAVLMECGPGAQAWARLLQAKGNPVRILPAQRVAEHRSGAKNDRNDAHAILRAGRDTSIASIPIKSTTALAIQALHRIRRGSIKRHTAIGNQIRGLLLEHGVSMPQGDTAIKSHVPRALEDASLPLPDLLREVLDELLTDWQSLGERITTLSKRLEATAQKDEVAQRLITIRGVGPITATAIVAKETEPRRFASGRMYSAFFGIVPDQHSSGSKVQLGRMSKRGDGYIRSLMIQGAHAVLSQLRPDSDQPDDRRLLRWLSRLGRKEAAIRLANRNLRIIWALLQSDQVYQRKPSSNPEAACASD

SEQ ID NO: 298518 - protein, 356 aa, unidentified
MQTENKEIDFRNKTIYAGIDVHKTKWVVTLRMEHLELKTFSMEPSVEGLVGHLKKRYPGASYSSVYEAGQSGFWIDRQLKRLGVANMIVNPADIPTTGREKDKKNDYRDSRKLARELENHTMRGIYVPCESQEALRSLCRIRSQFVGEKARLKNRIKCFLAYYGKPFPGKNTRQWSERLLTTVGEIRYPSSISNECMGLYLDQIVLLQQKVKAIEQMIKEKAEELGVLRTVERLQTIPGIGFVSAITIYTELSDITRFQKLDQLCSYIGLVPSTSSSGEKERVKGISLRQKKYLKSIIIEASWMALRKDPALTLSYSHLLSRMQSQKAIIKIAKKVLNRIRYVWIHDTDYQLSVVR

SEQ ID NO: 298519 - protein, 398 aa, unidentified
MGVAVGIDIAKEFHWVRAIDTADSRLLVDRRVDNEPVALHALVDELQALGAEHGQMRVGIDVVGGIAGLLSAMLTDAGIDLVHVSGLAVNRARQGSVGGEHKSDPKDAGVIADQVRHRRDLRPIDPATEIDAEIRLLVARRRELVADQTRRINRLRDLLASIFPGLERVVDPTQKASLRLLGRYVTPAEIRRAGRRRLVEHIARAGHLSRKHVEQLADRALDAAQAQDVAVAGERVAADLIRELADEITTAKTRLGALDADLEAALERHPDAALIRSLPGMGATLTAEFIAEAGSIDRFPTADQLAAAAGLAPVLKQSGKVRYLQRASTGNKTLKRVFFQSAFCSLQHPTSRAFYARKRAERKTHHQAVIALARRRVDVLHAMLRNRQPYEVRPAKAA

SEQ ID NO: 298520 - protein, 366 aa, unidentified
MKKISTVQTFGNEIFKEQRLTIGLDLGDHWSFYCVLDEAGKIILEQKLPTTPEAMKQTFERIPRSLMALETGTHSPWLSRLLKELGHQVLVAHAQKVQLISKSNRKDDRHDARTLARLARIDPELLGPVRHRSAQAQIHLTVIRARAELVSARTALVNAARGLAKSYGERLRKCGTEQVSRELAAELSVELREVLEPLLKEIESLNERIKEYDARMEKIARESYPQVALLKQVKGVGTQIALTYVLTLDDPHRFAKSREVGCFLGLKPGRRDSGESQPQMNISKAGDRYLRTMMVQGAHYILGPFGEDSDLRRWGLKLAARGGKNAKKRAVVAVARKLAVLLHRLWMSGEVYEPLRNSHQAMRAVA

SEQ ID NO: 298521 - protein, 439 aa, unidentified
MPWRHCEAPTCLWGAGRDGLRLVASGRSSVGLARESPAAFGLALPGFASRPGTGCGLAQQRSGPESGIQKSACRPWLFFGEHGSEANGMIIGVDPHKSSHTATAVDPATNSPVASLRIDASLAGYRQMLRWAAQFGERRWAVENARGLGRHLAQWLVARDEIVLDVSSTATARVRELSRGGRRKNDVIDAAAAASVAALQGDATVVVGEDHTTVFAMLEERRANLAAQRVRVANQLHALLRDLVPGGAPLALTARAAAAILRSVRPASTSERARKELAQDLVRDLRAVDTGLADIEKRMTVALDEHGTRLRSVDGVGPVTAVRLIGRTGPASRFRSADAFAVYAGVAPVEVASGDRTRHRLSRSGDRQLNSAIHLVAVTQVRMRDSIGRKYFDTKLAEGKSRNEAMRCLKRRLAAHLWRLMITDERRVAAADAGIADAA

SEQ ID NO: 298522 - protein, 416 aa, unidentified
MDVHRDFCEVAVAENGRVRSAGRIQSRVPALELFAQSLAPDDVVAMEATTGSDRIVSVLQRHGIRVVVANTRKLKAITDAKAKTDRLDARALAKLLMTGLLDPVWTPDERTRALRRLTNRRERIVRARTRAKNEAHGVLSRNLCERPPVTDAFGKAGREWLAGLELPIDERLTLDGCLRQVDFLDGEVVAIDREIAKQALAWPEVLRLMTVPGVNVQTAATFMAAVGDIRRFPSARKLVSYLGLDPRVRQSGNGPARHGRISKAGASETRHMLGEVAWKVTMTPGPLRAFFERVRARRGPQIAATATARKLTVLFWAMLTRGQDYAFGRPAMTRNKIRQLELRAGAPPQKGRHGIAGGKSKAVFDAERELSRQAEAAYRRLVSDWQASGPAKVGAGATPGRASQRPSKGKAARQTP

SEQ ID NO: 298523 - protein, 384 aa, unidentified
MNKHSILFIGLDTHKEFNEVAYIEEHRGAQPVHLGRFSSSKVAVQKLVRQFESKYPGATLHFVYEAGPCGYWIYRLITSLGHCCYVVAPSLIPKKPGEKIKTDKRDALKLAKLLKSEDLTPIYVPEPEDEAVRDLSRAREVAMKDLKDAKYQLKALLLRNNINYKGTANWSQKHLRWLTELVLPHPAQHIVLQEFLQTITERISRLERLDNELTHHVHQWRYYPVVKAIQAMRGVRLLVATGVVAELGDLTRFDHPRKLMSYLGLVPSEHSSGGKRHIGAITKCGNGRARRLLIEGAHTYRYAANISTDMQKRQEGLPKDIIDIAWKVQLRLCKRYKKMIAKGKHYNLVVTAIAREMIAYIWAIAKEVVLTPMNTKLRLARVPA

SEQ ID NO: 298524 - protein, 360 aa, unidentified
MTSQPGSRHVVGGVDTHKLTHHGAVLDADTGKLLADREFPATRVGYRLLLSWMSSHGTVLKVGLEGTGSYGAGLQRHLQAQGITVIEVSRPNRQARRARGKSDPIDAINAARAVLSEEAITTPKLRDGYVEAVRQIRATRRSAVKARRAALHQIHGLLWCAPEELREKLSSYDRAALVARCARLRVPTTGALDDPVVTARRMLRRLAKRIQMLDEEIADANKELDAILASQAPNLLAINGVGTEAAGQILTTAGENIDRLKFEASLARLCGVAPIPASTGKSTRHRLHRGGDRDANSAIYLIVVNRLRWHEPTKRYLERRTQEGKTKKEIIRCLKRAVVRELYRALQADLNRQPQALDVA

SEQ ID NO: 298525 - protein, 414 aa, unidentified
MEVKYERCCGIDVHKKTVVACVIVPGAKRGEVEKETQTYATMADDLGALGRWLQSKGVTHIAMESTGVYWKPVFNLLEGQFAIVVVNAERIKALRGRKTDVADAEWIADLLRHGLLPGSFIPSAPQRALRDLTRFRTSMVNDRVRAVNRLQKTLEDANLKLASVVADVTGVSARAILDALLAGQTDPQVLADLAKGQLRKKIEQLQKALAGTLRPHHRVLVVELLSQLDYWEEAIARLDKEIAAMLQPFEAELARLDSIPGVSQRIAEVLIAEIGVDMTPFARAQRLASWAGMCPGNHASAGRRKSGKTRQGSPWLRRALTEAAHGAARTKKSYLAAHYRRLAARRGSRRAIVAVGHTILTISYHLLTRHCMYQDLGPNYYDERDREGVKRRAVRRLEQLGYQVALSPSGSTPT

SEQ ID NO: 298526 - protein, 355 aa, unidentified
MYGLKHQKEKRSMDHFAGLDVSVKETSVCIVDETGKIVREVKVASEPEALLSVLKNPAYRFKRIGLEAGPLSQWLFSALAEAELPVVCVETRHMQAVLKAQINKTDRNDARGIAQMMRVGLYRPVHVKTLRSQKLRMLLTHRKLLQSKAIAIENDLRGTLRNFGLKVGMVGTVKFEARIKELVENLPDLAVLVEPLLVVRRVLREQFVILHRRLLAIVRDDEVCRRLMTTPGVGPVVALTYRATVDVPARFRKSKAVGAVFGLTCSKYQSGEIDWSGRISRCGDEMMRVMLYEAAQSMLHSKKWSWLKAWAMQIARRRGKKKAIVALARRLAVIMHRIWVDGTEFRWTREQAVAA

SEQ ID NO: 298527 - protein, 445 aa, unidentified
MHYKRLLALIDSVSSHLSVGLDVGADFTWMSIALPNGSFIGKPFKIVHSDPRSRDLAVAKIKEAQETYSLKSRCFLESTGIYHIPLLCFLRDKGFDCSVINPIITKNSTNINIRKLHNDKFDSKKAALVGLNVSLKTSIIPDDSVVDLRNLVRDYYYFKDLQSAVALKLTAELKVSFPAYAKVFSKVTTQSSLKLLSSYPLAEDMLAASKDDIVKIIRSTARFGEAYALRKYDTIIAAAQDAAVFGRALPSNAVRIRLYIDTYQEYQKHLDALLKALHETVDRLQDTLIYDQICLLQSLRGIGFLSAIVLIAEMGDFKLFSSPKKLYAYFGLDPAVKQSGKLNGDKVHMSKRGSSLARRVLHMVALNNVKVDKGSGTPVNPVVYDYYTRKCSGKKKPVAMGAVMHKICNIIFAMLRDNKPFEVITPEEHCRRFAAEHPDKIRKAA

SEQ ID NO: 298528 - protein, 337 aa, unidentified
MDYFAGLDVSLEKTHICVLNGDGTVVHEVTAASLPEAITAALAGAPECSRVVFETGRMAPMLYHGLVEFGVPIICIESRQAYQALKTLATHKTDRNDARGLAQLARTGFFKPVHVKSLPAHAVRALIIARKKLVGQRVTLENQIRGLAVVFGVRLPRGLSPAFVEQVLGMSKGIAGLSGAMRGLVAARDAVLGAIAAIDADMKKLVRASEACRRLMTIPGVGQLTALAFTAAIDDPSRFRRSRDLGAYLGLVPRRYQSGEIDYVGGISKVGDRRVRTLLYEAANVMLTRYKGELKLKDWAFAIAKRSTMRKARIALARRLAIIMHAMLRHGTEFKPT

SEQ ID NO: 298529 - protein, 341 aa, unidentified
MEEYISLDVSMKETAVSIRREGQRIWRGKCASDPRVVAELIRKRAPAVKRVVFETGPLSVWFYHALCAEGVPAICIDARHAKAALDMAANKTDANDADGLAHLAEVGFFREVRVKGFDSMLTRTLVAARTRLVRITVELSNQIRGLMKTFGLLVPAGKGSSFEKNVRRLLVDQEGLAPILLPMLEAWRSMRLRAAELGRQLAADARQSQACRILMSIPGVGVITATAFATAIENPDNFKQSRSVGAWIGLTTRRYQSGEVDYDGHISRRGDRHLRGLLYEAAAVILTRSSTDSSLRTWGLKLRERIGFKRAAVAVARKLAVIMHSMLKTGEFFDRNAGVTT

SEQ ID NO: 298530 - protein, 347 aa, unidentified
MRKIVKQVVGIDVAQKELVVSLGRMFDDWTPELYGSKTFQNTQKGFMAMVSWVRKLTEESGGIRYVMEATGVYHEALAYYLDQEGYDITIVLPNKISNYFKTLEVKTITDKTSAGTIAMFGLEKKLQTWKRPKKIFRDLRQLTRERDQIVEERTMVKNQLHAEQAEAYSNPSTVQRIKKRIQFLNQQETEIKVEIAALIKTDEPVSESVKLTSSVTGVGLLTSAIVLAETNGFELIRNKKQLTSYAGLDVIEKESGTSVKGKPKISKKGNKYLRKAMHLPALAAIRYDQRFKAIYARLVAKHGIKMKAAVAVQRKILEMIYTIYKTGLQYDKDYLKKNGKETSIKVE

SEQ ID NO: 298531 - protein, 405 aa, unidentified
MNMNAVGIDVSKRKSMVAILRPGGEFVARPFEVPHLSSDIQTLIDRIKGLDGDSRIVMECTGRYYESLARELVAAGLFVSAVNPKLISNYQDEDNALRRVKSDKADSVKIARYTLDRWAKLKQYGLMDEIRNQLKTMNRQFDFYMKHKTALKNNLIGLLDQTYPGVNTYFDSPARPDGHQKWVDFASTYWHVDCVRKISLNAFTDHYQKWCSRKGYNFCKAKAEEIYRAAKELIPVLPKDDFTKRIIKQAAEQLYAASQTIEELRSLMNQTAARLPEYPVVMAMKGVGPSLGPQLIAEIGDVARFTHRNAITAFAGVDPGVNDSGDYSQKSVHASKHGSPALRKTLFQVMDVLIKTKPLDDPVYLFMDKKRAQGKPYYVYMTAGANKFLRIYYGRVKEYLASLPQ

SEQ ID NO: 298532 - protein, 347 aa, unidentified
MNGDYAGRQVVGMDLHRHRSVLVRMSEDGRKLGTAKITNSPAALRAELARAGENPRVVLEATYGWYWAADTLAAAGAEVHLAHPLGVKAYGYQRVKTDAKDATNLADLLRMGRLPEAWITPPEIRDLRELTRYRQKLVGLRTSCKDQVHAVLAKLGIAVTCSDLFGTWGSAWLDRLRLPQPYAGKVTSLRQLIGELNTEITMLSEVIADLLAGHHGYRVIQRLPGIGPVLAAVIIAEIGDVTRFRTAAQLASWAGLTPKHRESDTTVIRGHATKQGSRLLRWALIEAIQRGPAGFPVRDARDAIIARRGTQARNIAKVAAARRLLTLVYYGLRDGEIRCLPEPARAA

SEQ ID NO: 298533 - protein, 394 aa, unidentified
MILVGIDIGKNKHTFSIIDKNSGEILLSPSDFSNNLKGFLFLIQKLSSYTKSELLIGMEDTGHYHFALLKYLLDRRYTVALINPTTTDLTRKLQGGITKNDPLDSLTICDVISSNHRNKPYRVTTLNRFDLYEQKQLTRHHHNLKEELNTYKNRLQKCIDIVFPEFNSLFHSKYGIVYMNILKAFSSAKAIANADIRSIRKCFEFKGQGKRISLSAEQLKLTAKSSIGIPSVAEEIQIRHLVSQIELLEKQLSEIDKRIEEFSLKNNSPILTIPGISHFSGTSIISELGDICNYTKASQIIKFAGVAPYHYESSQFTAQHTAITKKGSKYLRKTLYQIILPVISNNEVFYAYYTKKLNEGKCHRCAQGHCIRKLLRVIYHLLSTRQPFNPKLLV

SEQ ID NO: 298534 - protein, 400 aa, unidentified
MRVVFGIDVSKASSEVAILVNGEKVHGYTIPNDAIGFNRLLGDLKTVHQPEIVFEATGVYSRRLQAFFEDNSYAYTRLNPLESKKQLDSLRVRKTDKIDAEKLAMSQFILNRKPSYVQEALYQELRDLSRFYQNLTEDIVCAKNRLHKVLQVTFPELENILSAPTGEQYWNLVITFPCNSFVLESDDATLTATIRQSTAKRISEKRVTYLVDKLTKLANQSYCAVKKTSPVIEEVKYYARELLRLSEHRQGVLEEMVTLAQSLPEYEILLSIPGIAETTATSIIGELGDIRRFHSANQINAFIGIDLRHYESGNFLAKEHITKRGNPYARKILFKCIHNIASASHTNPCHIADFYEKRKRQSQVTSTKPHTIASIHRLIRTMYYLITHNKLYDYTSTQNR

SEQ ID NO: 298535 - protein, 419 aa, unidentified
MSEKVYRRCCGMDVHKDTVVVCVLPPDGETGKRALKVWRTFRRDLIRMRGWLKLLKVTEIAMESTGVYWRPVWNVLEEQGFRLLLVNPAQVKALQGRKSDQRDAQRLAEFLQDGRLDPSFVPPREIRELRQMLRHRLSLLQQRGEAHNQIRDLFETANIKLSSVASDLLGLSGRRIIEAMMAGQDSPELLSWKVRGKLRKKERQVQESLDGCFQEFHRRMLKAHYQHYQFLSQQVQDLEAEIARRMKPYADKIAVLRTIPGVEQMVAWHVIAELGADMSVFPDADHCASWAGLSPGSCESAGKQFSGRTKKGNKYLRRVLTQAAWAASHCKDGYLRAFFYRVKARQGWGKAIFAVAHKILVIAYCLLKTGTPYQELGSDYFDKLHPERTARRLVERLQRLGLTVTLTPSPAPTPTFSES

SEQ ID NO: 298536 - protein, 418 aa, unidentified
MKVVFPTCCGVDVHKSFLVATIIKTQQDSLQPSYQKKRFSTFNADLNRFADWLHENDCLDVCMESTGKYWVPVFNILEKRGIRVVVANPKWVKAVKGNKDDTKDSKWIGDLFRIGLVKSSFIPDKDIRILRELTRYRYKLTSMRSSEKNRFQNAFTVCNVALDSVVSDMFGKSATAITDYLTSGEDFDAQHCVSLLQRSLRKKADDVLQSIEGYEITAEQKTRIGIVRDHLHYIDALIARIDICINTMVDKYEGYIVLLRTIPGVDRSSAITILSEVGVDMTQFGSSKRLCCWAGLTPGNNESAGKKKSVRISRAGVYLKPALVQVAHAAVKDKLSPYYALKYERISKRRGKKRAIIAIARMILTAVFVMLSNLEEWNPVDLYRVDMPEHLKEKQLSKAVKQAIHFLKTQGLTVLDSA

SEQ ID NO: 298537 - protein, 368 aa, unidentified
MAKRNTFVGLDVHKESIAVAIAEGGRFGEVREYGTVGGELEALDKVLRALRAPGRTLHVVYEAGPCGFTIFRHLTRLREDCAVVSPSMTPKRAGDRVKTDRRDAMTLARLHRAGELRPIYVPNESDEALRDLVRAREDGVEVTREAKQRLKAFVLRHGLRYRGRAGWTIPYRRWLAGLTMPEPAPQIALQEYLATVEEAEQRVTRLTEQLRHLVPGWRWAPVVDALQALRGVSFITATGLVAEIGDVRRFTRAPELMAYLGLVPSERSSGPATRRGRITKAGNPHARRLLAEAAWAYRSIPRIGRVMQQRQAHLPAAVRALAWKAQLRLCGRFRRLNARGKPRVVIATAIARELTGFVWAVAREVPAP

SEQ ID NO: 298538 - protein, 409 aa, unidentified
MERQLERCAGLDVHRDTVAACVRVPGRGGHREQHVQTFGTTAAELLRLREWLEEQGVTDVAMESTGVYWKPIYYVLEEAFTCLLVNAAHIKQVPGRKTDVLDCVWIAQLLEHGLLRGRFVPPVPIRELRDLTRYRKGLIQERQREANRLHKVLQDAGIKLASVATNILGVSGRAMLEALVGGTTAPEVLAALARGKLRAKLPALREALAGRFRPHHAFLVSQGLAHLDYLDEAIDTVSTEVERLLLPFVEPRRRLDTIPGINTRTAEVVIAEIGVDMSRFPSEHHLASWAGLCPGNNESAGKHKAGTTRKGNRWLRMALIEVALAAIRKKDSAFGARYRRVMRHRGHKKAVVAVAHSLLRTIYHVLAESTDYREPGADYYDRRQTARTTRRAVAQLERLGYRVTLESAA

SEQ ID NO: 298539 - protein, 348 aa, unidentified
MTIISHLYAFVVGVDTHAKNHVYSVLTHTGEHVDTSTFPTTKAGIKRALTWVGRRTRGDLNTLWVIEGIGTYGAILADHVADAGYTVAEAASMNARDRHATGKDDRIDARRIAGTVLPLDESRLRFPRQADGPRQGLRILVKARESMTGEKTRTINALTALLRTHDLGMDARRKLSVVTIQTVAKWRLRNESVALTEARREAIRLAKRVVDLDVEISDYAMRIEALVKDSPGAVLLAEPGIGPISAAVFYLAWSHHGRVRSEAAFAKLAGVCPIPASSGNVVRFRLNRSGDRRLNSALYMVAITRLSHHQRSQEYMAKRLGEGETKKETIRCMKRHVARSVYRILEAA

SEQ ID NO: 298540 - protein, 385 aa, unidentified
MQKRHDDSKACLTAFIQDNTVIVIIEMSLRSWLVAGMIPGIDREPLKKIAADPEVLLRLLYRWRDEAIKAGKEITRIAVAYETGRDGFWLARWLRDRGIDAHVIHATSVAISREHRRAKTDRIDTAMLRRGFLGWLRGERGHCSMAVVPTIAEEDAKRPHRERESLVKERTRTINQMKAILTQFGVRNFKTASRKAAEKIGDVRTPEGVPLPPNAGAALRRQIEHFRLINGQIKTIEKTRLQRLRQQPTDKFNAMVFLLVRIIGLGIETAEQLVHEILSRKLRDRKAVARYSGLTGSPDESGARRREKGLSRSGNGRVRKILIQLSWRMLQFQPDSSLVRWFKDRTANSQRSRKPMIVAFARKLIIALWRYVNTGVTPEGFKLAK

SEQ ID NO: 298541 - protein, 415 aa, unidentified
MLFIGDDWAEDHHDVEIVNAAGDRLAARRLPEGVAGLAGLHALIADHLDPDQDAAQVVIGIETDRGPWVQALLAAGYLVYAVNPLQVARYRERHSVSGAKSDPGDAHVLAELVRLDRAHHRPIAGDSALAEHVKILARAHQSMVWSRQRQTNSLRSMLREYYPGALAVFGDDLAGRDALAVLSLAPTPQQGARLSEHQVAAALPRAGRQRNITVRAADIVAGLRAEQLAARPGVVGAYAAAAQALLAVITELSRQTLVLAGEVEAGFGRHPDVEIYLSQPGLGVILGARVLAEFGDDPDRYPDTRARKNYSGMAPVTRTSGKSRAVLARHARNRRLADALYQQAFAALNSSPGARAYYDTHRARGNTHHQALRALANRLVGILHGCLRHKTLYDEPRLGQPPRQLPLDSYEPWDV

SEQ ID NO: 298542 - protein, 375 aa, unidentified
MIYVGIDIAKLNHFASAISSDGEELIKPFKFTNDNDGFQLLLSKLDPLDKDSLIIGLESTAHYGDNLVRYLVAKNYKMCVLNPIKTSTMRKNNIRKTKTDKVDTYIICKTLMMQESLRFVTFYDLDLMDLKALGRFRQKTIKQRTRLKIQLTSYVDEIFPELQYFFKSGLHQKSVYALLKEAPTPEAIASMHMTHLAHLLKVNSHGRFDKEMAQQLRSLAQKSVGASDSSLSIQVTHTIQQIELLDSQLERVEAEMTEIMKFNDSVIMTIPGIGYINGGMILGEIGDIHRFSSPNKLLAYAGLDPSVYQSGNFQAKKTRMSKRGSKVLRYALVNAAHNVVKNNATFKAYYDAKMAEGRTHYNALGHCAGKLVRII

SEQ ID NO: 298543 - protein, 341 aa, unidentified
MKKFIRIGVDLAKNYFQVHALVSEVGPAVTRKLRRSKMHEFFSQIEPCLIGMEACGSAHYWARELKAMGHEVLLMPPAYTKPYVKRGKNDAVDADACCEAMSRFGMRFVPIKSAEQQATLMLHKTRELLVKQRTMSVNALRSHLSEFGIIAAKGIGRVDELLELAESDATLPNAARAGVKVLSQALEGLDKAIDDLEDEITSAHAQNEMTRLLYKVPGIGKIISSVIAASVPDPSVFKSGRDFAAWLGLTPRQNSSGGKQTLGAITKQGNRYIRKLLVLGATSLLNVMGKRKGALRDWIVGLLAKKPARLVTVALANKLARILWAMMKTGESFRTEMFAKA

SEQ ID NO: 298544 - protein, 335 aa, unidentified
MKHYAGIDLSMETSHVCVVDADGRKVGMQCVDSAPEAIAAVLERHGPIERAVIETGRMSPSVALGLRELGIAIVCIDARQAHQSLKAMKANKTDPHDAAGLAQLARTGFYKEVHVKSPAAHGVRSVITARGHLVEARVRLDNTIRGLCATFGIRLGAGQGERFIARMRAAASIPGLGEAVASLLRARERLVEEIGQMDRQLKAISTASPACQALMSIPGVGVQTSAAFAAAIDDASRFKRSRTAGAYFGLVPRRHQSGELDWTGRITKQGDGTVRKLLYEAANSILTRTRQSFALKTWALKIAKRRGLRKARVALARRLAVIIHAMLRDGTLFEA

SEQ ID NO: 298545 - protein, 407 aa, unidentified
MELVALYKRVIGLDVHQAQITACALIEECDGLIRIEQRQFGTFKKDRRALAQWVVQLQPDEVVMESTGIYWKSPYAALEAAGIRAKVVNARHVKNVPGRKTDINDAQWLATLSRAGLLRASFIPPAKMRELRLIARQRQKLTGQLASEKNRLHKILADGGIRLGVVVSDVHGQSARAMIKALIANKMPQEVLKFASRRLKASREELFDALQGELTESHRFVLNELMQHIEEIEQRIARFDQRLLAGLESEHNWLVLLQTLPGVDLIGAAMLLVEIGNNMDAFGSADRLCSWVGICPGNNESAGKHKSGRTRKGNAYVRRLLCEFAHAASRTTSAFKAKFSSLIVRRGYKRAIVALGHKILRIIFFMFKRREHYRDSATDYEKLSVQRNAARWIKTLIQHGFIKTAQA

SEQ ID NO: 298546 - protein, 412 aa, unidentified
MQVVYGRCAGLDVHKKTVSACVSVCEAEGKKQQQMRVFGTFTSDLLALADWLAEHQVTHVAMEATGVYWRPVWAVLEGRFQQMLVNPQHIKAVPGRKTDAKDCEWIADLLQHGLLKGSFVPPVPIQDLRDLTRYRAELRQSQNRVANRIQKFLEQANLKLASVASNALGVSGRQILEAIIAGEENAEQLAKLARGRLRNKIPELEQALQGRVRDHHRFLLAEYLDEWEALGQRITRMEAEIDKHIRPFEQAVALWETIPGVEHVTACNLVAEIGVDMNQFQTAQHLASWAALCPGNHESAGKRKSGKTRDGNRWLRRTLCQAAWAVTRKKNCYLSAQFKRLAARRGVKRAVTAVAHTMLIIGYHMLKTGKPYHELGGDYLEQINKDQLQRYFVKRLQRLGLTVTVEAAPQAA

SEQ ID NO: 298547 - protein, 364 aa, unidentified
MLYLGIDQHRKQLTVCDRNEAGDVTLRRQVSTEWARVRAFLAEYRELAEKQGGFVAIVEVCGMNHWLVKMLNEYECREVILVQPQERSKQKTDRRDANHLAETLWVNRHRLLGGRRVQGLRRVHPPTPEDVDARQLTELRKRLGQTRTKTINRVKHLLRKHNIEQDCPTKGLDTIRGRKWLGQLALDKIDRLELDMLLKQWELHDRQIEQISEEIKCRQATHATARIIETLPGCAAYSSLALASRIGAIERFPRPGSLANYWGLTPGCRNSGNATDRLGSITKRGNATARFILAQLVLQVLRRDGQMRARYLRIKKRRGSKIARVAVMRQLATVIWHMVKHQEPYVIGGPPRGKLTRQLARQPV

SEQ ID NO: 298548 - protein, 374 aa, unidentified
MPRHQHYWVGLDAGHLETAVCLVDAEGHAFFEAITETRAAPIRDILRRFGVEPVQSVTIEAGVGTQMVRDLRSFGFPVQVVDVRKSSKFLAIRRQKTDANDAKGLAELGRLAQSFGPHVFIKSVEHQDIRIMINIRRTLLKHRAKTDALLQSIFRLHGASIKLLNGRGSLAAEVANRLRLLSTNGVTIRVDLDPLVKMGEDLRSHIWDMDRKMRTMAASIPVCARFQTIPGVGTITALSFYSAVGDPYRFRSNRDVGPYLGLTPNLYQSGATARRGRISRYGNKLTRSHLITAATVLLRTIKTESSLRTWGLRLATKIGFLKARVAVARKLAVIMMAMWKTGASFDPDKSKPRFLQPEEAGLDPVQISGTKIPL

SEQ ID NO: 298549 - protein, 347 aa, unidentified
MRFYTTQHPFYCGIDLHARMMYVCLLDQSGEILVHRNMKTDPDTFLKAIAPYRQGIVVAVECMFTWYWLADLCADEGIPFVLGHALYMKAIHGGKAKNDKIDSQKIAALLRGGMLPQAYVYPAKMRATRDVLRRRMHLAHTRAELLAHVQNTNSQYNLPAIGKKIAYKANREGVAERFADAAVQKSLAVDLALITSYDELLRDVELPIVKTAKHHDPNTLYLLQTVPGIGKILSLVLLYAIHDVNRFPRVQDFVSSCRLVKCARESAGKRYGTSGAKIGNAHLKWAFSEAAVLFLRDHPAAQKHLARLEKKHDKGKALTILAQKLARAVYDMLKRQGAFDQDKFFQR

SEQ ID NO: 298550 - protein, 321 aa, unidentified
MTKVNKIIGIDISKEKFDACFSFQPYGYSSRTYTYNEEGIKSFLTEVPSDCICIMEATGVYHLRLAYALTKAAIYVSVVNPLSVKNFSRAVMCRTKTDKADARQLVDYARRMELVEWKPTSENYIRIQQIYRTIELFVTNITQLENQLEAISNSPVQDRMLCRILKRSITIQKRRIERLEKQIEELIAEDDKTVVKRLCSIPGIGKKTAVAVLTATKGMHGFNNYRQVSSYFGLCPRIYDSGKSVHGKAHICKMGMGWIRRLLYMCSISAAKHNEACKDLYLRLTERGKPIKVVFIAIANKLIKQFFAIVKNNSLYHKTFA

SEQ ID NO: 298551 - protein, 389 aa, unidentified
MQTARMTTAHTIATVECGAIFVSLELSRSTWLVTTLAAPVGSKLSRHQVRGGDMPGLLERFSDLQRHVHRRTGRIVPVIVIQEAGLDGFWIHRALVAEGIESHVVDPASIAVSRRHRRAKTDRIDGEALVRTLMAWKRGEPRVCSMVCVPTPEEEDRRRLCRELKTLIGERIRHVNRLKGLFFAQGIGGYEPRNKDRRERLEALRTGDGRPLPKHLKTLALRELEVIELLNRQIEAVKAERDALLEEAPAAGSALEPVRMLLELKGIGPGFAGALWSEGLFRNFANRRQVAAYAGLAPTPWKSGTINHEQGVSKAGNPRLRAIAVEMAWLWLRHQPGSALACWYHERVRRFGPRTRKVTIVALARKLLVALWKYVTGGVVIEGARMKAA

SEQ ID NO: 298552 - protein, 344 aa, unidentified
MRIASIGIDLGKTTFHLVALGERNKILLRRKFSRSQLLTYTANLPASLIGLEACAGAHFLGTALREQGHQVRLIPAQFVKPYRKSNKNDFIDAEAIAEAVTKQNMRFVQIKTQEQLDWQAMHRVRDRLMQRRTALINEIRGFLLERGLTFAARPIQLRKNLPTVIEDAEQNLSPRLRWLLTRLWQEWKQTEIDIKTITDELERISNEDARCRRLRQIPGFGPLVSTATVAAIGNGAAFRRGRDFAAWLGVVPRQYSTGGKQKLFGMSKRGNVYLRRMLIHGARAVLFRVKYDSGGFGQWVHRLAQRAPRNKVVVAIANKLARIAWAVLSSGKDYRHQPLQLAAA

SEQ ID NO: 298553 - protein, 343 aa, unidentified
MQLKKVTTWNDFVACPAIGIDVSKKYLDLAGLCGTAGYSRRITNNSRAITGFIKTLVRHNFRGTILCEATSHYHILLAVMLCEAGLDIRVINPLMSSKHAKSSIRKTKTDRVDARVLAVMVLTEPDLPPPLKLSRSQCAVRHTLGLIHSQEKHLQGMNRALASYQERLGQLDLAAGKAYRQTVKATEKLEQCHEKLLAELELYLLKIQPEQQEVVERVTEVPGITRRNAALFTFVLDPTVRGAKSWMAYAGLDVAIKESGTWRGRGRITKRGPAWLRKRLIQAAWGAAMTYSQGRQYYDFLKAKGRKHKEALVIIARKLLSIIYSLVVDGKTFDHTKAFQIDA

SEQ ID NO: 298554 - protein, 375 aa, unidentified
MTKIRFIGLDVHAETIAVAVAEPGGEVRSLGTIPNRIESVRKMIGKLGAVKELRACYEAGPTGYVLYWQLTTLGVECQVVAPTLVPVKAGERVKTDRRDAEKLARCHRAGDLTAVWVPDEAHEALRDLVRAREAGKKDQLRARHRLSKFLLRHGRRQPDGMNAWTKKHLEWIKSHVHFDQPAQEAALQDYFHEVEHAAARIERLEKSLDDAISKAPEQIRGVIEALQALRGVAQLTAATIVSEIGSFSRFEPRKLMGYSGLVASEHSSGAKVKRGSLTKTGNAHLRRVIVEAAWTYQRRPWIGGFLLRRQRDLKLTEEVKEIAWKAQYRLHKRYSKLTASGKNKNQTVAAVGRELLGFIWDIAVRTEYQYQPQAA

SEQ ID NO: 298555 - protein, 325 aa, unidentified
MKSPKLAAGIDVSKDVLDVYFNDAQGCEHSCKVANDAKGHETLLRKLGTKRVYVLESSGPYYLRFAFYLKKHGGDIRVENPISIKRFIQMNLERNKNDQKDARWIYRYAQAREVRPWQLPRKEQLQCQVLINAIDLYGRQILMLSNQLHALDQLPLGCRHVHKSLVEMQAALEAEVAHLEKQLYTCLQKWQAAALQSLSSIPGLGKRAVALLLVYTDGFTKVKNHRQLIALAGLSPREHTSGTSIRGKKGICKMGSGRLRKVLYMCSMSAIKHNKTCKELYERLKAKGKNGKVALIAVCNKLLKQAFAVVTKRTLYQPNYCSSKP

SEQ ID NO: 298556 - protein, 412 aa, unidentified
MKKVLYIGLDVHKESIVVATALQGDTDVQLHGQIGGTLDALDKVIKKLEKPNVELRFVYEAGPCGYVIYRHLQKRKYHCEVIAPSLIPTKASDRVKTDRRDARQLARLFRAGELTAIYVPDEEDEAVRDLVRARDRTRVDQRKARQRLKGFLLRLGHRYQGKGNWSPEHLRYLAIIKLSHAAQQIAFQEYLEAITVATERLERLTKAMEAALPGWKREPMVRALMSLRGVAVINGMTLVAEAGDLTRFDSPSQLMSYFGLTPSEYSSGEKRQQGGITKAGNGACRKALVEAAHHYRIAPRVSPAMQKRQEGQTKEVRAIALKAQQRLHGRYKVLTGHHKKAVVVITALARELCGFVWAIACQVSAPEKLKRREQTTVKETKATKASTVIKTSRTAVAAQRKYQLDATKKFKK

SEQ ID NO: 298557 - protein, 347 aa, unidentified
MRFYTKKHRYYCGIDLHARSMYVCILDPQGEILLHKNMPCTPELFLKAIAPYREDIAVAVECIFTWYWLADLCSKENIPFVLGHALYMKAIHGGKAKNDKIDAHKIAVLLRGGMLPMAYVYPPEMRATRDLLRRRMHLMRKRSELLAHIQNTNSQYCLPQFGKKIAYKTNRQGVAEQFSDLSVRKSIEMDLSLIDHYDKLLTEVELYITQTAKVNDVNVFYRLRSVHGIGKILALVILYEIHDIERFPTVQDFVSYARLVKCAKESAGKRHGTSGKKIGNVHLKWAFSEASVLFLRGNPAGQKYVDKLTAKHGKAKALSILAHKLGRAVYYMLKREKAFDMNQFFSS

SEQ ID NO: 298558 - protein, 419 aa, unidentified
MSFKILKNNCCGLDVHKTWIYACIGITDSFKRTEYKQARFSSFTKGLQELCLWLAKYNCIDVCMESTGKYWIPVFNVLEKNNIFVTLSHPKYTKPQKGNKTDRKDAKWICDLYMCGMVKPSFIPPADIRQLRDLVRYRFKLTCMITGEKNRAHNCLTVSNLKLDDVFSDIFGKSSRSITEQILQHPGEVFDVAPFVDSRCKTPIEEIQAAVDGAISHEQAVKLRQCLKHIDELEMHKAEIEREIFRLSQKYESVLDLIRTIPGFDKNPLTAIQVLSEIGADMSVFPTAKNLVSWAGCCPRNDQSSRKIKSTRISRAGSYFKPVLVQIVNALIKSKKHPEFTTRYRRIKARRGHKKAIIAICRMILTAIWHILTDLKPYTPEGFLESRPVNKEKVLTISQALNLIKQRGYIIKDDVGPVT

SEQ ID NO: 298559 - protein, 482 aa, unidentified
MAKRKKSTFERLQSSSPNRQQRKKLQRQFDADSAELIVVHPNAAGVDVGNPSHFVSVPPERDQTPVREFGSWTADLRRMVEWLKACGITTVVMQSTGVYWIAIYDQLEQAGFEVYLVNARGTKNLPGRKSDVQECQWLRKLHTYGLLRKSFRPTEQIREVRTLWRLRGRVLEDSSRAVQHIQKALTTMNVQLANAISDVSGVTGMAIVRAIVQGQRDPHELAKLRDPHIQASEEEIAHSLEGNWQRDVLFELQQVVDAYDFHRQQLAIIDTELQKYMTALPTREPVGEVSADISKLSAKLRKKLKANRKSKDNRPAFDLGAELARLMGVDLRLIDGIDVMTIQTIYSEVGADLSNWPTEGSFASWLELAPRNNITGGKVIKKEKRPSNNRVTTALRNAAESLVRSDSYLGARYRHFTGRLVGLKGVKAMARYLACLVYRLLTKGPAWVDRGAAYYENKRRDRELVGLHRKAAAAGMKLVPIT

SEQ ID NO: 298560 - protein, 367 aa, unidentified
MKKTSTAASKQSGNISQQKLTIGLDLGDRNSWYCVLDETGRIQLEQRVRTTAKALQEVFGGMPRSRIALEIGTHSPWISRLLGELGHEVIVANARKVRLIGESRQKDDRLDAQTLARLARIDPQLLYPVKHRSAKAQADLMMIRARASLVRTRTGLVNAARGLAKSYGERLRGCNVRNLDPEKAENLSPELQQALEPLLAAIAEVSARIVEYNDRIEALAQTSYPQVELLKQIKGVGTLIALTFLLTLEDPHRFRKSRDVGGYLGLQPGRRNSGQSEPQLHISKQGDPYLRTLLVQGAQHILGPFGIDCDLRRWGLKLAERGGRNGKKRAIVATARKLAVLLHHLWVSGEVYEPLHNRNRITVAAAA

SEQ ID NO: 298561 - protein, 356 aa, unidentified
MITIGIDFHKKTSTCCVITQNGQTLKNCKIMNNKKNIREFIQSFNESKRIAMESTRSWGLFYETIKDLSDDFQLGHPLKMKAISSCETKNDKVDANMIARLAHNNFLPKVFIPNISIRDLRAVVRFRGILVNQRRSIRNQIHALIDNNVWPDDKPKSFKNIFCKRGREWLSTLALSENQRFILDKSLEAFDQISEQILSIEAFLRQQEVDIPGLKYLRSTPGFKFSKINAYCVLLEIADIKRFRKATGLMHYAGFIPREYSSGEKYRTGRLIKQANMRLRTAIIESTFAAIRTDPGLKAYYKSVKLRRGSGPAIIATARKLCKAIYYVLKEQRSYKLESFKPPVAACHSSMAKSCI

SEQ ID NO: 298562 - protein, 313 aa, unidentified
MEIIRVGLDLAKNVFEVCGVDMRDVVVLRKTLRRDAVPQFFAKLPPCLIGMEACSSSHYWAKVLTDLGHQVRLIAPQFVTPYVKSNKNDRNDAEAICEAISRPSMRFVPPKSSEQLEIQAVHRIRQRLVSSRTRLVNQIRGLLAEHGIVIGRDISRLRRALSEIVEGAENALGELLQELVSEIHQELTALDERISSYDRRIRNLFRTNEMCQRIGRIEGIGPITATALVAAVGDQSCFKNGRQFAAWLGLVPKQRSSGGKSRLFGISKRGDRYLRTLLIHGARAVLGKAGGKQDVRSVWINQMCERRHPNIAP

SEQ ID NO: 298563 - protein, 353 aa, unidentified
MTQPALTRVTVGIDTHLDVHVAHAKDALGRRVETVSIPTTPAGYRDLLAWARGLGEVEAFGIEGTGSYGAALARFLRSHGQVVLEVNRPDRSARRRRGKSDPVDAEAAARTVQAGAATAVPKAGDGSVEMTRSLRVARASAMKARTQASNAMKALLATAPQDLREQLRDLSVGQLVRAAARLRPGAVTTPTAAAQLALRTLAERHQALSAESTELSTELDRLTAKTAARLVALSGVGPDCAGALLVAAGDNPGRLRSEAAFSMLCGSSPVEASSGKTRRHRLDRGGDRQANAALYRIVVVRLRWHQPTKDYAARRTTEGKSKKEIIRCLKRYVAREVFAALRQMGQDNPTAAA

SEQ ID NO: 298564 - protein, 347 aa, unidentified
MLHAGLDLSRKKLDVCLLSDDGEHLDQLAVPPDVDSLRTLARRIEEVHGEPICAVIESMTGARIVHDTLEACGWSVEIADAQKVKGLAPLACKTDKIDSMVLAVLSHRDLVPAIWLPDPRVREERELARFRLHLVKHKSALKCRVHSTLINFGRACPVTDLFGAEGRRLLARLEVPEPWRGNVTAAVELIDDLEDQIADINRRLKEGHTDHPYIPLLLSVPGIGWVLAFTIAAEIGEIERFSSPEKLAGYTGLCPRVNQSGESDRRGPLTKHGPTYLRWALLEATMHALKHPAYSERYQRNKRRLGKQRGAKVAQIDIARRLAHAIWHMLSRGEKFAPRGAAFRLAA

SEQ ID NO: 298565 - protein, 347 aa, unidentified
MNFYNNSHPYYCGIDLHARTLYVCIIDQDGQTCVHKEISDSPDKLSQLLEPYLGNIVVGVECMHCWYWMSDFCDDIGVDFILGHALYMKAIHGGKAKNDRIDSFKIANLIRGGNFPLAYVYPKEMRATRDLLRRRTKIVRHGAHLKAHVSNTTSQYNLPNHKVNLKNVCAREHLRTAFPDRVVQRSIDLDMAVLDCYAKELSKIECFLEQQAKQHNPVHWHLLKSISGIGRILGLTIIYEIGHIDRFESVQKFASYARLVKCKAESAGKSYGTQGNKIGNAHLKWAFSEAAVLYLRGNEKAQKYLLKLQKRMSKAKALSVLAHKLGRCVYFMLKNNTVFDEKQFLRG

SEQ ID NO: 298566 - protein, 380 aa, unidentified
MVSVTDAARCRVLGPIGCAVGCSALSAVVHRIEEAVGPSAQVKVGVEAAGHYHRPVLDYAWPTGWEVLELNPAHVSEQRRIAGRRRVKTDAIDLEAITELVLAGRGRPVGAEQMVLGEIGAWAAHRTRRVAVRSATKNQLLGQLDRAFPGVTRALPDVLGTKIGRLIAAEFAEPTRLSALGVSRLIRFAAARDVQLRRPLAERLVAAAREALPTADAAVARRVLAADVALLADLDAQITATEAELAMLVPHSPFATLTTVPGWGVVRVGNYAAALGDPGRWPGPRQIYRAAGLSPMQYESAGKRRDGAISREGSVALRRALIDLGIGLWHTDPAAKAYAVALKARGKHGGIIACALAHRASRIAYALVRDHATYDRSRWS

SEQ ID NO: 298567 - protein, 405 aa, unidentified
MNEHLLVGIDVGCHSHQVAIAESNGTLLKEFGISHTASGFQSLFSEITHYESTLKCPVVIGMEGLNGYARPLDQLIQQKGYTLYNINNLKLARFKELFSGPAKTDAIDARKIVEFMRIAPSFQEQRRAITEMKPGNRVNQTLKRLTRRRRQLVNEKICIQNRMQADLQSVAPGLVDLVKNIDSRWYLHFLTCRPSLRQLATMRKESLLKIKGVGKKYAAVIASWQKEAHFSTDVDLVSSMIIADARRILELMEAIATIENELEPLCEQSDLARTIGSIPGFGPISSAELAGEIDDLSRFPSEKSLALYLGMAPLDNSSGKKEGCKIALSVNTRTKAAMMVAVAHHSWKVEESKRYYEKKRLEGKKHNQAIRSLGRHLVRVIWSLIKENRYYEIREEKERNILKMA

SEQ ID NO: 298568 - protein, 409 aa, unidentified
MQSDFQYFVGIDWGSQQHRVCLMDRDGTIIEERWIEHSGSSLAELADWLRRQTLESPQALAASIEVPRGAIVETLLEHGFAVFSINPKQLDRFRDRYSPAGAKDDKRDAFVLADSLRTDMHCFHAVRVDEPERIRLRELSRLEDEVGEELTRSINRLREQFHRFFPQLLELSESAGEPWLWTLFESAPSPARAARLTEAKIARILQQHRIRRFDARQVRAILKTKPLTLAPGAAEAASEHALLLLPRLRLLYQQRAHIARRVDALLQELASGGDGSSCEHRDEAILLSLPGLGRKVAATMLSEASQAIAERDYHALRCYSGAAPITRQSGKKKVVMMRYGCNQRLRNALYHWSRTSIVWDPGSKKTYAQLRARGKSHGSALRTMADRWLRVLFSMLRHNTVYNAQLKTA

SEQ ID NO: 298569 - protein, 404 aa, unidentified
MWYAGIDWADQHHDALVIDEKGHQVGSIRIDHHPQGLAKLNTFLQQFIGSRPKEQMACIIETTHGLLIASLLEAGWPVYPVNPRTVDRRRSASGAKTDTIDAYLLAKTGRADFADLHRLTPDSEKVAELKLLTRDQDALIQTQTRLVNQLTACLTAYYPVALELFAKLQQHTTLVFLQTYPTPQQASAASREQITQVLKQAGHPNPLGVAPKIVERLHQPHLLADAVMTRTKSRLMVALVSQLLPLIAQIAQYDKEIDTLFLTHEDHELFESLPRAGQRLAPRLLAEIGDERARYRDASSLQALGGTSPVLFQSGTYSKAHRRLACIKPLRNALHQFAWQTTQSEPWAQAYYQRKRAEGKSHTVAIRALANVWTRIIFAMWLHHRCYQAATFEQAQQQHARRAA

SEQ ID NO: 298570 - protein, 431 aa, unidentified
MLKINPLSTLYVGIDVSSKSNYVCALDFYKNKYINSSFANNQPGAEELALKILECLKEHPDITTIVAALESTSVYSIHIANYLSSCEELMRFKPYVFVLNPKCTANYKKSYIGLGKSDPIDAFVIADYARAGNIESEPWRGSQFLALKRLTRHRLHLVECMTREKTYLVSNLYLKFSELQMLEGDDQPFCDIYGATSSSVLMEYFSPEEILVSSEEDLIAFLAKKSRNRIKDISKTADLLKKAARDSYRLDKALYEPLNVSISSSFNCIETFKREIKVIDNAIEKEIKGLNPNAFIILQSIDGIGPVFAGGIIAEIGDITAFHSSDALAKYAGLTWKSNQSGDFDGEDTPMIKAGNRYLRYYLGEAANSMRKHNVEYGAYYRKKYNEVPKHQHKRALALTSRKFVRLVYGLLARNQLYSGVSLDTSIKDSN

SEQ ID NO: 298571 - protein, 350 aa, unidentified
MSSRKTGQIAVIGIDIGKNSFHIVGLDKRGAIILRQKWSRSQVEARFANMPPCMIGMEACVGAHHLSRKLNRLGHDARLMPAKYVRAYSKGQKNDFRDAEAIAEAVQRPTMKFVATKTSEQLDLQALHRVRERLVSQRTGIINQIRAFLLERGIAVRQGQHFLRAELPRILGAPSAHLSPRMAQTIEDLAGDWRRLDGRIDGLSGDIEALARRDAGCARLMSVPGIGPIISSAMVAAIGAGEVFTKGRDFAAWLGLVPKQISTGDRTILGKISKRGNRYLRVLFVQAAWVVLVKPKIWERHGLKPWIEAAKKRLHHNVLAIALANKLARIAWSVLARDRNFEARSIAVNA

SEQ ID NO: 298572 - protein, 328 aa, unidentified
MRDQYIGIDLHKAFFQACAVSPAGDRLWEGRFPRTPAGLEALTARCTTRSALAVEASTPTWHFADDLVGAVGDLRIVDPLKTKLKAGFAAKTDRLDAQRLADALRRDSVVGIYYPPLAIRELRELCRMRHALVQVRTALINRVRAVLLRQGIADARRLARASDDRWLASFTLPARATESVAALRAVLSSVRTEAARAEAHVREATDADPIAITLQQLRGVGPVLALTIRAEIGDIHRFPTGAHLASYAGLVPRVAMSAGRYRYGRITKRGSPWLRWALIEAAMHGTKRLDRIGRWGRALAVKKGALKARVALARVLCHEIHRSWATVA

SEQ ID NO: 298573 - protein, 353 aa, unidentified
MATITSAPPKLYIGMDIHKKNWAIHMRTDISDHKPMTIPPKADVLYEYVSKNFPAHEVNLAYEAGCCGFSASRYFLNVGWNVKVVNPSDIPTMDKQYYQKNDKFDCRNLSKQLEANQLRGIHIPDENEDQLKSLVRQRISLTRQLRASKTSIKALLLYQGIEIPEQYDKPTWTKEFIEWLENIEWKSSTGKTCLLSKLKIYKCVYQEYLTVANELRAYCRKHLKKDYYLLKSIPGVGGYLAAVILAELGDIRRFNKASEFASYVGLIPMMRNSGGAENVFGITPRSRGHLRSYLIESAWVALRIDPEMQAYYRTHIGKNPKSIIVKIARKLTNRILSVIKTEQPYVINHSINK

SEQ ID NO: 298574 - protein, 359 aa, unidentified
MTTIANTYAFIIGVDTHARTHTYAVIAPNGEQIGTESFPNSLAGRKRAIAWVNRRTQSEVRVLWVIEGVGSYGALLAGAVSNSGYRVVEAPRRYAPARRGAGKTDPIDAAAIAAAALPLIEQELRIPRQADGIRAALRVLTAAREQMTLERTSKINALTALLRIVDLGVDARKPLTETQIVQVSSWRERDEGIDRVFARAESTRMAKRVLVLNVDLKDNQEKITELIESSPAAPLLEVTGVGPVTAAVVYAAWSHLGRVRSEAAFAALAGVNPIPASSGNVERHRLNRGGDRRLNSALHMATIVRTIHDPDTRAYAERRKPEGKSSREVRRILKRYLARRLYRILNALHSLPDAPLSSC

SEQ ID NO: 298575 - protein, 424 aa, unidentified
MKPHPDVEFAAFAGIDWSDTKHDICLQAANSEERELAVVAHRPAAIDAWASTLRQRFGGRPVAVCLELAKGPLVYALQKYDFLVLFPVHPTTLAKYRQAFTPSHAKADPSDAQLALELLLRYRAKLKALTPQSVPMRMLLRLVEQRRRMVGEQNRINNRLTDALKQYFPDVLAWFPDKDTILFCDFLTRWPTLKQLQRARWATLQSFFHDHHVRSPSCIEERLRAIQSATSLTDDPAVIRPNQLLVLALVEQSRVTLRAIESFDAEIASISQTLPDYALFRALPGAGATLAPRLLAAFGEQRERYQSAAEVQRYAGIAPVTESSGKKHWVHWRLQCPTFLRQTFVEWAGATVPRSFWAAAYYRQQRDKGCSHQAAVRALAFKWIRILYRCWQTRTPYDESTYLNALKRRGSPLLASIATTAKNT

SEQ ID NO: 298576 - protein, 283 aa, unidentified
MTYVGIDVSKVTFVVAYSSVKTNKTRTFKNTVNGVHEFVQTISASEHNCVLEATGNYSALLVYLLSEAGITISLENPLKIKNFARVMLTVTKTDEIDARLIALYGEKMQPAPYKLRSDAILVLKQKRTVLRQLKKQLVATRNLKGSMEVLPFFDPKCKKTIEKTITFLEKQIKEMEEELASLAQGEYKKQMDLLTSIKGIGVTLAAALIVATGRFSYFDNAKQLTRYLGLSPTYQQSGTSVNVKGHINRNGDSSLRSQLYVAAFSSLRCNTCLLYTSPSPRDA

SEQ ID NO: 298577 - protein, 395 aa, unidentified
MSKFNEGTGVEKGEASAAVLSAALSESDGHAGYVGMDVHKDTIAVAVAWPGRGEAQYLGEIANTPKAVAKLVRRLSPHGEVFLFAYEAGPCGYVLHRQLCELGQECEVVAAPRSDAVKTDRRDALKLARKLRAGELRAVWVPDQEQESMRDLSRCRSDFKAQQLKARQQLSAFVLRHGHHWPRDKSRWTLAHWQWLEGLDFAHRWQHQVLHEYLEAVRAASERVRDIEARMLGEALPCWSLAPVVDSLVALRGVDKVAAVTLLAELGDISRFDSPRQLMGYLGLVPRVHDSGQRRGRRGAITRAGNTHARRILVESAWSYRFAARQTAHLMRKAAQASPEAKAIAWRAQKRLCGRYRKLLEAGKNVKLTCVAIARELIGFVWDIVRQEIGKVRCA

SEQ ID NO: 298578 - protein, 407 aa, unidentified
MDLLKTVFGIDVSSRKSNVCIMVNGQKVNDYAISNDMVGFNQLLGDLKQVTKPQIIFEATGVYSRRLQAFLDMHDLRYVMMNPLEAKRKTKDDLHQNKTDKLDALYLAKLQSEHPQRLAYVQSKEYQELMANNRIYEQASHDLITNKNRLHKAVQLTFPEIEHLLANPRGKNYWSIVLRFPHPDIVLETKEADIIDFLKGLSGIGKKRANDITQSLIRLAKVASPAVKKNSAHVRGLKMAINNILSAEEECQTALQEMAKLAPKRDLEILTSIPGIGKNTALRIISELGDIRRFNNPSQLNAFVGVDPQVYESGNLTAHLSISKRGTAIGRKVLYLAINQIQSAKKAGNPCHIADYYEKRKRSSETASHKKAAIASIHKLLRTMFALIKNDQLYSYDVAKHNQRLLS

SEQ ID NO: 298579 - protein, 397 aa, unidentified
MYIVGIDIAKRKHEAAVIDGEGTVIIKPFSFTNNCSGYNRLLAMLAKAKLPLDEVSFAMEATGHYWLALFTRLQKEGFRVQVINPVQTNSIRSFYIRQAKTDPRDALLIAEVIRFGHFSESTLHPENIYELRELCRGRHAIVSMQADVKRKVVALLDQVFPEYETAFANMFGDTSMAILQTCPTPKELSEMRLEELCHLIEVSSHKRFRMAKAQELQALARNSFGFAMAGDVFSTMIRLYAKHLDFLKQQVREMDRKIAEIMETLDTPITTITGIGPTLGAYILSEIGDISRFSSAAKLAAYAGIDPTMRQSGEYNGVRNRMSKRGSPYLRHAIWLAASSAVLHDPALKLYFQKKRDEGKPYMASVGHACRKMVSIIYAVMRDNKAYTPCIPNEISV

SEQ ID NO: 298580 - protein, 349 aa, unidentified
MKIIGCDFHPSYQQIVMWDKATGEMLEWALSHERKEEVRAFYAGLQGPVRVGIEVSGQSQWFEQLLAELGHEVWIGDAAKIRASCERKQKTDRRDAELLVKLLDEERFPRIWVPTPAERDARQLLLHRHKLVRMRTQLKNQLQALALNQGVQRKRKLWSEAGRKQLEALPLLPWASRRRAELLVLLDQLEASIGELDGAAAEQANTRPAVRRLMTHPGVGPITALAFVLTMGPAQRFRRGKQVARYLGLIPTEHSSGGRGQRLGHISKQGNPFLRGLLVEAAQSAVRHEPEMRRAYQRLAQRKCRALAKVAMARKLAVRLYWMLRTEVDYAQLIQGSHAGQLESFRGRV

SEQ ID NO: 298581 - protein, 338 aa, unidentified
MEYGAIDLHLRHSQIRIVREDGSVVLERRISTTRESLTAMFQARPRMRVIVETGTESEWVAQTVEACGHEVIVVDPNYTLMYGTRQRRVKTDRRDVAALAEANRHGIYRAAHRVSAAQRHQRRVLRVREQLIRVRTQAINLVRAQLRQEGYRLSSGSAGRVVARYRALAITGALAQALAPVIALLEHLAPAIGGANTDATAAAQQDPIVRRLTTAPGVGPIIGLTYRATVDDIARCRAAASASAYFGLVPCEDSSADRQRRGRITKRGPTTARSLLIQAAWGVWRQRTRDPLQRWARRLAERRGRRIAIVALARRLCRILYAMWRDGTAYQPAMTGVA

SEQ ID NO: 298582 - protein, 315 aa, unidentified
MQIITIGIDLAKQVFQVHGVGANDKVAFNKPLRRAQMLPFFAKLAPCLIGMEACASAHYWARELKKLGHDVRLMPAKDVKAYVKRNKNDAVDAAACCEAVRRPTVRTVPVKTPEQQAQLMQHRVRDLLVRQRTQTINALRSHLAELGIIAAQGYEGLKTLLSIITGGSDARLPENARASLSALVAQIASCQAEIGAIEKRLLAEHRKNEDSKRLETIPGIGVIGASAIVATVPDASIFKTGRDFAAWIGIVSREDSTGGKQRLGPISKQGDRYLRRLLVVGALAVEAGPTPSRQLSLADAATSAQAGKSCGGRTG

SEQ ID NO: 298583 - protein, 442 aa, unidentified
MRKREDEVFPNAAGIDIGASSHWVAVPRHLAEQAGCEPVREVGAMTEDLNTLAAWLVGLGVDTVAVESTGVYWIPVFEVLEQHGLKVWLVDARQLKYVPGRKSDVQDCQWLQKLMSLGLLRAAWRPSAEVCVLRAVARQRQTLLVEQASWVQRMQKALVQMNIQLTEVLSDVMGQTGQAVIRDIVAGERDPKRLARHRQRRVKASEAEIARALQGNWREEHLFVLKQALAMYDDIGRHLAECDARLDALLDARGTAKVDIGKLPRAGSKARTEHDIRQRLANWAGVDLTRINGLGVTVVMKLLSEIGPDVSRFASVKHFCSWLGLCPGTKISGGKVLSSGTKRSANRARQALKLAAQSLWRSESALGAFYRRLSSRMDKPKANTAAAHKLARMVYFMLTRGEAFVDQGQQRYEQQQRQRSIAALKRRAAALGFQIHPVEAAA

SEQ ID NO: 298584 - protein, 425 aa, unidentified
MNYKQNEKINQVKESTLVVGIDIGSTTQYARAFDWRGIELGKVFPFSNSREGFESFKAWMQHLQDKYKKLDAIVGIEPTGHYWFDLGAYLEDEGILLVMVNPYAVKQTKELDDNSQSKNDRKDPKVIAKLVTEGRYSAPYTPDGVYADLRIMVANRKRLIREMTQIKNRFARWFAIYFPEYTDVFGDYEAQSSMLLLKKVCTPEAIVELGAEKINQIWRDAKLRAVGMKRATTLCETAKRSIGLKKGSSAARYEMKLLLEDYEYKKAQLDAVMEEIEKLCRKIPESEQMLAIKGIGVITVAGFLAEVGDVRRFESPRQIQKLAGLSLRENSSGKHKGQTTISKRGRSKLRAVLFNAAIPLIAKNPEFKSLHEYYTTRANNPLKKKQSVIAISCKLIRVFYAILAKGVTYDAQKLISDIHRQPQGA

SEQ ID NO: 298585 - protein, 401 aa, unidentified
MAVLFVGVDWGERHHDLCLVDQDGGVLATRRITDGLAGVGALHALVAAHAQDPAQVVVGIETDRGLLVGVLLAAGYQVYAVNPQVVSRYRGRHGSSRAKSDRGDAKVLADLVRTDRHNHRQVAGDSSLVEAVKVLARAHQSLIWARQRHVNALRSALRDFYPGALAALGTHLAEPEALAVLELAPTPKQGRRLTRAAVRRALVQAGRRRNLQGRVVAVHDALAAPQLAAPEQLEAAYREVVGALVTVLGCLNVQVAALEEQLTLRFAVHRDAGIVQSLPGLGVVLGARVLAEFGDDPHRYATAKGRKAFAGTAPVTRASGLRTTVVARAACNQRLVDACYLWAFAALTASPGARRCYDAHRARGASHHQALRALGNRLVGILHGCLARRVTYQEQVAWPAA

SEQ ID NO: 298586 - protein, 355 aa, unidentified
MTRTVYCGVDFHARMQTVAYCDTTDGEIHLVQLEHRKDDIRGFYSQFTGEVIVGLEASGYSSWFEAMLDEIGHTVWMGHAAEIRRRANWRQKNDRRDAELILEIMLRGDFPQIQRHSRESVEILRMLRYRGRLIKIRTMISNNLKAIAISSGLTEKTRMLSRTSQGRLKAARLTEAHKHQSEDLMMLLGPLNETITKADRWLKQKTLIDERVKLVMTHPGVGPLTGLAIVHTLEPFNRFTRQRAVVAYVGLDPMERSSAEKRRYLGISKAGSRLLRFLLGEAAHVAVRTDPELKQFYERVAKRRGKSKATVAAARKLLIRCWLMLRNNIDYAQFRSRGVEARLAPHIGRPSVPVG

SEQ ID NO: 298587 - protein, 406 aa, unidentified
MKQIVSVGIDVSKGKSTVCAMIHPNTIIKESFEVLHTVEEMSMLADYIGSLDGEIRIVMESTGHYHLPVAQFLYQKGFFVCVENAYIIRQFSRIMLHGAKTDPLDAKKLAKYGLAYWSELKPYKFHPSCYTELSLLSKQYQTYIKLLIAAKQNVIHLMDEMLPGFKEALDTASSVQFSKVKYVDFAKEFYHVDMIKSMGKEIFRENYKQWCKEKGYRFQSEKADELFHLAEDGIPTLPTEFPSTRLCMEVATEQVSQLGYALEQILSQMQNLAKTLPEYQTIRQMGGMGEKLCVRFIADIGYVRRFHNGKALVAYAGIDAPPYQSGQYTGTKRRISKRGNSALRKTGYEVMKSLKSHPPKTDTRVYDFIIKKENEGKSKKQAKIAGLNKFLQIYYARVMEIYKNIV

SEQ ID NO: 298588 - protein, 345 aa, unidentified
MNYAGWDLHQQFSQVVVGTKDGKKRKSIKFHHFPGMFEHPHLREFLQPPIEVAVEASSGWYWVVDQLEKMGAKVHLVHPLKTKLIAESKVKTDKIDANVLFDLLRTGFLPESYIPSGEVREEREIHRHRAALVKIRTSAKNRIHSILAKLGVFFKISDIFGIKGRKNLEKVIPNLKPVYKEEITRFLVLIDWLDKEVEKIEKKIRSLAKDNPLIKLLMTIPGISYYSALLILSEIGDINRFAHPKKLISFSGLNPGVNKSGKHFYNLPITKQGNTWLRWILIQIAPLAARSDERLKQIFQRIAKRKGNNTAKVAVAREILKAVYWVLKKRAPYCPKSVTPQLAMV

SEQ ID NO: 298589 - protein, 400 aa, unidentified
MSERRARVWAGIDAGKGHHWAAAVDETGSTLWSKKIDNDETAILTAMGEILDLADKVSWAVDISGTSSALLLALLAAHGQQAVYVPGRTVNRMSGAYRGEAKTDARDAYIIAETSRQRRDFAAIDVPAQMAADLALLTAHRSDLVADRVRMINRLRDALTGVFPALERAFDYSSQKGALVLLTGYQRPAALRRRGQARLTAWLANRSVRGADTVAATALEAAQAQQTALPGEDIAAQIVADLAAQILALDNRLKRVDKQIRDTFRGHPQAEIIESLPGMGPILGAEFVVAAGDLSAYADAGHLASVAGLVPVPRDSGRRTGNLHRPKRYSRRLRRVFYMSAQTSIIREGPNRDFYLKKRGEGCKHVQAVIALARRRASVLWALLRDGRAFTSAPPATQAA

SEQ ID NO: 298590 - protein, 319 aa, unidentified
MSDRDRVASIDIHSKVLMVVVGSREGEAISPQCKLERQRFGTMASDRRRLLAWLQAQGVKEVVMESTGQYWKPIWWELEPYMRLHLAQAFSNRAPRGRKGDFRDAERLLRRLVAGELILSFVPDPEQRAWRTMTRTKVQLARERVRLYSQVDGLLQEMRIKLANVLSDLFGASGLRILHALAAGETDPKKLAALGDDRLKCTEGQLIDALTGNVQAMQQKLLELYLQRLQLIDEQIAKLDGMIAQALKAHQEVVARLAEVPGFGPDSAQQVVAEVGVQASAFPSAANLASWVGACPGKEETAEKNHSSRSAKGNKYMRR

SEQ ID NO: 298591 - protein, 323 aa, unidentified
MNTAPIVYVGVDVAKASLRFDAGDGYSKNVGNQPAAIKRELARLRKRVPAGSALQVCFEATGCYTRKLKHACVEASVAASTLNAYKVKQYARAMSVSAKTDPIDARMIRLYSEHRKPGPDAPMTEGQEEMKELAGLRALYQKQEGMLRGALESAGSACAVKSVKASLASVERQISRLEARLEELRDADAKRAAVCAELAKIAGVGDLTALLVTSLVPELGTLSRRRSASLAGLAPHPEDSGTIHAPRHIKGGRFHVRRTLYMAALSASQFNAVLKVVYERKIKEGKPFKVAIVCIMRKLFVHMDRVAAKVLKDLAATPPLATA

SEQ ID NO: 298592 - protein, 388 aa, unidentified
MTCLFCGIDVAKFEHVASIYDPSTGEFLLDSLHFTNNDEGFKSLLAHLNTYKNHEILIGFESTSHYHQTLFHFLTTHHFKCYLINPFITSKFRSFSLRDSKNDNIDSRAIAHFLSFDYQNLIDEKYQINELKELSKSRDSLMTESARMKIKLKSYLDRVFPELEGIVDINRKAIRAILKEYPTAEDIAGVRIDRLKNIASDASQGKFNPSKIERLKEAAKSSVGFYSCAIGLNIQICIETLEQKERQIDVIEKAICSHPTIKDSPLHQLPGINDIEIGYIMSAITSITQFSSPKKLVAYAGLDPKVRQSGTWSAKTTRMSKRGNKLLRYALIWGSYNMTRKGGPMKSYYDQKRSQGKSHYNALGHCAAKLCRYIFWILNHPKEEFKYQ

SEQ ID NO: 298593 - protein, 314 aa, unidentified
MDETKHFVGIDVSKAALDVHVLPVGKSQRFPNDGDGHAALEGWLSSHPVESVVLEATGGYERKAVQALQQQGYHVCVVNPARPRDFAKAGSRLAKTDRLDAAVLAHYAQVFDPPSAPRPGDVEAKLARYASARDSFVAEKTRLRNQLGLNDDADLERMHRDILETIEAKLAELDRMIQSCIREKAELSQRYDQLRAVPGIGPVAAVSLLAFLPELGQVSRRAIAALVGVAPFARDSGMMRGQRRIAGGRAKVRKMLFMASLSAARHNPIIKTFYERLIKGGTGKKQAIIACSRKLLTILNAMVRDNKEWQPMST

SEQ ID NO: 298594 - protein, 343 aa, unidentified
MACGLDTVTGQVVRGRLVPTADVVLDWIGRLAGPVAVAYEAGPTGFGLARQLTAAGVRCVIAAPSKLQRPAADRIKTDARDALHLARLLRMDEIVEVRVPSVAEEAARDLVRVREDVRGDLMRYRHRLSKLLLRHGIVYSGGHAWTGVHEIWLRGQHFAQRGIQLAFDADLEAMLLTLDRRNRLDKAIAEMAVDDQYAAVVRRLGCLRGVSTLTAFGLAVEVGDWHRFTGATIGAYLGLVPTESSSGQQRSQGSITKAGNTHARRLLVEAAWHHRRTYRPGAVMRARWNLASPAAKARGHAGNHRLHQRWQGFIARKKKPVIANVAIARELAGWCWSLAVLDD

SEQ ID NO: 298595 - protein, 343 aa, unidentified
MLAITVVGLDIAKSVFQVHGVDARGGAVVRRQLKRRYVLAFFKKLPPCLVGIEACATSHHWSRELQAHGHTVRLIPPAYVKPYVKRQKNDAADAEAICEAVQRPNMRFVPTKTSDQQSCLMLHRTRHLFIRQQTAIINTIRAHLAEFGIIAPVGRNGVEELLYAVADQRDERIPEVARGCLESLGALLGKLKAQILEFDRQINAWHRSNETSRRLDELPGVGPALATALVASVADPKAFRSGRDFSAWIGLVPKQSSSGGREKLGSITKQGDRYLRSLFCAGALAVIRYAKIHGTKHRPWLAKLLERRPTKVAAIALANKIARMAWAMMAKGERYREPLALAR

SEQ ID NO: 298596 - protein, 349 aa, unidentified
MNKVIKQVLGIDVAQKELVTCLGKLDEDLELTLYAHKTFANTAKGFELLVQWVKKQTEQGIAVRYVMEATGVYHESLAYFLKNKGMEVSIVLPNKISNYARSLTIKTVTDKTASEAIAQFGLERKLDSWEKPSPIFKKIKQLTREREQLIIERTMAKNQLHAEQAEAEPNKTSVSRMKKRIEFLSKQEKEIVVEITAFVKSDEKTGSVVELLRSLPGVGTLTAAIIVAETNGFELIRNKRQLTSYAGLDVKEKQSGTSVKGKPKISKKGNRFLRKALHLPALCAIRHDERFKAIFVRLVSKHGIKMKAVVAVQRKLLEMMYTLFKTNKKYDKDYFKNQEIEMEVEVEGQ

SEQ ID NO: 298597 - protein, 345 aa, unidentified
MPIVGGLDIHRKQITFDYLDTATGEVKRGQIAPADRKHVRAWLARFAGRGEVAFAVEGCTGWRYIAEELAAAGLEAYLAEPADTAAARGRKRHAKTDKTDARHLRVLLAEGRLPECWIPPEQILEYRALLETYHDLRAEHTAWLQRIHAVFFHQGAPRLGEGALRTEQDLAALRAAAGAHLSAAGQLQVATALDMLAAVEARLGPLRHQLRDAARHLVGAKVLAARLYGAGPVTALALTCWLGGAGRFSSSRKAVRFTGLDVTVHSSDRKGPPGRLSRQGPPVLRWAVYEAGKTHGRPTAPDHGYYAAVKDRKNGKRAALSEARKIVRQACHILAELGDDALTTT

SEQ ID NO: 298598 - protein, 410 aa, unidentified
MASDSAGLNYAGIDTHKDTHVVAVIDSIGRLIATAAFLTTMRGYHELYEWLVHHGRVSVVGIEGTGSYGAGIAALLAGHGLDIVEVNRPDRQLRRRHGKTDTIDAEAAARSALNGHARGAAKSHDGIVESIRLHRVTLTTLRKSRTALINTLRSMLVTAPPKIRDELESLTPVALFARCARLRIDAVPSADPEHAVKQAMRTLARQIRALDSELGQLRAGLTKLAESANPELMSAHGVGVDSASALLVTAGDNPERMRSESAFASLCGASPIEASSGKTIRHRLNRGGDRQANSALWRIAMIRLNTDPKTQAYAHRRRTEGKTDREILRCLKRHIAREIYRLLTQPRPIIGIHDLRPVRLQLGLPMQAAADHLGVSLTTISRTERGIRPNHEFAAVYRSWLNALTLADAA

SEQ ID NO: 298599 - protein, 341 aa, unidentified
MDKELYFGVDVSKKTLDLAYYDGETIDWKNAHIKVSNDDAGFKKIGSWVAKVGKDFDTFLFCMEYTGLYNQNFRLWLESKEYIYGMVEPRKMHHFEPDLDDDQRSLDRIKTDELDAFRIAIYCEQNHKKILRNPSKLPSPVYFKLKRLLAERKQNTKQSTLYKQQLHDICAYDTDLSIERKKLLLKNMKENLKAIDKEIDSYMQEDANISKNYNLLTSIPGIGRIIALETIVLTENFTAISNPRKYACYIGIAPFKKESGTSVRKKTGVSKKGFSEAKADLSIAVLSAIRNNPSIRDYWIRKRKEKCGGIVLNAVKFKLVLRMFAVIKRGTPYVETDAYKN

SEQ ID NO: 298600 - protein, 339 aa, unidentified
MIVVSLGKLLEDLSTEIREYQIFSNNEKGFEQLLQWVYDKKSEQTNVVFVMESTGVYHERFAYFLHSKEEKVVIVLANKISNFMRTLEIKTVTDKTCSIAITQFGLGRKLKEWQPSNIVYKELQQLSREKNQVISERVVCMNQLHAEKIQALPNLKTIKRLDERILLLQNQEREINADMLEKVEESKEASEGVDLMSSIPGIGKATAIAVLAETNGFELIRNKKQLTSYAGLDIREKQSGTSIKGKARISKKGNKNLRKSLHFPSITATRVSNQYQELFHRIVSKTGIKMKGLVAVQRKILELMYTLFKNKTPYQANYQQNRVANQKDSYPMLADSGSL

SEQ ID NO: 298601 - protein, 444 aa, unidentified
MLFAGLDVHKNEIQAAILDDQGTITLRHRFPATNQAIQAFARKHLAQAKVALEATTNTWAIVRILTPLCLQVIVSNPLRTSAIAQAKIKTDKVDSLVLAQLLRSDFLPTVWQPDETTLQQRELASHRAALSHDRTRIKNRIHSILHMRLLHPPMDDIFGPSGREWLVSLDLDPYASQALTRDLTQLDLLHLQIEDIDTGLAKLAYGNEQILLLITLPGVDIIVAQALLAALGDISRFRDADCVASYLGLAPSTYQSGDHCYHGHITKQGSAHTRWLLIEAAQHIDSHPGPLGVYFRRIAKKKNRNVAVVACARKLAVIAYHMLKNNEPYRYAQPKTVAAKLSRLRVRATGEKRKGGYAKGSSRPSNYGSGVRTKTTASLDAIYASEGLPPLPDLAPGEVAMLDRTDLRDYKAAIHQPTRRRRNVKASESASTDSPQTTTSGTQA

SEQ ID NO: 298602 - protein, 401 aa, unidentified
MTAVRSRAWIGVDIGKTHHWVCAVDETGKKLLSLKVLNDEAQIIEVITSITDLADGRVWAIDILGTPSALLVALLANAGEQVRYASGRVVAAMSTAYTGEGKTDAKDAYVIAETARIRTDLAVIDADTDLVRALDVLTGHRADLVADRVRMINRLRDLLTSVFPALEREFDFASCKGALVVLSGYATPESIRRMGEARLSRWLRQRRVRGYADVAARAVAAAQTQQTVLAGQDVAASIVAELAEAVLAQHARLKLLDQQIQDAFAQHPQAEVIESMPGFGPVLGASLLVAAGDLAAFPTAGHLAAAAGLVPVPNDSGRRTGNVHKPRRYSRPLRHALYLSAQTSMMRAGPNRDYYLKKRDQGRSHSQAVIALARRRIDVLWALLRDNRTWTTAPPTRAQAA

SEQ ID NO: 298603 - protein, 430 aa, unidentified
MRAARHMNTDWNRHTHFAALDWATDHHDVVVVDRLGVIAAQFRFAHSASGWEEFTEKMTAFAGTPIALETSSGPAVDQLLQRGWSVYPVNPKAAERYRERKAPSGDKADGPDAWSLADALRTDGHAWRKLIPQDEATAILRALCRDEIALIEQRTLLVNQLIAALREYYPAALEVFDDWTQPYAWALISQFPTPVALQEAGKRRWEKFLHTHKLWRATTAPQRMKLFAAANALASSAAVVAAKSLLATSLVKVLQALERQLEEYRKRINQTFRQHPDHEIFGSLPGAGEKLAPRLLGELGSAREVYPDADALCCQAGASPVRYQSGQINKARIRWACDTVLRHTVHLWADCSRKKSPWARAYYARKRKDGMSHAAALRCLGKRWLKVLWRMWQNRCSYDSTIHEQSLKDHGSWVVAAMLAPCTVPIPSCE

SEQ ID NO: 298604 - protein, 372 aa, unidentified
MTMMQHHRYIGLDVHRATIAVAVADPDQTAVSYGTIPNTPEAIHKVINKLGGPDRILHVAYEAGPTGYVVYRQLTSMGVECHVVAPSLIPTRAGDRVKTDRRDALKLARLLRSHELTAVWVPDQEHEALRNLVRARAAAKADQLRAKHRLGKFLLCLGARPPVGVHNWSKRHFAWLRTLEFSHAADQVVFDDYLAEVIAAGERVKRLETALRQCAKTTRQVAVIQALQALRGIGFISAVTIVAEAGDLRRFPTAPLFMGYTGAVPSEASSGPKQHRGHITRTGNHALRHILGEAAHHARHAPCLSDDLKRRQQHVPRAVVDLAWRAQLRLHARYRHLSMRIGPRKAIVAVARELAGFVWAVGQALHPETVTA

SEQ ID NO: 298605 - protein, 458 aa, unidentified
MYRELQPLRQALSAELEGTLSLAGPGIEPQHLLQSYLDRLTMSVGCDVADQTFALFAVDAAGEELGHRLDVANNPRGFERAWEWLEQLRCQHHLRITLLAMETSGIYYWAWWDFLAGRPNLARVLYNPRTTEHMTEVLSKRVRNELVDAYALAEQVRLGSTPEVLLTDDADLLSARICSRAARDLAQHINDRKNQLRALLRAYNPALCQVFPKAQLHHRAVYALLQHYLLPDEFVAAGPQPIAAILHDHCRTAFGLSDAQQLVELCRQTLTRPIGRDVLHQRVCQLTQDIRNTQQHKQLYLKTGYRLIETRPETPLLRTVYGAGISNTLALVSEVGDVHRFPDGEHLASFLGLTTSKHISGTTLFQSKHITKQGSPNGRYAAVNLAFHLSLRVPKYQQMYQRIKSRKPPRQGHFIAVVAVARDFVSNVLFDMWRFQRPFFMEVDDYRAYRRAHPRSFS

SEQ ID NO: 298606 - protein, 397 aa, unidentified
MIAVGIDVSKSKSTVAILNGDGSIRAKPFDVHHVADELQALVDYIKRTSEPPTILMEPTSHYHYPLLKAFTEAELPVCMINPYQMKKYGDTELRKAKTDKRDSLRIAQYALEKSYSLIPYTPQDQKYEDLRFLSRQYSQRISTLTVAKVQLLSLLDETMPGITTILPLKSRDPDNCVLLRFIKRFKSFDVIRKMGKTRFLDSYQVLVKKTKDRFAGSKGLAIYELVLNSVTTRGENPLSAMTQDQCVDLVSTSQKAADEINLQMRIIAETMPEYKVLRSMAGVGDRLGPIILGEIGDIRRFHSGKALNAYAGNDAPPYQSGQFESRNRHISKRGNPALRKACFEVMQALKLTKPQDDPVYLFLLKKEQEGKPYNVAKMAAVNKFLRIYYARAMELYK

SEQ ID NO: 298607 - protein, 423 aa, unidentified
MKFKSQTRQNQLIEKITPQHLVVGIDIAQQTHFARAVNFRGIMVGNPLSFSNDEEGFNSLLRWIQSLQTTHTLTAAIVGMEPTGHYWLNLSKWLSYRQFEVVLVNPHLVKKNKENRDNTPSKSDKKDALVIADMVKNGYYSFTRNTPEAFEELRVFLSNRDSVVTRLVSAKNQIHRWVDVVFPELRQVFKNIMCIGSLATLRLFPTPEELCKLQAQDILRGWKSLMKRHSGDRKARALISLASRSVGSKQATHAYKLHLKQLLDEYDLACLQLQTVEKEIIAVLERIPFAGSMLAVKGISEISLAGILGEAGDLSGFVHGNALLRHAGLNLAEASSGKWTGQMKISKRGRSRLRRFIFMMTMSLVANNPEFKAMHAYNVQVKKMKKMRSIMKLCGKLARILVGMSRSGEAYNPPKTLPIQLAV

SEQ ID NO: 298608 - protein, 347 aa, unidentified
MRFYTKQHKFYCGIDLHANKMYLCILDETGEIKLHRNLITDREVFLKAIHPFREDIVVAVECMFTWYWIADLCVEEGIPFVLGHALYMKAIHGGKAKNDKIDSRKIAVLLKGGMIPQSYVYPAKMRATRDLLRRRNHLMRKRSELYAHIQNTRSQYNLDEPLGRIAKPQNREGVAERFEDPSVQKMIATDFAVIEAYDPIIAEIEQDIIQSARHHDPVSHALLHTIPGVGRILSLVILYEIENIKRFPSVQDFASYCRLVKCAKESNGKKYGSGGKKIGNAHLKWAFSEAAALFLRGNEQGKRYLDRVTATHGKGKALSILAHKMGRAVYFMLKNKKPFDQDKFLGL

SEQ ID NO: 298609 - protein, 315 aa, unidentified
MDEQPTVFVGIDVSKDRLDVHLRPSDEAFHVARDQKGLETLARRLDSLPVALVVLEATGGFEASVAAALAALGLPLCIVNPRQIRDFARAMGRLAKTDTLDAEVIALFAERIRPPARPLPEPERCHFAELVSRRRQIIGMINMEANRRDQAVDKQLIRRLNRHISFLERELAELDSEIGQAIEASPVWCETEALLKSVPGIGDVTARTLLAQLPELGTIGRHQLAALVGIAPINRDSGLMRGRRSIAGGRTSVRGVLYMAALTAIRRGSPFRPFYERLTQRGRPRKVALVAVMRKLLVTLNAIVRDRTPWRPLTA

SEQ ID NO: 298610 - protein, 408 aa, unidentified
MNTLYVGIDVSSKSNVVYFMLPDGSKHCNFSVANSHTGSSQLVKRILSALTSHSLDTVLIGLEATSVYGDNLVYFLREDATLAPFNRKIHVLNPKQVKKFHDAYNDLPKNDYVDSFVIADCLRFGRINKEVYMGDYRYKALQNLTRARFFAVQNLVKEKQRFMNVLFKKYSTMTQEKVFSDTFSTTALAVYDEFESAEALANMDLHELTDFIIEKGKNRFPDPDAVAKAIQKAARSSYRLPKTVNDSVNQVLSISITSMKALESQIKEFDKAIKAQMELLPNVLISIPGIGPVYSAGIMAEIGDINRFNSQAALAKYAGLAWKQHQSGGFESEVTRLIPSGNRFLKYYLCEAAFSLVRCDKEYSDFYRLKYKEVNRCQHKRALALTARKFVRLVFRLLKDNRLYCPAK

SEQ ID NO: 298611 - protein, 400 aa, unidentified
MGQPLWAGVDAGKSDHYCVVIDADGKRLLSRRVANDEAALLELINAITALADGSELTWAIDLNAGGAALLIALLIGAEQRLLYIPGRAVHHASGGYRGEGKTDAKDAAVIADQARMRRDLQPLRPEDDIAVELRILTSRRTDLVTDRTRAINRLRAQLLEYFPALERAFDYSASKAALILLSGYQTPDGLRHAGAARLAAWLRKRKARNADAVAAAAIEAAKSQHTVVPGQQLAAAMVARLAEEVMTLDTEIGDTDAMIEERFRRHRHAEIILSMPGFGVILGAEFLAATGGDIAAFGNTDRLAAVAGLAPVPRDSGRISGNLKRPRRYNRRLLRACYLASHIAIRTDTASRIYYDRKRVEGKRHTQAVLALARRRLNVMWAMLRDHKPYQPTAPNAAAA

SEQ ID NO: 298612 - protein, 318 aa, unidentified
MVTGIDCSKDYFDVVLLDGNSKVFEGRFANNLKGFQEVLPHIQHSHVVMEHTGPYYFSLACFLCESHVRVSIVNPLIIRRFSQTKMIRAKTDRKDALTIAEYGMMYQPPLWSVPSEKIQEIRQLETFLRGVIKRKQVLMNQFHAFEHGGNFIGYIREKMEGQLQGYELDIQQIEAKIQALIQEAFPDLYRNLTSIPGIGPKSSVLMIVTTNGFQDFESHKQVFSYFGLAPRIYESGTSVRGKASICKMGMSSLRAVLYMAARSARLYNKTCKELYERLRSAGKAHRVAMIAVVNKLIKQAFAIAKSGEVYRLEKRLAE

SEQ ID NO: 298613 - protein, 410 aa, unidentified
MDAFCGIDWAEDHHDVALVDHGGAVLARLRISDDAAGLTRLLGLLAEHGDSAENPVPVAIETPRGLLVACLRAGRPVYPVNPMAVARYRDRHSVAGRKSDKGDAAVLANVLRTDIHAHRPLPADSELARAIAVLARAQQDAVWDRVTAHNKLRSHLREYYPGFLAAFAAAKGGIMRPEARAILAAAPTPATAARLTLAQLRALLRKAGRSRGIDAEAARPREAFRQEQMRQPPLVEEAMGRQSRALLRQLDAACQNASDLEAAAIGSFSQHPDAGIITSFPGIGALTGARVLAEIGDDRSRFADGKGLKAYAGAAPITRASGKSRSVTRRHVKNNRLAAAGYIWAFSALTASPGARAHYDRRRDAGDRHAAAERNLFGRLPGCLHHCLATSQDYDEATAFPSHPAIPAAA

SEQ ID NO: 298614 - protein, 328 aa, unidentified
MACATRPQTIESHIIMTNFAPVSETVLGLDVAQDTITFHDLITRQTLTIANTHEALREALSPFAGTCRLAVCEATGGHEAVLLGVLWELSIPAHRADGARINAFARSIHIAKTDRLDARILALYAHERGANLARWTPLPQHQQQLTTLVRRRTEMVEMRKAERTRAKGPTAQEPSMAASLKRSLRFFDAEIQALEKAIAALIACTRQISQRYRVLQELPGVGPTVAATLLALMPEIGSLSRRQAAALAGVAPHPNQTGTTRNRARMQGGRRQLRPVLFIAALTAIRGDNSFAEFYRRLIKAGKPKRLAIVAVTRKIVVVANARLAACN

SEQ ID NO: 298615 - protein, 368 aa, unidentified
MTSLKHSGNVWLGLDVHKDSIAAGVLGTQESSPRIELIGPGPDAVRRLIKKVSGSPERVRACYEAGPTGYELHRLLTGLGVRCEVIAPSLIPKAAGERVKTDRRDAGRLARLLRAGELTAIRVPTPTEEAVRDLCRARADVVEDQRRARQRLGKFLLRHGVVYPGGRAWTVSYYQWLDQVRFAERALIETFRHYRAILAERDAALTAIDADLRPWCARDPFAAQVRRLACYRGVAELAGLTFATEVCDWRRFPSAPSFMAFTGLIPSEYSSGGSQHRGHITHAGNEHLRTQLVESAWTYRYCAQIGRGLARRQAGNPPQTLARSWAAQRRLCARYRRLAARKHVRTVVVTAIARELAGFLWAEMIAAD

SEQ ID NO: 298616 - protein, 359 aa, unidentified
MQEKINEKTFDGQSIYVGIDVHKKDWKVTIMTAELSYKTFSSVPNAEKLGVYLKSNFPGATYHSAYEAGFSGFWLHKELTALGINSIVVNPADIPTTDKERKQKEDLRDSRKIAHSLRSGQLQGIYVPNEATQNDRMLLRVRHAMVKDLNRSKNRIKSMLFFLGVILPDRFFAPGRSWSKPFIKWLEELSLDYPTAKSSLDAHLGQVRHLRSSVLKLTRQINELARSNYYKENAVLLISIPGVGTLTAMMLLTELGDIERFKTFDDLCSFVGLVPSTSSSGENDIINGITPRRNARLRSALIESAWVAIRNDPALLLSYQGLIKRMPGNRAIVRIAKKVLRRMIYVLRNKKSYEKGVIK

SEQ ID NO: 298617 - protein, 358 aa, unidentified
MHTQIKDLDFTGQNIYAGIDTHKKSWEVSIYTDVIYHKTFNQPPKPEILFHYLTKHFPNGTFYSVYEAGFCGFWIHERLQSLGINNIVVNPADVPTTDKEKKQKTDRVDSNKLARQLRNKDLEAIYIHKRDILEDRSLIRMRHTLVKDLTRYKNRIKSKLYFFGIEFPAQFTSDRFSWSNRFMDWLSQLELNRESGTESLRILVEQAKFLRSELLEVNRKVRKLSQHEYYRERINLLMSIRGIGLTTAMIILTEIEDIHRFDNQEKLASYVGLTPTSHSSGDKDIHGEMVNRGNKFLKSAIIESAWIAARVDPVLHMDFINYSKRMKKNKAIVRIARKLLNRISFVLKNKVPYNDGII

SEQ ID NO: 298618 - protein, 399 aa, unidentified
MVSVGIDVSKGKSTVCLMRPFGEIVAGPMEISHVDSELKTLVKLMKSMSDEVKVVMEATGIYHLPVLTYLKENGIFTVVINPYQMKQYRVQGLRRVKTDKADSMTIAKYGLDNWDKLKDFVSSEDKYRELTLLSRQYRHYMRIHVASLLELTHILDYTMPGIKKEFNSWDPEKGKDKLSDFVEKYWHYDNIRRKSERQFVESYLAWAKKKGYHRNQNKAAKIYSMAKEGIPTLPADQTTKMLVIQAIEVLRRVDETLNTILARMQEIAKTLPEYPVVRSMGGVGDVLAPKLIADIGDVRRFHNSKALIAYAGIDAPPYQSGQFTGTNRNISKRGSSAIRKTGYEVMRSLKSHPMPEDGAVYQFILKKEAEGKPKKVAKMAGLNKFLRIYYARVMEVYSC

SEQ ID NO: 298619 - protein, 370 aa, unidentified
MSVRRILAKTINTDLEYEAIGIDLAKNCVSVALLTTDGEVVCIDRLDYSELEKSAQVLCPTTFAMEPCTEMNYLVQKLEAWGHRCLVIGGKNVQNYVENHYSGQKTDLNDAQALAFLAQDTQLRPIKAKDMEQQKYASLTTLREQYIKQYRQTIVSLKGICQSWGLNISKGISGKARLKDLIENHAAFPEELKESLVDMVTHAQTTQKALNKITKTLEELAKNDKLCQLIQTIPGLGPVCSCRLRATIGDIQRFKNPKDFPAYYGLVPRSIATGHNEKKGRITHRGDKTMRSLMVQGAGSVVNMATKGKLKSKQLTKWILKKQKEKMPWGKLVCAVAAKLLRIVRAVLISSKPYNPKIAGVAKCSLPKGS

SEQ ID NO: 298620 - protein, 299 aa, unidentified
MLDIFESDTGRHARIANSDDAIAAACRPWSERGATVVFEATGCYDTRLRTALDRAGIPHVRVNPERARHFARYAGFSAKTDRIDARMLAEMGRRGGLVPEPPIDPSREALRALHRRRDQLVADRKAERQRSADAIDDTERGSIDRHIAFLDTEVETLERAITRQLADDPNLRRLEIRLRSIPNIGPVAATTLIALMPELGTRSPKAIACLAGLAPINRDSGTHLGARSIAGGRKRVRDALYMAAVSASRSDKAFGAFYKKLRQAGKPPKLALIAVARKILTTANAIIRDDTPYRNTSTA

SEQ ID NO: 298621 - protein, 419 aa, unidentified
MYYGLDAHKAFIQVCELSEDGRRRKDYPIQATSEALEAFGRRLGRNDHVVLEATFHTWAIHSILRQHAGSVTVANPLQVRAIAHAKIKTDKIDAHTLAQLLRAGFLPAVEMPSEETWARRQLISHRRLLVKQRTAAKNAIRAVLNRRLIEHPYGPTLFTEKNRTWMMSLELPAMERFILDNALELLRQLEERVEVVDQKLLRLASVDEDVKLLMTIPGIQVTVAIGFLAAIGDIRRFPSPDRLPSYFGLVPKVRQSADHCRHGHITKAGSASARWLAIEAAQILSKGGSPLIASYHRLRRKKGHNVAVTALARKLVVVVSHVLTFRQPYRHSPVKGTRAKLRRLALGAPRTPKGKVPESLEAVYAEAGLPALSPPSAGERRAARSNRIALSRMRASRDLLTRSEKRKQEEELRKRLTNS

SEQ ID NO: 298622 - protein, 314 aa, unidentified
MTLVGCDLHARDQQVAVLDTATGEIQERRLVHDGDSVEQFYTALPGPVTVGIESTGYALWFHALLRRLGHEVIVGDAAKIRAMVVRKTKTDRRDAAHLLDLLRHDRFPTVWLPEPAVRDQRPLLAHRMRLVRMRTMVKNGVHAIALNYRLALGPSLFTRAGVAQLQALSLPPHTACRRSESLELLSWLNTRIKGLDDQIGEAAHAHPEAQRLMTHPGVGPLSALATVLVLGAVTRFPTSKHVVSYVGLAPAIESSAGKHRLGRITKQGNALLRYVLGQAGQAAIKRDPDLNRLYYAVLHRRGRSRAKIAVARKL

SEQ ID NO: 298623 - protein, 359 aa, unidentified
MSTITIGVDLAKVLFSVCEVDDIGHVLKRQDLRREPFALWLAQLPAGTVVAMEACSGAHHWARRCLEYGLQPRIIAAQFVTPFRKSSRSKNDRNDAEAIATAVRQGNMRLVPVKDVDQQVRLSWHRVREGYKVESLAIGNRIRGLLAEFGVIVAQSDLALRQSLSDLDAQSELPSEFKELIRDLADHWKQLRTHFDACDARIEAHARQDERCVRLRAIIGVGPISADAAVATVGNAREFKQGRQMAAWLGLVPTQHSSGGHARLGEISCRGDAYLRTLLIQGARSSLQRAKAVAREKATPEQLWIRTLDGRLPFGKVIVAIANKHARQIWAMLARDVDYDPHARLNHPMHRQTQAVHAA

SEQ ID NO: 298624 - protein, 482 aa, unidentified
MKKRTIFPYQSQELNTLFEEAGNNAKVMCIPIDYAKKEHVVMFCNSHGNILRKPFPIKNSPKGIEYLTQQVLSSCHHRGIDPKYAFFGGEDVGSYAENFINTLRSGGWIVAGVNAHDAKKQRANVQASTDVLDLMGIASMLLNRRANCSPAQTGIYRNLRGLTRHRKKLVDMSTEEKNRIYTVVDQIFPGFLDEKNTGISPFSNSSLYLMADRFSPAQIRRRKRQKLIDTLRRYGTVKTEVSADKLQLYAAHVLNTPTEYLSALQTSLAQHIKHFKCLQESIEQLEKEVALWLAQTQGAFLTTLRGIGIVLAAGATAEIGDLTKQKPVANLVSYSGIIPRVKQTGGPEGQTRTGKVSKRCNRILKNYVVQSAHHIGLHGPEDLMADYKRRDANGQHADFGIGRRYIRTAMCLMRNSQIYIPKRLRSKGINPEERAGYFLMIWPSLRDKWAKLGALETAFTNDNPLCRWRNMVQELYEIKLKL

SEQ ID NO: 298625 - protein, 420 aa, unidentified
MAGVVDIVYPVCCGMDVHKDFLVACIATTDERGHTTHQIKRFSTYTGDLRRLADWLLANHCCDVCMESSGKYWIPVFNTLELTCNVCLTHPKYVKAIKGKKTDKKDAKWISELFKCDLVRSSFIPPPDIRQLRDLCRYYVKLTNICSSEKNRAQNCLTMCNFKLDDVFSDVFGKSATRILDALLESGNSDFDVAPLIDGKCKATADEIRAALDGTLDPSQAEKLKLIRKHMDNLNNLKNALEKLILKLASKYQTQIDLLMTVPGIGEPLTAIRILAEIGANMSVFETSKLLCSWAGLTPQNKESAGKKKTTRISRAGGWLKPLLVQIALAAVKSDKNPELKNKFQALKKRRGGKKAVIAIARKLLTAIWNMFTKNEPYNADLYRNSDFSPVNRVLSIEQAFILLRKQGFSVRDWALTVTT

SEQ ID NO: 298626 - protein, 393 aa, unidentified
MVCVGIDVAKDKHDCFIISSEGEILADVFTIPNNAEGFDTLLQAIRRSTRPEDKIKVGLEATGHYSYNILGFLLDKGLPTYVINPLHTNLYRKSLSLRKTKTDRVDARTIAAMLMSDVDLKSYTDTVYHNEELKSLTRYRFDKVRERAKLKQSVSRLVTILFPELEKLVSSLHSASVYALLSEFPGAKQISSTHMTHLKAVLKNASQGRYGQEMAETIRNAARSSVGSVMPAKSLELQHTIRLIRELDAEIEDIETAIQAIVDEMQSPITTIPGMGVRMGAVILAEIGDFSRFDSPDKILAYAGMSPSTYQSGQLSLSGAYSHMEKRGSRYLRYALYNATKHVCHWDPTFAAYLAKKRAEGKHHNVALSHAAKKLVRLIYAMEKSRQPYSSAA

SEQ ID NO: 298627 - protein, 350 aa, unidentified
MSYLGVDLHTNSFTVCRRTKQGKNSIRTFQVARIADFRKTLRRRDLLAVEATGNTAWFVSQIRDRVKKVTVVNPYQFEVIRKSVKKTDKHDAKTLALFLSKDMLPEARMKTKENAQLHSLATTQDKLVKQRTALINKIHNVLNSYGIKFKKESLGTEKGLKSVWAYDWDVIVRIELEALVEQIRSLNKSIKTLNKEMTDHGKKLKGHKGLTSIKGIAGRSATVLLSVIGDVNDFADENKLSAYFGIVPRVSDSNETVRHGRITKHGSKLGRTTLVQCTLVAKRYSPYLGRYYERIKSHRGSGKAIIATARKFLGIIYNTLKNDWVFEDFPNFVLASSCVKNSKDWSRLLT

SEQ ID NO: 298628 - protein, 352 aa, unidentified
MEYILGCDAHKHYSQFAVIDTERLLYLQTWINHEIGAIHEFLSRFPKDTPLALESVGNGYWIVDEIKSSHCKPQMAHALKAKLMMGNVNKTDQLDARGLATLLLNGALPTVWIAPAEVRDERQLHRTRMSFCKQRTALKNRVHATLAKYNRILPRNSDIFTPKWQAALHKLVTTLPLETARCLRQELELLNYLQAHIEKLEKRIHERLEMTESMQLLQTIPGIGEILAWVIEREVGDIQRFPSALHFSSYAGTVSTTSSSGGKTWQGRMRKQAHQYLKWAFIEAANVIVLKHNHPAWRSKHVVKLYERIRRRRGHGVVVGAVARHLSEAAYWILRSKEVYREPDLVLVSQTG

SEQ ID NO: 298629 - protein, 420 aa, unidentified
MKAYNVDDFAVLIGIDWADKKHDVCEHVLDSQKYHYSIIKSKPEALHDWAMSLKQRYPSQKIAVACELKKGPLIYALSKYTHLTLFTINPSSVANYRKVFTPSNAKDDPSDALLQVEILTLHMEKLCIIEPESAAMRSLAQLVEYRRSLVQDSVNLSNKITATLKNYYPQALEWFKEKDTFIFCDFISKWSSLTKVKRAKKQTLLDFFNSHNSHYAHVNDARILSIKSAMPLTEDIGVIEPNQLVVEVLIAQFRILLKGIESLDKTIKLAYKSHDDKVIFDSFPGAGPQLAPRLLVAFGSNRDRYNDASELQKYAGIAPVIERSGKKMWTHWRYSCPTFLRQTFVEWAGFSIRYSFWAKAYYDQQKSKGKPHNSIIRSLAFKWIRIVFRCWKTITPYNESKYLEALKRRGSPLLTFAVNS

SEQ ID NO: 298630 - protein, 338 aa, unidentified
MDKISVVGIDLGKAVFHVHGSDAQGRTVLERRFSRKALRIWLTRLEPCLIGMETCAGAHHWGRWLRAQGHEVRLMNPRYVKAYVKTNKNDARDAEAITEAATRANMRFSSIKTVAQQEVLMLHRARSRAVAARTALANQVRGFLIEFGIVVPQGLGVLRQRLPEILDDSQTEFGSTGRTLLRELREELVALDGRVASLDFRLRREAENDERCRRLQGLPGIGPLTATALVSSIGDVTNFSNGRHLAAWLGLVPRQHTTGGKPRLLGISKRGDRYLRTLLIHGARAALRGAPKRDDRCSRWVLALERRRGRNIAIVALANKMARMVWAVWSRQQTYLPA

SEQ ID NO: 298631 - protein, 401 aa, unidentified
MDPHLCVGVDVGCRSHRVGIAHPDGSILEEFDISHSDAGFQEFFRRIERRRQRLALPVVVAMEGYNGYARPLDRLVQEKGYRLYNVNNLKLARFKEVFPGAAKTDLIDTRKILELFRLKDQLPLAKDAIQEVVIAPEVNEKLKRLSRRRRHLVIEKMRVLNRMQADLQAVCPELLAATHDADNLWFLRLLTFRDDLRQLARLRRSTILQIPGVGKKYGGVIQEWQGKAQFSGEVEYVGPMIVEDARRILQLHKQIQALDEAMSELSEQSEIARRISTIPGFGKTSIAELAGEIGTPKRFASEASLALYLGMCPLTHQSGDMCRARIPRQVNTRCKAAMMTAVAHHFRCVPESRAYYDRKRAEGKTHNQAVRALGRHMVRVIWAMLRDQRDYEIREDVHPTA

SEQ ID NO: 298632 - protein, 432 aa, unidentified
MAKSTVEYEQIISRGCGIDVHKKVLVATISGTGIKEETRTYSCFTEDIESFKAWLQDNDITHVAMESTGVYWKPVYNILEGDFEILLVNARHIKNTPGHKTDKKDSKWIAKLLISGLLRGSFVPPKPTRELRDLTRNRKKIVEQITSDKNRIQKTLEDANIKLSCVVKDMSGATAVRIINAMISGVDDIDELVKFRHGRMKASKEELASALRGHLTEHHKFMLSFLKESILSKELLIEQLDERIEEYLKQQEVELYVDLLQTIPGVGQESARGIIAEIGTDMDRFPDEKHLASWAGMSPGCNESAGKKKSSRTTHGNNYLSSLLTQCGWAASRTKGTYLRSKYERLVGRRGKKRAIIALGHKILIAAYFVIRDKTAYKELGYEHLTQLNRTAKIKRHLKQLSEMGIQLRIDNDIAYEDPLLSGKLPNTYRGT

SEQ ID NO: 298633 - protein, 374 aa, unidentified
MSANGITFVGMDAHKKAINVAMLLPGQNKPVEWQLANEPAAIRRLAKKLQREAPGEVRCCYEAGPCGYVLQRQLEAGGVICEVVAPSLIPVKPGERIKTDRRDALKLARSLRSDDLTAVHPPTSADEAVRDLCRCREDARKDLLRARHRLDTFLLRRACLYTLTRRRWGQPYRAWLGSLKFEHAADQVTFEDYVRTIEQAEERVRRLDERLAAVAEQDPYREPVGWLRCFRGIDTLTAIAVVAELHDFRRFQTARALMAYLGLVPSEHSSGERQRRGAITKAGNIHVRRLLIEAAWHYRHRPHVGVGIRQRRTGQPEAIIAIADRAQERLCHRFRTLTARGKIPNKAVVAVARELVGFVWAALYPATQGQPTQS

SEQ ID NO: 298634 - protein, 379 aa, unidentified
MDHAIADTSAETVLRGALELSKNTWLLALQLPDRAQPSLYPIRGGDTEGLMAKLTAARDRLAKVSGKAPSIVLCYEAGYDAFWLARFLKARGIECLVVDAASMQVNRRARRAKTDRIDVGMLLRALIAWGQGDRHVWLVVRVPSVDEEDLRRSHRERDRLVRERTAHINRIKGLLFGQGIRDINVKSKYKTLQIDKLVTGEGHPLPPRLASEITREIARLALIQEQIAALERERDQAPTPCKTTERKRVQLMCLTGIGPAIAAVMTREVYYRQFDNRQQVAGFLGLATSPHDSGDVERSQGISRAGRGQVRGIMIQAAWLWLKHQPKSAITRWFVQRTAGQSGRIRRIMLIAVARKLAIALWRFVEQGLVPQGAMLATR

SEQ ID NO: 298635 - protein, 388 aa, unidentified
MQTVADRPEAPNAIRTDLGAIFVSLELSRSTWLITSLSPDGGEKMSKHAVRGGDVAGLLERFAQLRKKARARTGKVFPFVVIQEAGLDGFWIDRVLRKEGIESHVVDPASITTSRRRRRAKTDRIDGEALVRALLAYKRGEPRVCAMVKAPTPEEEDRRRLCRERKVLIVERVRHVNRVKGLLFSQGISGYEPLRRDRRKRLDTLQTGDGRLLPDHLKAQVRRELDRLELLLDQIKAVEAERDALLAVQQGAAPAPAAMLLNIKGIGPEFAAILWSEGLFRHFDNRRQVASYAGLAPTPWQSGSVDREQGVSKAGNPRLRTTLIQLAWLWLRNQPQSALALWFKERVNRNGGRLKKTTIVALARKLLVALWKYVTAGVVIEGAIMKSA

SEQ ID NO: 298636 - protein, 329 aa, unidentified
MKFIGIDISKSTFVAAYPQLKGYQTHTYTNDIKGVKKFISSLSVADHQCVLEATGNYGTLLLYMLCEQNIAASLVNPKQIKHFARMMMAVTKTDDVDARLIALYGEKMHPPVYKVPAEAVILMKHKKVVLRQLKKQLTSLTNLRGSFTVLPRIDKNSLKALDKTIAFIEKQIGGLEADIVNIANEEFSKQIKSLTSVKGIGITLATSLIISTAGFTQFENPKQLSRYIGICPTYQQSGTSINIKGTINRNGDSDLRSLLYIASWSAIRYNQACRETYQRLKAKGKPSKVALIAVANKLVRQAFAICKAESIYIDGYISKKEKTSNFSCI

SEQ ID NO: 298637 - protein, 402 aa, unidentified
MRVAVGIDVAKEFHWVAVVLADGGKVLLSRRVDNDPDSTDELIADLRAIAAEHGEVTVGIDLMGGVASLLTAMLLDAGVRLVHVPGLVVNRARRATKGGEAKSDPRDAKTIADQLRLREDWRALDHPDQLSVDLRLLVSRRRDLVVEQTRRLARLRETLTSVFPGLERAVDVTNLGDLHLLTRYCTPEQIRRAGRRRITEHLLRAGVRRSYAEPLVDKAIVAAAAQRTVVPGQARLAEFVREFATDAITARRRITELDSQISADLDDHPDAALIRSLPGMGATLTAELLAEAGDLTRFATGDQLASAAGLAPVLQQSGKMRYLRRATAGSKTLKFVFYQSAFCAIQRDPASKAFYARKRAEGKRHHQALIALARRRINVLHALLRTRQPYQAAHTRDATTAA

SEQ ID NO: 298638 - protein, 356 aa, unidentified
MSYDVNYIGMDVHKEAIVIAVLNETGKLVMESVIETKASSILQFLHGLRGELHVTWEEGTWAAWLYDLLQPHVQHIVVCNPRRNALLKEGSKSDKLDARILADLLRTGMLRPVYHGENGLRTLRELGRSYQNISKDLTRVMNRLKALYRGWGIPCAGTQVYAARAREEWLNKLPQAGVRRRAELLYQQLDGLQDLRREVRPEFLAESRKHKAAKLLRQIPCIGPIRAARLIGLMQTPHRFRSKRQLWTYSGLGIETHDSAQYRFVSGQVQRSKKPQQVRGLNRNHNHEMKEIFKSAATRASCGRGPFHDFYTGLLAKGMKPEMARLTLARKIAAITLTLWKKEERFDVEQLKTQAA

SEQ ID NO: 298639 - protein, 407 aa, unidentified
MDLLKTVFGIDVSSRKSNVCIMVNGQKVNDYAISNDMVGFNQLLGDLKQVTNPQIIFEATGVYSRRLQAFLDMHELRYVMMNPLEAKIKTKDDLHQNKTDKLDALYLAKLQSEYPQRLAYVQSEEYQELMANNHIYEQASHDLITNRNRLHKAIQLTFPEIEHLMANPRGKNYWSIVLRFPHPDIVLETKEADIIDFLKGLSGIGKKRANDIMQSLIRLAKVACPAVKKNSAHVRGLKMAINNILSTEEECQTALQEMAKLAPKRDLEILTSIPGIGENTALRIISELGDIRRFNNPSQLNAFVGVDPQVYESGNLTAQLSISKRGTAIGRKVLYLAINQIQSAKEAGNPCHIADYYEKRKRSSETASHKKAAIASIHKLLRTIFALIKNDQLYSYDVAKHNQRLLS

SEQ ID NO: 298640 - protein, 341 aa, unidentified
MKYVGVDLHKKTISLCVMVKADGQRRVVCRKRFGCTQPEAIRRFFEDLGRFQVVVEATSSYEWFLLLVEDVADRCVLAHPKKLRVIAESKNKSDKVDAQVLAEFLLLDMLPEAWRPTPRVREHRVLVRHRRWLDGRITAVKCKLRHKLAHYNADIAGLFTQRGTEYLAQTAMSPADRFEVRQLQAELDLFLTQLQQTDKQLREFAKRAPLVEREARAVLDTIPQVGPVTIDAVLSELGDWRRFRSAKKVVAYAGLDPGRRESNGKVKELSISKAGSRILRWALIQAAWRLANTSPRWQRVFETLRQNTGSKKKAIVGVARRLLCVMFALLRDGKRYDFAAA

SEQ ID NO: 298641 - protein, 429 aa, unidentified
MSQQKVSRNLAQVKRGALHIGVDLGLENNVAIVISDNAERLDRFRFSNDRDGYEYFQRRIDKLQRENTAPEVMVAMEPTNYLWKLLASDLEQKGIAYRLVNAYTVKKHREGDQLDRSKDDPRDAFTIADLSRTGKCTETQLQHGAYAELRQYISLYYRLKRQIRREKQHIWHAVGQLFPELPRVFRDITGETAKAILVTQAAALEIRKMSEEEFIASIRCGFDGKRLYVSRLRSAYRLAVNSVGVNHGVQALQFALKLHVESLNQLLIQEKQLVDALQACFLSLPEANSLLSVNGIGILSGATILAEIGDPTRFRHAGQLVKLAGIQPTPNRSGRKQRSATPMSHQGRPRLRSALYFTCLRLIQVDQRFSILYNRLQHRKKNPLTKMQAVGVLMNKLLHILWALIKKQAQYQPLYIRTFETQLCQAVCL

SEQ ID NO: 298642 - protein, 323 aa, unidentified
MSIVQSSFVPGVIGADVSKTRLDIHGLGELASVANDRYGIRRLIGRLRRSRPQLIVVEATGGYERSLVHGLLDAGLPVVRVNPLRVRRFAQSRGILAKTDRIDARVLADFGRLNADQLRPMQPISDNARMLQELIARRRQLVEQSVANKNQREHVTLGSVRQSIDRTIKHLCKEIMLVEQQIQEIIDSDEKLSGRQRKLQSVPGIGARVSRVLVSELPELGELDRRKIAALVGVAPFNDESGGYNGPRHIRGGRATVRSALYMATLVATRHDPVIRDYYNHLKANGKPKKVALVACMRKRLNYLTAILSKRPPQAAERNEAGF

SEQ ID NO: 298643 - protein, 354 aa, unidentified
MNFYTNTHPYYCGIDLHTRLLYVCIIDNENNILVHEKINDSPDKLLALLKPYLGNIVVGVECMHCWYWLSRSPVSDFCEEHNIDFILGHALYMKAIHAGKTKNDKIDALKIAKLMRGGNFPLAHAYSKEHRSIRDALRRRTHIMRMSAQLKAHVSSTISQYNLPALESRLNLQNSPDREKMHHFFPDEAVQKSMDLNLNIIETMVSELYKIEHYVKTQAQTHRATDLHILKSFPGIGKILALTILYEVGDIKRFPSVQKFASYSRLVKCKAESAGKTHGTQGNKIGNAHLKWAFSEAAVLYLKGNDNAKRYLAKLQKRMSKAKALSALAHKIGRCTYFMLKNQQVFDEERFLNG

SEQ ID NO: 298644 - protein, 342 aa, unidentified
MAIVTVGIDLAKNVFAVHGVDEAGKPALVRPSVPRAKLIELIAALPPCLIGMEACSGAHHWARAFAQFGHSVRLMAPKFVAPYRLSGKRGKNDAADAQAICEAVTRPNMRFVPVKTVDQQGQLMVHRARQGFVEQRTATLNRIRGLLSELGIVLPLKASVVRRQAVQHLEDLPGWANTVVGDLLSEVAHLDERIAQYDLHIRSMARQSTAAQQLMQLSGVGETTATTIISTVGNGHDFACGRQFCAWLGLVPGQYSSGGKARLGRITKAGDPYLRSLLVLGARSVLALAMRKDNPKQDPVSRWARSLAERRGYWRAIVAIAAKNARMCWAVLKHGEGFKVPA

SEQ ID NO: 298645 - protein, 344 aa, unidentified
MSKQIAVLGIDVGKNSCSVVGLNGVGQVVLRRRLRRESLIKLASELAPCVVAMEACCGAHHLGRIFRDQGHEVRLMSPEYVRPYVKAQKNDDRDAEAIAEAATRPTMRFVELKSTEQLDMQSLHRVRDRLVGERTALMNQMRALLLERGITIPKGRRKLEQHVASILDSDEGELSPRIRSLVAGMRGEWEALDRRIEAFDDEFALQAKTDDAARRLATIPGIGVLNATALVAAVGNAATFARGRDLAAWLGLVPRQMTTGGKPRLLGISKRGNKYLRKLLIHGARAALPSLSASATPLGRWLRGLLERAHKNTATVALANKLARIAWAVLRHGGTYNAAAMKAA

SEQ ID NO: 298646 - protein, 342 aa, unidentified
MEYFAGLDVSLEETAICVVDGDGRTAGEARVASEASAIATWFEATRLRPARLGLEAGPLAPWLQLGLEERGLPAVCIETRRMRSATLLMAVKTDRGDARAIAHAMRAGWYTAVHVKSMPSQELRLLLRNRKTLLEQRVRLDNVIRGTLKAFGIKLGRVSEARFADRVVALLEEHRPGLLDFVQPLLAVRLTLRRSYQALHRLVLRAVRDNPLCRRFMTVPGVGAVVALSVMTGIDDPRRFSRGRKVGVHFGLTPRKYASGEVDRNGAISRCGDAMVREALFQAAHTLLTRVQRWSALKAWGMRLAKRRGLRRATVALARKLAVILHRMWVSGEDFRWTAEAA

SEQ ID NO: 298647 - protein, 360 aa, unidentified
MQTQSTELNFEGQNLFVGIDVHLKSWTVSIFTEKLFHKTFTQPASAETLFNYLKRNFPGGIYHSVYEAGFSGFWSHYRLKEMGINSIVTNPADVPTTQKEHLQKDDPTDSRKLARSLRSGELSAIYIPDPSTLEDRSLVRMRATLIKDMTRFKQRIKSFLYFYGIAYPKEFERSGSHWSKRFMKWLNEEVILQHDSGTQALRILVQEVEQQRTLLLEVLRKIRLLSGSEKYAKNVELLRTIPGIGFVTSITFLTEIEKIERFENTDHFASFVGLVPNRHSSGEKDNNGEMTFRGLDILKSALIESSWFAARYDPALIKSYHTYIKRMEPNKAIIRIARKVLNRMYFVLKNKVEYVPGFVK

SEQ ID NO: 298648 - protein, 360 aa, unidentified
MSFNGTSVGLDVHALSVVAHAVDEQTGQVDRARLCPDHGEILEWLRRLRAPVRVAYEAGPTGFGLARALAEARIDCVVAAPSKLIRPAGDRVKTDARDAAHLTRLLRLGEITAVTVPEAEVEAVRDLVRAREDARADLMRVRHRLSKLLLRQGRVYSGGQAWTGVHETWLRRQRFDDAHTAAAFNHHFDAVLTTTAARDRLDEQIVAVAAAPRWADQVNRLGCLRGISALTGLALTVEIGDWTRFTGASIGAYVGLVPTEYSSGASRVQGSITKAGNAHVRRLLIESAWHHRAPYRNPGPTMRARWAKVEPALKDRGHAGNRRLHQQWCRFNERKKPHVVANVAVARELAGWCWSLATLT

SEQ ID NO: 298649 - protein, 416 aa, unidentified
MEVMFKFCAGLDVHKKIIVACVLLSSPEGLQRHIKTFSTMLVGLEALAAWLAGFGVTHVAMESTGVYWKPVYNVLSAHFDVWIVNARDLKQVPGRKTDVKDAEWIAQLMRLGLLKRSFIPDVEQRDLRDLTRYRTRLTAERAAASNRLQKVMEDANIKLAAVATDSQGVSARAMLEALINGETDPAQLAELAKGRLRAKIPVLEQALSGRVREHHRFMWREVLEHIDELNTRLLILNARIRDLTAPYESVIERLDAIPGVDRYTAEVILAEIGPNVTPFPTAKHLASWACLCPGNDISANKRRSGKTRRGNNWLRTALVEAAWAASRAKDTYLSSQFHRLRARRGDKRAAVAVAHSILIVVYHLLAKPEAVFTELGGDYFLKRNPEQEQRRAVRKLEGLGFTVTLTPVGATAATAA

SEQ ID NO: 298650 - protein, 342 aa, unidentified
MQAITVGLDIAKSVFQVHGVDCNGQVVIRRQLKRRYVLTFFEKLAPCLIGIEACASSHHWSRQLLALGHDVRLMPPSYVKPYVKRQKNDATDAEAICEAVSRANMRFVPTKTPEQQSGLVLHRTRHLFIRQQTSLINAIRAHCAEFGIVAPVGRQGVEELLNVIADAEDEQIPEIARACLSALGDQLHRIKAQILEFDRMIGAWHRSCEASRRLDEIPGVGPALATALVASIADPRTFRSGRDFSAWIGLVPKQSSSGGKPRLGSISKQGDRYLRGLFTAGALAVIRYAKIHGIGHRPWLTALLARRPIKVAAIALANKIARIAWAMMARGERYREPVALAA

SEQ ID NO: 298651 - protein, 381 aa, unidentified
MNQKQATAEKELTTKCPVLYVAFELGNSTWKMACSDGRKVRHVTVTARDLDQVERALLRAQNHFALAEGCSTVSCYEAGRDGFWLHRYLQGRGIDNVVVDSASLEVDRRLRRAKTDRIDAGKLLRMLIRYHGGEKQLWRVVRVPSREDEDARHLHRELESLKRERTRHRNRIHGILMQQGLCLTNPSKKRFLKDLEALCTWDGRKLPTGLKARLVRVYQQLRLVEDQISTLAKEKQEQLKQLDNVKMRQVAQLLRLPGIGPVSSWAFVMEFFGWRRFRNRREVAALAGLTPTPYDSGRKLREQGISKAGNRRIRTLAIEIAWAWLRYQPQSKLSHWFLERFAGGGTRMRRIGIVAVARRLLIDLWRFLEYGVVPEGALLTT

SEQ ID NO: 298652 - protein, 330 aa, unidentified
MTNAKVRESTSPPLEFVGVDVAQQAFEWALHGVRGTHRAGNDAHGFETLREALQGCHLGLIVLEATGGLERALAGYLLRHGLPVAVVNPRAAREFARSMGHLAKTDAVDAVALAHLAQTLAAKADQAGVRLTLPSAEIELLQALVARRVQLLSMRTAEKNRLGGAVRVLHKSIEAVIKTLDKQIAKLDRDIDAHLERHFTAQRQRFDAIKGLGLTTCAVVLAFMPELGTISGARAAKLAGLAPLNNDSGKDRGKRHIWGGRSIVRSALHMATLSAVRFNPVLKAFYDRLLAAGKPKKVALTACSHKLLRILNAMARTGQPWNERLHAITP

SEQ ID NO: 298653 - protein, 319 aa, unidentified
MVKMTQHTPIVAGIDVSKAHLDVYLHPDGLHRRFVNDKTGWRALHKWLPAASLQSIVYEATGPYHKGVERYLGEHGCPIARLDPRRARRFAEALGVKAKTDLVDARVLAQFGALLEPAPRSLPGPALEQLKELVAARRGLVKQRTRIANKSKTATIPLLKRQLRHAREQAARQIEQIDAQCHKIVRTDPALEPRFDILMSIPAIGIVTAMTLLADMPELGALNDKQAASLMGVAPIARDSGAFKGKRHIRGGRALVRQAVYMAALVATRFNPDMKRKYKTLIENGKPPKLALTVIMRKLIILANALIRDNRTWTEIRPC

SEQ ID NO: 298654 - protein, 348 aa, unidentified
MLADELDFVIGVDTHRDEHALALVACPSGARVQERLIGADERGYAAALAFAVERAAGRRAWAIEGTGSYGKGLARYLTQRDERVHEVERPRRQGGRARAKSDRLDALRAARSLIAAEKPALPRAAGLRESLRVLLQVRTSAVAARRVALNQLRALLVTCPEPLRAELRSLTRARLLRRCRELEPERTDDPELRSTLQALRLLAARVESLTAETRELEQELRAEAEQIAPALLAERGIGPIGAAQALVSWSHKGRFRSEAAFARLAGAPPIPASSGKTVRHRLDRGGDRKLNNVLHQIVITRRKHDPRTIAYIERRRREGKSEREAIRSLKRHLARHLFRLLETTTTPT

SEQ ID NO: 298655 - protein, 338 aa, unidentified
MTIVCVGIDLAKNVFALHGVDEAGKPALVRPAVPRAKLLEALAALPPCLVAMEACSGAHHWARQFQQLGHTVKLIAPKFVIPYRLSGKRGKNDAADAAAICEAAQRPSMRFVPAKSLEQQGQLCLHRVRQGFVEQRTALINRIRGLLSEFGIVLPLKATTVRREALLHLEDLPGWANLAVGDCLSEVGRLDERIREYDRHLSQLARQSEAARRLMRLSGIGETTATALMAAIGHGHDFQCGRQFAAWLGLVPGQYSSGGKTRLGRINKAGDAYLRSLLVLGARAVLAAAKNKADPISRWAVSLQERRGYWKAVVAMAAKNARLAWAVLAKGEDFKLPA

SEQ ID NO: 298656 - protein, 377 aa, unidentified
MTATTRSEFRSVSEPTLYVAFELSAKEWKLAMTSGLGADPWLRTVAAGDLGAVERAIGQARTRFRLAAGVPVVSCYEAGRDGFWIHRALTQRGLENHVVDSASIEVDRRARRAKTDRIDAMKLVRMLIRACAGDPDVWREVHVPTVADEAARHVSRERTVLIDEQTRVINQMRSWLATWGCRLPRRRAAGWWTTVRDWAQAPLPAPVQARIGRADARLTIIAAQIAVLEDQQAAARAGAPAASALGRLTQLKGVATTGASVLIDEGLIWRAFRNRREIGGLLGFAPTPYQSGEVAREQGISRAGNARLQAISIQLAWNWVRWQPMSALTLWYRSRFASGGKRLRRIGIVAVARKLVIALWRYATTGVVPTGAMLKGA

SEQ ID NO: 298657 - protein, 375 aa, unidentified
MSEITRAPIVRVGVDLAKQVIQVHAVDASGRRVVARAFKRDQFLAWCAQLPAGCLVAMEACSSAHYWSRKLRALGLDARLIAAHFVTPYRMEGKNGKNDATDAAAICEAASRPCMRFVPVKTCEQQGVMSLHRVREGLKEERTACINQIRGVLTEFGLVFGKSPKVLRAVLADVIEDASNELSTMARLVMQRAFEHWRELDEHLRWCDRQVGQHVRASPEAKRAVKVFGIGELGASALTAGVGDFKQFKSGHQFGAWLGLVPKQDSSGGKTRLGRITKRGDDYLRTLLIQGAKAAVMSADKRDDPTSRWLAQLTARAGWQKACVAMANKNARILWAVMTREEGFDPNHISVKPQAKPSARESAAVASSDTVACPA

SEQ ID NO: 298658 - protein, 334 aa, unidentified
MQNITLIGIDLGKHSFHIHCQDKSGKALLRKKFTRTKLMQFLATCPPSVVVMEACAGAHFMARCISDFGHETKLISPQFVRPFVKSNKNDFVDAEAICEAASRPSMRFVQPRTETQQAMRALHRVRESLIRDKVKTTNQIHGFLLEFGISLPIGDAVIKRLSLVLAEHEIPEYLSRLLVRLHTHYLYLVEQIAELESELSQSINADDTAQRIMTIPGVGPITASLLSSQLGDGKQFSCSRDFAASTGLVPRQYSTGGKSTLLGISKRGDKNLRRLLVQCARSFMMQLERQHGKLAEWVREQLNKKHSNVVTCALANKLARIAWAITTQKKEYQA

SEQ ID NO: 298659 - protein, 347 aa, unidentified
MKFYNQQHQYYCGIDLHARKMYVCILDQKGKTMVHENIKTDPEALLQIIRPYLEDIVVGVECVFCWYWVSDLCAKHQIPFVLGHALYMKAIHGGKTKNDKIDSYKIALLLKGGNFPTAYPYPAEWRATRDLLRRRMYLMRRCGELVAHIQNTKTQYNMPGFTKRLARKYNHEGVAEKFENPEVRRSVAVDLAAIAALNQILNQLEWHIEKTAEQHDYHTLYLLRSIPGVGLILALVFLYEIEDIKRFPSVQDFSSYARLIKPVKESDGKWAGKSNGKIGNHHLKWACNEAAILMLRESEKAKQYVARLERQYNKGKALGIFTHKIGRAVYYILKNKEAFNMDKFFHA

SEQ ID NO: 298660 - protein, 356 aa, unidentified
MCQSVGELQTLDSGESIMNLIKTLGIDLAKNSFSLVGMDKYGKVIFRKTLSRKKLLPFIAQLHPCLIAMEACSGAHYWAREFKSIGHQVAIIAAKFIEPFRKGGKNDNNDAEAICEAATRPNIWHVPVKTAEQQAIMTLHRVRQGLIKERTAMINQIRGLSAEFGITIPQGRYSLQDKIQSILEDADNKLPTFARQMINDLWQRIKQANEQILSYDRALAQQVREDTVAQRLMTIPGVGEQIATAMSANVPDPRLFRSSRQFCAWLGLVPRQYTTGGKIRLGRITKRGDKYMRMCLIHGARAVMANLGDKQDKVSCWIRELIERRGYLRAAVALAARNARLIWTLMIKQEDYKVVA

SEQ ID NO: 298661 - protein, 338 aa, unidentified
MKVQILGIDLAKNVFQLHGVDRKGSAVMVRRVRREQLLKVIGELDPCLIGIEASTGAFYWQRQFEKLGHTVRIMAPQYVKPFVRRQKNDTNDAEAICTAVQQRNMRFVPKKTLEQQDIQALHRARQRLVNHRTALISQMRGLLLDRGIAIAVSATRARQLIPKILAAANDELTVLVREIVSSLYAFMLQIDERIRVFDRKIDAIFKYSEVCQRIAKIRGIGPKTATAVVAAIGDGSDFKNGRHLAAWLGLVPRQHSSGDRRVMMGISKRGSQHLRTLLVHGARAVVRTAVRKTDSRSIWVNELRQRRGYNRATVAVANKNARVIWAVLTSGEPYRSAA

SEQ ID NO: 298662 - protein, 317 aa, unidentified
MSNNSIICAGIDIGKRRLDVAVCGAKASLEVDNTSAGHEKLVTWLQRHKVERVGVEATGGYEQEVVRALRREGFPVVVFQPIQVRACARFRLKLAKNDKIDASLIAACVASVDNVRTAPDPRFEAFAAAQTLIDQLTDDIVLYKTRLETARDEFSRAFWKGEIAGRKAQLRGVLKTLRTDMRAHTDIAAKLDLITSVEGIAEKTAIAVLIRMPEIGTLSREQVAALAGLAPYDDDSGRRAGSRHIQGGRTRLRSSLYAAALPAAFFWNPQLITFYKRLRANGKTHKMALVACARKLLIFINTVVARATPWQPKPAAI

SEQ ID NO: 298663 - protein, 344 aa, unidentified
MKETGKEKILYVGIDVAKSWLDLAVTTDGVRTIASKRVDNNPKGFKAALLWAKTHMRKQKASAVHFAVESTGIYSEGILEYLQDEDIRISMINPSQIKSFATSKLLRTRTDKIDASLIAVYLHAMKPKPTPKVPTELKQLKSLVRHLAYLTERRSEEKTYLESVTDRDVMESTRKNIKHYDREIKKIEEKIKDHLDKNSGLRKKVELLKTIPGVAETTARILLCELHHQGSYERISRKAQTAHAGLAPMEKTSGSSVRRKPKLCKTGNARLRKSLYFPAISAIKHNPVVKDFYDKLISKGKHKMVALVASMRKLLVIAIGILNNQVAFDADWEQHKRFRLLKTA

SEQ ID NO: 298664 - protein, 414 aa, unidentified
MALKIVYKICCGIDVHKTFVVACIASTNSNGVTVYKSHRFSTYTKGLKELSQWLFDNNCKDVCMESTGKYWIPIFNVLELSCNITLAHPKYVKAIRGKKTDKKDAKWIADLFKHDLVAASFMPPLDIRQLRDLMRYRFKLTCFTSSEKNRFQNCLTVSNIQLGNVVSDTFGKSSQKIIDKILENPLNKSFDIESLIHSSMKKKIPELELAIDGYITPEQAEKLKIIKCHCEDLKNRKAELESIITQLAKPYQKEIDLILTAPSFKNTFTAIAIISEIGVNMDVFPTAKHLCSWAGLTPTNNESAGKKKSVRVSKAGCYIKPLLVQCATAIVKSEKHPEIRNRFLRIKKRRGHKKAIIAIARMLLTALYNMLKKKEPYNAELYKKSDFLPVEREITIEQAILIAQNHGYIIKSAP

SEQ ID NO: 298665 - protein, 353 aa, unidentified
MSKHTRIWTVGIDVGDRSSFYCLLDERGEIAAEGQFRSTKEGLRQQLGAMQPALIALEAGGHSRWMSELLGELGHEVIVANPHRLRLLTESDRKNDKRDARTLAEVAFARPALLAPIQHRSAEAQADLNIIRARDLLVEARTKLINGVRSLVKGAAGRIPKCASERFTTMANTHLPDDIRPAAAPLLEAIDELGERIQCMDETLEHLAQTRYPRTALLKQIAGVGSLSALAFVLTIGDAERFRRSRDVGCWLGLRPKQKDSGSCTPQLRITKAGDQYLRRIMVSCAHYIVGPFGPDTDLRRWGLKLSERGGRNAKKRAVVAVARKLAVLLHRLWVTGEAYEPLRNAKLTTVAA

SEQ ID NO: 298666 - protein, 404 aa, unidentified
MWYAGIDWADQHHDALVIDEKGHQVGSIRIDHHPQGLAKLNTFLQQFIGSRPKEQMACIIETTHGLLIASLLEAGWPVYPVNPRTVDRRRSASGAKTDTIDAYLLAKTGRADFADLHRLTPDSEKVAELKLLTRDQDALIQTQTRLVNQLTACLTAYYPVALELFAKLQQHTTLVFLQTYPTPQAAKSAATDQITQVLKKAGHPNPLAVAPKIVERLQQPHLQADAVITRTKSRLMVALVSQLLPLIAQIAQYDKEIDTLFLTHEDHEIFESLPRAGQRLAPRLLAEIGDDRKRYQSASSLQALGGTSPVLYQSGMYSKAHRRLGCITPLRNALHQFAWQTTQSEPWARDYYQRKRAAGKSHTVAIRALANVWVRIIFAIWFGHCTYETAIFERAQQQHARRAA

SEQ ID NO: 298667 - protein, 314 aa, unidentified
MIIPLRYVGIDVSKKHLDIFDEADGVPRRIANATQAITQQVARWRCDTLVVFEATGTYDLKLREALGQAGVHFARINPARACDFARASGQLAKTDPIDARMLAAFGRVMQPAVEQAAANPARNALAGLAKRRDQLVLMRAQEKNRRSEADDRAMAGRISRLIEVLDGEIAEIEADIKALTKAEPEIADDARLMRSVPGVGPVACMQLIAKMPELGRVGAKQIAALAGLAPFNVDSGAFRGKRKIAGGRKRVRDALYMAALNAVRRADPFKAFYERLRLAGKPAKLALVAVARKLLTVINAIMRERKPYLTTTPT

SEQ ID NO: 298668 - protein, 342 aa, unidentified
MNITTIGIDLAKNSFSLVGMNKHGKIVLRKSLSRNKLLEFIAQCPPCLIGMEACSGAHYWGREFSKFGHHIGLIAAKFVEPYRKGGKNDNNDAEAICEAVLRPNIWFVPLKTPDQQAVLCVHRVRQGLVRDRTGMLNRLRGLLSEFGIVMAKGRYPAQAAIAGILEDAENDLPMLARRVIDDLWQRIKQTNEQIQGYDKELALLVKGNPVAKQIMSIPGVGEQTASGVVATVSDPRMFKNSRQFSAWLGLVPRQYTTGGKIKLGRITKKGDQYLRTCLVHGARAVVANLRDKQDRVSCWIRNLIARRGYLRAVVALAARNARLIWTLMIKQEDYKAMPAVVS

SEQ ID NO: 298669 - protein, 471 aa, unidentified
MPRRKPSSSRPDPATAALLQTLNPHAAGIDIGATALWVCVPPSAVASPAAPSAAAVLPPHVRRFGAFTADLHTIAAWLRQCQVTTVAMESTGVYWIPLYDLLESAGFQVLLVDPRQVQRAPNRPKTDVHDCQWIQRLHSLGLLTAAFRPEEPIRVWRSYQRHRATLIEDAGRHLQRMGKALEQMNVKLPEVVSDITGLTGMGIIRAIVRGERDPQELAKLRDHRCKESAETIARALQGTWQPEHLFALQQSLALYDYYHEQIRDCDRVIEAHLKGMALPEVPPLEPTRRVRRRKDNAVTFDARQRLHHVSGVDLTAIEGIEESTALVVLSEIGTDMSRWPSEKHFGSWLGLAPNPRKSGGRVKSSATRPGVNRAAQALRLAAKNLQRSQSALGAFFRRIAARRGLAKAITATAYKLARIVYALLKHGTAYVAQGLAVYETAYRERVVRQVKRKAAELGLVVMERDAVVQSS

SEQ ID NO: 298670 - protein, 346 aa, unidentified
MQYDAGIDVSLEQSSVCVVDAAGKIVKEAKVATDPYVLVTFFRGLGFPVTRIGLEAGPLSQWLYAGLTQAGFDVVLLETRHVKAALSAMVVKTDRKDARGIAQLIRMGWFRAVHAKSASSQEIRALLTARRLLLDKLRDVELSLRGVLRGFGLKLGKVTQKGFETRVRELVANHSMLQQITRSMLLARATLQREHNMLHKALLKIVRRDKVCRQFMTAPGVGPIVAITYKTAVDDPQRIKKSKGAGPLFGLTPKRYQSGETDVIGGISRIGDAMVRAMLYEAANSLLSRTMRFSALKRWGLAVAKRRGMKRAKVAVARKIAVILHRMWIDGTSFRWSNKERAAAHA

SEQ ID NO: 298671 - protein, 339 aa, unidentified
MQHVAIDLGGKESQLCVRASDGQILLEQKVATRTLETFFKRQPHSRVILETCSEAFHIADLALSHAHEVRVVPATLVRSLGVGARGIKTDRRDAQVLSEVSCRIDLPSVHVPTDLARQRRTLCGMRAALVDSRTALTNTVRGWTRTRLLKVRSTTAHFPQRIREAALAVPDGVPECVERLLIVLESINEQIAKADEELLALAENDPICKRLMSVPGVGPVTSMRFVAAIDDAMRFPTAHAVESYLGLTPGENSSSERKQRTGITKAGPPAVRSALVQAAWNLRRTRPQDPIAIWANGIEQRRGKFTATVALARKIAGILFAIWRDGSVYSPQHEAKHSA

SEQ ID NO: 298672 - protein, 343 aa, unidentified
MKIAILGIDLGKNSCSVVGLDHAGTVVKRRRMRPESIPAFTRTMPACTVAMEACCGAHHFGRLLRSQGHTVRLMSPEYVRPYVKAQKNDDRDAEAIAEAATRPTMRFVELKSEEQLDMQTLHRVRDRLVGERTALINQLRAILLERGCAVPQGRRKLEQHLAAMPDPDNDTSLSPRVCRLIDDMRAEWLELDRRIATFDNEFAARARNDADARRLTTIPGIGVLNATALVAAIGNGETFARGRDLAAWLGLVPRQVTTGGKPRLVGITKRGNKYLRKLIIHGARSALPVLASGPTPLGEWLRALMKRVHKNVAVVALANKLARITWAVLRRGEEFAATARAAT

SEQ ID NO: 298673 - protein, 422 aa, unidentified
MLNDVVDDGVIIERVAAIDVGKAEIVVCARVPSPTGRRSRAQEVRKFATMTAALIACSDWLTQLQVTRVVMEATSDYWKPVFYLLEAAGFETWLVNAKDVKHLPGRPKTDTLDAVWLCKVAERQMLRPSFVPPEPIRKLRDLTRYRVDLINERSREKNRVEKLLEDAGIKLSVVASDIFGVSGRAMLAALVDGERDPKVLAGLARTRMRTKIPALQEAFVGRFSEHHAFLLGKMLARIDAIDADLADLDAQIDALISPFGEAVDRLDTIPGVGATAARAIIAEIGVDMDRFPTAAHLTSWAKFAPGVNQSAGKTKGNGSTGHGNPYLARALGEAALAASKTDTFLGERYRRIARRRGTKKALVAVGRSILVIVWHLLNDPDAVFIDLGPDHYTNRVGTQRAVRNHIRGLNALGYTVTLNPAA

SEQ ID NO: 298674 - protein, 417 aa, unidentified
MTSGQLLLSGKEAVLDYALLAYDIYAGFDVGKFSHHLVAVRAKDQHIIASRRIAQDENEIRDALEGLMSMGKVLVAVDQKGSIGRLLVATAKSMDVDIGFITPSDFHAFAKGYTEVKSDARDAHIIADVAMRFTTRLHPVADFDEAIEVLRVQTTLRAALVQDSTQDKNRIRSLLVQVHPAFEAYLGKGALNVQAYLRILEHYGGPGGIKRAGRKNLEAFISKQPYCKNKAKNIAEGIFSALFAQTVRLHGSDAREDVVRYLAATLILRKQEIECVEKRTTAAYRCFSESIILSSMPGVGDVFGAVMLAEIGDINQYRDAGHLAAYAGVAPSKRQSGTTLDGAKKKIKCNRQLRNAFCESARISINSDEWSRWLYDKKRAEGKKHRQAILALARHRTDILYAMLKNGSLYEPKTIRR

SEQ ID NO: 298675 - protein, 465 aa, unidentified
MSMIERTAETQDGRQQSARSMKGLDVIHPGAAGLDLHKEVIVACAPMTAGETQHPVRKFGTYTSALLELATWLKQHGVTTVAMEATGVFWLPVIGILRSKGLEVLLVNAREVRSVKGRPKTDKLDCEWIRRLHACGLLRGSFIPDAETEMLKSLWRHRLNMEEEDARAIQRMQKAFQIMNIRLDIAVTDIVGETGIRIIEAILAGERDPRKLAKLRDPRVAKSEREIADALTGNFKEEQLFIIRENLAHHRFLLERIRETDARMGAQMETMKKKSNATDLPAATKPDRSRHGETLSRERLYELLGVDLTQIEGVGVLTVSSFLVNAGRDMSPWMTENHFASWLGLSPNVKQSAGKTRSGATRKTASALAHSFRMAVMTIGRLDSWLGAYYRRLKGRIGAPKAITATARKLAIIFYRAVKAGGTVKRLTAEAYEQANRDRILKALRQRAAHFGFDLTMKSNVPVEA

SEQ ID NO: 298676 - protein, 439 aa, unidentified
MKKRRDRVCGADVHKDLIVATITGDEILPIRKNFGTTKSELIKFQNWLVANKCEQVAFEATGVYWMPIYDALNKTLDTIVANPLQIKTVPNDKSDSKDSNRIAILCLNGQIKRSRVFTDEERDLRMITRARSGYVKTRTQFRNRIHKYLSSSGVKLSSTMDDIFCKSGRYILDGLAEKKPIEEILKGIPSGKIRKKQDLIRSALENGLNDTNRMLLIDALEILDNLESKMEKLSLKILDSVQQKSKDLAIVMSIPGIGFTSASVILSEVGDYHDFQTPKQLAKWCGLNPGENVSAGKKKKCGITKRGSKHIRVILVQAAQTISNMKKTALSRFFQRLIKRKERNVAIIAVARKLICLIYHLLINQELYQEDECRKKRSSQDKSCQAPSFKEEHLTDRVAAIVDAFYHLKESSRKNALMRELGAISMANPGQERPSGGGE

SEQ ID NO: 298677 - protein, 323 aa, unidentified
MVNLEKKVVGIDVSSKFLTISFKNAQNQEIVMNIGNLKKDILSCLKKLDQKDYKIVVEATGSYSSKILYYAYSKGFDVYQVNPLTIKKYAEVRNLISKTDDEDAKLIRDFGEKMEIYPFEPKKENLEFLEQELNLLQDLEQEKARFSLKLKSLRQKARLNKEVVKHYETLINNLQKEIEKLLKRLPKLEDEELQENKTLLKSINGIGEKTSLLLLVATNHFKSFEHSKSVSKYFGVAPRMYHSGNKKITIGKCRTTKEYIRSILFICSWSAVKCNPQCKALYERILVKGKCKKLALIAVCNKLLRQAFGIIKSKNKYQLDFAK

SEQ ID NO: 298678 - protein, 311 aa, unidentified
MRRMAGEAFVGIDVSKAHLDIAWDREDEVESCANDAASCAAAAAELKDATLAVVEATGGYELEIVHALQEANVAVAVVNPRRVRDFARASGRLAKTDRVDAQVIAHFARAMRPSQTPRIEDGRMALAELVARRRQLIDMLVAEQNRIEHAGPTMAAAIRDHLAYLKDQLTGIDAAIALQVRADPAIGRRRDILESVPGIGGTTAAVLLAELPELGAIDDKKIAALVGVAPVAHDSGTLRGQRHIAGGRSSVRCALYMATLSAVRCNPSIKIFHRRLRDSGKKPKVALVAAMRKLIILANTLVRRDQLWKPA

SEQ ID NO: 298679 - protein, 326 aa, unidentified
MTAPKLGIDISKKTFDVALIRDPETMKVKQRQFSNTPDGFRALQTWLAKQGVGRVHAVMEATGAYGLDLAECLHGAGHPVSIVNPAQIKAFGQSELQRNKTDRADAALIARFGWLHNPAPWTPPEPEQQELQSLVRHLDDLIEQRTQVSNRLSEGRLTKLVRESWEEILQALNERIAEVKRQINQHFDDHPRLKRQRELLDSIPGIGPETAARLLAEMPQLGEFDSARAAAAHTGLTPKRHQSGTSINAPARISKIGNPRVRYALYMPAMAALRSSKEFKELAARLTERGKKKMQIIAAAMHKLVRIAYGVLKNQQAYDSNYGSAV

SEQ ID NO: 298680 - protein, 388 aa, unidentified
MIYYIGIDISKYKHDFCIISNTGEVIIENSSFENNKKGFQSLLELLKPYNKSDVRIAFEATGHYSMNLELFLIDQGYSFMKMNPLVIHQFLKARSLRRTKTDKADSLIIANYLMSVPYKPNSNLLYNIFTLKSLCRAREQLIKERSKYQVLLTNQLDLTFPELKQFLNNRISATLLFILEKYTNTTHISLMRDYDSIKNISRGKFSYAKFAKLKELAKNSIGHHDENTDLLISTYVSIIKTFNNKIDPIDKQISTIIKELNPRMLTIPGLGEISAATILAEYGKINNFSSPNKMLAFAGLEPSIIQSGTIENNGKMVKHGSGHLRYSIMNAAMIILRYSPTFYDYYLKKRSEGKCHRVALSHVCKKLLRVIYTLEKNNLDFNPSLLKQ

SEQ ID NO: 298681 - protein, 415 aa, unidentified
MTKVMESIIGSCAGFDVHSKTVAVCIRRTGELGEIHSEVHTFRTLTRDLLELCDWLSREGVTHVAMESTGVFWKPIYNILEGQFEILLVNARHVKNVPGRKTDVKDCEWLAQLLQCGLLRGSFVPPRPQRELRDLTRLRMQLTHQMASVANRIHKVLEDTNIKLGLVATDILGVSGREIIKALIEGETDTVKMADMARGRLRDKIPLLEEALVGKVTEHHQFLLKALMDQLIYLESQIERFNQRIEQAARPFEKAIAALIPMPGYNYVSAQSVIAEIGPRLETFPSQAHLCSWAKVCPGNNESAGKHKNGATGHGNRWLEAMLVQVAWAASHKKGCYFQAQYRRLAGKRGKKRAIVAVAHSILTDTYYILKHKRTYKDLGGDYFDRLSHDRIRRYHVKRLQDLGYKVELAEKPAA

SEQ ID NO: 298682 - protein, 405 aa, unidentified
MRIIGMDIHRVAAEVVALHEGALRKLGRIPMLRGDLEAFARKVLTQDDHVVIEATGNAAAVAGVLAAHVDRVVIANPKQVRMIAHAKIKTDAIDAAVLAKLYASGFLPEVWIPDLRTLALRRQVARRTQLVRQRVRLKNLIQSILHTHLVPPCPHGNLTGISGRKWLARQLLPNDEYQAVQRHLGQIDQIEQSLKMVDADIAQHAMQDPQIERLMTLPGVDVTVASGVSAAIGDITRFPEPQKLVAYLGLNPSVRQSGEGPAYHGRITKQGRGQARGMLVEAAWAAARSPGPLRAFFRKIAARRGLHIAAVATARKLAMIIWHMLTKGADYIWARPALMARKLRTVELRAGAQANHAKRGTAYDYNIPAKRAEERRRVEAAEEAYASFTANWRTRIKPKPVENPG

SEQ ID NO: 298683 - protein, 344 aa, unidentified
MPEVTTIGLDIAKNVFHAYGADERGHVLFSKKLSRGKVLDFFAAQPVCTVALEACGGAHHWGRELMDMGHTVRLIPPAYVKPFVKRNKNDAVDAEAICEAAQRPNMRFVAVKSEEQQAAALVFRTRDLLVRQRTQLINAIRGHLTEYGWVAPKGPSYVAMLADLLEEEEMASSLPPAALAMIRLMLDLLPELDGRIAELDREIARRAREDAVSRRLMTIPGVGPITATAIAALAPPAETFAKGRDFAAWLGLAPLQKSTGGKQKLGAISKMGERTLRRLLIIGSMAVIKQAARRGAPKGSWLEQMLARKPRMLVAVALANKMARIVWALLMKQESYKAPAAVTA

SEQ ID NO: 298684 - protein, 314 aa, unidentified
MKSVGIDVSKDRLDVAVRTGEELNKEVFSVANDDRGRQELVKRLKKVAPERIVLEASGGYETLVVQALASAKLPVVVVNARQVRQFAQATGRLAKTDRIDADVIAHFGEAVQPAIRPLPDDAHRQLEALVSRRRQLVEMRADELKRKQTAPPVVHPNLDAVIEFLTKQIDDIDGDLQVLVRSSPAWREADDLLQSVPGVGPVLAITLTALLPELGTLSRKQIAALVGVAPFNNESGKRDGKRTIWGGRAPVRAVLYMAALAARRCNTMLKAVYERLVDRGKTQKVALVACMRKLLVALNAMVRDRRAWDPQLAG

SEQ ID NO: 298685 - protein, 354 aa, unidentified
MEQADSQAEVILGVDTHLDVHVGVVIDAVGRLKGTLSIETNPSGYAKLLVWAQSFGRLNRAGIEGTSSYGAGLTRFLEMSGVAIVEINRPNRSRRRHRGKSDPTDAESAARSVLAGDATGTPKSQGGIAEALRTLGVARRSAVKAKTQAVNQLRALLVSAPSVVRDTLLKAKPEHCVAACAALPENDEKNLVLASLKTTLRLLAKRWKALHEELRELDKQLTRLTKLAAPRLLGRFGVGPQTAATLLVTAGDNPTRLRNEAALAALCGVSPLEASSGKTNRHRLNRGGQRQANNALWTIAMVRMRSDARTREYVVRRTGEGLSKKEIHRCLKRYIVRELYPLILADLADSSRSA

SEQ ID NO: 298686 - protein, 454 aa, unidentified
MRKPQVIPDEDHEVVYERVAAVDVAKASGVVCLRTPDPARPGRFVNRIWDNVPATRARIAELGGELLRRQVQMVTLESTSGYWRVWYYVLESVGLAVQLVSASQARNLKGRPKTGKLDAMWLARLTQHGMLRPSFVPPAAIRRVRDFTRARTDLVRERTRVLQRLEKLLEDAMIKITSVARDGLKAKSVVAMVAALTAGERDPRTLADLAKGPLRGKRDALAGALDGMFDSRHGVIAQLLLDQVAFLDQRIKQMEDQAIAALAQVTESWGVDAGGETGPGRGTTPDSQVLAAAHRLAEIPGISVWLAIVIIAEIGLNMTLFPTPAHLVSWAGLCRSAAQSGTRHGKGKQKKGNSYARAAAGQAAIGAAGTATFPGERYRRIARRRGGAIAQVAVARSIMIIAWHLLSDPAARYRDLGPDWHARRTNRDKKIRTHIRGLQALGVTVAITDDEHAA

SEQ ID NO: 298687 - protein, 347 aa, unidentified
MDTIGLDLHKRESQLCVLVEDGTISERRIITSRERFTAVLGNRPRARILLEASTESEWVAQHLESLGHEVIVADPNYAPMYATRARRVKTDKRDARALAEALRLGAYRPAHRVSPERRHVRAELAVREALVRTRTRYVSLAKALVRRDGLRVSGSESHLVAKRIGELELSGALAAELMPLFQVLVPINEQIAAADRRIGSLTDDDPDVALLTTAPSIGPITAAAIVATVDDITRFHSAHQFEAFLGLVPGERSSGEKRQVGRITKAGNSRVRYLMVEAGWRIMRSKSEETRALRTWAQLIATRRGKRIAVVALARRLAGIVYAMWRDRSPYNAAKLRMPRPLLAQAS

SEQ ID NO: 298688 - protein, 398 aa, unidentified
MVLNLLIQKKRFSTFNNSILEFKQWLLDNHCHDVCMESTGKYWVPVFNLLEDKINVVIANPKWVKAVKGNKDDTKDSKWIGDLFRLGLVKGSYIPCKKVRILREYTRYRYKLVSCRSSEKNRYQNALTVCNVALDSIVSDIFGKSSTSIIDYLLEQSGTSINHEEIASKLLRSLKSKEDAVIESVEGYQMTDAQKYRMRLVRAHMDYITAEINDVDKMIENMISSNPDFENAVQFLCTIPGVKRDSAITIISETGTDMSQFSSSKRLCCWAGLTPGSNESAGKKKSVRITRAGVYLKPALVQCAHAAVKSDKSPYYKKKYESLVKRRGKKRAIIAIARMILTAIYQMLSTGEQWNPSDLYKIDMPVALVEKQKAKAIKQAKKLLQQEGLLPPDEPLAS

SEQ ID NO: 298689 - protein, 338 aa, unidentified
MNATTIGLDIAKSVFQLHGEDAEGRLVVQKRLSRRGMAEFFAKLAPCVVALEACGTSHYWGRTLRAMGHEVRLIPAAYVKPFVRRNKTDARDAAAICVAARRPDMRPVAIKSEEQQASRALERSRELLIKQRTQLMNSLRAMLAEFGIVAAQGARGFAELRARLASGDGLPKTLVTALRLVAAQLDGLTPAIESMEDKIKTIARADPTMRRLSRIPGVGFITAHAVVAAIGDGRQFVSSRCFAAWGGMTPRETSSAGKRRTKGLSRQGESRLRKLFALGAATLMRNARSRDDRASTWQRGILARRPMKVAVMAQAAKTARIAWAVLTSGKDYAPPAAA

SEQ ID NO: 298690 - protein, 393 aa, unidentified
MIIIGCDYHIGCDYHPGFQQIAFVDTDTGECSERRLEHREEAEKFYRDLGGQGAAVRLGMEASGHARWFERLLGELRFDLWIGDAAEIRTKRVRKQKTDRQDAELILRLLLEDRFPRIWVPRGENRDLRQLLWHRYRMVQARTRIMNQLQAVALNEGLRCKKRLWRDAGREQLEAFELAPWASRRRRDLLELLDQLTPTIAELTQAIEQEVEKCPEARRLQTHPGVGALTALAFVLIIGRADRFQCGKQIASYLGLVPLEESSGQRRRLGHITKQGNSLLRFLLVEAAQVTVRSDPEWRSKYFHLAMRRGRKIAKVAMARRLAVRMYWMWRKGWDYEQLKKFGSQRGTARNRRWCAVEHRVIDWVSRSPARGVRSSNHDRGCDRRDAWVGLSS

SEQ ID NO: 298691 - protein, 385 aa, unidentified
MSDHSEAFVAFDTSKLRNAVAIADGGRGDEPRFLGEIDNTPAATAKLVRKLAGKYERLTFCYEAGPTGYGLHRQVKSLGHECIVAAPSLIPKKPGDRVKTNRRDAVGLAKLLRSGDLTAVWVPDRRHEAMRDLTRARETAMLDLRAKRQQISAFLLRQGLHYPEDKRTWSKSHLNWLASQKFDIAEHRIVFEELMEAMRQAQGRLDRLEAAIRAAVPDWSLGKLVIALMAMRGLDMISASTIVAEVGDLSRFRTPRELMAYFGIVPSENSTGDKVKRSPITKTGNRRVRRMLVECAWSYQFPPRLSKDKQVKVDAVPQAVREIAWKAQSRLNQRYRALLRRGKLKNVAITAVAREFVGFIWAVAQAVGAAPAANNRTAPAPAAAR

SEQ ID NO: 298692 - protein, 346 aa, unidentified
MMIIGCDFHPSFQQIAVFDTETGEITEHKLVNGNGEAERFYRSLPVPSLIGIEACGNSHWFIDLLGRLGHQVWVGDAAKIRASYVRKQKTDRRDAGHILTLLLEKRFPKLWTPSRQERDQRQLLIHRHKLVQIRTRIKNSLQHLALNQGVQKKQKLWSKAGQKVLIQLPLEGWTAVRRQDCRELLAQLDERIARLDKAAELAAEAHPQASLLLQQKGVGPITALAFALTIGDVSRFPHSNQVASYLGLIPSEHTSSSKRRLGSITKQGNSFVRMLLVEAAQSVTRFDPQFHKHYVHLCRNKPKAVAKVAAARKLAVRLYWVLRTDQNSQKAVPIESSPRVPLVGAS

SEQ ID NO: 298693 - protein, 316 aa, unidentified
MTTTPVFVGIDVSKDRLDVALRPTSDRWALANDAPGLAGLVARLQGLAPTLIVLEATGGLAVPLTGALAAAGLPVVVVNPRQVRDFAKATGKLAKTDALDAAVLAQFAEAVRPALRPLPDAATQALSALLARRRQLIEMLTAEKNRLGSALPPVRPGIRAHISWLDRRLVDLDADLAQAIRESPVWREKDDLLQSAPGVGPVLATTLLASLPELGTLTRQQIAALVGVAPLNRDSGAWRGKRRVWGGRAHVRAALYMSALVATRFNPALRAFYQRLCAAGKAKKVALTACMRKLLTILNAMLKSRTRWHDHFALSA

SEQ ID NO: 298694 - protein, 338 aa, unidentified
MKLYGAIDLHSNNNVTVLIDEQDQVVYQKRLPNDLPLIAQQLSGYRDRLQGIVVESTYNWYWLVDGLMDQGHRVHLANTAAIQQYEGLKYTDDHSDARWLAHILRLGVLPQGYIYPKEERAVRDLLRKRGQMVRQRTANLLSIQNLITRNTGSSIRSNRIKTLDAEQVDDLLPNSDLALAVKANLAMIQCADGQIDILERTVTDRIKLRAAFGFLKTVPGIGQILALTIMLETGEIKRFPTVGDYASYCRCVGSQKLSNGKKKGSGNTKNGNKYLAWAFVEAANFAIRYNARIKSFYQRKKAKSHGVLAIKAVAHKLCRACYYIVKDQVPFDIAKAFA

SEQ ID NO: 298695 - protein, 400 aa, unidentified
MLSIGIDVSKGKSTVCGMKPGGEIVYTPFEVQHTREGMSELVSLLRSSGEEVRAVLESTGSYHCPVVAALLENGIFVSVVNSLRMKRFCSQSIRKVKTDRIDAMQIALYGLAYWQELQPARLPEDTYRELQLLARQYYQMTSMLIKAKVDFNAICDQVLPGMQELMNDHAGRHKLSDFVLRYHHTTHILEMGETRFRKDYCKWAEKKGYRNCERMAALIFATAQNGIPVLPNAPSTQIVITEAIRVLHTVEASRDAILTQMQALAKTLPEYSLVREMPCIGDTLAPRLIAEIGDVRRFHSKRALIAYAGIDAPPYQSGKFCANNRHISKRGNRYLRKTGYEVMQSYVMHKPANDPIFTFIEKKRGEGKSGKLAMVAGLNKFLRVYYGKVTELYRSLPAIE

SEQ ID NO: 298696 - protein, 342 aa, unidentified
MVQAVTVGLDIAKNVFHAYGVDAQGEKAFSRKLRRAKVEAFFAKLEPCLIGIEACATAHHWARTFENMGHQVRLMPPVYVKPYVKTQKNDEADAEAICEAVTRPNMRFAEIKTIEQQSVLVLHRTRALLIKHRTRMANTIRAHLAEFGITESIGREGLYRLIDMIVVGEDDRITGVTRRAMMCLVEQYRLLQDQILDLDRQVLAWHRSSEASKRLATIPGIGPLAASALVASVGDASSFKNGRSFAAFIGLVPRQSSSGGKERLGKISKHGDHYLRWLLVVGGLAVIRYAQRHGTRRPWLVKLLQRRTAKIAAVAMANKMARIAWVLMTRGGEYREPVAQAV

SEQ ID NO: 298697 - protein, 341 aa, unidentified
MEYCGIDLHAEYSQICILEEDGEVMETSRLRTSRKALERFFRREPMRVVLEAGGSSPWVARLLASLGHEVVVCSPRRVRLIAESKLKNDKVDAEVLARLVRLDPEFLKPIQHRSEEAQLLRGNLKVRSAMVEARTKWINTTRGLLRSFGYKVSGKAPRTFVDRVDQMKLPGELRAVIDPLLEQLDLLTGEIDRRNEHLEEMVKDLPEVEHLRQIPGVGPVVATYFVLTIDDPNRFRHSRDVASFFGLRPSMRESASVSHFGRITKEGDPEMRRLLVQAAHACLLTKADSELKTWALALAERKGKGKAVVALARKLAVLMHHLWVTGEVYQASPNKEANQAA

SEQ ID NO: 298698 - protein, 321 aa, unidentified
MQVIGNDMAKATFDVALPLPEGKYRTKAKFPNTPKGHAEFLAWRATHAPDAAVGMEATGIYHEALARALVEAGVVVYVANPARVKAFGQAEGVRTKTDRSDAKLIARFFEAQRPEKLHPYVPPTSSEVKLRALVRRRDDLQEMLQMEQNRLEVADISVQQGINDVIRTLEEQIKRVRKAIQDHIDNDPDLRGRHQLLTSIPGVGDTSSAQLLAFLGDLNKYSDVRQVVAHAGLNPAQRQSGNYEGKARISRVGDANFRKKLYMPALTGKTYNPTLKAFAERLSEKGKPFKVIMCALMRKLIHLVWGVLKSGRPFEPEVVLA

SEQ ID NO: 298699 - protein, 340 aa, unidentified
MEARMIGLDLAKNVFQAHGADAAGAVVVRKRLQRSKVLAFFTSQPACQVAMEACAGAHYWGREIGKLGHTVRLIPPAYVKPFLKRQKNDIADAEAICEAAQRPTMRFVAVKNEEQQSSAVGFRARDLLVRQRTQTINALRGHLAEYGLIIAQGPSHITKLIAHVEDPQSSLPQAARLALAILAETLRSMEHSIKRLDVEIARRAREDGSARRLATIPGIGPITATALVALSPAAASFKRGRDFAAWLGLTPLQRSTGGKQKLGATSKMGERTLRRLLIIGASAVTRQARRRGAPQGSWLARMFARKPPMLVIVALANKMARIVWALLAKGGVYQAPAVVA

SEQ ID NO: 298700 - protein, 356 aa, unidentified
MLYLGIDQHARQITISLRDDSGDVLQARQVSTRPEKINEFFQRLTRERLRNGEQFIAVVEVCGFNDWLIRLLKDYRCHKVILIQPEERKKRKTDRRDAAALSELLWVNRDRFLAGKPVRGLRQVDIASPTDQENRRLTTLRKDASQARTRIINKIKHMLRRFNLQWNMPTKTFPTQRAIAWLKQLVLPEIDRLEMNYLLVDLEGAQQRVQELEKVIAERCGHSEDAQLLRSIPGVSYFTATSLACRVGRVERFPRARSLANYWGLTPGCRNSGENNQRLGRITKAGSNMARWLLAQVTHQALRKDARLREWYKRIKRRRGSTVARVAVMRKLSTVIWHMLSKRQTYAECRAIAAAC

SEQ ID NO: 298701 - protein, 323 aa, unidentified
MSQPNLQCMGIDVAKLSLDIATTDTIEPFTVGNDEDGFAVITDKLKHTKINLILMEATGGLEAAIACKLQSEGYDVVVINPRQARDFARSMGYLAKTDKLDAAMLAQLALVIDRHPDRSRYIRHLPDEARAVLAAMVVRRRQLNHMLVAERNRLYPSHPQSRKSIDNIIDALQNELDRINEQMKQHMTAFFQEQARLIGSVKGVGDITVASLIAELPEQGKLNRREISALTGVAPLNRDSGKMRGKQTTFGGRAGVRATLNMAALVATQFNPAIKLFYQRLLAAGKPKKLALVACMRKLITILNTMLRKGEEWNASFQSQVIS

SEQ ID NO: 298702 - protein, 457 aa, unidentified
MSKAKRPSRKREMSPVHAHAAAVDIGATLNVAAVGPDRDPEPVRSFGTFTADLHRMADWFERCGIRTVAMESTGVYWIPAYEVLEQRGFAVVLVNARDAKHVPGRKTDVSDAQWLQRLHEYGLLRASFRPDAGIAALRDYLRQRERLLDYAASHIQHMQKALTQMNLQLHHVVTDITGTTGLRIIRAIVAGERDPAALAALRDYRCKASEETVRQALVGNDREEHVFALAQALELYDTYQAKVAACDARIEAALNRLQADCPVPATPLPTPRYQTQTHNALAFPAREALHRILGVDLTQTHGLGPYLALKLVGECGTSLAAWPSAKHFTSWLCLAPSNKISGGKVLSSKTRRSNNRAAALLRLAAVAVGRTETALGAFYRRLSGRVGKAKAVTATARKIAVLFYNTLRHGTAYTDPGASYYEERYRQRVLANLRRRAKSLGYVLQTTDPTPPVAAVS

SEQ ID NO: 298703 - protein, 449 aa, unidentified
MMAPEEIQDEEYEQVLERVAAVDVAKGSGMVCTRVPHPSRPGKRQTRVWQVDADTGSVMELAGHLAGERIGKVTLESTSDYWRIWFYVLEARGLDVQLVNARDVANVPGRPKSDKLDCVWQAKLTERGMLRPSFVPPAEIRRLRDYTRLRTDLTRERTRHWSRLEKLLEDALIKVTSVASKIGTLSVRDMLEALIAGERDPEVLAGLARGKMRAKHDRLVEALTGRFDDHHGELARVLLDQIDSLTAHIDKITGRVGELISAMPGAWGVDADGVTGPGAGLGAGAPVLPAVARLDEITGIGAPAAQVVIAEIGLDMGVFPTPGHLVSWAKLSPRTIQCGAKSQSGRTGKGNPYLKGVLGEAAAAAGRTDTFLGERYRRIARRRGKLRALVAVARSILVIAWHLLADPAARFRELGAGYYASRIDKNRKTRSHVRQLEALGYTVTLAQAA

SEQ ID NO: 298704 - protein, 351 aa, unidentified
MDSTKYIGMDVHKETISIAVLNSSGKLVMETIIETKASTVLEFVQGLRGSLHVTFEEGTWAAWLYDLLKPHVTEVLVCDPRKNALLKTGNKSDRIDARKLAELLYLNKLKPVYHGEHGVRTLKELSRSYLTISGDLARVMTRLKALYRSWAIACAGKQVYAPRYRSQWLGKISEAGVRRRAEFYYQPLDALRALRQQVRRELLAESGKHKASKLLCQIPSIGPIRAALLIAILQTPDRFRTKRQLWAYGGLAIETHSSADHRYVEGQLRPSKRPVSLRGLNRNHNHELKNIFKGAAIIAATKAGPFQEFYAALVAKGIRPEMARLTLARKIAAIALIVWKKGATAAPLGWL

SEQ ID NO: 298705 - protein, 421 aa, unidentified
MQVLYERCAAVDVGKDVIAVAVRLPGDGPDGRATDKRTFKTFYGVLREAARWLSSLGVTHVAMEATGIYSMPVYHALIEHGNFAQVLVCNAGHVKNVPGRKTDLADAEWLVHLLECGLLRGSFIPPADIKAARDVIRYRAKIVQSRTSELQRLGNVLQDAGIKIDSVASSIATKSGRAMIEALIDGERRPRVLADLALGKMRAKIPDLTLALEGRFGDHHALMCRLHLDHISHLDEMIAKLDAQIEAMMLPFRAQRDLLTTIPGIGPLTAAAVLSEIGASVTEYFPDAAHLASWAGLCPGNHESAGKRHSGKRRHGNQHLQPILVEAAWAAVRHQGYLKALYHRHVMKWGGYRSPTAKKKAIIVVAHAILVIIWHVMATGRPYDELGTDFFTRRMDPERETRRLIAKLEALGHQVSLQPAA

SEQ ID NO: 298706 - protein, 356 aa, unidentified
MQTQVTKKIDFTSKNLFVGLDVHKKSWSVTIIVDGMEHRTFTQPPDPEALQKYLQRSFPGGNYHSAYEAGYCGYGIHRRLNGLGIKNMVINAADIPSTQKEKLHKRDPVDSRKLARGLETNTLHGIHVLDRDLEELRSLNRTRFYLMRDLRRSKNRIKSFLLYYDIPLPGEFDNNQWTLKFIAWLKQVKLQTPAGQNAFSHLITSYEHHRQQLLILSRLVRLRISQHDKELYDLLKTTSGIGPLTSSALITEIGDINRFSNIDDLASYVGLVPRVRESGETTHTGGITFRCNNFLRVLLVEASWQAIRHDPALMQYYHHHLVNTKGHKVIIKVARKLLNRIRYVMKNRKPYVTGVA

SEQ ID NO: 298707 - protein, 369 aa, unidentified
MTTSQNSKPEIWIGLDTGVASTALCAIDGDSKVLIQQELPTKAAKIRDLLVEHFPDGVSSIGMEACSTSLQVVKGLRAFGYNANAYDTFAVRRFLELRKNKTDKNDARGIAEVARLGRGFLVEVHIKSNECYATRSKLVARHNMVRQRVSTELMIKSMLRVYGTRIKERTHNASRFRFHVERAIDEVRAETGHDLTQHMKPLLELSLKLRTEIVNLESELHEFAMSNDLCRRFTEIPGVSSITAVSFFTAIEEPTRFRRSTDVAAYLGLTPKIFESGDSKRNGGITKAGNPMTRVHLVSAATVMLAVAKKHDTALRRWGLDRAEAIGFSKARVAVARKLAVIMLNMWRTGRSYEAFPEVRDPEPLPVAA

SEQ ID NO: 298708 - protein, 307 aa, unidentified
MAIVILGIDLGKNICSLVGVGEDGSVILRRRMRRQTVLTFAAKLPSCVVAMEACCGAHHLGRLLTAQGHTVKLMSPEYVRPYVKAQKNDDRDAEGIAEAASRPTMRFVDLKSQEQLDLQSLHRVRSRLVGVRRTLLNQLRAILLERGHIFPQGRRRFEAAIDTLVADPAYEISSRIRQLVIDIRSEWQALDSRIEALNGEFVAIARHDETARRLVTIPGVGVLNATALVAAVGDGAAFRRGRDLGAWLGLVPKHTTGGKPKLLGISKRGNKYLRMLFIRKREPISVLDVCGSWLRRSSVATEFVDGH

SEQ ID NO: 298709 - protein, 428 aa, unidentified
MVEKEHNRIKEFRQLKKEIRGSEDYLIIGIDVAKEKHHAFFGTATGKTLLKRLVFENDFVGFEKLHAHMEAIKVKHSLNKVVFGLEPTANYHKPLAEYLIKCGHPVVLVSGVAVTKNRELLDGRWDKNDDKDSANIADLISQGKCLYYDYPSMPLRDLKDLLSIKRRLKKLEHGTRVRIRNHLIAQYFPEFDRYFGKGCSESLSIVKWCLNPSKIADMEYDEFVDLVMPRVKTIGQEKRLKTIWDLALESIGCKAGDALGFEAKLMVEDLQQIKASMGAVEDQIEDICLQFPEYSYLLTIPGFGPDVSSKVLGAIGNPFRFDNGKQVLKLAGYDLGANRSGKTSDRAVPVISKRGSAYLRYALYQAAFIASTRNRHFIIYYTNKLRGREKEKGIKTKMKVKMAAKMLIIAWTLMKKKEPFDPKFLNVD

SEQ ID NO: 298710 - protein, 355 aa, unidentified
MEMIGLDLHKRESQLCIKGEDGTVTERRIVTSRERFTAVLGSRPRARILLEATTESEWVAQHLETLGHEVIVADPNYAPMYANRSRRTKTDKRDARTLLEACETGAYRRAHRVSEARRHVRAELMVREALVRTRTRYVTVAKTLVRRDGLRVPGSSSEVVAERIAALPLGDVLTGELTPLFSILGPLNDEIAAADERLTAVMHADPIVRLLATAPGVGAVTASAFVATVDDITRFRGAHDLEAYLGVVPGERSSGEKRRLGRITKAGNTRVRWLLVEAGWRILRSKAPETAALRAWVLPIATRRGKAIAVVALARRLAGILFAMWRDGVAYDARQIRMRRPVVRQPVREVTQRAG

SEQ ID NO: 298711 - protein, 351 aa, unidentified
MENRITVGMDMGDKNHSICVLDAEGEVRERTTLANTAVAIQKYFGALPPCRIALEAGTHSGWISRLLDGLKHEVLVGNPRKLRVIWDSDDKNDARDAEMLARIARFDPQLLHPIHHRGQAAHTDLAVIKARDMLVKARSMLIAHARGTVKTLGQRISPCSAEAFHARLLDEMPAELRSALEPVMKSIEDLSVRIRHYDQLLGKLCTQDYPETEGLRAISGVGPVTALAYVLTIEERSRFAKSRDVGPFLGLVPKRDQSGQTDKQLHITKAGDSYLRRLLVGSAQYILGPFGPDCDLRRFGLKLAERGGKNAKRRAVVAVARKLAVMMHHLWTSGEAYDPCYRQTKKQGKAA

SEQ ID NO: 298712 - protein, 342 aa, unidentified
MEYYAGIDVSLECSSVCVMDGSGKFVREAKVASEPEVLIGWFGSLGLSLERIGLEAGPLSQWLYAAMREAGLAVELLETRHVRDAFRAMPVKSDRNDARGIAQLMRLGWFRPVHCKSMDAQEVRAVLTARKLVQTKLLDVENSLRGILRGFGLKVGKTTPRSFAGRIQELVDGQPNLEAIGEALLSVRAVLQREFNAFERRVRAMARLNARTRLLMSTPAVGPIVALTYAAAIDDPARFKSSKQAGSHFGLTPKKYQSGETDRSGRISKIGDASVREALYQAAHVMLTKPVKDCSELKGWAMRIARRAGMNKAKVALARKLAVILHRMLANGTPFNPAAAAA

SEQ ID NO: 298713 - protein, 335 aa, unidentified
MKKYLFYVGIDISKLKLDVVLIHGESSGSSEHFIVENTQKGVKEIVSHLLKKKIDVSQTLFCFENTGVYTYPLSYYFSQKGFDYWIVPAIEIKRSKGISRGKNDKTDAKDIAMYSVRNIDKLRLSSMTEMEIQQLKLLFTEREKVMKSIHLFESSKENIGFTSKEVYKMVNSINSKTINHLKKTLKELEAKMKEIIKSHTVLNQQFKLIQSVPGVGQQTAIYFLISTKGFNAFDSARKFSCYAGVAPFEYSSGSSIKGRTKVNHLADKKIKSLLQMCALSAIKYDPQLKEYYNKKKEEGKNKMLVLNNIRCKIIGRIFAVINRQTPYINTYKFAC

SEQ ID NO: 298714 - protein, 311 aa, unidentified
MNNTIGIDISKDTLDAHRLADGQHKQFLNGKTGHAQLVKWIGKQSDPLIIFEATGAYHRQLERVLGTHIIPFVKVNPKQARRFAQASGKLAKTDRVDCEMLAKMGAALQLMPKPFTAENLYDLKELLSARRALIKDRTAAKARKATVINALIKQQLEKRLRQIKNDIAKIDALMLDVAREDQYMSERLDILFSIPGIGVITALMILVDMPEIGALNNKQVASLAGLAPMSQSSGKWMGKARIQGGRPNLRNAIFMPALVAIRHNADLKTKYDRLVTAGKEKKVAITAVMRKLLVLANALLRDNRKWAEKAA

SEQ ID NO: 298715 - protein, 322 aa, unidentified
MPMFSYCGIDVSKDRLDVVVLPDEECFSVRNDSAGWAELIERLRGFSIAAIGIEASGGYERGVMRALLAAGMAVRQVNPFRLRQFARASGVLAKNDPIDARMITSFVAIMPTRPAQRHAPAVERLAEMLAIRRQLSAEKVAAENASRLLENPMLQRLSRRRIARLTADIDMLDKHLVEIVASDAALGHRYQLLTSMPGVGSLLACTLIALLPELGSMSRKQVAALVGVAPYAFESGTLKGRRCIRGGRAPVRHVLYMAAMSASNWNPVLKVFHARLKGAGKLPKVAIVAVMRKMITALNAMVRDDVIWADRHRGRHPVPTAR

SEQ ID NO: 298716 - protein, 345 aa, unidentified
MPIVGGLDIHRKQITFDYLDTVTGQVCRGQVSPADRAHLRAWLARFAGCDDVAFAVEGCTGWRYVAEELAAAGVTAHLAEPADTASARGRKRHAKTDKTDCRHLRMLLAEGRLPECWIPPGHILECRALLETYHDLRAEHTAWVQRIHAVLFHHGAPALGAGTLRTGQGLAALQAAAASCLSPAGQLQVATALEVLEALEARMHVVRHQLLDAARHLAGAKILAERLYGVGPFAALAITCWLGGKDRFSSSRQVVRFAGLDVTVWSSDRKGPPGRLSRQGPPVLRWAVYEAGKTHARASAPDYAYYAQVKGRCNGKRAALSEARKILRQAHHILAELGDDALSAA

SEQ ID NO: 298717 - protein, 450 aa, unidentified
MAKRKQTEAVFPHAAGIDVGGSCHFVAVPAQEDEQPVREFGPMTDDLHAMADWLLSCGVDTVALESTGVYWIPVFEVLEQRGLTVWLVDARQLKYVPGRKSDVQDCQWLQKLMSFGLLRAAWRPAADVCVVRAVMRQRDTLLTEQTSWVQRMQKALVQMNIQLTEVLSDIMGASGQAIVRAIVDGERNPQVLAKLRHRSIKASGEAVIKALTGNWRDEHLFVLGQALAMYDDIGRHLAECDAKLNTLLTDRRRGHVDIGHAPRAGTLAGQAYDLRQALADWAGVDLTRINGLGVTAALKLLAEIGPDLSRFASVKHFCSWLGLCPGTKISGGKVLTAATKRSANRARQILKMAAMALSRSQSALGAFYRRLCTRMDKPRANTAVAHKLARMVYFMLTRGEAYVDKGQQHYEDQQRQRSIAALRRRAAALGYQINQISVVVPESCTNGSVS

SEQ ID NO: 298718 - protein, 323 aa, unidentified
MSPVVGVDIAKQSFDVATLLPNGKYRTRAKLTNKAEGFETLKAWLTLHAEPAAWVLMEATGVYHEALAEYLHAQGYRVCVINPARIASYAKSQLQRVKTDKTDAKLIALYGHRHVDQLRGWTPEPPSLRRLRALVRRLADLKEIAQMERNRLEVAESGVQASIRTVIALVEQQIAETLKALKDHIDDDPDLRTQRDLLVSINGISDKTAALLLAELGDPLRFTDANAVVAFAGLNPRLQDSGTYKGYVRISRMGSAALRTGLYMPALAAMIHNPAVSALKKRLQEKGKAGKQIVCAAMRKLLVIAYGVLKSGKPFEAKLALAR

SEQ ID NO: 298719 - protein, 418 aa, unidentified
MLKIAYPICCGIDVHKKFVVASVGITNKFGVTEYQTRQFSTFMQDLHKLLSWLKSLNCINVCMESTGKYWHPVFNVLESDCNVVIANPKYVKGIRGKKTDKKDSIWLCDLHKHGLVPSSFIPPLLTRQIRDLMRYRVKLTSFRSSEKNRIQNSLTVSNIMISSVVSDTFGVSSMKIINHILQNPDDKDFDVSSMLHKSMRDKADTIRKSIDGNLTKPQADKMRICFNHFDNVDKHIEDIEKVVLDLAKPYLPQINIIMSLPSIKDIFTAIAIIGEIGTDMSVFHSSKHLCSWAGLTPQNNESAGKKKSVRISRAGVYLKPLLVQCANAAIKSKKVCFFKIRYEQIKKRRGHKKAIIAIAHMLLNCIYYMLLWNENFNPDLFKIDSKPTQTYSPKITEEMAIKYLQTLGYQLQSIPMKT

SEQ ID NO: 298720 - protein, 378 aa, unidentified
MRMTTDQARVTAGVDAHADTHEAAALDDRGRLLGTRTFRTGSEGYRELLAWLEQFGELVVVGVESTGSYAAGLVRFLHAHGVDVVEVNRPHAHTRRRRGKSDPIDAEMAARQALSGDASAIPKTTTGIVESIRQLRVARDGAVKARSAALCQLSDVIVTAPDGLRERLSQRKRTRAKARLCLGLRPRTTHLGEPAEAAKLALRSLARRIQNLDEEIAALDKHLGTLVATAAPRTTKLLGISTGHAGQLLVTAGQNIERLRSDGAFAALCGASPVPVSSGRRSRHRLNPGGDRDANRTLHMIAVVRLRYCQRTRAYAQRRSTEGKTKREIIRCLKRYIARETYRTLCADLHDLQQPPRPAAAVTIMCGAGPIGRTRRRT

SEQ ID NO: 298721 - protein, 344 aa, unidentified
MTLVGCDLHTRKQQVAALDTETGETHERQLVHEGSAVEEFYAALPRPVTVGIESTGYAIWFHALMHRLGHTVRVGDAAKIRAMVVRKTKTDQRDARHLLDLLRHDRFPTVWVPDPATRDLRALLTHRRRLVRIQTMLKNGLHAIALNERLVCGSKLLRHAGLAQLQALPLPPYTAQRRDHSLELLELLHTKIQQLDGAIATATLAHPDAPRLLTHPGVGPLTALATVVVLGPVTRFADAKHVVSYVGLAPSLNASADKYRLGHITKQGSSLLRWVLGQAAPHAARLDAALNRTYGTLRHRRGRAKARVAVTRKLLVRLFIMLRDQIDYAEFRRRGRPPAPVAAG

SEQ ID NO: 298722 - protein, 365 aa, unidentified
MIVVGADTHKDSHTLAAVDAAVGRVLADVTVRARRRSFEDLLVWARELSGERVWAIEDCRHVSGALERFLLARGERVVRVAPKLMAGARTSARERGKSDRIDAVTIARAALREGLEKLPSAQLAGPELDVRLLVDHRERLVAQRTALINDLRWGLHDLWPEFEVPLRALIHARWQERVGGRLTRAEQSARVRIARDELRRIRELTRSIDALERELAGLVAALAPQLLAERGCGVLTAAKLIGEIAGVSRFATDAKLARTAASAPIPASSGRTHRHRLDRGGNRQLNCALHRLAVSKGRLDPETAAYLDRKQAEGKTRREALRCLKRHLARRIWKLLQPPADPNHNTPTKPITIHCNTPTGSLALT

SEQ ID NO: 298723 - protein, 364 aa, unidentified
MARKDSRLQHGIRRDSGDRRDRHPHDLHQAAVIDSIGRHLATEAFETTPEGYQRLTDWLNAHGEVMAVGIEGTGAYGAELARFLTARGITVIEVDRPDRRARRAKGKSDSVDAYAAATAVLSGRATGTPKSRDGIVEAIRALRAVRKSAVKARTQTMNQLRSLIVTAPSIVRDKLRALPTSVLVDTLARSRPTGELHDPACAARTALRRLARRYLQLSDEIKEADAEIGPLVTNAAPRLVALPGVGPETAGQLLETAGDNPDRLASEAAFAHLCAAAPVSASSGRTDRHRLNRAGDRHANAALHTIVIVRMKCDPRTREYVARRTAQGLTKKDIIRCLKRFVAREIYHHLPRVTHATEPHPQTA

SEQ ID NO: 298724 - protein, 339 aa, unidentified
MHVTTIGLDLAKNVFQVHGITLDDEVAFNRPLRRAQLLPFFSKLNPCLIGMEACSSAHHWARELTNFGHDVRLIPPIYVKPYVKRGKSDAIDAEAICEAVTRPTMRFVAIKTVEQQSLLSVHRARSLLVRQRTQLINGLRGMVAEFGVYIARGLARVIGFAENILTGEVLELPDIANEVIHNMCEHLMALHARVHWYEDRLKQVAKEDAQVRLLRTIPGVGAVTASAIIASIGDGHQFSNGREFAAWLGLTPANKSSGGKEKLGRITKMGDQYLRSLLVVGMTSLVRQTKSHPERASKWLTSLLERKPARVATVAMANKTARIVWAVLTRNEPYTPHTA

SEQ ID NO: 298725 - protein, 412 aa, unidentified
MRRVVGMDIHRTFGEVVIWENGVLRHAGRVDMTRSALEGLGNRLAATDEVVIEATGNSMAVSRVLSRFVARVIIANPLQVKAIAHAHVKTDKIDAGTLASLHAAGYLPEIWTPDVATERKRRLVARRYQVVRHRTRLKNEVHAILHAHLIPKCPHADLFNARGRIWLGRQPLPDDERSAIDRHVRELDRLAEDLDILDREIAQGAVDDLTIKRLITITGVNLTVAASIMAAIGDIGRFKSPGKLVSYFGLNPRVRQSGLGAAHHGRISKIGRSHARAMLVEAAWAAAKTAGPLHAFFVRIRARRGHQIAAVAVARKLAVLCWHLLTKDEDYLWARPALVANKTRAIELQAGKPQRKGNQRGAAYAYNVKKLRDQEMQIAEQAERNYTRFVARWKTRSPQDGVRERLNPARQE

SEQ ID NO: 298726 - protein, 399 aa, unidentified
MFVGIDWANESHDICVVDPAGKIRGRATIAHSQEGFDELTKHLGRWAEQGEILVGIERPEGRLVDRILEAGHPIVLIPTFAMKDLRRRYAVGGAKSDPGDAYVIADVTRTDGHRLRHLEPLSEETRALRSVVRARGDLVDQRVALGNQLRACLQAYWPGAAVIFADVCSEIALAFLERYPTPDAAARLGEVRLASFLKKAGYSGRRSAIELLERLRSAPEGIGGVEAEARADSVRAMLRVMRSLNRSIKDLDRAVVAHLGEHPDAEVFTSLPRSGRINAAQMLAEWGDCREAYPCPDAVSMLGGLCPVTHASGKHRDVAFRWACNKRLREAITTFADNSRHASPWAADIYRRAVGRGCDHPHAVRILARAWVRVIWRCWQDRRPYDPALHGAAVLLEAA

SEQ ID NO: 298727 - protein, 346 aa, unidentified
MRIIGCDLHARQQTISMLDTESGEVIEKTLAHEGETVREFYAALPKPVLVGLEATGSMFWFLRLLEELGIEYRVGHPAAIRKAETRKQKHDRRDAGLIRRLLVEKRFPQIWLPTPEQRDLRTLLQHRQQLVRMRVMTQNGLQGLALSQGLRRGAKLWSQAGQQALNSLSLADYSHTRRQQLQELRQELNQRLQQLDQAVREQAEQRAGARRLLSHPGVGPITALATEVFLGDAQRFPNAKAVASYAGMIPSEHSSAGKQRNGSISKQGNPLLRQLWVEAARAAARKDARLKQFYRKKLVQKGLGKAVVATARKLGIRLWIMLRDQIDYTEFCRRAEPRCPHAGMPE

SEQ ID NO: 298728 - protein, 409 aa, unidentified
MRYYLGVDWADQTHAVWVVDERGTKLTARTVPHTAEGLSEWGRELDEWRAQGLELWAAIERPDGRVVDFLLDHGVVVYPVNPKALDRARDRFRQSGAKSDPFDARVLAEFLRTDHAHLRALQPSSEAAQELKLLPEDCQRQVRQQTRLVNQLTATLKAYYPRALEVAELTTALAREFLQAYPTPAAVAGLTERQWPRWARAHRLSEARTQELWAVLQRPQLPVPAHVVRAKARLMQTLLTQLGPVVAAVGEYRQAVEDFFAAMPAAQWIRTLPIGDHGVTAPTLWARLGDAPGRWESFQHLQAQAGTVPVTVRSGKQRVVHFRFACDKMLRYVVDQVAFLSLRSSEWARAYYDEQRARGHSHHEALRALGAKWVKIIFVLWERQVPYDEQYHLATMARQQLRQRPRKIA

SEQ ID NO: 298729 - protein, 352 aa, unidentified
MKEDIKYAGIDLHQSTSLVAVHDGHGKAISESILKTEAETLRSFFRGLSGTIHIAFEVGTQSAWLYEILKPVVTSITVCDVRKHKRRGNKSDRIDAHKLATWLRMGELTAVYQGDRNIRKLRDLAHGYLATVSDSTRVMNRIKALYRSWSIPCGGRDVYYIRNRQEWLSKFPIQESRMRAGVYYAQLDLLKEQRRETKKAFLKEARRYPIEKILRGIPGFGPIRSAFAIAVIGTPHRFRTRRQLWSYSGLSVVIHSTSDHEIIRDQIIRKQHKHSTRGLTPDYNRILKMVFKGAATEAIRKDPMETFYRIKLAKGIRPEMAVLSIARKLAAIALILWKRGEKFNTAKLISSN

SEQ ID NO: 298730 - protein, 336 aa, unidentified
MSQNYLGIDVHKKWCVFTQIDSTGKVMRQSRFRNTLEEVSTFASSLNSKINLVLEPVLNYLWLLDQFEPYVGSVHVATPFKVRVIAESKSKTDKYDSRMLAELLRTNFLPESWVPPSDIRLLRGLIRQRYHLVKSMVMNKNRIRHLLFQYGIDLKVFNIASPKARLEIQHLCLPDITRQTIEQCLKVIALLDDQIKEISQRIWECVKDNSMVELLQTIPGIGKLRSAVIYAEVGDVTRFHSAKALASYTGLTPIVRSSGDSVWTGGITHLGSRPLRHVLVEASIDAVRKSPELNRMFCRILYRSNVQKARVAIARKLAVIIYAMLNRNEPFRAETA

SEQ ID NO: 298731 - protein, 394 aa, unidentified
MSVVQFTQVLLRGCGMDIHKKVVVATVQGEGICKETRSFDTFTRSLTQLREWLVSLGITHVAMESTGVYWKPIYNVFEGFIPHIWIVNARHIKNVPGHKTDKNDSEWICQLLMAGLLKPSFIPPKAQRELRDLTRYRRKLIQFVSANKNRIIRILEDGNIKLSSVLRDTSGATAVKLIDMLCDGKQITLSDIESVCHGRCQHTKEEMLEACTGCLDEHKVYMLGKIRECNASLKEDILDFDKRIKDVLSSYHDAIERMCEIPGIQNCVCEDLVAEIGLDMSNFPTSAHLCSWAGMCPGNNESAGKKKSGRTNHGDKQVKETLVEAAWAASRAKGTFFMERFNRLAPRKGSKKALIAVGHSYSNAFIMCFQQVDVTKNWVTTMYPIRKSRSVRSI

SEQ ID NO: 298732 - protein, 361 aa, unidentified
MAKSSVSSLQQFVSGFESQPFWLGIDVHKQSYSFALRRDDQRCFTWKGPADPKAVASQIARLGITLAVAAYESGPTGFGLARTLEEANIPVIVAAPSRIPRSVTAGAKCDRLDCIRLADYAAKGMLKPIAIPTPEEESKRTLLRRRHNLVDAVRRVKQRIKSQLLFLGLPEPDAVKHWSNEAADALLRLSVDQATRMTMESYLRELTFQQSELRTVERQLQQLLMETKEEHRRVVNLRTVPGIGPTVAATFALELYRPQRFQRAEEVASYLGLAPMVRHSGGKTPAGRLMPVGQKRLRSLLIEAAWMWKAKDTSASELYNRLLGRTGLAQKAITALARRLAIILWRIAVEQRPYRVVATAP

SEQ ID NO: 298733 - protein, 447 aa, unidentified
MPGSSPSRRRRARLKVVNPRSAGIDIGSRFHVVAIPTELDDEPVRKFSSFTSDLKSMARWLLAIGITTVAMESTGIYWVPLYEILVGHGIEVFLVNARHAKNVPGRKTDISDAQWLQQLHSYGLVRASFQPEPCIAKLRAYFRQRDILVRYRSSHQQHIQKALMQMNLQLHHVVRDITGLTARRIIDAILAGERDPERLATLRDRRCKETEATIAAALDGNYQEEHLFELKVAVEMFDAYSVKIQECELAGQSVLKELAGDDYVEPEKQASDRRIRGNGFSFNPQALITSVAGHDLLSLPGLGPATVITLISECGLDMTRWPSAKHFVSWLGLSPQNKISGGRVLSSRTRQGTTRAGSAFWMAAVPISRTSTALGAFQRRLSARVGKSKALIATARKIAILYYKTIRYGMEFQEPGALAYQQASQERQMRGLERRARALGYQLVATG

SEQ ID NO: 298734 - protein, 335 aa, unidentified
MQSELSVVGIDLAKSIFHLVGTDERGTIILRKRLARGEVLSLMAQLPRVLVGMEACGGAHDWAWHLREQGHEVKLMAPQYVKPYVQTNTNDLRDAAAIAEAVTRPSMRFVPIKNVAQQDLQALHRVRERLMGARTALVNDMRGLLAEYGIVLPTGVNAFRHAWAAKLEAEHAQLTPLSQELFGKLWAECKQVEAEGAYDDEKLQALATTHPESPRLWSMPGIGPLTATALIAAVGEVGGFTNGRQFAAWLGLVPKQHSTGGQTRLLGIRKRGDRYLRKLLIHGARATRRWARTKTESRSRWIRGVLERRGWNRTAVAVAHKHARIVWALLSRGGV

SEQ ID NO: 298735 - protein, 409 aa, unidentified
MEVVYERCCGVDVHKRFITACLIVPGPSGKPTKEVQTFRTMTGDLERFRDWLLAAGCTHVAMESTGVYWKPIYNLLEEHLTVIVANAQHIKQVPGRKTDVRDCEWIADLLRHGLLQGSFIPDRTQRELRELTRYRSSLIQERAAEVNRLQKVLEGATIKLAAVTRDMTGVSCREMLAELVAGSRDADAMANLARGKLRAKIPELREALIGRMQPHQQFLIAEQLAHIDTLDEAIERVSKEIEQRTRPFAEVIALLDTIPGVAQRTAEVLVAEIGTEMSRFPTAAHLASWAGLAPGNNESGGKRRSGKTRKGSPWLRTALVEAANGAGRKNGTYLQAQYRQLSRRKGKKRAAVAVAHSIIVIAYHVIKERRPYNDLGADYLDRRRSEAAEQRLVNQLRARGYTVTPQEAA

SEQ ID NO: 298736 - protein, 287 aa, unidentified
MPEFNNFLYSLGGKENTIVALEDTNGYGVRIVESLVTEGFKIRYVPGILTERDRKQSVHRDKSDVFDARRVGKVILTKYEETLPARESIASLEERMLSTELDLLLTERKDLVNSKTILKNQLHALVHQLLGDGYMLDFKKGFSKRKIPVYQKLIKQKQKMGELKENPLTRSIIRRLERLDLTHDQILSIDKEILKVSSGKTVIEALRQNVVGCGQTTAATIISQVMTIRRFSSSAKLAKYAGIAPTQKSSGRKTKLKTSPFGTVKYPFFCNNFLHITGQEFKLEFNR

SEQ ID NO: 298737 - protein, 337 aa, unidentified
MKYSAIDLHSNNSVVSVTDEEDRVVVEKRLPNDLAKILGFLLPWREELAGVVVESTFNWYWLVDGLQAAGFKVHLANTTAIKKYEGLKHSGDETDARYLAHLLRLGILPTGTILPPEQRAVRDLARKRMQLVRSRTAHILAVENITARQHGTRISSNQVKRLTAEAVDQMPLPGDVALAIKANVAVITTLSAQIDLLEKRLQEKVGARAEYGLLTSVPGIGQVLATTILLETGPIERFAAAGNFASYARCVDSVHTSNGKKKGAGNTKNGNKYLAWAFVEAANFALRYCAEAKRFYERKKAKTNNVVAIKALAHKLARACFHILKERKPFDVTRCFA

SEQ ID NO: 298738 - protein, 387 aa, unidentified
MKKAYIGIDSHKAQNTVAIALAGREDPELYGKAPADLDGFERVLRRVLAKYSLEKEDVAICYEAGPTGFVLCRRLRSLGFECEVVAPSKIPKAAGDRVKTDRRDARKLERMFRAGDLVFVNVPDVADEVIRDVCRGRTDAAEVRGRARQQLGALLLRNGYRYGDKTNWTEAHMRYLRELVLPDPAQKFVLEEYLQRVDASVAQVERIEAQMARLLPAWQRRKFVEALQGFRGFQLVAAMTLGSELGDLLRFDHPRRLMAYIGLVPGENTTGERRRQGPITKCGNSHVRWMLVEAAHHYHYPPKVSKELSKRQEGLSREVRAVSWRAQERLHRRFWRLLKRGVHRNKVVIAIARELTAFVWELAQVLERERAAADPRQPARPAARKAS

SEQ ID NO: 298739 - protein, 342 aa, unidentified
MEHYAGIDVSLECSSVCVVDANGKILREAKVASEPEALIGWFQSSGFDLERIGLEAGPLSQWLFAALREAGLAVELLETRHVRKAFEAMPVKSDRNDARGIAQLMRLGWFRPVHCKSTSAQETRSLLMARKLVQSKLRDVENSLRGILRGFGLKVGKTTELKFAGRIEELVVGHPHLQVIANALLAVRAVLRKEFAAFEKQTRKMARSDARTRLLMSTPAVGPIVALTYASAIDDPSRFKSSKQAGAHFGLTPKKYQSGETDYTGRISKIGDSSVRTALYEAAHIMLTKPLKGCSQLKSWAMRIARRAGMSKAKVALARRLAVIMHRMLADATPFNAAAAAA

SEQ ID NO: 298740 - protein, 310 aa, unidentified
MGTKVFVGVDVSKDNLDVAIGAAKDIVTFANDQKGVDALAKKLRRINPALTVFESTGGYELLAASCCGEAGLPVVIVNPRQVRDFAKSAGILAKTDAIDARVIAQFAEAVKPDVGQLKDRQTSELTALVTRRRQIIEMIVAERNRLRLANKRNKKDIEDHIRWLKKRLDKIETDIGKMIQSSPIWRCKDDILQSVPGIGPVTSASLICDLPELGVLSPKKIAMLAGLAPLNCDSGKYKGRRRIWGGRACVRSGLYMATMAAIRCNPAIKGFYQRLTAAGKCHKVAATACMRKLLIIANAMLRDQTLWQQN

SEQ ID NO: 298741 - protein, 346 aa, unidentified
MKNKSFVGIDISKKVIDVSIFREDTNIKMFPHEVFNNTRKGFGDMCSWLKKSRVVLSQALFGMEFTGCYSLDLEKFLTSKNYSFCMLSTRIVKHHPMGTIDKSDKNDSAKIADFLYRYDGTECAKPYKLPSKAMQQLKQLVNERKFLVEQRTNFMNRMQMFETKEDSAMYESYIKKLNHDNIDQEECELMSKEEDVLDTFQNLLTIPGIGFVNATNIIAITRNFTAFDTARQYARYVGVAPCSHTSGTSVKWRARPSAHCNGQVKADLSMAALRAVEYDVEMQIFYNRKLGGRKDSDTKRKALNAVKFKLIRRMFAIGKQKRKWEVLNTSDDRKNLHIEKSKASEL

SEQ ID NO: 298742 - protein, 421 aa, unidentified
MFKIYRKNCCGLDVHKTWVYGCIGLTDENGRTEYKQSRFSMFSKGLRELADWLAKYGCTEVCIESAGKYWIPVFNILELTCNVTLAHPKYTKPQKGNKTDRKDAKWICDLFMCDMVKPSFIPPPDIRHLRDLMRYRFKLTNILTGEKNRAQNCLTVSNLKLDDVFSDVFGKSSMSITKYMLDHPGKQFNVAQFVDRRCKQPIEEIQAAVDGSISHEQAAKLREILRHIDELEVHKLNIESEILRLAEPYIHQLDLIHSVPGFFANPMTAIALVSEIGMDMSVFPTAKNLSSWAGCCPRNDQSGGKRKSSRISRAGSYLKPLLVQVSNAIVKSDKYPEFKDRYRRIKSRRGHKKAIIAICRMLLTAIWNILSKGEPYDPAGYLVNRFIPKGDTFITRAQALNYMRSRGFVIYDDSEPEEALT

SEQ ID NO: 298743 - protein, 465 aa, unidentified
MKKTARRPRRLKAQVPPLVARDDAAGVDLGATLVTAALPPSRAGVTVRTFATFTPDLQALVAWFQQNGIATVAMEATSVYWIPLYTMLEDAGIEVCLVNARHLKNVPGRKTDVADAQWLQQLHAVGLLHASFHPPAAIRRLRTLWRQRDSLVREAARQVQLMHKALDQMNLHLHHVLSDLMGESGSRMVAAILAGERDAAALARLRDHRVKASEATLIKALTGDYRPEYLFCLQQAHASYAHFQTQIAACDRQLEAALGELDAVTDAPAPAPARVTRGKKDKTARKDSNQPKFDLRTQLYRVCGVDLTAVPGINLGVATTIIAEVGPKFTGFETSKRFCSWLRVAPDPRVSGGQVIGGKVPRGSPRAARAFRLAAHSLHSSHSPLGDVFRRFRAKLGAAAAITALAHKLARIVYHLLTTREPYDESKVLAATECYRVRQEASLRKRARSLGYQIIPIHYSINAVP

SEQ ID NO: 298744 - protein, 349 aa, unidentified
MEAYDGPQIVGMDLHRRRSVLVRMRPDGQKLATARIDNDPAELRKQIARAGECPRVVLEAAYGWYWAVDALEAAGAEVHLAHPLGVKGFAYRRVKNDEKDAADLADLLRMGRLPEAWIAPPEIRELRELTRYRIKLVHIRTSCKDQVHAVLAKLGVTVTCTDIFGVWGSQWLDELGLPQPYAGKLASLRGLAAELTTEITLLEKVIADLLEHHDGYHALQQLPGIGKVLAAVIVAEIGDISRFHHPGQLCSWTGLTPRHRESDTKIARGHITKQGSRVLRWAMVEAIQRLPADTPVRDIKDRIIARRGKEARNIAKVAAARQLLTCVFYAMRDGHVRSLTARAAAKEAA

SEQ ID NO: 298745 - protein, 386 aa, unidentified
MRNDHSPEQGAIRTDLGAIFVSLELSRSTWLITSLSPGVGEKLSKHSIPAGDAGALLARLTLLRQKATARTGRAFPIIVIQEAGLDGFWIHRVLESEGVESHVVDAASILTSRRRRQAKTDRIDGETLVRTLLAYKRGEPRVCSMVRVPTPNQEDRRRICRERKALLTERIGHTNRIKGLLCTQGVFNYNPLLRDRRARLEVLQTGDGRPLPERMKAQISRELDRIELIIAQLKAVEVDRDLLLEQEEATPTVPAVMLGRLKGIGPQIATLLWSEALYRHFDNRRQVAAYAGLAPTPWKSGSIDHEQGVSKAGNPRLRTTMIQVAWLWTRHQPGSALTLWFKDRVERNGGRMRKTAIVALARKLLVAFWKYVTSGVVIEGAVMQAA

SEQ ID NO: 298746 - protein, 331 aa, unidentified
MTIHVGLDVGSRTTAMAWRQKGSPAGTWVIDQTPKGRKIAPKKLLALKPLSVVVEATGIYYLDLAIELSSAGLPVSVINPKSARNFARLMLQHNKTDAIDAQLLAEYGERMTPRLWLPPSPVQLELRAIGRHINRLTSHRTRAKNELHALQVTETTSPMLIEDEEEAIAMFDKRIERFRKAGRDLIRNCTSLDASFTHMLAAPGMGDVSTLAILAELTTLPDTLKSSQVSRHAGLDVRLTQSGTSIDKPGRLSKCGNAYLRSALFMPALSAIRCDRYVKAFYETLVGRGKRKMQAICAVMRKYLTGLWACMKSGEDFDTAKLFSEKHLLKA

SEQ ID NO: 298747 - protein, 339 aa, unidentified
MKEINTIGVDIAKGVFQVHGVDRSGAVVVRRAVRRSQMLSWFSKLPPCLVGMEACASAYYWARELRRFGHEVRLIPPAYAKAYVRRNKNDPADAEAICEAVSRPSMRFVAVKSEDQQAAAGIHRVREILMKQHTMLRNHLRGLMGEFGIVAAKGRRGLEELIAILADPDDRRIPSPLREGLAAIVETLRGVDGKLDALERQIVEAGREHATVRHLITAPGYGPILSSAMAAMVVNPAAFRCGSDFAASLGLVPRQEGTGGKTWLGPISKRGNGYLRRLLVNDATAVLKSKRAKQDPWIAKLLATKPRKLVAVALANKMARIGWALMMRQKDFHESRAAA

SEQ ID NO: 298748 - protein, 353 aa, unidentified
MKCDQYMGMDVHQATTVVVVLDVEGRLVLETIVATEAAAILRLIRSLSGPLHVTFEETTQAAWLYEVTRAYVAEVIVCDPRRNKLLSEGSKADKPDARKLAELLRAGMLRSVYHGHEATRKLKEFVRAYETLSADTGRTMVRIKAIYRGRGIRTAGRGVYQIQQREQWLEQLTEPGVRQRVSWLYEQLDQLRPLRRRAKQAMLAESRTHRAVALLRSIPQLGPIRSALIVATVDTPHRFRTRQQLWSYSGLAVVTHMSSEYEIKQGRVVRSRKPIATRGLNRNCNRRLKEVFIGAATGGSQAEPYRSYLEKLKQTGMRAEMARLTLARKIAAIALRIWKKGETFDPKKLNWTT

SEQ ID NO: 298749 - protein, 370 aa, unidentified
MSKSTPLFVGLDVHKDSIAVAHAQGQSADPPVFLGAIGTRQADLDKLIRRLQAKTPDLVFAYEAGPCGYTLYRDLTRQGFDCHVVAPSLIPKKPGDKVKTDRRDAVDLARLLRSGDLTRVYVPTVEDEAIRDLCRARDAARLTLKNAKLRLKAFLLRLGLHYVGRADWNAAHRRYLAKVVCPTPAQQIVFQETLGAVDEQVDRLGRLEAELRECGATWRLDPVVQALQALRGVQWLVAITVVAELGDLTRFDSPRQLAAFVGLIPSEYSSGPARRQGGITKAGNGRARRALIEAAWAYRHPAKVSQHIQTRIDRLPKPIQAIGWKAQVRLCKRFRRLTARGKHANVAVTAIARELIAFMWAIAKEVAVAA

SEQ ID NO: 298750 - protein, 391 aa, unidentified
MKSSHHIDTPAAGDKDGTLYVAFELSKSKWLIGIVLSGESKMSRHVVAGGDTAAVWQLISKKRAQAEKKLGRPVRVVSCYEAGFDGFWLDRWLAEQGIENRVLDPSSIELPRRARHAKTDRLDLERLMRVLIRHEGGEPRVCSVVRPPSPEQEDVRRLSRERDRLVGERTAHGNRIKGLLHGQGVRDVEPRRKDFREQLARARTGDGRALPAKLVAEIVREHARLMLIAGQLAEVEGLMKAEREAAVPDSRARQVNQILDLKGFGPVGGETLANEVFWRDFRNRRQVGAYFGLVGTPYDSGESSREQGISKSGNSRARTLAIELAWGWLRYQPDSALSRWFKERVGDQKGLVKRIAIVALARKLMVALWRYLTQGVVPENAIVRAAAPAGR

SEQ ID NO: 298751 - protein, 344 aa, unidentified
MLYVGLDLSRKRLDFDARLAGGELVERGAVPPDPDGLAGLVRRLGDSEVLAVIESMNGARFVHDRLELSGWDVRIADAVKAKGLAPLACKTDKIDAWVLAELARRDLVPEIWLPDPAVRAERERARFRLHLVRHRTALKNRVHAILIAHGIPNPSSDLFGLAGRRLLERLELPEPWKSTTAASLTLIDSLDQQINACERELRSLGADHPYVPLLMTIPGIAWILAYTIASEIGDIGRFPTPTKLIGYTGLTPRVDQSGEQDRRGPLRKNGPNHLRWALVEAAHTASRHPLYQPILERNRDRHGRKRGSKIAALTIARKLTEATWHMLSKNQPFAPAGATRPLAP

SEQ ID NO: 298752 - protein, 309 aa, unidentified
MKEGTTYIGLDAHKKAIQVCLLRSNREEPLEWQVANEAGAVRRMAKKILKESQGEVLSCYEAGPCGYALQRQLQEAGVACQVIAPSLIPVKPGDRIKTDKRDARKLAELLRANLLTEVHPPNAEEEAVRDLVRCREDAKEDLLRCRHRLAKMLLRRGFAWQHKGWTLKHKQWIRTLQFDHPADQAMFGDYLLAIEQIDERIRTLEAKIEALAQRDPYREPVAWLRCFRGIDTTTAMTIVAELHDFSRFHSPRELMAYLGLVPSEYSSSERGSRAPSPRPATLTSAAFWSKPRGTTAIRSPSARSSASDE

SEQ ID NO: 298753 - protein, 422 aa, unidentified
MLEQTQETEEIIQRVAALDIGKAELVCCVRVPSPDAPGKRLQEVATYTTMTRSLLVLADRLGELGVTRVVMEATSDYWKPVFYLLEAQGFETWLVNARDVKHLPGRPKTDRLDAVWLAKVAERQMLRPSFVPPPAIRRLRDLTRYRADLVGVRTAEKQRVEKLLEDAQIKLSVVASDIFGASGRAMLAALITGTRDPEALAELARGRLRAKRSQLREAFTGHFSDHHGFLLHTMVGRIDQASADIAELEAKIEAEIAPFARAVDRLDEITGVGQTAAQVIIAEIGLDMGRFPTPGHLASWARFAPGVKQSAGKTKGKNATGHGNPYLARVLGEAAVVAGRTDTFLGERYRRIARRRGSKKAIVAVGRSILIIVWHLLADPTARFHDLGAGFYDTRINPERTKRNHVRQLEALGYKVTLEPAA

SEQ ID NO: 298754 - protein, 391 aa, unidentified
MSIYFVGIDISKYKHDCCILSATDQKVVSKFAFKNDKSSFEQLNLILNSLSTPEDIRIGFESTAHYALNLELFLENAHHSFMEINPVFIKDFKKSRTLRRTKTDSIDCELIARWLMTVEYKPHSKGFYHAYSLKSLTRLRDRLVRQRSFYLVKLTNVLDHTFPEFKPFFQERFSKTALYLLETYGSAEKMARMNSASYEKLRSISRGKFSPQQFIRLKELAANTVGVNNSIFDVELGSLLSLYKSLVYEIETLEREINRLVEEVHPHYMSIPGIGPISAAIIYAEYGDISNFSNPNQMLAFAGIEPSVHESGTEAYNGRMVKHGSSRLRYVLINCCLPLIRFDVTFATYYAKKRAENKPHRVAITHVAKKLVRVIYALESQDIDFDTKKLR

SEQ ID NO: 298755 - protein, 347 aa, unidentified
MSEISIIGLDLAKQVFQVHGADPAGRCVLRKQLKRREVLQFFAKLRPCTVAMEACGTAHYWAREIGKLGHCTRLIPPAYVKPYVKRGKNGAIDAEAICEAAARPTMRFVPVKPMENQAIVMLHRSRDLVIKNRTMLVNALRAHLAEFGFVAGKGIWKLPDLVKIVSQAPAEALPELVRTTLSGLLDIIAAIGSQLDAIEKRLREWHKKDARSKRLDTVPGIGLIAATACRALVPDPKLFRNGRHFAAWIGIAPKLDGTGGKTRLGRISKAGDRYLRRLFVLGATSLLRSLENKSTRLALWVQALLARRTKRAVTVALANKLARIAWAVMTRDEAYKPLAAAQPAGCA

SEQ ID NO: 298756 - protein, 352 aa, unidentified
MMRYYGCDAHKVYSIFTWVDDQGGSGPFFRVKNDRNEFKEYIGTLPPGSPIALETVGNWYWMADEIEKAGHIPILANAARARAMMGQVNKTDKLDAKGLATLLRNRTLPSVWIPSGKLRDERELTRMRMALIRMRTMIKNRIHATLSKYAIKIDEVSDIFGPKGRKIIEDRSRELPPYTQKCLCKELELLNEVEDKISQIEVQIKAVMIETEEIKLLRTIPGIGLILAVVISTEIGDINRFSGPEKLASYSGTVPRVKASGGKVFYGPIRPDVNRYLKWAFIEAANTVVIFHKKWSNRHVAKLYGRLRAKKGHSKSVVAVARHLAEATYWVLKKREPYKEKDVKNPVSSTRK

SEQ ID NO: 298757 - protein, 348 aa, unidentified
MAVSIVGIDLAKNVFRLHGCDAQGRAVLRKQLMRGQLLAFLARLPRCVVAMEACASAHYWARELERFGHQVRLINPRFVKPFVKANKNDASVAEAICEAASRPAMRFVAVKTAEQQEVQAVHRVRQQLVKSHTALINQVRGLLAEHGIVMAQGRAQLRRTLARILEDADNRLSGVMRELVSEIGERLKYMEDRLRQYELQIERRCRLDPRCRRLTEVEGVGPLTATALVAAVGNAAEFKHGRELAAYLGLVPRHRASGGRTIMQGISKRGDRYLRSLLIHGARAALWTIERRGNQRSAWATRLKLRRGTNVAAVALAHKNARLLWALLRSGECYRAAPLFPRPAEAAG

SEQ ID NO: 298758 - protein, 408 aa, unidentified
MDVLYPCCCGIDVHESFVLVCLSQVEHGNVHKELKRFQTYTGDLKALCQWLLEAKCTHVAMESTGIYWRPVYDQLFGFFEITVTNAQHMKAVPGHKTDVKDAEWIADLLQHGLLTKSFVPPPEQQELRDLTRLRITLVQERAQLSNRVHKVLEEANIKLTMVLSDIFGVSGQAILHALAVGETDPERLASLAHRSLRRKHAQLAQALDGHMGAHHQFVLQELLGLISSLDQSIGRVEGKIEERLRPLDDTLTRLAEITGVGRRILYVLFAEVGTDMGRFPDAPHLASWAGMCPGQDESAGKRRSGRTRKGNRWLRAALIQAAHAAGRTQTYLGEQYRQISKRRGKKRAAVAVGHSILIIFYHMMKSGEPYQEKGVAYLQKKQQQRLQRRLVERLERLGYRVQAPSAVA

SEQ ID NO: 298759 - protein, 334 aa, unidentified
MNTIALIGIDLGKHSFHVHCQEQSGKALLRKKFTRTKLMEFLADCSPATVVMEACAGAHFMARRIADLGHEAKLISPQFVRPFVKSNKNDFIDAEAICEAASRPSMRFVQPRTEAQQAMRALHRVRESLVRDKVKTTNQMQAFLLEFGISMPKGIAVIKRLSTVLAEHPLPSYLAQILLRLQAHYHYLVGQITEIETALSQEIIQDDTGQRLMTIPGIGPITASVLSSQLGDGKQYSRSRDFAASTGLVPRQYSTGGRTTLLGISKRGNKTLRQLLVLCARSFMQQIEHRQGKLADWVKQQLERKHSNIVACALANKLARIAWAITTQRTVFVA

SEQ ID NO: 298760 - protein, 339 aa, unidentified
MKVTVFGLDLAKRVFQLHWVDMETGEIGRQQVKRAQLAEFFAKRTPAVIGMEACGSAHYWARKFAAMGHDVRLIAGQFVRPFVKTNKTDVADAQAIWEAVQRPGMKFVSVKSEEQQSVLMLHRMRQQLVKMRTMQIQQLRGLLYEFGADLPQGRQAGMERIPVELAKLEGTLPRMAVEAVEQQIKRIEGFDKDIAELEKKLSAWKKENVAVKRLMAIPGVGILTATAAVAMIGNAKAFKNGREFAAYVGLVPRQSGTGGRVKLLGISKRGDTYLRTLLIHGARSVIQHAKEPGPWLTNLLARRPHNTAAVALANKMARTIWALLALDRAYQKDYATVAA

SEQ ID NO: 298761 - protein, 344 aa, unidentified
MHIASIGIDLGKTTFHLVALGDHSKILVRKKFSRAQLLAYTANLPPSLIGLEACSGAHFLGSALREQGHEVRLIPAQFVKPYRKSNKNDFIDAEAIAEAVTKQNMRFVPIKTQEQLDVQAMHRVRDRLVQRRTALINEIRGFLLERGITFPTQPSHLRKNLPTVVEDCEQNLTPRLRWLLDRLWQEWKQTEIDIATVTEEIERISAEDERCRRLRQIPGFGPLVSTAMVAAIGNGAAFRRGRDFAAWVGVVPRQYSTGGKQKLFGISKRGNIYLRRMLIHGARAVLFRIRYDTAGLGQWVHRLSQRAPRNKVIVAIANKLARIAWAVLSSGKDYRHQPLQRAAA

SEQ ID NO: 298762 - protein, 411 aa, unidentified
MEVIYKRCCGLDVHKEIVVTCLLVREGGKVLKEIRTFLTMTVDLVVLHDWLKAHQVTHVAMESTGIYWRPVFNLLEEDFTILLVNAAHIKRVPGRKTDVKDCEWIADLLSHGLLRGSFIPPEPIRDLRDLTRYRKSLTDERVRQVQRLQKFLEGANIKLASVASNVMGVSGRAMLEALMAGSTDPQVLSELAKGRLRKRLPELKKALEGRFRSHHGFMVAEILTHLDFLDEAIERVSQEVSNRIVPFGRKVELMDLVPGINQRVAEGVLSEMGVDMSCFPSHRHAASWTGLCPGNNESAGKRKSGRVRKGNPWLRRYLIEASWAAVKKRGTYLSALYYRLVPRRGKKKAIVAVAHAILVMIYHILKDQVPYHELGSDYFNKLNAAYVQRHHVRRLESLGFKVILEPLSEAA

SEQ ID NO: 298763 - protein, 514 aa, unidentified
MVSRRVQCGRITLWRVLVCRTARGRDWFQLSACVLFGDAVRTVFPLGRLVLPWTAGHRGAGQFSEIPWLLIMKPLPVLDPQAAAIDVGSESLHVSVAGDTPKVFGTFTVDLEALREWFKGQGVRTVAMEATGVYWLYLYEVLEAAGLEVVVVNGRHVQNVPGRKTDMSDCQWLATLHAHGLLRGGFVPPADIRRLQDYQRLRADHIIGAAGQVQKMQQALERMNVKFHDVISDLTGVSGLKVVRAILRGERAPVRLLALCDGQIQRKKSAAVKESLRGCWKAEQLFALRQGLELWETFQEKIAACDRELERLLQQLAGPPPAEGGPGGGELRLAPAKDAGKNAPTIERCQHLLARICGGRDATQIPGLSVYLVLQLISEVGTDMTRWPTEKHFTSWLGLAGGRKQSGKRKGSIKAHRNRAGRMFCAAARALARSIDKALGAFYRRLRGRIGGLAANVALARKLAQLFYRLLRYGMDYVEKGLKAYEVKVCETEARLLRKLAKNQGFILIPATLN

SEQ ID NO: 298764 - protein, 445 aa, unidentified
MCIANAHKSKDRGDSAMKNSTNKRLEEITVTTVIVGIDIAKSVHWARFVDYRGMELGKAISFKCNRQGFESIVAKVKEICNNKLRKLDKVIMGMEPTGHYWKTLAHYLIKAGYRVVGVNPYHTKKAKELDDNSQTKNDKKDALTIARLVKDGRFFDPYLPEDIYAELRVLTNARVSINKRFCRAKNTITAILDEYFPEIWEVFKYPLKGKASRQVLRSCPFPSFILELGEAGVLAEVKKAVKRTVGIKKVRELIEMSQASIGVDYGLESAKLRLNLSLEELEQSERHLADIETSMERMLHETGYAEQFLSIKGIGVITAAGFLGEVGNPLRFQDARQIANYAGYNLIEDSSGKSKSGTCISKRGRSQLRSVLYQMAFTMVGLNEEMKELHKYLTTRAKNPLKKKQSLVVVSKKIITVIYSLLKKQATYNPALVLGDVRREMMKAA

SEQ ID NO: 298765 - protein, 358 aa, unidentified
MNSVGVDIHKTRCIACIKNPEGTMQEEFTFQNNPEGLEELVKHLKAYPEVQVAIESTGNLWTTIYDRLEAEQIHVILTNPKKTKAIAEAKIKTDRLNARMLADLLRGNLISASYVPPPEIRIQRSIIRERARLVQLRTIIKNRIHTLLDRYQLKAPCTDLFGKHGLAWLNQQQLQPGDRTLLEVNLEQLNSLNHSINRLTEDIASSAIENPEVKLLMGFTGIDYYSAMLLINEIGPITRFPSPKNLVSYAGLAPSTHQSGNRTFHGSITKEGNSHIRWILIEAAQHASRHDPRFNQFYQRITKRRGHQKAIVAVARKMLVTIYHVLNHRNDYRGLRPELYENKIKRLQRITKPSLQVP

SEQ ID NO: 298766 - protein, 415 aa, unidentified
MKPSIETNFAAFVGIDWADAKHDVCLQPAGSTQRERSVLVHRPEAIERWALSLRERFAERPIAVCLEIAKGPLVHALQRYPFLVLFPVNPTTLAKYRETFCVSGAKDDPSDAEFALELLLVHPEKLRSLQPQSTAMRTLEQLVEQRRMLVDEVRRITNRLSSALKEYFPQVLEWFKDKDTLVFCDFVSRWPTLKQAQRARKARLCAFFREHNVRYPNVIERRVQAIVAATPLTTDPSVIGPHSLLVVSLAQQLRVLLQSVERFDTEIAAVAPTLPDYELFAALPGAGPVFAPRLLAAFGEQRERFENASQVQSYVGIAPVTERSGNKCWVHWRLRCPKFVRQTFVEWAALSIPNSYWAHAYYQRQREKGSSHQAALRALAFKWIRILYRCWQTRTPYDEATYLNALKRRGSPLLA

SEQ ID NO: 298767 - protein, 466 aa, unidentified
MKPFYMGIDVSKGYADFMIINAQKKPVIQGFQLDDTFEGHQALYNIVGRFLSKHPDSKLFVGMESTGGYENNWYSSLVAFQSSLDIQTARLNPLGVKHNSQADLKKNTTDKISAQNIAEYLVAHAEKVVYQQQDRLAGLRKQWGFIQTLTKQRTQFLNQFKQLLYTSNPELLGYCQSETPAWIVKLATKYPSAARLKRANVKSVAKIPFVSKEKAQQLVSDAKRSVASATNTATEQLIVATAQQIIHLNKIIDAQTQRMIKACKLPEVELLKTFPGISDKSAIGLIIEIQTVERFAQVKKLASFFGVHPVYKISGDGVGGMKMSKQGRKQPRHILYMITLAAIKCNPLIQQIYEKHQKNGKHNMAAMGICMHKILRIIYGMLKHNKPFDPRIDIANRQRSLRTKKAAPGKNASRRFQAYDTKAPISRRQKKKRLEQDGSHSVNSTKSGITAPVPVGDIIANILPEL

SEQ ID NO: 298768 - protein, 343 aa, unidentified
MELHAIGIDLGKTVFHLVGLDSSGNVIVRKRCSRTQLLKYTANLRVQRIGMEACSGSHFLARALREQGHDARLIPAQYVKPYVKTNKSDYIDAEAIAEAVQRPTMRFVPIKTEEQLDLQTVHRVRERWVMRRTAVINQIRGLLLERGLTLPKGRSHVDRILPEILTDPALRLAGSFRVLLGQLQLELEQLSARIEQMDAVIQQTAKENEACQRLTAIPGIGPVTATALVAAIGNGAGFRRGKDLAAWVGMVPREYSTGGKQKLLGISKRGNSYLRRLFVQGARVVMQYRTKQAPGLSNWLSQLMARTHQNVAVVALANKLLRMAWAVLCKNETYRIPALAPAP

SEQ ID NO: 298769 - protein, 392 aa, unidentified
MSQHCHFDVSRSLTALEQDSTIIAVIEMSQTKWLVAALIPGVERQPLKKFDAHEEALLKLLHRWRREAGQAGRNIKRIVVAYEAGRDGFWLARWLRARDVEAYVIHPTSIAVSREHRRAKTDRLDTELLMRVLLGWLRGETRHCSMVAIPTIEEEDARRPNRERQNLVTEQTRIINQIKAIFTRFGIRSLRPTMRKVAEKLEDLRTAEGTPLPQNTLAELRRHLARLRVVRDQIRAVEQERLRNLAVAPAAEKKSPHAMVRLIARVLGVGVETADMLVNEIFSRHWRDRRAVARYAGLTGSPDESGSRRRERGLARAGNVRVRSGMIQLAWRFVRFQKNSALAQWFAARTADGRASTRKTMIVALARKLLIALWRLVTRGELPQGVVLRPAS

SEQ ID NO: 298770 - protein, 435 aa, unidentified
MFVLIYVGIDVAKDKHDCCIMNQEESELYPVFTFRNDQTGLNMLFDRVQNAVSGQTTIPEPCSNHEHTVNTPSSLLSTIATISEQNHIIVAPSQHAKPTVLVGLEATGHYSYNLLNALSSQGYETCLINPLHTNLYRKGTSLRKTKTDRVDATAIARMLIHDRSLKRYTGIADYTDELKALTRYRFDRVQDRVRLKISIARLVTILFPELEKHVPDLHMNSVYTLLEELPGASYIAGASLKRLSELLAESSHGHYGHDKARAIHDAAKSSIAITMPSRSLELQYTIRLIRTMDEEIAAIEKSLKSLIDTLNPPILTIPGISYRMGAMILAEVGDFSRFDNADKLLAYAGLSPSTYQSGQLVSTYCHMEKRGSKYLRYALFNATRFVCQWDPTFSSYLAKKLSEGKHYNVAISHAAKKLLRVMYRMQLTGEPYRRS

SEQ ID NO: 298771 - protein, 393 aa, unidentified
MFNPLKVRLMRAVCGLDVHKDSVFLCILNEDGELIERVFGVLTFQLQQMRDLLLTHHVDEVSMESTSIYWIPIWRILAPHFHLRLVNPYFIKQLPGHKSDVADAQWIAECTMKNLVSSSFVPPEDIQQLRQYDRRIFDLDEEIVRKLSKLDAVMQRCNIRLSNYVSNVDCKSYKDVVRKISEGVTDPEVLIEEIHGRIIKHHGRETILASLTGVISQAETDVLRQLREELDMAEKHKQECLEKMLEICQEKYPDELRRLQTIPGVKERTATSLIAEIGTDMSKFETANHLAAWSGLRPRNDESNKKFKSRRITHGNVYLRKNVIQCAWAASRTKDCFFSRFSYHQTQVRKKNRMKVIVAVARKLLVATWHVINDKTDYVDFQKQDRQASVTNG

SEQ ID NO: 298772 - protein, 346 aa, unidentified
MQITTIGIDLAKSVFQVHAVDGDCATVVRKRLRWAEVLLFFAGLEPCLIGMEACATSHYWARELAKFGHTVKLMPPAYVKPYVKLGKNDTADAEAICEAVTRPNMRFVPVKSADQQAVLMLHRTRALLILIRQQTMLANAFRAHLAELGIVVPQGIRHVRALIERVFGEGADAIDLPDLARIALRPLVAQLMELRLQIKAIEKELLAWHRTSQESRRLETIPGVGFITATAIAATVTDPSHFRSSREFAAWLGLTPRQKSSGGKDRLGRVSKMGNGYLRSLIVVGATAMIRYAREKGAVNARWINGLLEKKPARLVSVAVANKTARIAWALLVRKEDYRVPVPVAA

SEQ ID NO: 298773 - protein, 370 aa, unidentified
MEWPAPPSGVVESPAVQKEEESDMALTAISVLGVDLGKNVCSVVGLDASGAVVLRRKVRRETLIALAEKLSPCVIGMEACCGAHHTGRLFAAHGHDVRLMSPEYVRPYVKAQKNDDRDAEGIAEAATRPTMRFVELKRQDQLDMQTLHRSRDRLVGERTALINQLRAILLERGYVAPQGKRKLEQFLSVLMDEQGGAELSPRMILLIADARAQWAELDRRIAAFDAEFVHWAKGNEEARRLTTIPGVGPTIASALVAAIGQAESFDRGRDLAAWLGLVPRQFTTGGRPKLLGISKRGNKYLRKLLIHGARAALPYVAERDTPLGRWAKGLLGRAHHNVAVVAFANKLARIAWAVLRRGEKFAVKGSTVAA

SEQ ID NO: 298774 - protein, 339 aa, unidentified
MERFVGVDLHKNMFMVSFFDSQTGNHQLKRYYIKDITSFSSELSSEDTVGVESTNNTRYFVNQIRECVKEVKVINPSQFRIISKSVKKTDENDAKVIAEFLSKDMVPEVRMKDKKTAQINSLANTRDKLVKLRTALKNKIHNILSSHGILLKKESLSSDKGLNRILEQPVDPTACVELEVIVSQIRSLNDGIKKLDKELEEKGKELPGHENITSIKGIGNKSGSILLSVIGNINDFENEKKLAAYFGIVPRVSNSNETEWQGRITKRGSKLGRTTLVQCTLVAIKYSPYLRSFYERIKAKKGSGKAIIATSKKLLVIIYNTLKNNWVFEDFPSGLIRTT

SEQ ID NO: 298775 - protein, 365 aa, unidentified
MFIGVDVHKDTHTAVGVSPFGEKLFEITVGNYSKDFRSLAETVESVSSKETLSPYFGLEDCSGFGERLSGFLLDSGYIVVHVPPILVDERRKNETHPEKSDSLDAFGVAKVMLQRSDTLLPYTVTEESRKAKQIKEISVDREFLVSERTRLKNQLHTLLHRIWNTEYRSKFKDPFSLKALRYWKARTPKSADDFLIRSMKRKVGRLLDLHEEIAELESELEKLLLESGHTIQTASGCGVTLAAMIVGEVGDINRFHSPAALAKYAGCAPRECSSGKTKRFRKTRSGNRRLNCAFHRMALSQISRMGNPAAQKYFKRKVSEGKSKSQALVCLRRQMVNIVWMMMKHKTEFRLPAESLAQAGYPQEN

SEQ ID NO: 298776 - protein, 338 aa, unidentified
MKYKRIAIDTSKHVFTLHGVDEQERPVLRRELRRGQVEAFFDKQDATEVVLEACGGSHHWGRLFSRLGHRVRLIPPQYVKPFVKRAKNDRNDAEAISEAASRPSMRSVVVKTVDQQADGIILKHREMLVSQRTQAINALRGHAAEFGVVAAKGAVRVAALLAELVADSAIPATALMMFEQMGAHIEVLDQRVAAVDSELSALHKANEVSQLLAEIPGVGPLGAITMALTVEPGNFVSARHFAAWLGLTPKEHSTGGKQRMGKISKAGNERLRQLLFVGAMSVIRFAKPGSKSASAWLLQLLERKPRKLAAVALANKMARIIWAMMARGEAYRRQPIVA

SEQ ID NO: 298777 - protein, 343 aa, unidentified
MTQYVGLDVSLKETKLHVLDEAGNRIWRGRCATDPAAIATAVRRYAPNAVRIGLETGPLTTWLWTALTAEGLPMVCLDARHAKRALDMKVNKTDANDAEGLAHLVRAGWYREVRVKSRNAMLAKALLGARSQLLSMSLALENQIRGILKTFGRIVPKGAGGLFEKNVRALITDDAEIAAVIMPLLQARGMARSKCLALDRRLIGSVKADATCRRLMTMPGVGPLTAVAYVAALEKPDTFRRSRAVGAWLGLTPRRFQSGEVDYDGHISRRGDCQLRALLYEAAAVLLTRVRKESALRRWGLMLWKRLGFKRAATALARKMAVVLHAMWKSGTAFDPTLSAVTP

SEQ ID NO: 298778 - protein, 312 aa, unidentified
MTQIICGVDVSSKTLDARIGREGAVGRFACTAEGVAALAAFCKAHRVDLVAMEATGGYEKMPFALLWTHGVPAAIVNPRSVRRFAEGMGFFEKTDRIDAGVIAWYAEVKRIVAQEPSSEAHQRLEALVTRLRQLTELRTAQTNQRRLVKEAAVLSTFDELLALLKRQTRSLERQIAALVDSDPLWHKLDPAFRSIKGVADRTVARLMAEMPEIGTLSNKAISKLAGLAPFARDSGQFKGKRAVRGGRTHVRSILFVVAELVRRYNPDFAAFHKRLKDAGKPLKVIRIALAHKLLVRLNAKAREVREQIACAT

SEQ ID NO: 298779 - protein, 343 aa, unidentified
MKQISTIGLDIAKNVFQLHGIDENGEVVVVRQLKRRGVLAYFAKLAPCLVGLEACATSHHWAREIEKLGHEVRMMPPRYVKPYVKRNKNDAADAEAICEAVQRPTMRFVPIKTPQQQSVLMLHRTRQLFVRQRTTLINAIRAHLAEFGIVAGIGRNGVEVLLELIAKGEDERIPPAARECLMALAAQLHLVKRQILEADRRVLAWHRTSKTSKRLEAIPGVGPLIATALVASIPDPSAFRSGRDLSAWIGLVPKQNSTGGKERLGSISKAGNRYLRKLLVIGALSVIKRAKILGYTRHPWLVRLMERRSTKIAAVALANKIARMAWAMMVRDEKYRTPLPQAV

SEQ ID NO: 298780 - protein, 439 aa, unidentified
MFSRSEERSLNKKGKQTPMKAAQTILHVGLDVHKDSIAVALAAQDGSLRRYGEIPGHIEAVDKLLKRLDRADQQIRLCYEAGPFGFVLFRHLRRKGYVCEVVAPSLIPKRAGDRVKTDARDAEQLARLFRAGELTAVRVPDEAEEALRDLIRGRLSAVFEQHRARHRLKGFLLRLGFRYPGKTSWTPAHMNYLSKLKMSHPAQQIVLEEYIQAVQSATERLDRLTTQVQAQLPGWKWEPVVRALMCLRGVSVINGMTLVAEIGDIDRFESPRQLMSFLGLTPSEHTSGDKRHQGAITKAGNGACRRALVEAAHHYRIPPRISPTLRQRQHGQPEQVRQIAWKAQQRLYSRQRTLSLRRKKSVVVVTAVARELCGFVWAICRALKHPHPKAPTRTSEGSARVYVLKPDLKFKSGAGRSRLASSAAAPPARARKGPTSLAS

SEQ ID NO: 298781 - protein, 398 aa, unidentified
MRDRVWAGIDVGKEHHWVVAVDTDGRTVLSRRVFNDESAIASVVGEVVNLADEVSWTVDLTTAYAALLLCVLWQAGHAVHYLTGRSVHQASAMYRGEGKTDARDAKVIADQSRMRPDLPQLRPGEDLIAELRMLTGHRADLVADRTRTINRLRQQLGAVCPALERTAEITQHRGWAILLARYQRPKAIRRAGVDRLTRMLADAGVRNAAAIAQSAVAAAKSQTVRLPGEDVAAELVSELAKGVIDLDARIKLADTAIEERFRRHRLAEVITSLPGMGFRLGAEFLAAVGDPSQIESADHLAAWAGLAPVPKDSGKRTGRLQTPMRYNRALRRVFYMSALTSVRCHPESRIYYDRKRSEGKRPIQAVVCLARRRTNVLFALMRDNRTWTSQAPVTTAAA

SEQ ID NO: 298782 - protein, 344 aa, unidentified
MKISTLSIDLAKNVFQVAGFNSNHKRECNKRLNRSKLNAFMANTPPCRVVMEACYSSHYWGRVFTSYGHTVDLIPAQHVTPFVRGNKNDSNDALAIYEASLRPNIKFVPIKTEAQQEILMLHKIRERLLQNRIAATNQLRGLLVDFGYVFPVGIKALEQGLIAFESDSALRPLLRTMVSDIYTEYKTLVKRIKAIEAMLTAHVERDANAKILHSIPGVGVLNASAYAASIGNGQAFKNAKELGVWLGLTPKQYASGDKSKMSGITKRGNSYLRKQLIHGARAIIARSHHKTDALSLWINQLREKKHFNCVVVATAHRLARLMWILLTKQTLYSPQYVQNTQKDA

SEQ ID NO: 298783 - protein, 347 aa, unidentified
MSITMIGLDTAKSVFQVHGVNETGKVEIRRKLRRSELIPFFEKLEACTVVMEACGAAHHWARILSSLGHEVKLIAPEAVRPFVKKRKKNDPADAAALCTAASRPDMMFVPVKSIEQQGILALHSARSLLVKQQTMLANAMRGLATEFGLTVPKGIDRLEELLALVDADKAFPEKACQVFTGLFDQRRALAESIRAIEVEIVAHARHDDTARRLATIPGVGPITASLIAATVVDIGLFKTARHFAAWLGLVPRQFSTGGKTRLGRITKTGNREIRKLLVLGATSMVYRAPQWNSVVGAWTRGVLERRPVRLVTVALANKMARIAWASMTRKEVYRATGRVAAATEAAA

SEQ ID NO: 298784 - protein, 343 aa, unidentified
MKLFVGLDVSLEKTAICVISEHGKIVSEAQLASEPEALARWMRELGCTIAAIGLEAGPLSQWLHRGLTAAGLGVVLMETRQVKGALKAMPIKTDRRDAEGIARLLHLGWFRPVHCKSVSAQEVRAILNARKAVQQGFIALEMSLRGLLRNFGLKVGSISRGRFEQRIRELAAGNPMLEAATEPMLRARLSLRQELAGLERRVRQLAHEDPACRRMMSMPGVGAVVALTYRSAVDDPGRFTSSKKVGPWVGLTPSRNQSGERDVSGGITKAGDVNLRRALCQAATVMMHRGRSSWLRTWAAQVARRRGSKRAMVALARRIGVILHRMWVEDADFRSDGPAPNVA

SEQ ID NO: 298785 - protein, 366 aa, unidentified
MKQQHQDSEVTIGLDLGERRHRFCALDGRGEVVEEGSLLNDRASLGRVTARYPGALAVMEAGTHSPWVSRYLEGLGWEVIVSNPRKVRAIYQHERKSDQRDALMLARIGRMDRALLYPVRHGSEQAQQDLLRIKLRDSLVRARVALINSVRFSLKSLGYAVCNPSSERFHKVAMERLPERVQQMVAPSVQALAELSTRIAVLEREINVVARTKYPQTLWLQQVPGVGALTALYFVLKIEDPQRFENVRDVGAYAGLCPRRDQSGGSDPQLRISKRGDPYLRRLLVSAAQYILGPFGPQSALRAYGLMLAADGSARARKRAVVAVARKLAVLLLSLWKNRSHYEAFPHWQTIEDKRSVTIAIHRVEA

SEQ ID NO: 298786 - protein, 333 aa, unidentified
MNYIGLDIHKKNTQACVKNDMGKVLMNVRFPSDSEDINEFLDKIEPLGAASIVMEATGFCMYIYDIIEARGHDVKVAHPFKVKALTAGRAKTDKNDAEMLAELLRLNPIPESYIPPKELRELRELTRFRQSLVRSSASIKNQVHAILAMRGIKTPPPLRSHFSKKHVKWLRSLEIVQLDDFLDIMALIDTKTAKADEDIGRICHDDEDVQRLKTIPGIGDVTATSFVAEIGDIHRFDSPEKLASYAGLTPIVRQSGEKTWAGPISKRGNATLRYLLIEAAYSHVNSSKESKLTRFFERKSQAKGRKKAIVATSRKMLEVIFYMLKRGEAYHAH

SEQ ID NO: 298787 - protein, 345 aa, unidentified
MPIVGGLDIHRKQITFDYLDTMTGEVKRGQIAPADREHVRAWLARFAGRGEVAFAVEGCAGWRYVAEELAAAGIAAHLGEPADTAALRGRKRHAKTDKTDARHLRSLLAEGRLPECWIPPAHILEYRALLETYHDLRRAHTAWVQRIHAVFFHQGAPLLGEGALRTEPGLEALQAAVAAHLSAAGQQQVATALDMLAATEAQLGPLRHQLRDAARHLMGARVLAERLYGVGPVTGLALTCWLGGKDRFSSSAKAVRFTGLDITVHSSDRKGPPGRLSRQGPPVLRWAVYEAGKTHARTSAPDHGYYAAVADRKNTKRAALPEARKIVRQACHILTELGDDALTAA

SEQ ID NO: 298788 - protein, 414 aa, unidentified
MEMDVVVERCAFLDVHRDTVMACARTPDGRGGRREDVVEFGTTTSQLLVLADWLAERRVTLVGMEATGVYWKPVHWVLEGSVPEVWVINARHMRNVPGRKTDVADAIWGASLLEHGLVRPSFIPPEPFRALRDLTRYRKSVIEERARESQRLHKILEDAGVKLSSVASSVLTKSGREMIDALIAGQRDPTVLAEMAKGRMRSKIPQLQDAMAGRFNEHHALLCRAMLARIDQADATVDTLTDRIDELLDPYEAAVTLLVTIPGIARRSAQVILAEIGADMSRFPTAGHLASWAGMCPGNNESAGKHRSGRTRHGSKWLRKALIEAGQAAGRSKDTYLAAQYAQIRSRRGPQRAAVAVGHSILVIAWHLLSTGEPYHDLGGDYFDKRRNSAARQRRLVAQLEAMGHRVTLEPAAA

SEQ ID NO: 298789 - protein, 341 aa, unidentified
MQIRSVGIDLGKTTFHLVALSAAGKVLLRKKFTQKQLLTFTANLQTSLIGLEACSGAHFLGRALREQGHDVKLIPAQFVKPFVKSNKNDFLDAEAIAEAVDRQNMRFVPIKTDDQLQAIHRVRDRLIARRTSVINQLRAFLLERGMTFAKTPAKLKLAMPEILENADANLTPRMRNLVGLLWSEWKDLEQQIVAMNMEVEQIASSEPACQRLRQIPGIGPLVATAIVAAIGNGAAFHKGREFASWLGLVPRQHSTGGKARLFGISKRGNRYLRKILVHGARSAVLRVKRERAPFGAWLDALQTRAPLNVVVTAMANKLARIAWAVLWSGQEFRPAASVVAN

SEQ ID NO: 298790 - protein, 411 aa, unidentified
MQRVIGMDIHRTFAEVVFWEAGRLRPGGRVDMTRSGLEGFGRSLSKEDEVVVEATGNAMAVVRVLSPYVARVIIANPLQVKAIAHAHVKTDKIDAGVLASLRAAGFLPEVWLPDADTELRRRLVARRNQVVRHRTRIKNEVHSILQAHLIPPCPHADLFGRLGRNWLGRQELPVDERAAIERHLRELDRLGEDLELLDREIAERVIEDQSVKRLLTITGVNIIVAAGLVAAIGDIQRFSSPQKLVSYVGLNPRVRQSGLGLAQHGRISKRGRSHARAMLVEAAWAASKAPGPLRSFFLRIRARRGHQVAAVAVARKLAVLCWHLLAKDAEYQWARPALVANKIRAMQLQAGQPARKGNKRGAAYAYNIKELRDREIDVARHAEHAYEQFVSRWQPRGPGKRRTGAANEERR

SEQ ID NO: 298791 - protein, 319 aa, unidentified
MLVGIDVAKAELVVATRPGGERWTVENAERGVRTLVERLRRDGAQLIVLEATGGYELLCVAALVAASLPVVVVNPRQVRDFAKATGQLAKTDRIDADLLALFAERVRPELRPLPDEEAKELEALLARRRQLLEMLQAERNRLGQVFGRGKAPVKKSLKAHIAFLERELRMADTDLGDMIRASPAWHEREDLLRSVPGVGPVLSLTLLANLPELGRLSRRAIAKLVGVAPLSRDSGTLRGRRFVHGGRASVRGVLYMGALVATKRNAVIRAFYARLLAAGKPKKLALVACMRKLLTILNTMIRTGQRWCAEHTDRAVIHA

SEQ ID NO: 298792 - protein, 341 aa, unidentified
MDIAVLGIDLGKNSCSVVALDSSGKVTLRRRMLRKTIVALTSKLTPCIIAMEACCGAHHLGRVLSAQGHTVRLMSPEYVRPYVKAQKNDDRDAEAIAEAATRPTMRFVALKSEEQLDMQTLHRARDRAVGERTSLMNQLRAVLLERGVIVPQGRAKLRLRVTELLQQSPEQISSRIRLLIEDMLMRWQALDEWIAGFDGEFAAELKRDEAARRLTSIPGIGALNATALVAAVGDAQTFARGRDLAAWLGLVPRQATTGGKPRLLGITKRGSKYLRKMLIQGARAALPTLSRSNTRLGQWLRGLLARAHSNTVVVALAAKMARTVWALLRYGTTFEPRAIAI

SEQ ID NO: 298793 - protein, 343 aa, unidentified
MQTIKTIGLDIAKSVFQVHGVDAGGQMVIRRQLKRRFVLSFFEKLPPCLVGIEACASSHHWSRELQALGHTVRLMPPAYVKPYVKRQKNDSTDAEAICEAVARPNMRFVPTKTVEQQSCLMLHRARHLFIRQQTAVINSIRAYLAEFGIVAPVGRRGIEQLLEVVADRADHRLPEIARACLASLGSQLRALKVQILQFDRRIIAWHRSNATSKRLDAIPGVGPALATALVASIADPTAFRSGRDFSAWVGLVPKQNSSGGKDKLGSISKQGDRYLRSLFTAGALAVIRYAKIHGTGHRPWLTGLLARRPTKVAAIALANKIARMAWAMMARGERYREPVALAA

SEQ ID NO: 298794 - protein, 408 aa, unidentified
MNENTITSEPAALIAIDWADQKHDIALLPAGAERAEHLQLAHGPQDLVQWACGLRQRFAGRKIAVAVEQKRGALIHALMAYEFFVFYLVNPGTLANFRKAFKRSGAKSDPLDRDLLLELIQKHRDRLTRWQPDDVHTRHLDLLVQDRREAVNECTRLGEQLRATLKNYFPAMLDLAGNVTTVLACKLILKWPNFASLQRAKPQTLRTFFYAHNFRRPDILEQRLESVQAAAPLCKDVAIIGAGQLKAIRLARAILTLLPAIKQYDKEIARLFETHPDAPIFDSFPGAGPALAPRLLTAFGSQRDRWQHSLELATFSGIAAVIEGSGKRSVTHWRWACPKFVRQSLHEFAGISIRFCPWAKRFYQTQLNRGKGHHVAVRALAFKWIRILFRCWQDRSTYDPAKYAPANL

SEQ ID NO: 298795 - protein, 347 aa, unidentified
MNFYNNTHPHYCGIDLHARVLYVCIIDQEGNTCVHQEIPADPDKLRQLLEPYIGNIVVGVECMHCWYWVSDFCEDIDVDFILGHALYMKAIHGGKAKNDRIDSYKIANLMRGGNFPLAYVYPKAMRATRDLLRRRMKIVRHGGDLKGHVANTTSQYNLPPNKVNLKNKDAREQLKTTFPDEVVQRNIDLDMAILDCYAKELSKIEWYIQQQAKQHKPVHFHLLKSVWGIGPILALTIIYEIGDINRFESVQKFASYARLVKCKAESAGKSYGTQGNKIGNAHLKWAFSEAAVLYLRGNKKAQNYLLKLQKRMSKAKALSTLAHKLGRCVYFMLKNETVFDESKFIKG

SEQ ID NO: 298796 - protein, 387 aa, unidentified
MPNRNDLSKSLTALDQDSTLIAVIEMSQLSWLVGALVPGLKREPVKKQVPDAEALLRLLQRWRDEAVKAGRVIKRICVAFEAGRDGFWLARWLRGRGMEAYVIHASSIPVQREHRRAKTDRLDVGLLKRAFLGWLRGEAKHCSMVAIPTLAQEDAKRPSRERENLVGECSRIVNRMKATLIRLGIRGFNVKLRQAAERLGGLRTPEGEGLPPNTLVELEREMARLDFLKAQIKAIELARLERLERAPAEGAHAMVLLLAKVRGIGIETADMLVHEVLGRNLRDRRAVARYGGITGSPDESGTKRREKGLARAGNARVRRAMIQLAWRWLMFQKDSALAQWYGERTADARGATRKTMIVALARKLLIALWRLVTAGQLPVGVVLQPAP

SEQ ID NO: 298797 - protein, 340 aa, unidentified
MTDVTRIGLDLAKSVFQVHGVNADEKVTIRRSLRRGQLLAWFSKLPPCLVGMEACAGAHYWARELTRLGHTVRLMPPLCVKGYVWRNKNDAADAAAICEAVSRPAMRFVPSKTPEQQAAAGIHRARSLLTKQETMTMNSLRGLMAEFGIIAPQGRKGMAELLAILNDPDDRRIPEPLHGALQALAATLRSLAAQLKTVDKALAAWGRQDAITRHLSTIPGVGLVTATAIAAHVPDPHVFASGRHFSASVGVVPRQEGTGGKVQLGSISKKGSRYIRRLSVNGAMSYLRSKSGRQDPWVVKMLASKPMKVVAVALANKNLRIAWALMVRGEEYRPATVAAA

SEQ ID NO: 298798 - protein, 316 aa, unidentified
MSISTTAPRIVGCDVGKARIEIFDSHDQSRKSIANDPAALAEWTATLDPDCLVVCEATGGYEAALLAALLAAGVPAHRADARKVKAFIRSLGVHGKTDALDARALARYGQERHLQLARWQAPDKARGKLQALALTRRDLVVQRTAFSNRAQAPGAEPVQSYLKALLDCLDAQIAAIDADIAALIEAHDELRRSEKALRSIAGLGAKTAAALLALMPELGSCDRRRAASLAGLAPHPRQSGEKDAYRRMIGGRPEVKRVLFMAAMSAARHNPVLRDVYKRLLANGKKPIVALSAIMRKIIVIANARLRDLKMAPQLS

SEQ ID NO: 298799 - protein, 365 aa, unidentified
MKEQKTQTTRYVGIDLGKRTYEMAIVGKQGKVTFTNGKTTIEGRQMLYKKLCSKDKVALEAGNLAFIMAKEIEAIVGCQVYVLNPYQLVIIYKSMKKTDKEDSLKLAHILEDTREERLPTVAVPSDEEMRRRKLLASYRREQQSRTRALNRLHSLFLAQGITTIRKKNLDTVASRKKAIIILTGLELEEAEHLLLSLELYEQRIEVLDQRMTEAAKGDEQIERLQTVPGVGPKVSFAFVSHVAAERFENAAQVSNYLGMVPRVYISGDTKRYGKITKRGNSYIRALLVQAAWSLTRTKAGGKLKERYIYMTKEKGISKKKAIVAIARRIGELMYAMMRDGTKYEPRPFIRDKEYGCNLARLALSA

SEQ ID NO: 298800 - protein, 396 aa, unidentified
MLYLAIDQHKAQITINLRNEQGDVIQKEQISTDHAEIDEFFAALKKQAARTKGFMAIVEVCGFNHWLLKKLEEYGCKEIVVVQPGGSSNNKTDKNDANSLGELLWNNRKRLQNGERPNGIRRIIWATDEESEVRQLANFRQYLIGQRTRIINKIKGILNKHNMQQDAPTERYTTNKFKKWLEAVSLPVVDRMEIDAHLESWKTYDKQILDAELELAKRSEVNKEVAKIAAIPGISAMGAIIFCSRIGDIRRFKTPDSLANYFGLTPGCHNTGGKQRIGGITKAGSPIARQVLNFAVNHVIRKDPNMKAWHKKIKTRRGAKIARMAVMRKLATIIWHILRWDKPYQFRYEVVLPPKNASVKSNSNKSFRGISNSNPQKKKSKIPLKNRGKTAVKARA

SEQ ID NO: 298801 - protein, 326 aa, unidentified
MQGKVTLKDSAAMEAYAGIDVCKRWLDIAIHPHGHCERFENTGKGLKKLMRWLSAYDVALIVMEATGKLHRKAHTALHDAGFAVAIVNPLRARLFAGAVGQLAKTDKIDAGSLALMAATVKPQAAAPRPEPMEILHELWRARQALVDERTAFLNRIAACASAFLKRELTRQQAALAASIARIDKELLRLIKTDAGLERRYKILLSIPSVGAVAASGLAIGLSELGACSNKQAAMLAGLAPVACESGESKGARHIRGGRAGVRRSLYMAAVSAITHNKPLKAFYERLIAAGKLAKVALTAVMRKLAVIANSLITQDRFWQEEAPQHA

SEQ ID NO: 298802 - protein, 344 aa, unidentified
MSVYVGIDVHRKRSQVAVIDAKGKVLANRNVPNGAEPILKVIGGLPPGTPAAFEACYGTSWLVELLEDYGFAPHLVHALRCKAIASARLKNDKVDAAILAQLLRADLLPEAWIAPPPVRALRALRRHRVALVRLRTLLRNRIHAIVADHGYDRPAGEYWTGPGRAWLASLELPAVSRELVEDDLGLIDALQDRIDRLDWEIHQRARSDPRVTVLTQLPGVGPFTALVILAETSDMSRFASARKLASWAGLTPTVRGSDRMAHYGHISKEGSVWLRWVLCEAAQTAKRHPQFAAAYQAIAQRRGKKIATIAVARKLATRAWHLLTDAEHVTTTPAAPAASPTGTR

SEQ ID NO: 298803 - protein, 387 aa, unidentified
MTVLTVNNLPAATHGETVRCLFAIELSKMSWVIAFNTPLSEKISRRTLTGCKWKRLLELIEEVRARVSRETGRAVEVVSCYEAGYDGFWLHRQLEAHGIRNYVIDPASLQVDRRARRVKTDRIDTERLLRSLMAYLRGEPKVWSVVRVPSVAEEDARRLHRERDRLVSERVQHVNRIKGLCALQGIYDYNPLRPQAMARLEQMRTTQGGALPPRLKSEIKRELQRLELVVEMIATLETERDAIVADEASTHVNAKKIRNLHKLKAIGPEFAAVLVGEIFHRDFNNRRQLASYVGFAPSPFQSGSVAHDQGISKAGNRKGRTTGIELAWLWLRYQPDSDLSGWFRARVGTTKGRIRRIAIVALARKLLVALWRYLETGVVPRGAVLKG

SEQ ID NO: 298804 - protein, 321 aa, unidentified
MSKVTMIGCDLHDRWMLLKVAVGSGQPMKKSFETSHAAEMIVWLKEFARQHDSRRIVFAYEASGLGFGLYDELTDAGIECHVLAPTHLPHTAHRRKNKTDEKDAEMILDEVRAFVLAGRELPAVWVPDPETRDDREPVRLRLRLGKQRTQIKNQIRCLFKRSKWSLPDWFTKSGDWSQRSVKWLRAVAAGDEADLPPGVLAVLAPLVALYESFTAQLKALDEVIGELAQSERYAKAFRKLKLLKGVGTLTAMVFLTEIGDLNRFANRRQLAAYLGLAPASYESGERDDRKGRITRSLSGPAGVVPGGLGGTALLGQVERHV

SEQ ID NO: 298805 - protein, 337 aa, unidentified
MEVAFLGIDLAKNIFQLHGENADGQMVLQRRVRRDRLMVEVEALSPCTIAIEACTGAFYWQRRFEAAGHRVRIIAPQYVKPFAQHQKNDRNDAAAICRAVRQPDMRFVPGKSLEQQDIQALHRGRQRLVNHRTALVAQMRGLLLDRGIGFAQSITRARREIKALLEDGASEISELFRSMLSQLYAIFLTLDEQIAWFDKEIEKVFRSSETCRRLAKIKGVGPKTATAIVAAVGDGAEFANGRHLAAWMGLVPRQHSSGNRQRLYGISKRGDRHLRTLLIHGARAVVRTSATRNDAQGAWIRDLQARRGAAKTIVAVANKNARVIFAMLKGGTEYRAA

SEQ ID NO: 298806 - protein, 396 aa, unidentified
MHYIGIDWGLEKHNICVLAADGKVLSEFRITHDWKGFERLEQLLSPLRDIQVNIERQDGLLVDWLSERELTLFVTHPNVIGYRRPRRSKDDRGDAHLLATMLRMGDPEVHPMPRQSALVKHLKQLVIAYDDTLNEQRRLGNRLIFNLRQYYPAVLEAFGVPHSLIVQAFLEAYPTPEASQALTLEALRTFLRTNGYSQMQCLEKIYAALQTRYPRASMSAGHVQAVLTLAPLLRALHQQRSRLKKEMLKVFKQHPDAAWWRGFPGAHGELTPVRLLAWIGDDRSRFPSPEVLQAIAGTAPITRRSGKQQRVEFRHACSHPLRNAVDDLARHSLPKSGWARSYFYDQIAKGHGKSRAYRALANRWLKIIWTLWKSGEKYDEAKHLANRSHHGRAVTA

SEQ ID NO: 298807 - protein, 408 aa, unidentified
MDVVYQTCCGIDVHKMKLVACLCKGHKQEIKEFSAKTKDIKAMVDWLEGNKCEMVAMESTSVYWKPLVNIFEMRGLKYMVVNAKDFKAVPGRKTDVLDSAWLADLLRHGLLKSSFIPSREQRELREATRYRKAITEERARALNRLQKLLEGANIKISSVLSTMTGKTTMNLLDYVLNNDEMMDAKTAETLIISRISASVKEVTEAMEGIMTPFQKTMMKQVLTHLNELSERIEEMDIIIDTYMAEYWEAIKKLEQIPGIGKKSAEIILAEIGLDMNQFPSAGHLASWAGVAPGNNESAGKRKSGRTRKGNKILKSTLAQVAKSASKNKNSFFHAQYQRIAVKRGKNRATLAVAHSILIAIYHMLKDGQEFIDLGSDYYNQFNTEKKINSYLKKLAALGYRVDEHSTVK

SEQ ID NO: 298808 - protein, 345 aa, unidentified
MSIVGAFDVHRRQLTFDYLDIETGEVRRGRIVPADREHLRAWLARFAGRDDVRFAVEGCTGWRYVVEELLAAGIEPHLAEPADTAALRGKKRHAKTDKADAAHLRAHLLAADLPECWIPPAHVLEARAVVRLYKDLLDERGGWHQRIAATMFHQGVPAGSSMDTAAGRAAAAEAQLSPAGRQAVEAGLRQIDRLTGELDSLRRQLDLISRRQPGCAALRAAHFGIGAVTAVAIWAELGDVRRFGNSDDVVRHTGLDITVYSSDGKRSAGHLARQGPPLLRWALYEAAKCAARPAAPDYHYYSAVRDRRTGVVRERQRPRRVIAGRVLNERAGREVQQAVRHRDDL

SEQ ID NO: 298809 - protein, 450 aa, unidentified
MGKAKPQVIEDEEHQRVFERVAAIDVAKASGMVCVRLPGRDGRPRASKVWEVPAVTSAVTELGRRLLKDRVQMVTLEATSDYWRIFYYLLEALGLAVQLVSPAQARQLKGRPKTDKHDAMWLARLTEWGMLRPCFVPPAPIRALRDYTRARTDYVRERTRCYQRLEKLLEGALIKLSSVASKLTTESAKDMVRALIAGERDPHVLAGLARTRMKAKHDELVEALTGMFDAHHGELAQLELDQVKFLDQKIIQLEARIRDTLAAIPQAQGVDPDGTTGPAAGTGPDAPVLPAAQRLAEIPGISPDLAHAIIAETGLDMTRFPTAAHLVSWAGLCPAANQSGPRTGRGKKKHGNAYLRGALGQAALGAARTGTFLGERYRRVARRRGKAKAQVAVARSILIVIWHLLADPAARFIDLGPDYAASRTDRDKKIRNHVRQLQAMGLQVTLTAPA

SEQ ID NO: 298810 - protein, 514 aa, unidentified
MSEGTAQPPFSRLCPRLLRKHSAWLIRHIPLTQKFHPQPLAPAKMADWVHAHYARVRSPYAAQDKPFASGFTNPYRNGGDIMLKINYMSTLFVGIDVSSKSNSVYAMDFEENKYLSTSFGNNQPGADELVNRIAACMQKHKNLDTLLIVLESTSVYSVHISNFLASSEILMPYKPYVFCVNPKATANYRKSYIGMEKTDPTDAYLIADFARVGRTKKLEPWRGGQFIALKRLTRHRMHLSECITREKTYMVSNLYLKFSQLQLLEGDDKPFGNLYGATSSAILTEFLSPQEIIDMPEEDLLAFLAQRSRNRICDLSKTSELLRKAARDSYRLDKCMYEPLNISLASSFNCIQAYQKEIRLIEQAIEKCIKGMNPNALIILQSIPGIGPVWASGILSEIGDISAFHSSDALAKYAGLYWPKGDSGDFISEDNQMSKAGNPYLRYYFGEAANSIRKHIPEYADFYARKYAEVSKHQHKRALALTSRKFVRLVFGLLAKNQLYTGEKLDTEHNTESN

SEQ ID NO: 298811 - protein, 361 aa, unidentified
MVSVAKGHGKGKQKQVIFEGKSCWVGVDVHKLSYAVALLDTEGQRWEFSTPAEPTKLLLQLLRMGINIKALIYESGPTGYSLAWACQEKDIPVLVVAPSRVPRPASKTGKTDRLDSMKLVELLSRDMVKSIAIPTREEFALREMERVRQRLVKKRREVRQNIRAFLLRNGLDEPTGLSSWGVAAVHFLREMPLSEYLRLSLDIYLEDHANILAALGKIAKQLEQATLAHGYSEQIKNLRTIPGVGVTIAHTFTSEIFRPDRFQRAEDICAYVGLAPVTSHSGSSKEKAWLRPVGQRYLRSILVESAWRLIRVEARYRDFYNRIRNKTGLPQKAIVAVARKLLILIWRIAIEKRAYRPAELH

SEQ ID NO: 298812 - protein, 338 aa, unidentified
MVLIGIDPHKATHTAVAVDTEETALAELTVKADRHQVERLLKWAIDFPDRRWAVESANGLGFLLAQQLVAAGEDVVDVPPTLAARVRVLGSGKTQKNDRNDALSTAIAAMRAKRLRNVVAEDHGGVLRLLVDHHHDLGSLRTQAVCRLHALVRCLIPGGTGLRLSAARASVVLRSVRPTNAVDAERKRMALGHVADIRRLDAEIAASKARIVTAVAASGTSVTELYGVGPVVAAFLIGHSGDMARFVNRDHYASYNATAPIEASSGPRVRHRLNPRGNRRLNHAIHVIAICQIRHPGEGRRYFDRKVAEGKTTKEALRALKRQISNAVYRQLVNDSTR

SEQ ID NO: 298813 - protein, 412 aa, unidentified
MIGGPMDWMQQPGAFAGIDWGGHEHQLCVVDGAGSKELELRVTHDVSGLDELVRALALHGEHVPVAIERAEGLLVEHLQAHGHPVFPVSPRISARARERYRVAPVKDDRFDAFVLADTLRHEHAHWRALAVPSSLLAELRALTRDRGRLLETQQATEAQLRAILECYHPAPARLFSSLDRQIALAFVADYPTPAVASRVRTTRMAGFLRRNAYTGRVPAQVLAERMRANLLSGAEGTIAGKSLSAKTFAHLLGVMNDALAEFDDAIASVLAEHPDAHIFASFPGVGPILTGVLLAEIGEDRTRYPSPEALLAEAGLAPVTRSSGRSRSVRFRYAANTRLREAAMWWAFNSIKTSPWAAVAFRQARDERGQRYHRALRGLAARWMRVAWRCWQDGATYEPARHTAAANAEAAA

SEQ ID NO: 298814 - protein, 360 aa, unidentified
MKIVGCDLHAKQQTIAMVDTETGEFTEKTLAHEGNKVREFYAGLEGSVVVGIEATGAMQWFLQLLEELGIECRVGHPAKIRAKETRKQKHDRRDARLELELLMEDRFPTIWMPSSEQRDLRTLLRDRHQWVKVRTRVQNTLQAIALNHALRHGHALWSPAGQKALQALALSRYSSQRRDELLHLYVPLQKRIKELDRQVEEEAKRRPQALRLLTHPGVGPITALATDVFLGDAHRFATGNQVASYIGMIPCEHSSGKRQRLGKLSKQGNARLRYLWTEAVMHAAAKDPELKRFYRRKLIQKGMGKARIAAARNLGIRLWIMMRDQIDYEEFCRRGKLRQSGEAHAGMPDFNSGPASAVTG

SEQ ID NO: 298815 - protein, 411 aa, unidentified
MDVFCGIDWAEDHHDVALADRDGGLLARLRISDDAAGLARLLELLASHGDSAEAPIPVAIETPRGLLVACLRPAGRMVYCVNPMAVARYRDRHSAAGRKSDHGDAVVLANVLRTGMHAHRPLAADSELAQTVAVLARAQQDAVWDRVTAHNRLRSHLREYFPGFLAAFAAVKGGIMRPEARAVLAAAPAPADAAKLTVAQLRALLRKAGRSRGIDAEAQRLRGAFRQQQMRQLPLVEQAMGRQALALLRQLDAACQSADDLEAAGIEAFNQHPDAGIITSFPGIGALTGARVLAEIGDDRSRFKDARGLKAYAGAAPITRASGKTRSVTRRHVKNNRLAAAGYIWAFSAITASPGARAHYDRRRDAGDRHAAAQRNLFSRLLGCLHHCLLSGQHYDEATAFPAKAAPPAAA

SEQ ID NO: 298816 - protein, 450 aa, unidentified
MPRRHPRTTRAATLPIRTPHAAGIDIGATEIYVCVPLDRDPQPIRRFGTFTPDLWALAAWLQQCGVTSVAMESTGVYWVPLYQILETRGLEVCLVNARHVKNVPGRKTDVQDCQWLQYLHTVGLLRASFRPPETVCAVRSLLRHRDALVQLAATHIQHLQKALNQMNLQLHHVLSDITGVTGLAILDAILAGERDPRVLAQHRHRTVKASPETIAKALVGDYRPEHLFTLRQSLDCYRHYQRLIEACDREVQGLLGSFAAAGLPAPVRPSGPGAGRALRFDLRAELSRILGIDLTQVAGLNTPTVYTLFAELGADLSKFPTGKHFVSWLGLCPDNRISGGKVLSVKTRHVKHRVAQALRMAALGLSRSRSTLGAFFRRMRAKLGAPKAITATAHKLARIVYHLLTTREPYEETQLAKAEQEHRQRTESRLRSQARALGFQLVPVIEQSVS

SEQ ID NO: 298817 - protein, 408 aa, unidentified
MEVLYPRCAGLDVHKDSVVACVRCVSPPIHQEVRSFQTTTTGLLALADWLTSHGCTHVAMEATGVYWKPVWHVLDGSFELVLANAQHVRNVPGRKTDVNDATWIADLLAHGLIRSSFVPPARIQELRDLTRTRKQLVREISQHSLRIQKVLEDANIKVASVLSDVLGRSGRAMLAAIIVGEDNAERLADLAQGTARKKRTELVEALRGRVTDHHREMLTLHLGLIAALESALRQVDAAVGKALAPIQARAQLLTTMPGVSDIVAQVVVAEIGVDMTRFPSAAHLVSWAGICPRNDESAGKRRSTRVRKSGTWLKTTLVTAAWAAVRVKDSYLRVQFLRIKSRRGPKKAILAVAASMLTAAYYMLRDGVEYRDLGPSHFDRHDRNKTVQRLVKRLRDLGCAVEIQQDAA

SEQ ID NO: 298818 - protein, 331 aa, unidentified
MKNKEFIGIDVSKNVLDIFILKLKFHFVVSNDPSGFAKLLEICCIKLSCTKYNLFYCFENTGRYSRLLSIFFHESDIMYAMVPALDIKQSKGMTRGKSDKKDAKSIALYAWRKKDELVPTKLHSAEVGQLRQLLALRNKLIKHRTAYKNAIKDLHDCFCEGETEFIRQTQVRLIKQLNIEINNVEQQIDDIIQAMPEWKTNYKLIQTVKGIGPVTAKYFIIYTENFSRFSDPKKFACFAGIAPFEYSSGSSIKGKTKLHPCANKHLKSLLNIAAMGAVQLKGEYKTYYQRRTLEGKNKMNTLNIIRNKPGTRVFAVVKRQTPYVDFSTFAA

SEQ ID NO: 298819 - protein, 341 aa, unidentified
MTLYIGVDIHARQQTLSYLDTEDGTTGQVELQHERDDVKGFYCQFQGEVIVGIEACGYTNWFEELMEQLGHQLLVGDAAEIRRLARRRQKNDRRDADLLLDLLVHHEFPALFRYSRESREVLRQLRYRHKLVKLRTMVANTLHALAINAGLSLRAKLLTKGGRQQLRTLQLSAISQQQRDELLSLADELTRRIQTVEQWLQTQAKSDARVQRLQTHPGVGLLTSLCLVHTLGDLSRFSSTRKVAAYVGFDPMEDSSAERKVYGGISKAGSKLLRYLLVEAGQTAAKDDQDLKQFYRRLLPRRGKARAKVAVARKLLIRCFIMGRAEIDYAEFLRRAKKETE

SEQ ID NO: 298820 - protein, 347 aa, unidentified
MNHYAGLDVSLEETAICVVDSTGQIVKEARAASEPETLIAALREIDLPLERVGLEACSLTAWLHDELHSAGLPAVCIETRHANAAMKTMPNKTDRNDARALAQIMRTGWYRQVHVKSRQCRLWRSLLVARRTVLNEMRSIENVVRAVLREGGLKLGTPSRAAFAERVRDLMAEDASVKPLVDPLLTILVTMLDQFARLTKQVLDIVRREKVCRRLMSVPGVGPITALAFRATIDRPDRFRRSRDVGAHLGLTPARYQPGETDVSGRISRCGDELARTALYEAAHTLLVRSRKWSSLRAWGMKVAKTRGMARARVAVARKLAVILHRMWSDETEFRFGRNPAAALAAA

SEQ ID NO: 298821 - protein, 319 aa, unidentified
METIRFEQIVKVGCGIDVHQHLIVASIRKSNEEVETREFTAYTSSLTSLRDWCKQEGVTHVAMESTGVYWKPVFNILEEDFEILLVNARHVKNVPGHKTDKKDSRWLSKLLLSGLLKGSFIPPRDIRDLRDLVRYRKKVVAQAAADKNRIIKILEDGNIKLSSVLSKVDGSVGTKIIDKLIEGVTDVDELMKFYHGKIKVEQAEFCLALGGKLTSHHRLMLQIYKDSISDKERQIKRLDAEIEKATKAYQVEIDLLQTIPGVGKDSAITIISETGVDMDKFPDEHHLSSLSGMSPGNNESGGKKKLQKRFTATHTFRVH

SEQ ID NO: 298822 - protein, 408 aa, unidentified
MSDPATPRFVGLDWGAFRHAVCVIDASGQLLTRFELEHDGAGLTELTGRLARFGAPEELPIAVERPSGLLIDTLVAAGHPIVPIHPNVVRHTRPRYGAAGAKSDAGDAFMLADMLRTDGHRFAVLNPASDAIRALRALTRCRDDLVAERVRLTNQLGATLDAFWPGAKTLFAALHSPIALAFLKRYPSPAKAARLGEKRMAGFLAAEHYSGRRTAAELVERLRAAAIGHVGTLEAQAREQLVGDLAALLVVLTGRIRQLDRRIDEALGRVKLGAVMASFPRAGRINAAQIVAELGEDPNRFATEARLAAEAGVAPVTRASGRARAVVCRFACNKRLRRAITCWADNSRHASDWAQGIYQRARASGKKHPHAVRVLARAWLRVLWRCWQTGTVYDPARHGAAAALVKPA

SEQ ID NO: 298823 - protein, 402 aa, unidentified
MNSVGIDISKGRSTVAVMRPFGEVVISPFEVRHTGSELSKLAKQLKSLDGETRVVMEATGNYHAPVAKLLHDAGLYVSVINAKLVHGYGNNDLRRVKTDKKDSVKLANYGLDRWLTLTRYVPEEDTRLLLKNCYRQYQQYSKVQTVLKNNLISLLDTVFPNVNRLFSSPARADGSEKWVDFVAEFWHCGCICERSEKAFVSKYQKWCKKHGYNFGEEKACAIYAEASGHIGVMPKSETTKLLVEQAVSQLRATSAALAALKHEMQSLASMLPEYPAVMDMFGVGLTLGPQLIAEIGDVRRFYSKKALVAYAGLDAPPNDSGDVTGRHKSMSKVGASSLRRTLFLVMSAYLQNAPLDEPVYQFMDRKRAEGKPYRVYMMASANKFLRIYYASVKAYLDSLEHD

SEQ ID NO: 298824 - protein, 349 aa, unidentified
MRFYTKQHQFYCGIDLHASAMYCCILDSTGEVVVHKNIPTKPKAFLKLIKPYRDNLVIGCECMFTWYWLADLCTEEEIDFVLGHALYMRSIHGGKAKNDKIDSYKIASLLRGGNFPLAYTYPQKMRATRDLLRRRNHLARKRGELYAHIQNTATQYNLPEALGRIAKPSERDGLPAKFRDPIVRAMVEVDLATIEHYEELLGTLERHLEKIAVGHDPLTLALLKSIPGVGRILALVILYEIEDISRFPRVQDFVSYCRLVKPAKESNGKKYGHSGKKIGNAHLRWAFGQAVVLMLKGNKPLQTVLQRLASRYGKGKALAILSHRLGRAVYFMLKNQVPFDMERFLRKST

SEQ ID NO: 298825 - protein, 411 aa, unidentified
MEQICERVAGLDVHRDAVAVCVRTPGPRGGVQVEKARFTTTTSGLAVLAGWLAEREVALVAMEATGVYWKPVYYALEDRFELWLCNAHHVKNVPGRKTDMSDAEWLADVAAHGMVRPSFVPPPAVRELRVLTRYRQKQASIRAGEIARLEKVLQDAGIKLTSVASRVLTQSGRAMIEAMIAGQRDPRALAGLAKGKLRPKIPQLAEALDGHFGGHHAAVAARILAHLDFLDTAVAELDAQIAERITGGYGSAARLLRDVPGINRAAAEVIIAETSADMTRFPSPAHLASWAGLCPGNHESAGKRRMVATRPGNPWLRRTLIESARAAARTKGSYFGAQYRQIARRRGPNKAAVAVAHSLLDVIWHMLTTGEVFTDPGENYFTSRQDKQHQARRLVSQLEKLGYTVELAPAA

SEQ ID NO: 298826 - protein, 397 aa, unidentified
MIAVGIDVSKSKSTVAILNADGSIRAKPFEIHHNLDELHSLALYIKSTNEQPIILMEPTGHYHYPILKIFQEEHLPVCLINPYLMKKYGDNELRKAKTDKKDALRIAQYALEKAYSLTPYESTEQKYDDLRFLSRQYKQRISTLTVAKVQLQNLLDETMPGITSILPLKSRDPENCVLLRFIKRFKSFDVIRKMGKTRFLESYKVLVKKTTDRYALSKGLAIYELVINSVTTRGENPLSSIVQEQCVDLVSTAQTAADEINLQMRIIAETIPEYKILHDMPGVGDRLGPIILAEIGDIRRFHSGKALNAYAGNDAPPYQSGQFESRNRHISKRGNPALRKACFEVMQALKLSKPQNDPVYLFMIKKEQEGKPYNVAKMAAVNKFLRIYYARAMELYK

SEQ ID NO: 298827 - protein, 350 aa, unidentified
MTRYIGLDVHSQSTALAIVGESGRKLGSKVLETSAPVLIEALRAIPGPRRLVLEEGTQSSWLAEVLGPHVEKLVVTVPRARTGEAKSDVADAFARAEELRRGALDKTVFKSAATPLRQALKLYQPLTTDMVRAKNRFRALLRSRGLQVNAEDPYDPTPKELERMLKQLPTGMRFAAEATLEQIMLLEDLRNRAEDVLVGEASKHPAFGKLLTAPGFGPIRVATVLAIVVIPDRFRQSHQFWSYCGLGVQTVVSSEFRFRGGLPVRQRQPMTRGLKPGNPMLKNVFKGAALTVALRLLNHPMHAHYRQLLKRGMGESLARVTIARKLAAIVLAMWKNMEAYDPAKHHIHHP

SEQ ID NO: 298828 - protein, 353 aa, unidentified
MYVTSAAWTDGLTIGGVDTHRDTHHAAVIDQVGRHLADAEFPATPAGYRHLLEWLAEHGRLERVGVEGTGAYGAALTRFLRERGVAVVEVDRPDRKDRRTRGKSDPIDAYAAARAALSGAASGHPKARDGRVEAIRVLRVVRRGAVKARTQTMNQLKGLIVTAPADLRESLRGLPTAGLIATCARLRPGSGDQPAAVMSKCTKLALRRLARRYQQLSREIAELDAELQPLVRITAPALLELPGVGAEVAGQLLASAGDNPDRMRSEAAFAHLCGVAPLPASTGRKDRHRLNRGGDRAANTALHTVVLTRLRYDPRTREYMRRRTGQGLGKKEIMRCLKRYVAREVYRVITAST

SEQ ID NO: 298829 - protein, 459 aa, unidentified
MKGRQQEGDGTAGMPLVNLNAAGLDIGAAEIWACVPADQDVEPVRRFGTVTPDLQAMAEWLVGCGIDTVAMESTGVYWIPVYEILEARGFQVQVVNARHVKNVPGRKSDIQDCQWLQGLHSVGLLRGSFRPAGEIVTLRAYLRHRATLIEHRAAHIQHMQKALQQMNVQLPQVVSDITGVTGLAIVRAIVAGQRDAQQLAALRQPGCKKSAQEIAKALSGNYRREHLFALQQALALYDFYTEQMAACDAEIEGQFANLKPIRDDLPPLPPSNKPESHSKNAPSYDARSYLYRIAGVDLVAISGLNESSVQIIVAETGIDMSHFPTEKHFCSWLGLAPHNDVSGGKHLRSRTLPTNNRAGQAFRMAAQSVSRSPESAFGAFYRRMRAKLGPSQAIVATAHKIARAFYHILKHRVPFHDMGGAEYERRARLRELKNLQKRAAKLGLVVVEKPQAAALAGSF

SEQ ID NO: 298830 - protein, 368 aa, unidentified
MEKSIIFVGLDVHKNSIAVAIADTGRNAEVRNYGIIGGGLDDLDRLVKKLAVPGKELHFVYEAGPCGYEIYRSLTLRGLECAVCSPAHIPKSPADRIKTDRRDAMMLARLHRAGELTYVFVPRADDEAMRDLTRCREDAKKAQRVAQQQLNGMLLRLGFRYPKDNWTKAHFGWLADLKMPTPSQQVVFQEYIHAIKETTDRVERLTNQIETLVPTWRMAPVVTALQALRGVSIIVATTTIAELGDLTRFETPKKLMAFLGLVPSEHSSGEKKQRGKITKTGNGHARRVLVEGAHAYSYPARMTRLILKRQEGLSQEVRDIAWKCQVRLCARFQRLVAKGKNRNAVVTAIARELAAFMWAIANKTPIAA

SEQ ID NO: 298831 - protein, 394 aa, unidentified
MKLIGIDIGKNKHFFCVMDQQTGEIISQPVSFSNDKEGFDFLLQKIKSYPKDSVIIGMEDTGHYHFALLKYLLDLQYTVALINPKTTDFNRKMQGGITKNDKLDTINICDVLDTPERKKQYRITKVNKFDLYEQKQLTRQHHNLKEELNVYKNRLQKSIDIVFPEFNSLFKSKYGTVYINILKTFGSAENIANTDIRTIRKCFEIDGRGNRISLTPERLKERARSSIGISSLAEVIQIKHLSAQIDLIEEQLSEIDKKIEEFSIQNNSPILSIPGISHFSGTSILAELGDISNYSKPSQIIKFAGVAPLHYESSQFNAQHTAITKKGSKYLRKTLYQIILPVIRHNPVFNKYYQLKISQGKGHRCAQGHCVRKLLRIIYHLLKTNQQFDPQLLR

SEQ ID NO: 298832 - protein, 344 aa, unidentified
MLYVGLDLSRKRLDWQALDRDGERVSIGAVPPDRDGLAGLAQRLGDTPVLAVIESMSGARFVHDQLELAGWEVKVANAARARGLAPLACKTDRIDCWVLAELARLDLVPEVWLPDAAVRAERERARFRLHLVKHRRSLKQRVHAILFQHGLPNPHRDLFGAGGRCLLTRLQLDEPWASTVQASVQLIDQLDEQIDECERELRRLGADHRYVPLLTTLPGVAWVLGYTIASEIGDITRFASPRKLVGYTGLTPRVEQSGERDRRGPLRKNGPDYLRWALIEAAHTAGRDPRYQPVVERMRARHGRKRGSKIAAIEIGRRLSEAIWHMLTNNQPFAPAGAPTPLAA

SEQ ID NO: 298833 - protein, 339 aa, unidentified
MSEQIRFDRNLATYVGIDVHPATHTAFAMNRFEEGRGSLRFENTHNGIQQFLSWLSCVDGERSNIIVGVEGRGGNGHALVGQLLDTYDKVYEVNPLYTKHRRSFGTKQEKTDERDAKLIAEVLTRKLDELPAITKQEYLPRQVVLKKSVEFYDEATLTGARFKNQLHRLQRELTLATNKQEKHILTLAIKEKQADILRFAKRQKAFVKQFEVLLEGNGKNLTTFPGISTIAAARIVAHVNGVSRFHSLDGFIRYTGIAPIERSSGKTTKYKQNYGGNRQLNSVLYIVALSHLRWDPKGKAYFEKKVQEGKTKKHAIRCLMSRIACIVYAMLKSGEAYRG

SEQ ID NO: 298834 - protein, 419 aa, unidentified
MSFKILKNNCCGLDVHKTWIYACIGITDSNGRTEYKQARFSSFTKGLQELCDWLVKYNCNDVCMESTGKYWIPVFNILEKNNLWVTLSHPKYTKPQKGNKTDRKDAKWICDLYMCGMVKPSFIPPADIRQLRDLVRYRFKLTCMITGEKNRAQNCLTVSNFKLDDVFSDVFGKSSRSITEQILQHPGETFDVAPFVDGRCKTPIEEIQAAVDGAISTEQAVKLRQCLNHIDELEKHQAEIEREIFRLSDKYESILNLIRTVPGFDKNPLTAIQVLSEIGGDMSVFPTAKNLVSWAGCCPRNDQSNHKIKSTRISRAGSYFKPVLVQVANALIKSKKHPEFTTRYRRIKARRGHKKAIIAICRMILTAIWHILTDLKPYTPEGFLDSRPVNKEKVLTTSQALNLLKQRGYFIKDDPLSVS

SEQ ID NO: 298835 - protein, 376 aa, unidentified
MENDSTLYVGLDVHKDSITVAYALGSGEVELLGKIGTTQTDIDRLCKRLQSKARRIRVVYEAGPCGYGVYRQLVQKGFDCMVRAPSLIPKKPGERVKTDRRDAVKLVRSLRAGDLSAVYVPTVDDEAFRELARAWVSAKDDLKRARQRLKAFLLSHGMRYTGPADWGPAHRRWLSAFSFDSVWQQLAFDELRRTIEDRLAQCERLEAALREAVVNWRFYPAVLGLQTMRGVQFTTAVGMLAELGDLSRFAHPRQLMAWLGVTPCEHSSGNKRRQGSITKKGNSYARKLLIEAAWSYQHPARVSREIQRRHEGIPKPIVDRAWDAQVRLCRRYRKLVARGKEKNIAVVAVARELSGFIWDISRLAMSLAIPREELTA

SEQ ID NO: 298836 - protein, 396 aa, unidentified
MAQIWAGTDIGKTHHHCVVLNTEGERLLSRRVLNDEPELLGLLTDVLALDEDVVWAVDVADGMAALWISVLLNHGQHLVYIPGLAVNRASAGYRGMGKTDAKDATVIADQARMRRDLTVLRPDDEHAIELRVLTSRRSDLNADRTRRINRLRGQLAGIFPALERTLDLGNAGPLILLSGYQTPAALRRTGGKRLVTWLRNRKVRNPEALAEAALEAAERQHTAVPGEKITAQVIHTLAREVMSLNEQIAEIDKLIAARFRDHGLAEVISSMPGIGPLLGAEFLAATAGDMTRYGTADRLASLAGVAPVPRDSGNISGNLHRPRRYHRGLQRVFYTSALISIRNCDASRRFYERKRAEGTRHIQAVLALARRRVNVLWALIRDGQCYQSDLPVTAAA

SEQ ID NO: 298837 - protein, 426 aa, unidentified
MKEHIDYLSTLFVGIDIASRIHVISALDFNQDFYIKMKPFENTKEGAGIVEKMIADVLADNHQFKYVVIGMESTGFYGVHLANYLSTSELLAPFSVRVYCLNPKEVKNYKKSFNDIGKNDGIDSFVIADFARVGRIAIKPWRGSQYLALQRLTRHRMHITECITREKTYMLNNIYLKFSEYALLRNGEHPFSNKYGATAEAILTEYTTNEDIVNSSIEELVKFINSKSKGRIADPEETAKIVQAAARNSYRLDKCLYEPLTISIASSFNCISSFEKELKAIDKAILQTVQGLNPEEYTVLNSIPGIGKVYSAGILAEIGSIKAFQNANQLAKYCGIVWNDNDSGDFESEDSRMSKAGNRYLRYYIIEATGSVINHCPEYKAFYQKKYAETRNHQHKRALALTSRKFIRLLFGLLDKGQLYSPEKGR

SEQ ID NO: 298838 - protein, 339 aa, unidentified
MKYTPVGVDIAKHVIQVHFIDEHTGEVIDKQLRRQDFLMFFCNREPCLIGIEACGGSQHWARELTKLGHKVRLLQARFVKAFVTGNKNDVMDARAIWMAVQQPCKEIAVKTEEQQSFLVLHRTRMQLVKFRTAQINSLHGMLLEFGETIHKGRAAMDREFPEALERLKERLPPNVISVLDNQFNKLNELDLQIDDIEKQLTSVARQNETCRRLLDIPGVGPLIATAAVAIMGEASAFKSGREFAAYVGLVPRQTGSGGKIRLLGISKRGDKYLRTLFIHGARAAALLTKEPGPWITELKKRRPASVAIVAMANKLARTVWAIAAHGRKYNKNHVSIRPY

SEQ ID NO: 298839 - protein, 425 aa, unidentified
MKEHIDYLSTLFVGIDIASRIHVISALDFNQDFFIKMKPFENTKEGAGIVEKMIADVLADNHQFKYVVIGMESTGFYGVHLANYLSTSELLAPFSVRVYCLNPKEVKNYKKSFNDIGKNDGIDSFVIADFARVGRIAIKPWRGSQYLALQRLTRHRMHITECITREKTYMLNNIYLKFSEYALLRNGEHPFSNKYGATAEAILTEFTTNEDIVNSSIEELVEFINSKSKGRIADPEETAKIVQAAARNSYRLDKCLYEPLTISIASFNCISSFERELKAIDKAILQTVQGLNPEEYTVLNSIPGIGKVYSAGILAEIGSIKAFQNANQLAKYCGIVWNDNDSGDFESEDSRMSKAGNRYLRYYIIEATGSVISHCPEYKAFYQKKYAETRNHQHKRALALTSRKFIRLLFGLLDKGQLYSPEKGR

SEQ ID NO: 298840 - protein, 326 aa, unidentified
MDYFAGLDVSVKDTSVCIVDGTGQIVREAKVASEPDALLQIMRNPAYCFKRIGLEAGPLSQWLFSALGEANLPVICVETRHMRAVLKAQINKTDRNDARGIAQMMRVGLYRPVHVKTLRSQKLRMLLTHRKLLQSKAIAIENELRGTLRNFGLKVGMTGWTRFAARIEELVADMPDLAVLVEPLLVVRRVLREQIAVLHRRLLTIVRDDEVCRRLMTIPGVGPVVALTYRATVDVPARFRKSKSVGAVFGLTCSRDQSGERDRPGAISRCGDEMMRAMLYEAAQAMLLRSAKWSWLKAWAMQIAKRRGMKRAIIALARLHSHSCIL

SEQ ID NO: 298841 - protein, 322 aa, unidentified
MDKYKEIFGVDISKDVFDVYGSESGHNQFKNDASGFKLFLKSLPKESLVIMEATGYYHYRLAQFLFKQSVLVSVVNPLSVKRFIQMKLAKVKTDKSDAKAICEYGKINKVPLYTALTNVQSECLQLFRLMDSFLKKRTATKNKIHGEEVLGVPSKWVYRSLKRDKKHLDKELLGIEKKLLSLVKQEQQVQLTLLTSIPGIGLKTALFMIVLTDGFDKFETAKQLCSYVGITPTIRESGSSVRGRSRISKVGNKKLRNLLFLCSFTACKHNKGCREIYERIVNKGKSKKLALIAVSNKLIKQSFAIVKSGLSYDETYVSVLPK

SEQ ID NO: 298842 - protein, 454 aa, unidentified
MRKPRVIPDEDHEVVYERVAAVDVAKASGVVCMRLPDPARPGRYSNQIWDNVPAARARITELGRELLRHQVQMVTLESTSDYWRIWYYVLESTGLAVQLVSASQARNLKGRPKTDKLDAMWLARLTQWGMLRPSFVPPAAIRQVRDFTRARTDLVHERTRVLQRLEKLPEDAMVKITSVVSDGMKAKSAVAMVAALVAGERDPRTIADLAKGSLRGKRDALAEALDGMFDSHHGVIAQALLDQVAFLDQRITQMEAGAIAALAQVEQSWGVDADGETGPGRGTGPDSRVLAAVYRLAEIPGVSVWLAIVIIAEIGLNMALFPTPAHLVSWMGLCRSAAQSGTRRGKGKPKKGNSYARAAAGQAAIGAAGTATFLGERYARIARRRGGAIAQVAVARSIMIIVWHLLADPAARYRDLGPDWHAAHVNRDKKIRNHIRGLQALGLTVTVADDEHAA

SEQ ID NO: 298843 - protein, 363 aa, unidentified
MPTEASPRLYAGLDLHKSNVFCGLIDQEGKPIYRRRLSAELPTILQALEPYRPQLKALAVESTFNWYWLVDGLQAADYPVHLANPAAMEQYRGLKQTDDESDALWLAEMLRLGILPEGYIYPPAQRPVRDMLRRRMLVVRQATQTLLSLQSMVVRHTGHSVSARNLQDWSLAQVRATFVDPYSQQTATAMLELLGEQRRIQHSLEKQVLAVAKPTGPFVRLLSLPGIGNILGLTITLETGPIQRFGSAGQYASYCRTVDSRCVSNGKTKGRNNRKNGNEYLAWAYVEAANFAQRYSPRAHAWFARKQARAGRVVAVKALACKLAKAAYYLLRDDVDFDEARMFGASSGGGRQPVKGVGSQPSD

SEQ ID NO: 298844 - protein, 462 aa, unidentified
MPRRKLTAQTRKPTPRPVYHEGAATLQVQNPHAAGIDVHSDNHVVCVGPGQVCTFGAYTADLHAIAAYLRQAGVTTVALESTGVYWVPLFEHLEAQGFACYLVEPGQLHGCGARPKTDVLDCQWMQRLHTYGLLKPSFRPPESVRALRAYHRQRQMVIRHAAAHVQHMQKALEQMNVKLTEVLSDITGLTGLRIIRAVLDGERDPQALAGLASPKCAKTREEFALALRGLWQPEHLFELRQAHELFLTYQRLVDECDRQIEAELARQPDRSGDKPVPRKPRRCGRKKNDLRFTATGPLFRALGVDLTEIEGIDVGTALVILAEIGVDVSRFPTEKQFASWLGLCPNTARSNLRERKRSPRQGSSRLRQAFRMCAQSVGRTQTPLGMFYRRIKSRIGGRGACTATAHKLARLVYRMLKYGRDYVKQGMDEYAAKMRADAERNLRKKAAALGFELTPRAAAATT

SEQ ID NO: 298845 - protein, 341 aa, unidentified
MRTLYVGMDIHKNFIQAAAMDQAGTIIKEQQFKSNEKDIKRFVKSLKTQNIQAAIEATCTWYHVYETLDALGVKTTLVNMRRTKTIAESKIKTDKLDAKTIAQCLRTGFIATAYIPPKTIMEQRTILRHRMSLRKEITRYKNKIHAILLRNGIQHSDYSDLFGPGGMKFLRNITLPDSEQYSLTSYLNIIETLLHEKTQTAEKIETLCKHNKHAMLLTSIPGISYYSAMIILTELGDIHRFPHPKKLCSYAGLVPRTIQSGNHVYHGRILKECNQNLKWILDQCTHIHIRHCPNSSITRLYYRVENKKGRNKAIVAASRKLLTCIWYMLMKSETFKYNNDD

SEQ ID NO: 298846 - protein, 424 aa, unidentified
MKKHSYRTQSIASVKLETLQAQVRGHRLVVSIDVAKADIVAALMTADRDVLALIRWRHPEQTMQFFQLVTDRLAWSSLEVVMEPSGTYGDPLRSWFNRHGYAVFRVSPKRCHDAAEVYDGVPSLHDPKAATLIARLHLDGLSERWPELDPYQRLLRAKINTLELFDDAFYRQLNRLEGQLGRYWPELTAQLALTSVTLLELLSTFGSPAQVAAQADQARALMRRVGRVWLSDETIEQVIESATATVGMPCLAVERASLQRLAAETRRAQQSAKAAEQAVIDAGLQQPSIQAMAAVLGKRTAVVLGGLLGPPEDYPNAASYLKAMGLNLKERSSGKHQGQLMITKRGSGTVRRYLFLAALRLIQKESIIQQWYQHKVNRDGGRLKMKAVVAVMRKLGRAWWHVGQGQPFDATRLVDVNRLAQRPS

SEQ ID NO: 298847 - protein, 457 aa, unidentified
MTRQSPSRRQRDLAPIHPHAAAVDIGARMHVAAVSPRSDPEPVRTFGTFTGDLQRLADWFEQCRVTTVALESTGVYWIPLYEILTQRGFAVVVVNAREVKQVPGRKTDVCDAQWLQRLHEYGLLRASFQPQGEIATLRSYLRQRERLLEAAAAHIQHMQKALTQMNLQLQHVVADITGQTGLRIIRALVAGERDPDRLATLRDGRCKTPLATLRAALVGNDREEHIFALAQALELYEVYQTKVAACDERIAAVLERLQAQSPPPATALPPPRRAQPQANEPAVPVRAALHAILGVDLTQIDGIGPYLALKLVSECGSDLAAWPSAQHFASWLGLAPHNKISGGKVLSSRTRRSGSRVAALLRLAAGAVGRTQTALGAFYRRLAARVGKVKAITATARKIAVLVYNTLRHGMAYADPGASYYEERYRQRVLSNLRRRAKSLGYVLEKAEPASTEVVVS

SEQ ID NO: 298848 - protein, 313 aa, unidentified
MKEQQRFVGIDVSKKELVVAVIPSGETQSFLNTEEGLASLVQFIRPCSPALVVLEATGSFGAAAVSALALAALPVVVVNPRQVRDFAKATGILAKTDAVDARVIARFAEAVRPEVRPLKDRETQKLEALNTRRRQIVEMITAEKNRLVMAPEWTRRDIQSTIAWLEKRLKKVNDDLDDHLKQSPLWREKEKLLKSVPGVGPVMTTTLLCELPELGTLNRKEIAALVGVAPFNRDSGRFRGKRSIWGGRASVRSVLYMSSLTAIRHNPVIRAFYERLIRAGKRPKVAITACMRKLLVILNTMVKTKTSWRYACQ

SEQ ID NO: 298849 - protein, 320 aa, unidentified
MRTSQKTPDTIATIGIDIGKNVFHLVGLDKGGTIVLRQKLSRGQLARRLANIPRCLIGMEACSGAHHIGRELVALGHAARLIPAQYVKPFLKGHKNDYRDAEAIAEAVQRPTMHFVTIKTPDQMDLLALHRVRSRLVSQRTGVINQIRGFLIERGITVRQGPMPLRKALADILSCGAVSPRIVCLISDLAEDWRRLDDRIATVSAEIEALAGQDESCRRLMSVPGVGPIISSAVVAAIGNGAGFKQGRDFGAWLGLVPKQESTGDRTILGKISKRGNKYLRTLFVQAAHVVLARRPSAAMQRLWPWIEQVHVRWNVGFRG

SEQ ID NO: 298850 - protein, 404 aa, unidentified
MIFVGDDWAEDHHDVYVMDAEGARLAALRLPEGLTGIRALHELIAGHAVEPSDVVIGIETDRGLWVQALGAAGYQVFAVNPLAVARYRERHQVSGAKSDAGDAKVLADLVRTDRHNHRALAGDSLEVEAIKVLARAHQNLIWARTRHTNALRSALREYYPAALEAFDDLADRDALAVLGRAPTPADAAHLSLSKIRSALKHAGRQRNIDARAQHIAAALRTEQLTAPAPVTAAFAATTRAAVGIIIELNRQITDLEAELATHFEAHPDADIYLSLPGLGVILGARVLGEFGDDPNRYTTAKSRKNYAGTSPLTVASGKKRAVLARRVRNRRLYAAIDQWALGAINASPGARAFYDQHRAAGDLHHQALRALGNRLVGILHGCLRHHTHYSEHTAWAHRQITQAA

SEQ ID NO: 298851 - protein, 460 aa, unidentified
MAKRKKSAVTIPALDILGQVNPNAAGLDVGAEEAYACVPPDRDARSVRMFPTFTADIHAMADWLEACGIETVAMESTGVYWIPIYEILVARGFEVCLVNARHLKNVPGRKSDILDCQWIQQLHSYGLLRASFRPPEEICALRALAHHRDNLIRYRAAHIQHMQKALQLMNVKLTVVVSDITGVTGLSIIRAIVAGERDPHTLARLRQRGCAKTEEEIAKALQGNYRPEHLFVLKQALAQYDFYLGQIEACDTEMEAMYTDLPPCDPDEIASPPPKPRSRRTRKNQTHFDLSTSLYRVVGVDLTAIDGLDALTVHSIITRIGTDVTAWPTVKHFTSWLCLSPNNDVSGGKILRSRTQKTQNRANLAFRLAAQSLSRSDSALGAYYRRMKARHGPAKATTATAHKLARIVYSMLKNRTAYVDPGADYYEQQHRDRAIRSLQLKAAKLGLELAPVSTQPMTVS

SEQ ID NO: 298852 - protein, 486 aa, unidentified
MAKRKKSTFERLQSSCLNRQQRRELQRQFDTDSAELTIVQPNAAGIDVGNASHFVSVPPDRDEVPVREFGSWTADLHRMARWMKSCGITSVVMQSTGVYWIPVYDVLEQEGFEVYLVNARGTKNLPGRKSDVQECQWLRKLHTYGLLRKSFRPPVQIREVRTLWHLRGRILEDASRAVQHIQKALTTMNVQLANVISDVSGVTGMNIVRAILQGQRDPHELAKLRDPRIRANEEEIAHSLQGNWQRDVLFELQQVVEGYDFHRQQLATIDAELQKYMTALPTREPVGEAPVEVSKLSAKQRKKLKANRKSKDNRPAFDLGAELTRLMGVDLRLIDGIDVMTVQTIYSEVGADLGAWPTEGAWASWLELAPRNYITGGKVIKKKKRPSNNRVTTALRNAAESLVRSDSYLGARYRHLTGRLEGLKGVKAMAHYLACLVYRLLTKGQAWVDRGVAYYQNKRRERELVSLHRKAAAAGMQLVPIAQGNA

SEQ ID NO: 298853 - protein, 319 aa, unidentified
MTRIICGVDIASSSLAARIGRDGIASTFANTQPGIAELAAFCESHGVELVAMEATGGYEQRAFAQLSEHGLPVAVVNPRAVRQFAQSMGALEKTDAIDSGMIAWYAETKKSQPLCLAPKTQLELRARVTRLRQLTEMRTAQLNQQRLVIDPAIQKGFRKMLQFLAQQIEELEQAVAGLIQSDPLWRELDQAFRTIKGVADRTVARLMAEMPEIGTLSNKTISKLAGLAPLANDSGKHQGRRAVRGGRSAVRDILFIVGSVVARYEPDFIVFQQRLRAAGKPPKVVRIAVAHKLLVRLNAKAREVRRLAVAHAPSALTCA

SEQ ID NO: 298854 - protein, 454 aa, unidentified
MGKPRVIPDEDHEVVYERVAAVDVAKASGVVCLRTPDPQRPGRFVNRIWDNVPATRARIGELGQELRGHRVQMVTLESTSDYWRIWYYVLESIGLAVQLVSASQAKNLKGRPKTDKLDAMWLARLTQWGMLRPSFVPPAAIRAVRDFTRARQDLVRERTRCLQRVEKLLEDAMIKITSVAADGMKSKSLVAMVQALIAGERDPRTLADLAKGSLRGKRDQLAEALDGMFDSHHGVIAKSLLDQAAFLDRQVTVMEEQAIAALAQVKESWGVDASGEAGPQAGTSPDAPVLAAAHRLAEIPGISLWLAIVIIAEVGLNMTAFPAPAHLVSWVGLCRSATQSGTRHGKGRQKKGNSYARAAAGQAAIGAARTATFLGERYTRIARRRGRAIAQVAVARSIMIIVWHLLSDPRARYRDLGPDFYASCIDRDKKIRNHLRGLQALGLTVTITPDEQAA

SEQ ID NO: 298855 - protein, 454 aa, unidentified
MLYLGIDLHRKQMTINLRNADGDVLVRRQVSSWGDEPVKFLNEVAGRDPAGYAAIVENCGFHEWLTELLPQHGCREVVLIQADSRSRRKTDRRDANQLSELLWLNRERLLKGQRVRGLRRIVPPTSRDRDDRRLTQLRLNVTADLTRKINDVRHLLRRLNLEQQCPTKGIQTLKARAWLKTLPLPDLDRFEMNQLLVAWRYLEKQRRQIDERIAQRAAKHPQVLLLKTIPGVSSYTALALVSRIGDIKRFATPRSLANSWGLTPSCRNSGETNQRLGAITKEGSALARYVLGQLVLHVLRKDPVMREWFRRIKRRRGAKIARVAVMRRLAVIIWHMLTHQVPYEVARPSRRRPSPRQAANVVPSAPAAPLGALPPDPRDLSPGAEFEGDTASSKPAPKKTSGRRPPSALRTQPGSGARVTSQQGPILPPGCPPASQNGLAKTRSGRQRPKATLS

SEQ ID NO: 298856 - protein, 335 aa, unidentified
MKEITTVGIDLAKSVFTVHGVDARGRTVLRKTVRREKLMELIAALPPCLIGLEACGGAHEWARKFATHGHRVGIMMARFVAAYRKNSKNDGNDAEAICEAVGRPNMRFVPVKSAEQQAVLSLHRVRQGFVEQRTATINRIRGLLAEFGVVLPQRAEQVRRAAVIAAEGLPVLARDAVSDLRAHLAYLDARIEHYERQLVSLARQCEAARRIQTMTGIGPLTASAITASVACGHEFANGRQFAAWLGLVPRQYSTGGKTKLGRITKRGDAYLRTLLMLGARAVLQSAPHKSDRLSRWAMAIRVRRGYHRAIIAVAAKNARIVWALLAKNQTFSVAT

SEQ ID NO: 298857 - protein, 423 aa, unidentified
MTKFAATIGLDWADQKHDLWIQPADGSKAEHRQLEHTPEALHEWVAKLRERFGNRPVAIGIETCRGAVVSALMAYDFIVFFPINPKALKDYRAAFAVSGAKTDRVDASLLEEFVRLHGDKLHALEPDTELTRKLAGLVQNRRLLVDERTRLVNQLHATLKTYYPLAQSLLGAQMNTAMAAEFLARWPELQSLKKATIQTLRAFFYKHNSRGAQLMEERLEAVQKAKALTTDPAIIEPARALVTALAAMLKPLHKVIAFLDKQIELTMDQHPDAAIFRSFPSAGPALAPRLLVAFGTNRARFASATEVAQFYGLAPVVEQSGNSKTVRMRYRCPKFGRQSFHENAACAIRKEPWANCYYTQQKARHDDKHHLACRALAFKLIRIYFACWRDRQPYDPARYLSALEKNGSPLLAKLEASTTTARE

SEQ ID NO: 298858 - protein, 343 aa, unidentified
MQAITTIGLDIAKSVFQVHGVDAEGNVVTRRQLKRRYLLAFFEKLPPCLVGIEACASSHHWSRELQALGHNVRLMPPAYVKPYVKRQKNDMADAEAICEAVTRTNMRFVPTKTPEQQSGLVLHRTRHLFIRQQTSVINAIRAHLAEFGVIAPVGRKGIEELLHVISDPSDKRVPDVVRACLAALGSQLLNLKKQILDFDRMILAWHRSNPTSKRLNCIPGVGPLLATALVANVADPKVFRSGRNFSAWIGLVPKQHSSGGRAKLGSISKQGDRYLRSLFVAGALAVIRYAKLHGTKYRPWVAALLARRPTKVAAIALANKLARMAWAMMARGERYNYPAGLRV

SEQ ID NO: 298859 - protein, 341 aa, unidentified
MGEVSTIGLDIAKSAFQVHGVDVAGSVVIRRRISRAKVLEYFGGLPRCLVGIEACPSAHHWGRELQALGHLVRLIPPSYVKAYLKRSKNDANDAAAICEAVTRPSMRFVPIKTKEQQTVLMLHRTRQLLVRQRTMLSNALRGHLAELGFVSAKGRNGTAELLRIIADGRVSPAVSGILEVLARQYSAIGTEIASIDKNIMVLHRACEASRRLAEIPGIGPIGATALVAEIGDWKAFGSGRSLAAWIGLVPKQHTTGGKDRLGSITKQGNRYLRWLLVVGAMAVIRYARKHGTAKRPWLGRLMERRPTKVAAVALANKIARMAWAIMVRDERYKEPKLLLAP

SEQ ID NO: 298860 - protein, 360 aa, unidentified
MNYNTVYVGMDVHKETFSLCCYTNEKELAEYSQKVDAHYSKVLNYLEAMRFHYGDDVMFICGYEAGCLGFTLYHQLTSHNMKCIILAPTTMSKPTGRKKVKTDKRDAALIARCLAHHDYSPVHIPTEQDEQVKEYIRMRQDHKLALKKIKQQILTFCLRHNYRYDTTKSHWTQAHLTWLRSLEPEGLYQEILTEYLATYDQLTDKLERLDKRIEELASKEDYQENVSHLSCLLGVKTQTALSTLVEVGDFKRFASAQQFASYLGLTPGEDSSGEDQNRLGITKAGNSHIRTLLVEAAQSYTRGKPGYKSKALKARQKGNPADIIAYADKANERLRRRYYQLVLGQNKKANVAKTAVARRL

SEQ ID NO: 298861 - protein, 407 aa, unidentified
MGRAARYSTIVVCTRMMEHAMPKPNDLSRSLTALDQDSTLIAVIEMSLSRWLVSALVPGLKRDPLKQQGPDAEALLRLLHRWRDEAVKAGRVITRICVAFEAGRDGFWLARWLRARGIEAHVIHAASIPVQREHRRAKTDRLDVGLLKRAFLGWLRGEAKHCSMAAIPTLAQEDAKRPSRERENLVGERSRIVNRMKATLVRLGIRGFNVKLRQAPKRLEGLRTPEGELVPPNTAAELRREMARLDFLKAQIKVIERARLERLEAAPAERKHAMIQLLAKIRGIGIETADMLVHEVLARNLRDRRAVARYGGITGSPDESGSKRREKGLARAGNARVRRGMIQLAWRWLMFQKDSALAQWYRQRTADARGDTRKTMIVALARKLLIALWRLVTSGQLPSGVVLQPAP

SEQ ID NO: 298862 - protein, 423 aa, unidentified
MLDTMQIQCWGGNLFMMYNAVGIDASKGKSTVSIIRPAGVVVKRPYDVMHTASGLNDLISYIQSLEGETKAVVECTGRYHEPVLKVFSEANIFISAVNPKLIKGQNDNTLRHVKSDPADSRKIARYALDNWAELRQYSSMDTTREQLKTLNAQFDFFMKQKVAAKANLISLLDNTYPGVNKLFKSPAREDGSEKWVDFAYSFWHVDCVRKIGLKAFTERYKSFCKKHKYNFRTGKAQELFELSQELVAVFPKDKTYKMIIQQSILQLNLASEHLEKLRKEMDDLASTLPEYETVMSMYGVGKTYGPQLIAELGDISRFTHREAITAYAGVDPGVDESGQRKRKSNAASKCGPSRLRKTLFQLMSTILQNKPANDPVYQFLDRKRSEGKNYYVYMTAGANKFLRIYYGKVKAHYRELEAQSQEQ

SEQ ID NO: 298863 - protein, 461 aa, unidentified
MRKARKAAGRRGKKRVDVTANLEILHPHAAGIDVGNAQHYAAVPVGRDPQPVQTFGSFTADLHRLGQWLRACQIETVVMQATGVYWIALYEVLESYAFKVYVVNAKHTKTLPGRKTDVLECQWLQKLHTFGLLNNSFLPPEEIRVLRTYLRQRENLVAGAGTCIQQMQKVLTQMNAPLANVLSDLSGKSGLEVLKAILSGERDPYRLAALADPRVQASRKEIAQSLEGHWREDLLFVLRQVHDLYFFHLDNIAECDRRIQAHLQTLESKVDLASQPLPQPTSLPRRKHIPQTNLQEELYRIAGVDLTRIDGIQVQTAQVVLSETGVNMTHWEDEHHFASWLGLSPNHQITGGKVIRRGTKKVLNRATTALRLAAQTLHHSQSYLGAKYRRLRAKLGAPKAITAMAHQLARLIYRLLRFGTEYHDKGMEHYQRQYRKNQIEWLKRQAAQLNMQLIPNTGVAR

SEQ ID NO: 298864 - protein, 410 aa, unidentified
MSDQTQRYVAFDVHKSYLMVAAVNAAQKVVLPPRRIEFSRFEAWINKHLKAADQVVLEATTNAWYIHDLLEPRVARVVVAHPYQVKLIAAAAVKTDKRDTLALAKLLAANLIPEVWVPPTEVRELRALIAHRRRVVSQRTAAKNRLNSVLHRNNIVPPAGKLFNQENQAWWLSLDLSCSEQLRVRQDLATLLHLNPQIGEIESELARLSTLDPWADPMTYLVQLPGIGMLTAMTILGAIGDISRFASAKKLVGYAGLGARVYASGQTHRGGRITKQGRRDLRSVLVEAAWSAVRFDPNWEETFERLAHRIGKKKAIVAVARKLLVVIWHVLSAAETDRRANADKVAGKLMLWAWQIGQAQRPLSPGQFIRYNLLKLDLGHDLDFIVRGGVKRLIPSPDQLKADRPDLFVD

SEQ ID NO: 298865 - protein, 364 aa, unidentified
MDVHKESFSLCALHGTTGEIVREARCASNVSLVKKFVEKLKIKYGEDIKIKAGYEAGCLGYSLHNLLEQNGIDCDILAPTTMYSASKNKMVKNDKFDAKMIALNLANGTYKEVYVPEEEDVAVKEYIRMLGDFKTSLKKIKQQIKAFLLRHGYVYEGKSSWTIAYMKWLKSLDLQELFKETLGEYLLQYDVLVDKIERFSLRLEELSHSERYEEPVAKLRCLKGIDTTSAMTVHVEIADFTRFPTAKAFMAYVGLTPSESSSGEKISRRSITKQGNSTVRSTLVECANALVKGTIGLKSKRVKARQKGQRSEVIAYADQAVERLQRKYHRMIYQGKPRNVAVTAIARELGCFIWGLETGKIHRK

SEQ ID NO: 298866 - protein, 323 aa, unidentified
MYVGLDVHKRICHGTMMNGEGTIVKQERFSNGPRGVDAFMGGVEGARVVMEAGYCWQPLYDRLEAEGHDVRLAHPLKTKAIAQAKVKTDKIDSETLAHLLRADLVPESWVPPQELRDLRELVKRRAFLVQMRTKLKNRVHAELAKRDITPVRPPFTRKGMEVLQGLGIGAVSQLLPIIEVLDRQIAEVSAIIDRVAIEHGDARLLTTIPGVGYYIALLLVAEIGDVNRFPSSEQLCSYAGLVPSVRRSGSSTLHGSITKAGSKWVRWALTQAVHVHVRYDTRLTRFYRRLAGKKAKQVAVMATARKLLKVVYWMLKSGEEYRP

SEQ ID NO: 298867 - protein, 358 aa, unidentified
MEETRTRVVGIDLAKRTYVAHMIEDGNPKARVWDGKNDETGLLRLCSRLRSSDRVGMEACALAFHWAKVIQAKVGCRVVVLNAGDLAVIYKSVKKTDLEDAGKLGWLLHRLPDEELPVVTLPSEQEELRRAMISELSSKKRARTMMINRLHSLFVRQGIVTIRKPDLATPDRRKQTLAVLTGRTLIEAGRIEEELILVDAHIDQIQQEIRRELRDEPKAARLMSIPGVGPTTAIAFLAHVGDGRRFSKARQVSHFVGMTPRVDSSGETTRMGSITKRGCSAIRGLIVQAAWSATHSAMDHRLKRKYRELEARRGKGRAIVAIARRILELMWVVVTKDLDYWETDRNSLDRKLARLRAA

SEQ ID NO: 298868 - protein, 482 aa, unidentified
MSKPTQHSKKPGEKKTAAGQGKRSRKRKGMCLEDRPILEPNAAGIDIGAREIFVAVPPDRDADPVRVFSTFTEDLEEMAQWLVSCGVTTAAMESTGVYWIPAYDVLEQHGVKPCLVDAHGMKNVPGRRTDWHECQWIQFLHSVGLLRAAFRPDGEVCAVRSLMRHRSDLVQMTNQHIQHIHKALTQMNVQIHHVIDDITGVTGLAIVDAIVDGQRNPLELAKLRDPRIKASEETIVKSLQGTWRPEHLFTLKQSRQMYRHYQDQIAACDEEIEKLLVAFQPRVDPAEKPLPPDRKKRKRGRQKKKNAKTKQGFDLRTESYKIFGVDLTQIPGLMAMVLTLFSEVGRDMSRWKTAGQFVSWLALCPDNDITGGRVAWRGMRRVHNRAGELFRMAAYSLHHDKSPLGDYLRRMKSKLGPRGATTATAHKIAIIFYTMVKKQVEYDATLWAERDTQREKRFEAKLKRQAQQLGYKLVPIEEKPAA

SEQ ID NO: 298869 - protein, 418 aa, unidentified
MTATHFTASTLLVAIDISKHRHEVLIGIPGKKRRRRMTITNTLEDFRRLSAALTSYDLPVRIGFEATGNYHRPLAHHLGLAGFDLKLVSSVGLARTREALHNSWDKNDPKDAQVILHMMEIGAVQFFHDPLVVGTADIQELSKTHEVVSRSKTELWHRILTHYLPLYFPEAERFHRSSRTDWFLAFLERYPTPTMIAAMTREDFIADAWHVVGKKVSKERLLSDIYATAVGSVGLPVGPDSDAVRMFRLVLAEGRSLVRQRNEIEARAVELLSDLPDYQLLTTIPGIGPINAMTILAEAGDLRRFRHHRQFLKFCGMDLATVQSGMFRGQSRISKYGNARLRRTLWMAGQTAVLKRTNSFRDKFERYISKDRHNAHLRRKAYTAIAAKMARTVHAVVNHGEPYRPFFEGVSPGGRTPL

SEQ ID NO: 298870 - protein, 392 aa, unidentified
MTLINFVAANQKYYAFNLLSVFIMVFWSVQYLLQHLLVQTQLSDQLLQRLILILQLPQTPQFRHARPGKFFLPVNGMDYLLPLRLTVRNVLTRRITMNIVFLGIDLAKNVFQLCGLNQAGKPVYTKRTGRKELLQTLANIPACLIGIEASTGAFYWQREFEKLGHKVKVISSQYVKPFVRGQKNDGNDAQAIAVALMQPTMQFVPPKSPEQQDIQALHRARQRIVNHRTATVCQIRGLLLDRGIPIGSAVSRARRAIPLILEDAENGLSSRMRRTIAELYDLFNDLERRIHFFDKEIETVFRQSEACQRIAKVKGIGPKTATAVAAAIGKGTEFKNGRHFAAWLGLVPRQHSSGDRQVLMNMTKKGDKHLRTLLFMVPALSSGLPRITMMVI

SEQ ID NO: 298871 - protein, 339 aa, unidentified
MKVYAGIDLHSNNCFIGLVDGQGRRLGGFRLKNRLDQIIERLSEYEADLEGIAVESTYNWYWLVDGLMDHGWRVHLANPAAMKQYRGLKHTDDRHDALWLAKLLQLGILPEGYIYPKHLRPVRDLLRTRGVLVEKRTSLMTTLSNIVTRNTGRTPRGGDIKVLREDRIAPQLEDDECLQLSANSLKAMIDALTRRIHEIENVVTKHAKLDSAYENLLSIPGVGRVLGLTIVLETGMINRFPSVGDYVSYCRKVSSDHLSNNKIKGHGNVKNGNRHLAWAFGQAADHARRHNDRVRAFYNRKRQRQNAAVAHGAVARKLARVTYHMMSTGQQFVPERAFG

SEQ ID NO: 298872 - protein, 346 aa, unidentified
MQSYVGLDVSLRQTAVCVVDQTGKIMRESMIDSDPDTICDFIRASASNLARVGLETGATSTWLWTELKKRGLPVVCIDARHAKAALKMQINKSDRNDAVGIARIMQTGWYKEVRVKDLDSHAVRALLASRALLVELKRDLENQIRGLLKNFGLVIGRAKMNTFTTRATELIDGRPELTAAIEPLLKARDALAGQIEKLDRKVLRLARSEPQVRRFMTVPGVGPITALCYLATIDDPSRFKRSRSVGAYVGLTTRRYASGETDRTGRISKCGDEMLRSYLYEAANVLLTRVAKWSALKAWGMRIAKRRSMNKARVAVARKLAVILHRMWIDGTEFCWSKEGNGMQPS

SEQ ID NO: 298873 - protein, 394 aa, unidentified
MKLVGIDVGKNSHHFCVMDKETGELNVTPSSFPNNKEGFDFLINSLKPYSKKSILLGMEDTGHYHVALLKFLLSNGYTVALINPKTTDLTRKMEGGITKNDKLDTITICDVLDTPERKKQYRITKVDRFDLYEQRQLTRHHHNLKEELNLYCNRLQKSIDLVFPEFNTLFSSKYGVVYMNLLKTFGSAEAIASTDIRTIRKCFEIKGRGNRISLTPEKLKECAKNSIGISSEVETIQIKHLVRQITLIKEQIAEIDKKIEEFSITNNSPILSIPGISHFSGTSILAELGDIGNYSKPSQIIKFAGVAPYHYESSQYNAQHTAITKKGSKYLRKTLYQIILPVINNNPVFKKYYRLKISQGKGHRCAQGHCIRKLLRIIYHLLETGQSFDPALLR

SEQ ID NO: 298874 - protein, 333 aa, unidentified
MATVDSAGIDVGAEELVGTLWRDGRFLRRTFPNTPAAHKAISRWLTESGRSTRVCVEATGTYGLDLALVLSRSERVQIMVANPRAVRRFAEALMERNKTDAIDADVLEQFAARMPFQAWVAPSREALELRAISRRLDSLRTVCAAEKNRRHAAGLTQYTPESVHSSIDRLIETLELEIEELSKHALALVRSEPTLKARYELAVTVCGIGPVSAILLLGELAYLPPDMDARQWVAHAGLDPKHHRSGTSVEKKPRISKAGNRFLRKALFMPAMTARTHDPALKAFADHLIQRGKTPLQAVVAVMRKLLVALHAMFRKGQPFSSEKLQPSLSTSP

SEQ ID NO: 298875 - protein, 423 aa, unidentified
MAKKEVEAGMQVIFERVCGLDVHKKVVVACLRVLSAGGRVRSEVRRFGTMTQDLLALLEWLQQAQVTHVAMESTGVFWKPIYNILEGHNMEVWVVNAQHLKKVPGRKTDVTDAQWIAQLLQCGLLRPSFVPDRTQRELRDLTRQRMRLVQHTATIANRLQKTLEDANIKLGAVASDVLGVSGRRMIEAIIAGQEDSTVLAELAVRRLRGKIPQLRLALQGQVTDHHRFLLRELLEQYDYTARKIAAFNQRIEQMAPPLFKQCATLLDSVPGIALEAAQAILAEIGTNMAQFPSHKHLCSWAGRCPGNRESAGKRQSGKTPKANKWLDAVLTEVAWAASRTKGTYLKAQYHRLAPRRGKKRALGALKHSILTAVYFMVRDQVPYKDLGADHFTRLNPEQQTRYHVRKLQQLGHNVEISPIEEAA

SEQ ID NO: 298876 - protein, 345 aa, unidentified
MKKGITIGMDLGDKKHQVCILDKSGKIIAEEKVTGTRAAVTKFFKQYRGAVVAMETGTHSRWVSQVAEAEGLNVLVGNARKLRMIWQSRQKSDARDAVMLARIARMDPALLCPIHHRGEQVQMDLEIIRARDVLVRERTRMVSHVRSVVKNMGERLAPSSAASFGHKAKIPEALNEALKPMLEMIRELTKKIRAYDLMIKEAATSKYPETERLRQVVGVGPLTALAYVLTLEEPGRFAKSRMAGAYLGLVPRLDQSGQIDKQLRITKHGDGYLRRLLIGSAHYILGPFGPDCDLRTFGLKLMQRGGKNAKKRAVVAVARKLAVLLHALWRSGQQYEPKRIQPLAA

SEQ ID NO: 298877 - protein, 348 aa, unidentified
MKYYCGLDVSLNNTAICVVNRDGDIIHEGEVSTEPTAIDQWLSDTGLGLERVGLEAGSLTPWLCHELLGLGWSAICIETRHAKAALAAQQVKTDRNDARGLAHIMRTGWFKEVHVKRHESQKLRILLNNRRCLLDKRLDIDSQIRGTLKVFGLKTGKVTPATYEARIRELIGDDRELQAYILPMLHVRRQLIDQCKSLEKLVLDHVKEDEVCRRFMTIPGVGPLTALAFKTWVDRPERFRRSRSVGAALGLTPRKYASGEVDYDGRITKCGDAFVRSHLFEAAKVMLSRAARPSTLKAWGLRVARRSSKKNACVAVARRLAVLMHAMWRDGTEFIFRPDEERTMAVAA

SEQ ID NO: 298878 - protein, 466 aa, unidentified
MEPFFMGIDVSKGYSDFMIINAKKQPITQSFQLDDTFEGHRSLYNFLSRFLAEHPESTLFAAVESTGGYENNWYNSLIEFQGSLNIQSARLNPLGVVHNSKADLKKNTTDKISAQNIAEYLVSHPEKVVYQQDDKMAGLKKQWGFIKTLTKQKTQLLNQLNALLYTTNPEILIYCQDGVPVWVLKLLLKYPSAIKLKKAQPKTVAKIPYISLERAQQLVADAKHSVASNKDHVTEQLIATTAKQILHLKKVVDEQIKLMAVKCPTLEIELLKTFPGISDLSAIGLMIEIQTAKRFAAAKKLASFFGLHPVYKISGDGVGGIKMSKQGRKEPRRILYTVSLSAIRCNPLIKEIYEKHVQNGKHKMAAIGICMHKILRIIYGMLKHNKPFNPQIDIENRQRSVSVKIAEPEINKSRRFQDYDTKAPVTRRQRKKRMEREQSQSVRDTESGISAPVPLGDIIANILPNL

SEQ ID NO: 298879 - protein, 411 aa, unidentified
MNPVIGLDVSKGESQVQAFLDKGKPYRKSFKVSHTIEGLDLLVEFLEVVKRETGKKPPIVLEATGHYHSSVVQYLEDRGYLLIIINPLISYKAKSSSLRKVKTDALDAYHLCELFYKEDLEPYKKRGVQLLNLRNLTRQHENITGVLIQTKLQFQAILDQVFPEYRGVFGDLYSVVSLLTLSEFPSSEDILEASVETIADKIAQLCKSRSYRWANEKAIQLKAAADRNPFEKTLYQSHILSLGMYIKIILQYKEHLSKLESEIDALAKEVEEYNIIKSIPGIGEKIAATIISEIGEIDRFNDPKKLVAFAGVDPSVFESGKFTATRNRITKRGSSRLRHALYMAVRCAIRDCRKSKTSDEIIPRNKKLREFYDKKREEGKPFKVAVIACVNKLLHWIFALLKSKTTFQDIA

SEQ ID NO: 298880 - protein, 344 aa, unidentified
MTYYAALDVSLRTVNICVIDDQGEMVAETKLNSEVTDIIAYLDGLELEIASVGLEAGTLCQYLTYGLQSAGFEVVCMEARQVKSALSAMRNKTDKNDARGIAQLLRSGWYSRVHVKSMDSHRVRALLSSRKAVLSKCIDLEQEIRGLFKVFGIKLPAKLGHGAFDGAVRNIIETDATLSHALLPLLDARLVLYRAFRELDNRSRNLAQQDPVCQRLMSAPGVGFITALTYKAGVDDPHRFKRSRTVAAHFGLTPRRFQSGEIDIDGHISRCGDRQVRCTLYTAANALMTRSSKWSSLKAWGMQKAKTRGHRKAVIAVARKLAVILHRMWVDDTQFNWGMEDARS

SEQ ID NO: 298881 - protein, 317 aa, unidentified
MPEVSIGIDVCKDFLDVAVTPGGASFRAKNSPIGVARLVKKLAGFSPDVVVFEATGGYEQRLLAAGQSVGLPMALVQPRRVKSFANAVGRRAKTDALDAETLAQFGLKVQPKLTPVRSAAQREMAGLVDRRTTLLKLKTAENNRLKQCRFELVARDIQDSISSIEQRLARLDEEIDKRIAADSVMAAQTKRLRSVPGVGRVLAMVLAAYLPELGRLSGKQIASLVGIAPYNRDSGYKTGLRRIAEGRSKVRTVLYMGALVGTKRNVVIEAFYERLLTRGKPKKVALIACMRKLLVILNAMERDGTDWAPKVVSDPSA

SEQ ID NO: 298882 - protein, 369 aa, unidentified
MPHVTSIGLDVHARSVAAAAFNPFTGEVVHRDFGTDAAEIAEWALGFEEPRACYESGPTGFHMARELRALGLDCAVAAVSKMQRPAADARRKNDRRDAEFIARMLATHNIVEVPLPDAAAEAARDLDRALDDATAEYRRARQRLNMFLIRLGHVWDERNADGTRRGSWTRAHWRWISGIRLEGPQRDVLEYYVTAARCAESDRRQLEKKVLALARTDRWRPAVEALSCIKGIDTLTAFRLAAEAGSFTRFRTAPAFASWCGLVPSERSSGETERRGGITKTGNRLARTALVESAWHYLTCTPRPKAPAPGADVPAAIRARADDCTARLCRRREALAAAGKSPCKANAAVARELACWVWEIGRRAEGTLG

SEQ ID NO: 298883 - protein, 397 aa, unidentified
MIAVGIDISKAKSTVAVIDSDGTVLASPFTMAHTQPEMEAFVTYLKGLGEPTTILMEYTGHYHYPVLKKLQGEGFPVCIVNPYQMKKYGDVEIHKAKTDKKDALRIAAYALEKSYKLVPYSSMEQKYEDLKFLSRQYSQRITYVAKLKVQLIALLDQTMPGITRILPLNSRNPEKCALLLFIRRFKSFDEIHRIGKARFLASYDVLAKKTSERSASSKGLSIYELAVDSITTRGEDPYIWLSQNQCVDLLSATQNAADEIISQMRNIAETIPEYKVLRAMRGVGDRLGPIILAEIGDIRRFHSGKALNSYAGNDAPPYQSGQFESRNRHISKRGSSALRKACYEVMQALKLTKPQDDPVYLFMLKKEQEGKPFNVAKMAGVNKFLRIYYARAMELYK

SEQ ID NO: 298884 - protein, 341 aa, unidentified
MQITTIGLDLAKNVFQVHGIDAAENVVVRKQLRRRQMLEFFKALPPCLIGMEACATSHYWARELTKLGHEVRLMPAKDVKAYIKRNKNDAADAEAICEAVRRPTMRFVQIKSAEQQGQLMQHRARDLLMRQRTQVINAMRAHLAELGIPARQGREGLKELMAIVADDDDTRVPVNARASLMVLAAQLQALQTLIGSIEKRIIKQHRVNEASQRLESIPGIGVIGATAIAATVADPKVFRSGRDFAAWIGLVPREASTGGKHKLGPISKQGDRYLRRILVVGACAVLKLARQKPEKYPWLTQLLARRPFKVVAVALANKMARMAWALLANGGTYRAPRIAAA

SEQ ID NO: 298885 - protein, 399 aa, unidentified
MRSIHQLAYCGIDTHKHTHTAKVIDCWLNPLGEITFENRPGKFDSFLKKIKQISGHLQPVFGLEDTRGYGRNLAVYLTGQRYIVKQVNPAYTSAARRSAPTVYKDDSYDAFCIAQTLRDRNQQLPDANQEDIFWTIRQLVKRRDTLANSAKMLQNQLHVQLVNSYPSYKKFFTLVTCTTALYFWEKYPSPMHLRNITPEELGKELRQIGKNACSTRKAQKILSLMEADGQIPKAYQAERDFIVKSMVQEIRYKSEAIKEVEQQLQHIVPLTGYQLETMPGIHWITASRIISEIGDIQRFANADKLARFAGIAPVHFSSAGKGKEQRSKQGNRVLNATLYFLAVQLLSVRGGNPRNPAFHEYFQRKVKEGKKKSQAIICIQRRLSNILYGMMKNKTAYKL

SEQ ID NO: 298886 - protein, 311 aa, unidentified
MTDHNIGADISKSHLDAFLLEDGAAQRFDNSAMGFRALTKWLGKAPVARIVFESTGPYHKAFEAKLGETFSLVKVNPLQARQFAEAHGTRAKTDAVDARMLARMGVAFDLVPQVPCSKEILVLKDLNVARTGLIKDRTRLRNRAQTQDITVLKRQTKARLAQVERHVVELDAEIAALIAAGQTPARNCDILCSMPGIGTVTAAAMLTLMPEIGTLERKQVASLAGLAPITRQSGQWQGKAFIGGGRKPLRDAIYVPAVVAMRCNPDLKAKYEQLRAAGKPAKVAIVAVMRKLIEMANALVKADRTWTPKTA

SEQ ID NO: 298887 - protein, 366 aa, unidentified
MWIIGCDFHPSGQQVYTVNRETGEVVERWLSHSSEEVDEFYSALPWGSEVGVETSGNMLWFERKLAQYGHQLRIGDAAKIQARETRKQKHDRRSAELIYRLMEKKDFPELKWVPSLEQRDLRQLLLHRHKLVRMRAQVKNQLQHIALNQGQQKKWQLWTKTGQELLKNLALERWTGRRRDDLLKLLESLNGYCEGLDAAVEQAAQARAEARRLMTHPGIGPVISLAAVLTLGNVQERFETSRQLVSYLGLNPAEASSGTRRRLGSISKQGSSFMRLLLIQGAQTAVRGDAELARQYRRLAVKKNKGIAKVMVARKLAVRVFWMLKTNKTYPELVRMRGSSSHPGVAVTETDALSERPASRSGRKKM

SEQ ID NO: 298888 - protein, 336 aa, unidentified
MERQYVGIDLHRRRSVIVRMTGDGEVLETVRIVNDPVALSLELAKAGPDPEVALESTYGWYWAADLLEADGAVVHLVHPLGLHWDARRVKNDERDATELAHRLRRGDLPESWIAPPEVRELRELIRYRAKLAALRTSAKAQIHAVMAKLGILPTQSDMFSPTGQILLDEMPFEGAYAIRVDSLRDLLEIYERELAMVEQALHRRLAGHKGYWAIQALNGVGRITAAIFVAEIGDVTRFPSPHHLCSWAGLTPTHRESDTKVRRGHITKQGSTLVRWAAVEAVARYHGGAPIAPAFMRIAKRRGVMIARVAAARKLLRLVYYGLRDGEIRCLSKETA

SEQ ID NO: 298889 - protein, 368 aa, unidentified
MTDVTTHVGIDAHKKDLFIAMLVGTGATPVTWTVPNEPNAVRRLVRKIEREAPGPVRVCYEAGPCGYALQRQLTTTRVACQVIAPGLIPRKPGDRVKTDRRDARKLAELFRAGLLTEVHPPTPDQEAVRDLCRARDDVREDLQRARHRMGKLLLRRGLHYGGRNWTRPHRAWIDGLAWTHAAERVVVDDYLLAIDHLEARLGELDARLAEIAATDPYREPVGYLRCFRGVDTLTAMLVLAELHDFRRFPSPRALMAYLGLVPGEDSSGEKHRRGRITRTGNTLVRRLLVEAAWHYQHRASIGVGLAHRRKGQPGRVIAIADKAQQRLCRRFRRLAEQHKPAPKIVVAIARELSGFFWAALQPVATAAK

SEQ ID NO: 298890 - protein, 372 aa, unidentified
MKYTTVYVGMDVHKESFTLACYTNEKEEAEYVQRTEAHYSKVLNYLEAMRLHYGDDVTFICGYEAGCLGYTLYHQLTSHHVKCDILAPTSMPTQKGKKKVKTDKRDAQKIARCLAHHDYSAVHVPTVKDEETKEYIRMRDDHKLALKKVKQQILAFCLRNNCSFPGNNHWTQAHLRWLREIKLGDVYQEILEEYLLTYSNLVDKLERLDKRIEELAAGEEYAKNVHKLSCFLGIKTQSALSVLTETGDFKRFGTAQQYASYLGLTPGEDSSGEGQDRLGITKAGNRHLRMLLVEAAQSYGRGKPGYKSTELKKRQEGNPPEVIAYADKANERLRRKYYRLVLNYNKRSNVAKIAVARELACFIWGMMTGNVS

SEQ ID NO: 298891 - protein, 328 aa, unidentified
MCTLGIDVSKNKIDLCLLTAGPGGKKKHKVLTNEPAVARKVVDWLNAQKCVPESVTVVLEATGIYHENLAYGLHEAGVSVCMANPCRVREFAHGMDILNKNDAVDAFVLACYGELKSPAVWVPPSPEVRKLRALLRQRDALREDVQRTVNRLEKANSTSTPQEVIRSLERTKSWLNEELARIEKLITDHTDNDPGLKADLDLLKSIKGVKEQVGREMLALLKDGMFKSASQVAAYLGLTPVEKTSGSSVRGRPHMSKTGPSGVRAKLYVAALTASRWNIQAKAIYERLVAKGKAKKAALGAVMRKLVHLCFGVLKTRLPWDENYVATA

SEQ ID NO: 298892 - protein, 410 aa, unidentified
MSVLEAALDPATVIVAVDPGKTFNRVWMSNGSGLLADPMSLPVSRDGITQLELALNKHGSDAPVIAIEATGSLHRPWVAELERRHPGSVRLFAPSETKSARTQLGSGRFKSDDRDCAALTYMARQGGGRRYRQELTVEGLRAAVRHRRGLIADRKVAQQRLHDQLNALCPGLSAPAGHGRSLAVETPTGLAVLACAAAFAGRAPRLRSLMCRAPGRLTTSTAQYWLHRWRGCLPPPADADQRANRLGRDLDRYLRLRADIDALDIEVVALLAQTDGQILTTLPGVAAIRAAAFAAHSLPIERFPDAEHLYSATGLAPALYQSATLNRRGQISRQGLAEHRDALMGIAWGLAQNSPSFAERDAQLRARGMAPIQARVALARNACRLAYRLLRTQQPFDEQRYRRGRLSGER

SEQ ID NO: 298893 - protein, 358 aa, unidentified
MRIIGCDLHARQQTIAMLDTDTGELEEKTLEHEGDTVREFYSALPGPILVGIEATGSMQWFLELLEELGIECRVGHPAKIRRAETRKQKHDRRDARLLLTLLAENRFPTIWMPSSEQRDLRTLLRHRDQWVRLRSRVQHTLQSMALNHGLRRGHALWNQEGQHALRALPLAPYASERRSALLTLYPRLQGSIEELDKEVCEEVQQHPQARRLLTHPGVGPITALATEVFLGDPLRFSDGKALASYIGMIPSEHSSGRRQRLGAMSKQGNTLLRYLWCEAAMHAVERDPELKRFYRRKLVQKGLGKARVAAARKLGIRLWIMMRDEIDYQEFCRRGKGRQESGSVCAGMPDINSGPAEA

SEQ ID NO: 298894 - protein, 339 aa, unidentified
MYILPPSIPKGIEGYRWQSFTPPAAGKARRFRGLICHRRIHLDVHRLPEGKFRRYRNNRTGHRALIKWLRQGPVKRIIYEATGPYHRAFELALGTAGLPLVKVNPRQARRFAEASGTLAKTDRIDAAMLARMGALLEPEPRPLPGPVLNELKDLRLAHRALIKDRTAAKNRAKVLRLPLLKRHNAERLAQIDAQLKAIEAAMQSLIDKNEALKERFAILLSIPGISALTAFALLIDMPELGTIGPRQAASLAGLAPITRQSGTWQGRAFIRGGRAALRQALYMPALVAARFNPDMKAKYQTLIEAGKPPKVAITAVMRKLLLLANALIRDRRKWQPDIA

SEQ ID NO: 298895 - protein, 367 aa, unidentified
MKDSSTVVGLDVHKNSIEIVTADTDGAMEVRRFGRIGGTMDALDKAVRKLVSGGSTLRFVYEAGPCGYEIYRHLTGKGFACKVVAPSKTPKKSGDRIKNDRRDAQTLARLERAGELTGIYVPREEDEAMRDLTRAREDAVKSLKTARHQLNAFLLRYGKRYPGKASWTPVHMRWLSDIALPHPSQQIVLQEYITTVMVGAERTTRLTDQILKLLPEWHLNPVVKALQALRGVAPIVAVTTIAEIGDMSRFENPRQLMAYLGLVPSEDSSGESTHRGHITKTGNGHVRRALVEAAHAYGFPARVSRHLLERQEGLPERVRAIAWKAQVRLCGRFRRLMARGKLKNKVVTAIARELSGFMWAIAREVEV

SEQ ID NO: 298896 - protein, 416 aa, unidentified
MVDERQWYAGIDWASESHHALLADGAGRKIGERVFKHGGEGLAEMAAWLMATSGAGEAAQIRIAIEVPHGPVVETLIERGFKVHAINPKQMDRFRDRFTLAGAKDDSRDAEVMASALRTDPRCFRLLAVADPIVVELREWSRIAEDLGAERNRLTNRLREQLWRYFPAILQLEDDLGAEWLLDLWQTVPTPDNAARIREGTIAKILKRNRIRRFDAAHVLDVLRQPPIRVAAGTIEAASAHVATLVARVRLVNQQLKQAHQRLDTLMARLIPTEEPEPGQRKQHDVEILASLPGVGRIVLATLLAEAFDALQRRDYAALRSLTGVAPVTKRSGKSCIVIRRQACHDRLANAMYHWARVAVQHDAKSRAKYAALRSRGHSHGRALRSVADRLLNVACAMLKSGTTFNPSLIAQKTSC

SEQ ID NO: 298897 - protein, 362 aa, unidentified
MRIIGCDLHARQQTLAMLDTTTGEVVEMTLTHEGNNVREFYSTLPRPVRVGIEATGSMQWFVNLMEELGIECLVGHPAEIRAAEPRKQKHDRRDADLILKLLVENRFPAIWLPSKELQDLRSLLRHRHQWVRMRTRIQNALQSIALANGLRRGSSLWSQAGQHTIASLPLAPHTAYRRSELQALYEKFEVEIEKLNQRVEEQASERPGARLLMTHPGVGPVTALATEVFLGDPARFADSKALASYVGMIPREYSSGERQRLGGLSKQGNPLLRFLWGEAGAHAVRRDPELKRFYRRKLIQKGFGKASVAVARKLGIRLWIMLRDQIEYNEFCRRGQKQQKSSDACAGMPETRYGAKSHRPVD

SEQ ID NO: 298898 - protein, 354 aa, unidentified
MSQKLNSEIAVIGIDIGKNSFHIVGQDRRGALLLRQKWSRGQVEARLANLPPCLIGMEACVGAHHLSRKLKALGHDARLMPAKYVRPYSKVEKNDYRDAEAIAEAVQRPTMKFVATKTADQLDLQALHRVRERLVSQRTGIINQIRAFLLERGIAVRQGLHFLRAELPGILAKCTDVLSPRMLHLIEDLATDWRRLDERIEGLSDEIGALARHDKGCERLMTVPGIGPIISSAIVAAIGTGDVFSKGRDFGAWLGLVPKQISTGDRTILGPISRRGNRYLRALFVQAAWVVLVKIKPEGWERYGLRSWIEAAKQRLHHNVLAIALANKLARIAWAVLHKGRAFECVKTNASRAA

SEQ ID NO: 298899 - protein, 368 aa, unidentified
MKNVTTYVGIDAHKKDLFVAMLIGNEKTPVTWQLANEPRAVHRLVRKLERETPGPIRVFYEAGPCGYALQRQVTTSRLGCDVVAPALIPRKPGERVKTNRRDARKLAELGRAGLLTAVQPPTPEDEAVRDLARARDDAREDLQRCRHRLGKLLLRRGLHYHGRNWTRAHRQWIDSLEWAHTAERAVVDDYRLAIDHTEARLLELDARLAEIAERDPYREPVGWLRCFRGIDTLTAMVILAELHDFRRFGSAPALMAYLGLVPGEDSSGEKHRRGRITRTGNALVRRLLVETAWHYQHRPSVGVALSRRRQGQPGRVIAIADKAQQRLCRRFRKLAAEHKPAPKIAVAIARELAGFLWAVLQPVPVTVK

SEQ ID NO: 298900 - protein, 377 aa, unidentified
MEEKKKVVKQENAKTGVRWVGIDMGKSSYVLRLIDENGKITGWDGKTNKEGRKELYRRLRSTDKIAIESCSLAFTMNKEFKELTGTDFYILNPNKLFQIYMTDKKTDKEDALKLAKEIRDKQEEDLPRVNAPTEKMKEMRNVMSEYREIVKFRTMKINRLHSVYEHAGITDLKRSDLKTKTNREKNLKLLNGYEKEEAQRLMHLIDLLESQKMELENKIKEEENTNEQMQIVEQIPGIGKTTAFCFVGVIGDPNRFTNMTRVSSYLGFIPKIDCSSKTNHYGHITKKGNAYLRGLLVQAAWVIVRSNNGGSLKEKYNDLIIHGMSKKKAVVAIARKLAELMYTLLKNHSSYEPRPYTPRTTYVENLADQALSYAAAS

SEQ ID NO: 298901 - protein, 377 aa, unidentified
MSKLRYVGLDVHAETIAVAVAEPTGEVRSVGQIPNRPEAVRRLVKKLGAPEQLRACYEAGPTGSGLYWQLTALGVACEVVAPTLVPVKAGDRVKTDRRDAEKLARCYRAGDLTAVWVPDPAHEALRDLVRAREAAQQDQLRARHRLGKFFLRHGQRPPLPMKAWTQKYLGWVKTAVHFAQPAQEATLLDYVHEVDHAAGRVERLEQAIDAVVRTTPAPLGTVIGALQALRGIAQVAAVTIACAVGTFTRFRKATPLMGYAGVVACEAASGARTWRGGITKTGNAHLRRIVVEAAWAYRHRPALGSALKQRQVGVSAAVQAMAWKAQHRLHDRYRTLLGRGKAKQLAVTAVGRELLGFIWAIGVHVEQQARASQPRAA

SEQ ID NO: 298902 - protein, 377 aa, unidentified
MKQIVSVGIDVSKGKSTVCAMIHPNTIIKESFEVLHTVEEMSMLADYIGSLDGEIRIVMESTGHYHLPVAQFLYQKGFFICVENAYIIRQFSRIMLHGAKTDPLDAKKLAKYGLAYWSELKPYKFHPSCYTELSLLSKQYQTYIKLLIVAKQNVIHLMDEMLPGFKEALDTASSVQFSKVKYVDFAKEFYHVDMIKSMGKEIFRENYKQWCKEKGYRFQSEKADELFHLAEDGIPTLPTEFPSTRLCMEVATEQVSQLGYALEQILSQMQNLAKTLPEYQTIRQMGGMGEKLCVRFIADIGDVRRFHNGKALVAYAGIDAPPYQSGQYTGTKRRISKRGNSALRKTGYEVMKSLKSHPPKTDTRVYDFIMKKEKRKK

SEQ ID NO: 298903 - protein, 346 aa, unidentified
MEHYAGIDVSLECSSVCIVEATGKIVREGKVASEPEALIAWFGSSRLDLVRIGLEAGPLSQWLYPAMQRAGLAVELLETRHVRRAFETMLVKSDRNDARGIAQLMRHGWFKPVHCKSLAAQEMRALLTARKLVQSKLHDVQNSLRGILRGFGLKVGETTSPRFSGRITQLVTGHPNLEVIAEALLAVHAVLLREFKGFEKRLRLTARSDGRARLLMSVPSVGTIVALIYASAIDDPARFTSSKQAGAHFGLTPKKYQSGEIDYSGRISKIGDASVRAALFEAAHIMLTKPLKGCTQLKSWAMRIARRAGMRKAKVALARKLAVIMHRMLADGQPFNPTAAATIAAA

SEQ ID NO: 298904 - protein, 327 aa, unidentified
MQDFTTSITTNRAAECFVGIDVAKAHLDVCLLPGGETLRVANGARGIARLVEQLTKRQPTLIVLEATGKYETNVLIELAAVGLPVAVVNPRQVRAFARAIGILAKTDRIDAAVLARFARDVRPPIRRLPSEKQRLLQELVARRRQLVEMRGAESNRLKQTRSKDVKHSIQKMLDILQEQLDQLQQQLDEAIQNCESLKAKDQLLRTVPSVGSVVSQTLLIELPELGTLNRRQIASLVGVAPLNRDSGMMRGKRMVWGGRAAVRSALYMAALVGMRCNPIIRAFYQRLREAGKPAKVALTACMRKLLTILNTMVANNTPWRIPDSPPF

SEQ ID NO: 298905 - protein, 319 aa, unidentified
MAQNDLHVVGIDVAKDKVDACVRSPAQRQTFPTGAEGRRKLMAWLRRHKVGKAVMEASGGYERDWAKALRTAGIEVRIVDPKRVRNFARSAGRLAKNDAIDAEMIAWFAETFGDAPNQVYDAERERLAQIVNARQGLLDVQTELQNRNEHSVPELVQNVHARLLKKIAAEVAKLEAAIAAMIKATRHFAELAAIIESVPGLGEGTSAGLIATMPELGHVSNKVAAALLGVAPYDDDSGKRRGERQIKGGRRKVRNLFYMACLGAATRHNPALNAFYRRLIAKGKEKKVALVACMRKLIVILNTMIARGQKWDANLHLAS

SEQ ID NO: 298906 - protein, 364 aa, unidentified
MSSIALGRSDVIVGVDTHKDQHVAVAVDGLGGTIGEARFVPATRDGYVELVTWATMLGDIYAFGVEGCGSYGSGLARFLRRHDYKVFEVARPARRGERRAVGKSDTIDAEHAARVVLSGQGTATPKLADGLIEAIRLVKIARDTAVKAHTTAIVTLKATLVTASDELRGELEPLTDYQLVTACAGLDVAGDMADPDTAMRHTLVTLASRWLTLHDEIKTHTTHLKALTKTAAPQMLERFGIGFDTTAELLIAAGDNSDRIRNEAAFAKMCGVCPIPAGSGKTSGRHRLNRGGNRQANAALYRVVIVRMRWHPATIAYVERRTAEGLSKKDIIRCLKRYVAREIYHLLPEPAVLETEADGLPDAA

SEQ ID NO: 298907 - protein, 357 aa, unidentified
MLSSNVKYIGLDVHKEAIAIAVLNGAGKLVMESIVETKSSTVLDFLHGLRGELHVTLEEGTWAAWLYDVLKPHVREIVVCNPRRNALLKEGSKSDKIDARKLAELLRAGLLRAVYHGENGLQTLRELARCYLTISKDLKRVKNRLKALYHSWGICCAGKQVYAARHREQWLSKIAQVGVHRRADLFYEQLDGLLVLRNTVRGELLAESRKHQAVKILRQIPSIGPLRAALLLALMQTPHRFRGKRQLWTYSGLAVVTHDSAQHRYVDGQLQRSRKPQQIRGLNQNHNHAMKEIFKSTALNASRCTGPLQDFYARLLARGMKPDMARLTLARKIAAITLALWKKGGSFDAEHLKSQAA

SEQ ID NO: 298908 - protein, 369 aa, unidentified
MRLYRLKAAPAASAVELNNNNKSTKAKRILVGCDVHLRGYQGARKIDEGAIGVVDNFRSEEALLLYIEKQRQQAEQVVVVYEAGPLGYTLYRKLRATGVLCYVCAPDSTQQRKKRRKNNQIDARSLTSKLFNYLNGDQHALQLARVPSEAQEQQRMASRQHDQLVEERKRLGAKGNAMLLSQGIGSWSNWWRPKAWSQLSRVAAQWLLERLQIWVDVLKILDEKISLAKAALARACSGPRPKGVGALSQMQLQSEVLDWSLYSNRRKIACLAGMVPSEWSTGDKASRGSITKVGVPALRRIIVEMVWRMVLFQPQYKPVQKWQEVLKGSNPALKKKAVVAIGRQLMVDLWRLQTGRVTAQDLNLIMVEN

SEQ ID NO: 298909 - protein, 343 aa, unidentified
MRIVGVTGGVDTHADTHVAAAVDHNGGLLGVEPFPADQAGYEELLGWLVGFGPVSRIGVEGTGSWGVGLTRFLGDHDVMVVEVDRPNRQTRRRVGKSDPTDAVSAARAALSGVATVTPKSRDGAVEEMRVLLVARRSGREQRIQTLNQLRHLVFCAPEEIRVRFKDRPKRGLVTEAANMRPRKGSDPVTYRTNLVIRGLARRIKHLDAEMRTIDQTLRLLIEDTAPSLFGLHGVGVDTAASLLVTAGDNPDRLKSERSWAHLCGVTPIPASSGKVTRHRLNRGGDRQANTALHRIVLTRMSSHPETRIYVTKRRAEGLSTPEIMRCLKRYVARQTYKHLPHMI

SEQ ID NO: 298910 - protein, 342 aa, unidentified
MKHYAGLDVSQQTTSICIVDEDGRMVAERKAVTCPQAIATAIEPFHVARAGLETEPLSVWLWNGLNAAGVPVICMDARHANAALSMMPAKTDRNDAAGLAQIVRTGWCKRVHVKSAPSHEARALLAARSQLVQIRCDLENEIRGVLRTFGIIFGKRIGGFSKRAEEIVAGELDASPTIRIVLEALMKARVDILAQVAILDGKVRSLSRGNGIVRHLMTVPGVGAITALGFVATIDDPARFRRSASAGAYLGLTPKIYASGETMKVGRISRRGDDFLRRSLYEAANALLTRVARPSALKAWGLRIAKRGGFKRAKVAVARKLAVVLHAMWTTGEELRWSTSTS

SEQ ID NO: 298911 - protein, 392 aa, unidentified
MLYVGIDVAKSKHDCCIIDSDGSILSDALSISNSLDGFELLCSTILSHLQDDDLDNVKIGLESTDHYSTNITNYLYAKGFQITTLNPLATNLFRKAHTLRKTKTDKTDAMVIASMLFTDESKSYSPVSYQIQELKSLTRHRYRMIGYRSKLKLSITRLIDIIFPELPSEVWSIHQNSSYQLLLECPTPEAIVACHLTKLSNILKRASKGHYGKDKALALKSLASKSIGSNNRSLAFELKQTIRLIQSVQHEINELELQIKIVVDELNSPLMTIPGISYTLASVIIAEIGDIERFSSPAKLLAFAGMEPSTYQSGNYKATNTPMVKRGSTYLRWAIMQAARTVSMRDITFANYLHKKRCEGKHYCVAINHVGKKLTRVIYYLMMTNTAFVSQT

SEQ ID NO: 298912 - protein, 444 aa, unidentified
MGNYAGVDWASEKHDVVVQDEAGEELLAASFAHDEKGLRSLCRTLVRLNVELVAIERPDGLLVERLLDAGLRLLPLHPNQVKAARPRFRVAGGKSDRFDAFVLCELARTDHHRFRVLEPDSDQTKALRAMTRAREELVQSRVALANQLRSELERFWPGPIGLFSDLDNLISLAFLKRYPSPADARGLGEQRFQAFLARERYSGHKPPAELLAKLRRAPEGRTGALEGQARRQAVLSLVAALEPIVAAIHQLERQIAAAVREHPDGEIFLSLFRSPRSVITAATMLAEMGDCRGRYPTRDALAGDAGQGAVALESGKRKVATFRWACNKRLRGAFDTLADSTRHWHPWAADHYARAIARGHDHPRATRTLGRAWCRIVWTCWQHRTPYDPNRHRALQQHVLVTVPTPSGPVPDTAATQRMLGVAVTRRADRKVRAQRAWCAGYGC

SEQ ID NO: 298913 - protein, 345 aa, unidentified
MKVTTVGVDLAKNLIQIHGVDERGKTALRKQLKRAQVASFFARLEPCLIGMEACGSAHHWARKLQGFGHTVRLMAPQFVKPYVKTNKNDVADAEAICEAVGRPNMRFVPVKTIEQQGVLALHRARQGFVKARTAQANAIRGLLGEFGIVIPQGIGPLVKRVPEILEDGENGLTGSFRQLLQRLMEHLKELDRQVDEVEREIQVWHRENEASRKLAKIPGIGPITATALVASVGDAKNFVNGRQMAAWLGLVPRQHSSGGKSTLLGISKRGDCYLRTLLVHGARSVVRYAEGKITPDAEWLKGLLARRNTNVAVVALANKNARVAWALLAHDREFRSDYTLARTGA

SEQ ID NO: 298914 - protein, 457 aa, unidentified
MTKKDNERQSVALPVLRALVAGIDIGSKEHGVCGPQSVDDTPNVHVFGTTTPELERLTTWLVEQGVASVAMESTYRYWIPVYELWEARGLEVVLVNARHFRNVPGRKTDMRDCQWIQRLHSCGLLRGSFRPTEDIGSLRAMQRQLDNLVADRTRYVQWMQKSLDQMNVQVHRAVTDITGKTGMSIVRAIVDGERDPIKLAGLRDRRCRKSVAEIADHLTGTWREEHLYNLGAALRMYDAVEAEIAVYEASMLDKLEQLQPPDRRDEPPPCSPNTSKEKAITRRGEQDKRTTLFRFAGVDLTLIDGIGVGAAATILTEVAPNLSAFPTEKQFISWLRRCPRTPISGGKPLRKRRNALGCSRIGGILRMAALPLARSRTAIGAYFRRISRRKGGAVAVFATARKLATYVYRMLRYGQPYVDVGEASYEAAYVQRRLAAAQQTASENGYTLVPVSEGVSH

SEQ ID NO: 298915 - protein, 319 aa, unidentified
MGKSNIEFEQVIDRGCGLDVHRDTVVATVMGKGIKTETRTFGTTTSSLNELGVWLESLNVTDGAMESTGVYWKPVLHVLRAYPLNLIVVNARHIKNVPGRKTDKADSQWICKLLISGLLKGSFIPPENIQELRDLHRYKKKLIGTVASEKNRIIRVLEDANIKLSSVVSDTSGVTASYLIKGLIEGRKDLEKLIAECYHRKLQASPQQIKEAITGRLTAHHAFILKSMQKHIASVEEQIAEIDVEIEKYIKDFEKEIELLQTIPGVGKEGAIGIVAEIGVDMDVFPSEHHLASHSGMCPGNNESAGKKKVQEHDRGTNI

SEQ ID NO: 298916 - protein, 324 aa, unidentified
MVQAVSGAVVDQVTVPATPVGYQQLRRLADRQDGRRVWAIEGTGGYGAGLTRFLQANAEQVVELDRPKRAARRHGAKSDPLDATRAAREALGRDQLAQPRAAGHRAALSVRLAARRSAVQAATDAQRQLHALVVAAPDPLRERLRSLTTARLVATCGRLRQQAAWDAETAATAASLRALARRIQLLNAEIVEHTRAISALVRTWRPELLTRCGVGPIVAAIVLCAWSHPGRCPSDAAFAMLGGAAPIPASSGQTVRVRLNRSGDRQLNQALHLVVLTRLRYDPATRAYAQRRRAQGKTNREIRRCLVRYVARQLYRLLEANPGL

SEQ ID NO: 298917 - protein, 428 aa, unidentified
MKIEDTIRREQFCQIKSEIRGSDQHLVVGIDVAKDKHHAFMGSATGKSLLRKLVFENNLQGFRKLQERSEAIGIQNSLSKIVFGMEPTGTYHKPLGAYLIGCGHHVVLVTGKAVKNNRELLDGRWDKNDIKDPANVADLICQGKCLYYDYPSASINQLRELLSLRRRLKKEEHSLRMRIRNNLLAQYFPELDRFYSACETESLAIVRWFLDPAMIACMEFDEFFSLVTRTKRGIAQKLRLEKIHRLAVESVGCPMGPAVEFEAELLVKKLDQVRQQLKKTAELMEDFCMEFSEYSWLLTIPGFGPYIAARVLASISNPWRFDSSNQVIKLAGYDLGANRSGKTSNEAVPVISKRGNSELRYALYQAAHVASTRNPEFIRYFTRMLRGRERERGIKTKMKVKLAAKMLKIAWTLMKKNQGFDPDYLITE

SEQ ID NO: 298918 - protein, 445 aa, unidentified
METQTEFVVAERRCIGLDVHREFAQVAVWQGGLVWQAGRFATTPEGVRGFAEQLGPADEVALEATGNTWAIATVLASRAGRVVVSNPVKTRAIAEAKVKTDKVDAEILAQLLAADYLPAVWRPDPATAALRRQVLRRAHIVRQRTRLKNQVHAILHRNLIPRCPAADLFGHKGRRWLAEQSLPPDERGAAIALLRQLDFHAQELREIDTDLGKVALDRPEVLRLMTVPGIDATVALSIVAAVGDFTRFRSPEKLVAYLGLNPRVRQSGGQPASHGRITKAGPAHARGMLVEAAWSACKAAGPLRAFYQRVQARRGMQVAVVATARKLTVLCWHLIIKGEDYAYAQPSLVAHKRRKLELRAGAPSARGQKGKAAGYSLKAVRAAERDLVTQAERAYQVTVAAWQPTRPTPRASAARSSAARSGVDVAATNGARLSRPSRGNAARQG

SEQ ID NO: 298919 - protein, 369 aa, unidentified
MDKDTTYVALDDSKRKIVAGILRPADAQPELREIANDPRQIRRLFERLKREGPVTACYEAGVSGYDLHRQISALGVACAVIAPALTPRRPGQRIKTDRRAAAKLVRLFRAGELTAIHIPDEAEEAVRDLVRCRDDIRRDVLRWRHRVLKLLARHGRACLAGKNWSHAHWRWVREQRFDLPPLQRAFEATVFALEQALARQAELDKELEALAATAPYREPVGWLRCFRGIDTLSALILIAEVVDFQRFRRPRELMAYLGLVPTEYSSGETQRRGALTKAGNSHARRVLVEAAWHYRHRPTIGRALASRSQGQPDEIVSHAWRAQQRLHRRYRHLVGHGKRTPVAVAAIARELVGFIWAAMTRHESRRQAA

SEQ ID NO: 298920 - protein, 385 aa, unidentified
MTATTRSFDPIALRNVLCLSFELGEGTWKLAFSPGFGENVVRRTVTSRDREAVLHTITAMKERLGLTPDCRVVSCYEAGREGFWLHRFLASHGVENLVVDSSSIEVSRRKRRAKTDRLDGESLLDLLLRHLAGSRKKVWSVVRVPTVEQEDRRHLHRELQSAKRDRTRVTNRMKGLLANQGLTLDLKQDVPAQLAALRQWDGSPLAEGLRARLAREWERVQLYTGLIERLEAERRELLREAKDPVIEKALQLNCLRGIGVNSAWLYVMELFGWRELRNRREVGSILGLTPTPNESGQQERERGMSKAGNRHVRAMAIEIAWGWLRFQPNSELSKWYQRRFGSGSKRVRKIGIVALARKLMIELWRFLETGVVPEGAELKTDARIR

SEQ ID NO: 298921 - protein, 366 aa, unidentified
MKKISTMAIEGIQIFKDNQLTIGLDLGDRTSHYCVLDEPGQVILEQELPTTAKGFEQVFSKIPRSRIALETGTHSPWVSRQLTELGHEVIVAHARNVRLIGESSRKDDRLDARTLARLVRIDPALLGPVRHRSAKAQIHLTVIRARATLVSARTALVNAARGLTKSYGARLPKCGTEQIHRKITKELKPELREALNPLLAEIESLNARIAEYDTRIEQIAKEVYPEVSRLKQVKGVGPLIALTYVLTLDNPYRFRRSRDVGCFVGLRPGRRNSGMSEPQLHISKEGDRYLRTLLVQGAHYILGPFGQDSDLRRWGLKLSERGGRNAKKRAVVAVARKLAVLLHKLWVSKEVYEPLRNNRKQMAQVA

SEQ ID NO: 298922 - protein, 401 aa, unidentified
MTSVGVDVSKGKSTICILKPYGEIVCSPFEVQHEEGAMEAFVDLLAKLDGEIRVVMEATGIYHLPILTFLHDKGYFVSVINPFAMKKYAKNNSIRGAKTDKLDSMMIANYGIEKWYKLQKYEGDEETYAELKLLGRRYRYYMELHVKALQELTHILDYVMPGIKKMFNSWNEANGKDKLSDFVEKFWHFDLITSKNLEEFTEEYLVWAKEKKYHCSKSKAEAVYELACNGIPTLSSDTPSTKMLVQEAVSVLRAIDSSLTLILARMQSLAKSLPEYSTVREMGGVGDVLAPKLIAEIGDVRRLHSAKALIAWAGIDPPPYESGQFIGSKRRITKRGSSTLRKVGYEVMRVLKSHPAPKDDAVYNYILKKEAEGKSKKHAKIAGLNKFLRIYYSRVMEVYQK

SEQ ID NO: 298923 - protein, 398 aa, unidentified
MISVGIDVSKGKSTVCIMKPYGEVISMPFDVLHTERELSELAAMIERLTGETRIIMEATGNYHLPILSFLKEHNCFIAVINPLVMKKYASTMLRKGKTDKLDAIKIANYGLDHWFRLTNYEVSEETYVQLRLLGRQYAHYNKLRVESKLSLTTLLDMVMPGIKKLLSGKSYYTKKDKLSDFVEEYWHFDNITSKSEKRFINNYKSWAKKNGYHQSESKAIKIYELAQDGIPTLDYNAPSTKMLVLESVRVLREVEKTLSKILTHMQDLARTLKEYSTVREMNGVGDVLAPRLIAEIGDVRRFYKGKALIAYAGIDAPPYQSGNFVGTKRRISKRGSSTLRKTGYEVMKCLKCNKPEEDAVYKFIIKKEKEGKALKVAKIAGLNKFLRIYYARVKEIYQ

SEQ ID NO: 298924 - protein, 301 aa, unidentified
MDDITFVGLDVHKATICIAVAEGTRGGEVRQLGVFENRPEILRKVVSRLSKGGRRLSFCYEAGPCGYGIHRLLTGYGHECVVVAPSLIPMKAGDRVKTDRRDALMLAKLHRAGELTAIWIPDAAHEAMRDLVRARATAVRVLVKARQHLQGFLLRHERIYRGARAWTLAYRRWLSTVRFDHPAQQIVLQDYIHAVQEAETRRDRLTQQIEELLPNWSMAPVVAALQSMRGVALVVAVTVVAEVGDFRRFANPRQLMAYLGLVPSEHSSGSSVRRGGITKAGNALRGACSSRGPGPTECRLG

SEQ ID NO: 298925 - protein, 320 aa, unidentified
MKKPSVSTARREIGVDVSKDKLDVFDGAAHWQVNNDKTGIRSLITRLKKGGPLAQSRLTCESTGRYGHLLVAMALEAGLPVSIANPRAVRDYARAHGRLAKTDRIDAAMIAAFAAGINPPVLGQAWRDRQRFAELHSRMRSLVVLAASQKAALHQTRDRKILAEIRATIVMLERRVAAYEKELQGLVDTSAQMRGRMEKMTAIKGVGKRTGLALLAAMPELGSLNRQEVAALAGLAPMNRDSGTLRGKRCIQAGRSPVRSALYMAAVVASRFHPTLPDFYKRLRAAGKSSRQAFCAVARKLLIQINTALKPAPEKIPIEI

SEQ ID NO: 298926 - protein, 339 aa, unidentified
MIFAGVDWAEAHHDVCVMSEDGQVLEQRRVSHSVAGIGELHALIAAHAGGGEPVAAGIEVDGGLVVTALLAAGYQVYAVNPMASSRYRDRHATSGAKPDRGDAKVLADLVRTDRHNHRQVAGDFDLAEGVRVLARAHQPAIWSRQRQVNALRSALREYYPAALAAFGTDLAASDAAAVLALAPTPDAGQALSRSKIAAALRRAGRQRNTGHRADEIQAALRADNLHARPAITAAHRAAARSAIRLITACNTEIAELEHALSEHFEQHPDAKIVRSLPGLGTVLGARVPGEFGDDRTRFTSPQSRKNYSGTSPITRASGRSHVVLARYARNRRLADALEQ

SEQ ID NO: 298927 - protein, 445 aa, unidentified
MAHANRLSRGDLRRNARLERLRGVVSRDRAVLAVDLADDTQVVVVCDHDSRVLARRTWRCRPWQLDRALGWGLAVACRQGFAGVVVACEPTGHRWRVVVEQASRLGLEAVCVQPLLVRRAREAEDFTRDKSDDKDALLIARLMTQLHCYLPERPTAAWARLRHLGNRRVEQLTHTTAAQQRLRDLLECGWPAALEVARHPLDSLTWRAAMTVGRCDPARIRRLGLARFVRAVARELPRWGGRRRHLGILRALYAATGDDRGVTSQRAGALERSALVLADFKQALAALAEVEGRMAKVLAELGLAELVTSIRGVSVVGAAAILAETGDPTRFDDAKAVVKHAGLCPRDNASGSFAGKTTISGRGRPLLRLAAWRAVWGALPHNPVFAARYTHLTSRQCNRLSDGQARTAVAAALLRQLWVVCVNRIPWEPAVAGGADGKEVTDPAA

SEQ ID NO: 298928 - protein, 360 aa, unidentified
MTTMTNLTTAVTGGVDTHGQTHHAAVLDHVGRELGDREFPTTPSGYCALLSWVRGHGQLERVGVEGTGTYGAALSRHLRAAGVEVVEVDRPDRKARRAQGKSDPLDAYSAARATLAGRATGAPKARDGRVEAIRALRVARSSAVKARSQTTNQLKALLVTAPAELREHLRGLTTTALIATCARLRPTGDVASPEHATKTALRRLARRHQFLSAEISDADAELHNLVTAAAPRLIALPGVGPEVAGQLLTTVGDNPDRLHSEAAFAHLCGVAPIPASSGRTRRHRLNRGGDRAANNALYVVVLGRLRYDQRTWAYAARRTTEGLSKPEIIRCLKRFVARELYNALSPSTRRKIRPTRLDNP

SEQ ID NO: 298929 - protein, 412 aa, unidentified
MILEAFCGIDWAEDHHDIALVDRDGGLLARARIGDDAAGLARLLELLAEHGDSAESRIPVAIETPRGLLTACLRASRPVYAVNPMAVARYRDRHSVAGRKSDHGDAVVLANVLRTDLHAHRPLPADSELAQAIAVLARAQQDAVWDRTQAHNKLRACLREYYPGFLAAFATAKGGIMRPEARAILAAAPTPADAAKLTLAQLRSLLRKAGRSRGIDAGAQRLREAFRAPQMRQLPLVEQAMGRQAVALLRQLDAACASADDLEATAIESFNQHPDAGIITSFPGLGPLTGARVLAEIGDDRSRFTDAKGLKAYAGAAPITRASGKTRSVTRRHVKNNRLAQAGYIWAFSALTASPGARTHYDRRREAGDRHAAAERNLFGRLLGCLHHCLATGQHYHEATAFPSHAATLAAA

SEQ ID NO: 298930 - protein, 324 aa, unidentified
MIDGILGIDVCKNTLDVSISSYTKVRTKSFTNSPDGWRHLLDWLIAQKIQRVHACLESTGRYSLGIACALYGADHVVSIINPAQIRDFVRTKLGRNKTDGVDASHIREYCELFKPSPWAPPSEAHRRLGELQTIRSGIIAGLTEWKNRKNSGIVDAEAQALAAATVSHFTSQLGAVDKAIALTIDNDCDLQSKRDLLLSISGVGETLAGVVLAELPGPDVLRSSAEVVAYAGLNPRQHQSGTSIDRATRISKIGNAVLRAALYMPALSAMRYNSAIVALVTRLKSRGRLKPKQIVVAAMRKLLVLCFGVLKTGRPFDAAIAMGG

SEQ ID NO: 298931 - protein, 392 aa, unidentified
MYIVGIDIGKNHHEASIVSPEGKQIGRSLRFATTHKGADSLMSFIFKNIGNSPCVFGMEATGHYWYPIYSFLKAKGYTIYVINPIQSDSLRKMYIRQTKNDSIDSFLIAEVIRFGQFGTTSMADENILAMRQLCRYRDSVISSRTEIKLRIGTIMEQIFPEYEKQFSSLWVSTSMGILEKYLTPENIENTPIDELFEIIKDKSHNRLTKAKAISIKEAAADTFGIKIAQDAFSFQLKQLIDRMNFLDKQIEALDCQILEYYEKFDCYLHTIPGIGMIAAATILAEIGDISRFKNSSALVAFAGIDPTVRQSGEFNSTHNHMSKRGSPYLRHAIFLAATTCSFHNSPLNAYYKKKRDQGKHHLTATGAVARKLTTVIYAVLRDSKPYEPKKFC

SEQ ID NO: 298932 - protein, 395 aa, unidentified
MRHILSFDIAKGKSVYCFIDELRNVIIDASLIEHKKDEFDLLFNKVKNYSNLIVIMESTSIYHLPVETYFRSKGIETIIINPKLVKQFKDTLNKSKTDKLDCFKIARCFLGTIDDFYQKQDEYFMYNPLARQYWSLIEGQTRLKNRYRQLIDIVFPEFALIFNDLYDDLALNFIHDFPHPVLFVNRRIDYLMNYLKEKNGTTQAYRFKNKVLKMKELASNSLCFVAFDSYQVQNLVQVIEMIQYHKSEINKIKNQLINEMKDKKLFKIINSIPRFGEFSTALFLAEVGDITRFDDKYQFISFIGIDSVTSQSGVSAYHGPISKTGCKFGRTILFNIVTTILQISAHSDKTNPIYLFFRKKQSEGKHHYKCIIACSTKLCKIIYKLCSSDCLYENK

SEQ ID NO: 298933 - protein, 337 aa, unidentified
MKNIGLDIGKRRHWVVSMDERGTIDCNQRLPNDPTVIEQFFKTLEGPCRVVLEATGNWMAVYDRIEPWVEEVLLAHPLKTKAIASARIKTDKIDATTLAHLLRADLIPQAYIPPKEVRNWRELVRHRAFLVRLRTRLKNRIHSLLAKRGISPPAVSDLFGRRGLQWLKALELPEPYGAIRIRYLAILDRLSHEIKESEKEIDQTVETTPEAKLLETVPGVGRYLSLLILAEIGEIGRFPSPKQLVSYAGLCPSTYQSGDTLRHGRLTKQGSRWLRWALVEAALHASQYPRTRLARLHERLTRRRDAKTARVAVARELCISVFHMLRKKESYREPSSS

SEQ ID NO: 298934 - protein, 421 aa, unidentified
MQHPKMQYVYVGIDSHKETHCAVFLNCFFEKLGEISFRNVPNDFPAFLEKAQQFRLEGTKLAFGLEDVTAYGRNLTVFLTGQKQLVKHVNASLVASERNSRNVLHKTDAEDAECAARVLLNRFDRLPEANPQDKFWVLKSLVTRRDSIVKMNTALKNHLHAFLTSHYPHYQQFFTNIDCNSALAFFAKYPSPGKLNSVTVAELAAFLEDNSHRKVGLTKARQILDTIQKDGDTTTQHQEARDLAVQSAISQIKHNLQEIDSVDALLEDFLSFFPYKLQSMKGIDTVLAASFIAEIGDIARFSTPAKLARYAGVAPVTYASGKSDVQFANQRGNRVLHALFYHLAVLVTMTAGKNKRIINPFFYHYYHRKISEGKTKAQALKCVQRRLVNILWSMMNRQTEYLNPPAENYPVKEEAKEKQAE

SEQ ID NO: 298935 - protein, 456 aa, unidentified
MPGSRSTRGRSSGQLATINPNAAGLDVGSTFHVVAVPADRDEQPVRTFRTFSGDLHRLAEWLEETGITTVAMESTSVYWIPVFEILEARGFEVLLVNARDVKHVPGRKTDVQDAQWLQQLHQHGLLRGSFRPRDGVVRLRAYLRHRERLVEYAASHIQHMQKALMQMNVQLHHVVSDITGATGMRIIRAIVSGNHAPERLAEFRDVRCAASEATIRAALTGHYRVEHVFALRHALELWDFHQAKIAECDAEIERVLRTLNEVRATPTEPLPAVRHAKAKNEPEFDTRPALYTLLGADLTQIHGFGAYTVLRLVAECGDDMRKWPTAKHFTSWLSLAPRNKISGGRLLSSKTRRSSNRAATLLRIAAVNVGRTQTALGAFYRRLAARIGKAKAVTATARKLAILFYQALRFGMTYVDPGASYYEERYRQRVIQHLQHRARHFGFALVADPAASGGVS

SEQ ID NO: 298936 - protein, 375 aa, unidentified
MNEITRAPIARVGVDLAKQVIQVHAVDASGRRVVARAFKRDQFLAWCAQLPAGCLVAMEACSSAHYWSRKLRALGLDARLIAAHFVTPYRMEGKSGKNDANDAAAICEAASRPCMRFVPVKTCEQQGVMSLHRVREGLKEERTACINQIRGVLTEFGLVFCKSPKVLRAVLADVIEDASNELSAMARLVMQRAFEHWRELDEHLRWCDRQVGQHVRASPEAKRAVKVFGIGELGASALTAGVGDFKQFKSGHQFGAWLGLVPKQDSSGGKTRLGRITKRGDDYLRTLLIQGAKAAVMSADKRDDPTSRWLAQLTARAGWQKACVAMANKNARILWAVMTREEGFDPNHISVKPQAKPSARESAAVASSDTVACPA

SEQ ID NO: 298937 - protein, 361 aa, unidentified
MTGTMTWAGLDVHARSTHAAAINVMSGELVRAKFGAGLQEPLAWLQALPGPVKACYEAGPTGYGLYRAAQKAGVEMIVIAPGKTPRGPSDRVKTDKKDAELLARLLLAGSLTAVAVPPPEFEAARDLMRAHDACRRDLMDARHRVSKLLLRHGRVYPESSTWTARHRGWLGRQQFDQLATELAFLDALACVDSITARKAALAQRLSELALDERWWPTVARLRCFHGIDTLTAFALHLELGGDWQRFARAPQLAAWLGLTPTLSQSGESSRQGHITKTGSTLARRLLVEAAWHYARTPGPGVALTARQAGQPAHVLQISHRARQRLHRTHRKMRSRGKPGNVCVVAAARELSCFLWAAATAD

SEQ ID NO: 298938 - protein, 339 aa, unidentified
MNNASTIGLDLAKKVFQVHGVDQAGEVLVRRTLRRSQVLAYFGKLAPCLVGMEACATAHYWARELSKLGHTVRLIPPAYAKAYVRRNKNDPADAAAICEAVGRPAMRFVTIKTAEQQAAAGVHKVRELLMKQRTMLMNSLRGLMAEFGIVVAEGPRHIGELVAILADPGDRRIPAPLQGGLVRMADVLRHLERQIEVVDKQILDWGRGNKTCRHLITIPGFGPILSTAMAAIVVNPATFRSGRDFSASLGLVPRQDGTGGKVKLGPISKRGNGYLRRLLVSGAMTVLSGKRAKQDSWLVKLLATKERKVAAVALANKMARIAWAMMMRQEDFRAVPAAA

SEQ ID NO: 298939 - protein, 419 aa, unidentified
MTRRDDSRIIRIVHPICCGLDVHKENVSACVIFPDDKGEEQCDIKVFGTFTDDLMRLREWLLEHDCPVVAMESTGVYWRPVHNVLEDSVQVVLANAREMHNVPGRKTDIGDSRWIAGLLRHGLLKSSFIPPQDIRQWRDLTRLRKKYVQSAGDYRKRTHKLFESANIKIDSVVSDLFGVTGRNLMQLLVTDRKLTLSDIQTCVRGKLKGKEAELFRSIQGFFTDHHRFVLKTILKTIAMLEAQIGALDHEIHRVMKGHETLLDRMKEAPGISDVSSCDILAEIGPTLDSFPTDTALVSWSGLCPGNNESAGKRKSGKSPVRKHHLKTIMLEVAWAAVKKKGSYFKDKYYRLKARRGAKKAIVAIAHRILLGIYHVIKDGVVFRDLGEDYLTRRNKSQKVFHLRKQALALGFDLVPQTAQ

SEQ ID NO: 298940 - protein, 380 aa, unidentified
MRFYTKQHKYYCGIDLHARWMYVCILDAAGEVLVHRNLRATPENLLGVLRPYREDVVVGVECIFTWYWIADVCGREGIPFVLGHALYMKAIHGGKAKNDRIDSRKIAVLLRGGMMPQAYVYPPAMRATRDLLRRRTRLVRKRGELLAHIQNTTSQYNLPELGKKIAYKKNRTDVPEHFESTDPSVRKSIEVDLALIDHHDPLIRDLELHILRHAREHDVQGYYRLRSVPGIGEILALVVLYEIHDIERFPTVGDFVSYCRLVKCSKESAGKRLGSSGNKIGNAHLKWAFSEAAVLFLRKNPRGQKYYARLERKHGKGKALTILAHKIARAVYYMLRREQAFDVDRFHDDTTATVTVRRAPAATAAPATATEQATTMSTTN

SEQ ID NO: 298941 - protein, 411 aa, unidentified
MNQITSVGIDVSKGFSMVVIRQPGGVIVEPPFRVNHTFRELNALVQRLHILPGEIRIVMEHTSCYWRPIGLTLVNAGFFVSIVNAMLIHDFHDNSIRRVKTDRADALKIANYALTFWTELKPYSPEDELRQLLKMQCRLYERTLSTSVTLRNGLISLLDQTFPEINRMFHPLVKQSNGHVKWVDFVKTYWHKEKIATMTESRFMDSYRRWCKREHYQYYTSHARRIYGLAKETFASKPRSESTRQLICQAVDSLNAVYEALHQLRKEMLRLAQQLPEFEAVMSLPGAGNITGPKLMGEIGDVRRFTSKRALVAFARVDAMPYQSGIMDSHSRRMSKRGSPLLRKTLFQMCSICLQLSRVDDPVYLFMDRKRGEGKQFYVYMVAGAAKLFRMYYARAKSVFDADKEENKITA

SEQ ID NO: 298942 - protein, 367 aa, unidentified
MRTSVVYVGLDVHKDSIAIATARGREPAAVLEVIRHDELSLMQVLDRIGPRERLRLCYEAGPTGFDLARRLNQWGYCCQVVAPSLVPTAPGNRVKTDRRDAARLAQFLRSGDLVEVRIPEAQTEAMRDLERARDDAKKAERVARHQLDKFLLRHGRSWSQGSKWTLKHWTWIRVQQFPEEMLRRVLQDYITTIEQATQRVERLEKDMAEMVDSWALKPLVVSLMALRGVRLVTAVILAAEIGDFARFASPRNLMSYLGLVPSEHSSGQRRSQGRITRAGNAHARRIVIEASWNYRFAPRASKAIQKRRGQVSAEVRAIAEKAEQRLSRRFHKLTQRGKKSQNVVTAVARELTGFVWAIAQSARPAAA

SEQ ID NO: 298943 - protein, 393 aa, unidentified
MYITGDKLKYVSVVVAGDVRTGRLVEAVGREQPASKQRRDRPTLGKQPVGSLIRRRFITISARTVAWDILSNEPVYARKGTKMENYIGIDISKRYFDLHCLPEGKQHQFENNQKGIQQCLKLLADIKPKLVVMESTGGYEITLACKLQATGLPVAVVNPRQIRDFAKAIGQIAKTDKIDAKVIAKFASMVEPPAREVMDDKARQLKGLVTRRDQLTEMHVAESNRMEHVVDRSIAHSIKVILKVIERQISDIDKQIAEHIRQDEHLRRKADIVDSAPGIGNTTAFMLVTKLPEIGTLNRRQIAALVGVAPMNRDSGAFRGKRMTGGGRGSVRSSLFMPTLVAIKHNPVIREFYQRLLSVGKTKMTAVIAAMRKLLTILNTMVAKNEFWNPKIA

SEQ ID NO: 298944 - protein, 339 aa, unidentified
MIKIELLGIDLAKNVFQLWRTDAAGNCVLQRRVRRESLLDIVGALPPCCIGIEACTGAFFWQRRFEALGHQVKIIAPQYVKPFVKRQKNDRNDAEAICTALRQPNMRFVPKKTIEQQDIQSLHRARRRLVNHRTALVSQMRGILLDRGIGFAKSIGLARRMIPQILADRDNDLTELCREMLGSLLAFLLEIDTRVHEFDKRIERIFRENEACRRVASIRGVGPKIATAIIAAVGDGHEFENGRHMAAWLGLVPRQHSSGDRRRLMGISKRGDQHLRTLLVHGARAVVRTAANKTDAFSDWVNALKERRGMNRATVAVANKNARVIWALLRHGTEFRSAA

SEQ ID NO: 298945 - protein, 403 aa, unidentified
MMTATPLQATLVIGGVDTHAETIHVAAIDDLGRDLGDQEFPTTPVGYREALAFLIGHGTLSMIGIEGTSSYGAGIARAARTAGIEVREVTRPDRATRRMQGKSDPIDAYAAARAVLSGRADAAPKDEQVDAIRALHIARNSAVKARTAAMNQIHHMLITAPAPIREKYRTLKEKPLVNALAACRPATQEPTHRAVLHALKTLAQRHQFLTAQADDLHAELDALATAANPHLRSIRGVGPTTAAQLLITAGGNPERLRAEASFAALCGTAPVPASSGKTTRYRLSRGGDRAANSALHRIALNRMSSDPRTRDYVARQRASNRSTPEILRMLKRAIAREIFKSLTQGLAAPLLADLRPARQAKNITITAAAKALGTYPSKLSRTEHGTYPDYDLAHRYREWLAAA

SEQ ID NO: 298946 - protein, 344 aa, unidentified
MYLCILNQDGEILVHRNMPAGPEPFLKAVAPYREDLVVCVECIFPWDWLADLCAREGIPFVLGHALSMKAIHGGKAKNDQIDSQKMAVLLRGGMLPQADVYPAAMRATRDLLRRRMHLMRKRAELLAHVQNTNSQYNLPGMGKNIAYKANRDGIAERFPDPAVQKSIAVDLALIGHYDPLLNDVEFSIVHTAKQPDPQTLSRLQSVPGIGKILSLVLLYEIHTIDRFPRVQDFVSYCRLVKGAKESAGKRYGTSGAKIGNAYLKWAFSEAAGLLLRTNPAGQKSLARLEKKHGQGKALTVLAQKLARAVYSMLKRKTAFDMPMFLQSSSGAERVSPTSHWTLSG

SEQ ID NO: 298947 - protein, 337 aa, unidentified
MDTSKHIFQLHGVNAAEEPVLRKKLRRKEMVTFFEKLAPTVIGIEACSASNHWARLLQSFGHTVKLIAPQLVKPYVKRGKNDAADAEALCEAMSRPTMRFVPVKTREQQTALMLVGVRDRLIRNRTQLINAIRGYAGEFGYTAAKGKAHLGPLLERIQADESLPGLARELFVAQAKEYAQLQAQIDEVDAKLLAWHRADECSQRLAKIPGVGPIGAVLLKMKTPEPELFRSGRQFAAWIGLTPKDHSTAGKVRLGVITRAGDEGLRSVLVVGATAVVQHVRRGGRASPWLTALLKRKSPKLAAVALANKMARVAWKLMITGENYAVKSAPAALAGAA

SEQ ID NO: 298948 - protein, 353 aa, unidentified
MKCDKYMGMDVHQAMTVVVVLDADGRVILETMVPTEGAAIIRLVQSLSGPLRVTFEESTQAAWLYDVIRAYVTEVIVCDPRRNKLLEDGSKADKVDARKLAELLRAGLLRSVYHGHEATRNLKELVRAYETLSIDTQRTMARIKAIYRARGIGTPGRGVYQPKQRQRWLESLTEAGIRQRVAWLYEQLDQLKPLRREAKQAMLAESRRHRAVSLLRTIPQMGPIRCAFIVATVDTPHRFRTKRQFWSYVGLAVVTHMSSEYEMTAGRVVRRRKPVATRGLNHNCNRRLKEVFISAATGGSLHEPYKPFLEKLKENGMRAEMARLTLARKIAAIALIVWKKGVAFDSTKLNCTT

SEQ ID NO: 298949 - protein, 348 aa, unidentified
MSQSNIHQYVGLDVSLKETSICVVDESGKIVWRGRTDSTPQAIAEAIKKHARHVVRIGLESGQLSTWLFHGLSERSLPVICIDARHAKAALSLKVNKTDANDALGLAQIMRVGWYREVAVKGLDSQAVRALLVARAQLVSQITTLKNCVRGILKTFGFVVRKGLRSQFPKHVREAIHANPALAAIVEPTLRVLEAARAQLLVYDRAVIQRARSDDTARQLMSAPGIGAIVVLAYMTGVESPARFRRSSSVAAYFGMTPARYQSGEVDRAGRVSKCGDGMVRGLLFEAAKVLLSRSARPCALQSWGQALAKRIGTKKATMAVARKLAVILHRMWATGATFRWSTPAPAA

SEQ ID NO: 298950 - protein, 359 aa, unidentified
MGVMEGRERRIVGGVDTHKDLHVAAVVDEQDQVIETRCFATTRQGYRQMLTWMRSFGELQRIGIESTGSYGAGLLRFMQQAKVPVLEVTTPDRQDRRRRGKNDDLDAQNAAHAAFAGQRTVTPRSRDGMIESLRVLMACRKTAVSARRVALQMIHNTIVCAPDDLRDQLRSLTRMQLVRTLAAWRPDLTAYRDLDSAYRISLKSLARRYLELHDEIADLDAMITAIVDELAPNLVARNSIGHIGAAQLLLTAGDNPERLQSEASFASLCGVSPVPASSGKIVRHRLNRGGDRAANSALHIIAIGRLRTDQRTRDYIARRMAEGHSKLDAIRALKRYLAREVFTLITQRRREINATRIAA

SEQ ID NO: 298951 - protein, 344 aa, unidentified
MEISTIGLDLAKNVFQIHGVDAKGKAVIRKALRRSQMLPFFEKLQPCLVGIEACGTSHYWARELLKFGHEVRLMPPAYVKPYVKRGKTDAADAEAICEAVTRPTMRFVPVKSEDQQAVLSMHRTRDLFVKQRTQLINMMRGLLAEFGIDIPQGVNRALEKARAIVDGEAPDVPIDAVRIVQRLSQQALDIHAQVREIERDLIEWQRQSDVATRLMTIPGIGPIGATALAASVNDPSEFRSGRQFAAWLGLTPLQKSSGGKERLGHISKMGDRYLRKLLVVGMTAVVRNAKRKPEAVDPNVLALLARKPARVVTVALANKTARIVWAIMARGEVYRERHVPALAA

SEQ ID NO: 298952 - protein, 315 aa, unidentified
MALPLTFVGIDWLDLWLEPLKRFERLANQPAGWVALIERLPALGPPAGIIVAFEASGGYERGLRTALLDAGFAVRRLNPLRVRLYARSLGRHAKNDRIDARVIARYAAAAETVPEILDPVREHLAELVTHRRRLVDEQVAIGNRSAMLQDPALKAHNRERLALLERQIGETDRLIRDALSGAAPLVAKLRLLTTLKGVKQGTAATLVALLPELGRLTRRAIAALVGLAPFDHDSGRRKGTRTIAGGRAPVRTALYMAARAAARSKSPLGDYYRRLIAAGKTAKTATVALMRKMLVTLNAMLRDGQPWKHGRKTPA

SEQ ID NO: 298953 - protein, 343 aa, unidentified
MNRYYYIGLDIHKRIIAYCVKAIYGSLVDQGKVDADRQSLEVWVKGLPGPWIGAMEATIFTGWVYDFLKPHAIALKVAHPAMLKAITAAKKKNDRADAEKIADLLRVNLLPECYMLSEEIRELRRILRYRNHIVRTAVKMQNKMSGLLMEVGATYSKKRLHGKKYFRELLERVDDIPPSVKELLQLSRSSYEMFRSFQKRLVETLRTNQLIHDRVHHLMTIPGVGEITALTWVLEIGDSGRFSSIRKAVSYCGLCSAQKESAGKEQRGPISKKRNKHLQTMLIEAAKLAPHWNEQLAIVHEQELKKGNRNRATLAVARKLVAYMLAVDRKGADFKLPSEIRAA

SEQ ID NO: 298954 - protein, 331 aa, unidentified
MKKVTETIGIDVSKLTLDVFVRITNVHKQFSNDTKGFKQIISWLNKQKINLDQTLFCFEHTGWYCLQLSYFLYENDYRYCCINAIEIKRSMGLKRGKSDKADAWEIANYAWLRREELVPSTPPSKKLIELQRMMSLREQLVKQQTASKNLLKGMASIVEDDKSDVSMTILKENIGQLENQILTTEKAMNELIKQDEAMITNYKLSKTVKGVGMVLAVQMLLHTHNYTRFESSRQFSAYCGLVPYPYQSGTSINGRNKIHPISDRKMKSLLSMSAISAIQHDNELKIYYKKRLEEGKPKMVVLNIIRNKIVSRVFATINRGTPYVEMNKFLA

SEQ ID NO: 298955 - protein, 512 aa, unidentified
MADISFGVIHDRVKRPRAARRSEVVNNSAAGENIAGGRPASARSRSYRSDPQRIKGRLPGEPKALAPTSNRKAPQEGHHISLVDSRAKRRKNQRQTMNDEQWKKHRAFGAVDWGSDKHSVIVVDQAGKVIEDFEIEQSALGWKKFREKLQPYGSIPFAIETSQGAAVEQLLEAGMIVYPLNPKSAQAYRERKAPSGVKDDRLDAWSFADALRVDGQDWKALRPEEPLIKELRLLCRDEVALIEQRTAFIQQLRHALAEYYPAALEAFEDWTSVSAWMFLQRFPSPELLAQAGKRQWQKFLHSRRLWGSDEGPRRMEIFAHATELSGSAPTTKAKSLLALSLVQMLFVIEKQLGVYRQRIEELFARHPDHDLFGSLPGAGPKIAPRLLSEIGDDRERFDGDARNLQCIGGTAPVTKRSGKYRHCHQRWACDKHLRHAIYLFAEKSLSRCAWAQTYYQRHRQKDRSHANALRRLGHRWLKIIHKMWMDRTLYDPELHHRNQLQHGSWIFQLKEC

SEQ ID NO: 298956 - protein, 453 aa, unidentified
MKTFYLGTDVSKGYADFVILDKNKQRVENNFQMDDTFTGHCLLYERLVKFFDTHPNCLLCAAVESTGGYENNWLSSLLKFQATLNIQSARLNPLGVNANSRADLKRNITDKISAQNVAEFMIAHPEKINYQQQDSFANLRRQWRYINLLTKQSTQLLNQLESLLYISNPELLAYCQDRTPKWVLTLLKKYPTASKLSRAKAKSLSRIPYLSIQRARELIAGAKQSIASATDDITGQLIVSTVKQIVRLNQTVDAQTKQMAQHCRMDEINLLKTFIGISDYSAIGLMLEIQSIHRFPAVKKLASFFGVHPVFKLSGDGSGGFYMSKQGRKEPRRILFMVAIAAIKHNSLIGSIYKQRLEKGMARMAAVGYCMHKILRIIYGMLKNETAFDPEIDRKNRIKNIQRRSKTRHDKSRRYMAYDGKAPVSRRQRNKRKERKESQSDNITKNGIIVSAP

SEQ ID NO: 298957 - protein, 407 aa, unidentified
MEVMYPRCAGLDVHAKTVVACVRVATGGTVTYAHQTVATDTRGLLALADWLATFEVTHVAMEATGVYWKPVWHVLEDAFTLVLANAQHVRNVPGRKSDKTDAKWLADLLALGLIRSSFVPPAPIQELRDLTRTRKQLVRELSRHTQRIQKTLEDANLKLTEVISDVLGQSGRAILTALVAGETDPERLIDLTHGLKASREELVQAVHGRVTPHHRFMIQLHLTQVAALEQGIADLDARIGDALAPFRAAVDLLTTMPGLKTTAAAVIIAEIGVDMAVFPSAGHLISWAGLCPRLDESAGKRRSRRTRQSAPWLKTTLVQIAWPASRKKESYFHAQFLRLKSRRGPKKAIVAVAASMLTDVYYMLRDGVEFRDLGSQYFTQRDKSRITKRLLQRLHDLGVDVEVKNAA

SEQ ID NO: 298958 - protein, 420 aa, unidentified
MSDMPTRFKRRLDIMTSNGGRLTPDGTRVSLPKPVPLDVATSTHNTRRSTMSQSRTLFIGMDVHKDSIAVAYVAQDHGAEVTYLGARGTRQCDIDQLVRKMQSKAKHLLFVYEAGPCGYWLYRYLPRKGSDCWVVAPSLIPHKPGDRVNTDRRDARQLARLARSGDLTVVYVPKVEEEAIRALSRAREDAISDLKDAKFRLKAFLLRQDIRYVGRAHWGPAHLRWLSEVVCPTPAQQIVFQEYVRAVQEHTERLQRLAQELQEQVNAWRLHPVVEALQALRGVQFTVAVTMVAEIGDLTRFDTPRELMQFLGLIPSAYSSGEQRRQGSITKAGKTHARKAVVEGAWAYRYPAKVSRHLQLRLEKPPKMIQDLSWKAQVRLCTRYRRLVSRGKHATVVTVAMARELVGFMGAIATQVPLTA

SEQ ID NO: 298959 - protein, 414 aa, unidentified
MNRLIERCAMLDIHKSQITACVRAPDDARGRQQEIREFSATTAGLLLLADWLRSWAVTVVGMESTGVYWRAVFYLLEGEFECRLYNARHLRHVPGRKSDVQDAEWGCQLVEHGLVRASFVPPRPLRVRDVVRYRKAKIQERTREVQRVEKTLQDAGIKLSSVASEVLGVSARRMLDALISGTHDPEILAELAKGALRKKIPALREALHGRFTGHHALLIGQMLAQIDFLDETIQTLSERIEELTRPYSREIELLDTIPGIDKRAAEMLLAEIGPDMSQFPTEHHLASWAGLCPGQRESGGKQHSTATRKGSKWLRGTLTESAKAVVRTKGTYLSARYHRIKSRRGHARATIATGHKILTAAYHVLKRGVPYNDLGEEFFYRRDTENTDRHRRRLVKQLERLGHQVTLEPLPEAA

SEQ ID NO: 298960 - protein, 364 aa, unidentified
MHKETLAVAIAAPERLGEVRYYGTINNEAQAVRRLFQKLQGLYGNILSCYEAGPCGFGLYHQLTAMNIKCQVIAPSRIPKSPTDRIKNDHRDAISLARLLRAGELTPVWIPDLTHEAMRDLIRARAAAKRDSRVARQRILSMLLRTDKHYAGKHWTGKHRTWLANQSFSQPSQQIAFQHYCQSLEQIEDRILQLDQEISRLLPEWSLCNLVCQLQALKGVAQLIAITLVAELGDFSRFSNPKQLMAFLGLVPGEYSSGNSIRPRGITKVGNSELRRLLYEAAWSYRTPAKVGAWLIYYRPDSVTQYSKDIAWKAQQRLCSRYRSLTAKGKKSQVAITAVARELTGFMWDIALAAQSSFSQQKQN

SEQ ID NO: 298961 - protein, 317 aa, unidentified
MSQTTITTAGIDTSKAKLDIAVHGRTERWQLANAVSGWRTLAAKLAKAGVARVGIEATGGYERGVVEHLRAAGFTVLVLQPIQVRAFGRVHLRRAKNDALDAVLIAACAAAIDQPRIAPDPRLSELATHLTFLEQAEEDIARFKTRLEHIDEPRLRRIVTGDIARLKARRAALIRALAKRLRAYDDLAKRLDLVLSIPGIGERTALALIVRMPELGQVSREEAAALAGLAPFDNDSGQHRGQRRIAGGRGRLRRSLFAAALPAAFRWNKALIALYARLTALGKAHNAALIACARKLLIYANTVVQRGTPWTEKPLSI

SEQ ID NO: 298962 - protein, 337 aa, unidentified
MQITTVGVDLAKHVFQIHGIDDEGQVVLRRRLRRAEVIPFFAGLTPCLVGMEACATSHHWARELMSLGHTVKMMPPSYVKPYVRRGKNDATDAQAICEAVTRPSMRFVPVKSAEQQSVLMLHRVRALLIRQRTMLVNALRGHLAEFGVVVAQGVKRIRELIAMLTGENAPVPALARTSLAPLVEQLMDLDLRIKELEAELLAWHRSSEESRRLETIPGVGVITATALAATVTDPSHFRSGREFAAWLGLTPRQNSSGGKERLGRISKMGDGYLRSLLVVGATAVMRYAREKPSWVSGLLARKPARLVSVALANKMARIAWALLARKQTYQTQSSAVA

SEQ ID NO: 298963 - protein, 379 aa, unidentified
MIARTRPEMSVSEPTMYVAFELGKKEWKLAMTSGFGVAPWLRSVVSGDWRGVDRAIAQGRARFGLAAAVPVVSCYEAGRDGFWIHRALQQRGIRNRVVDSASIEVNRRARRAKTDRLDALKLVTMLVRVCWGERRVWSEVHVPSVAAEAARQVSRERTALTQEQTRLTNQLKGWLATWGATLPRRRPSGWWTTVSDWAGAPLPVEVQARVARAEARRAVLEGQIAELDAQQRAAVTTAAPASALRQLVQLKGVATTSASVLLDEGLVWRAFQNRRQIGGLLGFAPTPYESGESAREQGISRAGNNRLQAISIQLAWNWVRWQPHSALTVWYREQFGKGKRARRIGIVAVARKLVIALWRYVTTGVVPAGAILKGARPVA

SEQ ID NO: 298964 - protein, 350 aa, unidentified
MIIGVDYHPSFQQIAFCVEETGEYGERQLNHNAGEAERFYRDLKQRGIRVRVGMEATGYSRWFDRLLAELGFELWIGDPAEIKAKRVRKPKTDREDANLLLKLLLEDRFPRIWVPSPENRDLRQLLWHRHRLVQMRTRIMNQLQALAMNENKCWKGKLWSAVGRAAFEKLPLAFWASRRRQELLELLDRMNPAIDELTAAVEKEAGKRPEALRLMTHPGVGALTALAYVLIIGTPERFAYGKQISNYVGLIPSEDSSGGRQRLGHITKQGNSLLRFLLVEAAQAAARCNPHWRRRYRHLAMRRRRNIAKVAMGRRLAVRLYWMWRNGCEYSPSFEFGSHAGKLEIGNGVH

SEQ ID NO: 298965 - protein, 351 aa, unidentified
MKTIAKAIPATIGLDIAKTFFQVHAVDGSGQVVLRRKLSRGEVLGFFETQPKVLVGVEACGTGHYWAREIAALGHEVKLLPPTYVKAYVKRGKTDAADAEAICEAVTRPNMHVVPIKTPEQQAALMMHRSRELLVGQRTALVNALRGHLAELGIVTAKGIHRVADLLAELVGVENTKIPPLARASLRCLAAQIEAVETQIDELEALIIEWHKANEASKRLAKIPGVGPITASAVVATIGDASNFTSARHLSAALGLTPKQNSSGGKPKQGGISKAGNTYLRRLLFIGAIAVIRSKRAQEAGSWLARLLERRPAKVVAIALANKSARIIWAMLRRGEAYRAPTIHAVAAAAA

SEQ ID NO: 298966 - protein, 382 aa, unidentified
MQTIDPVNPTILLAIELSTSTWLVAARVPGLDKPRLSRIDGGDTAALLALISSLQARAACGLGATMGIVCCFEAGRDGFWLHRLLTAHGVVSYVLEPTSILVNRRARRAKTDRLDAEGMLRVLAAYLRGDHQACSRVRVPTPDQEDAKRTHREREHLVQERLRIENRIEALLFTQGIRKRPSLRSWERDLTVLRTGDGRKIPHHLRAELDRLRRRLVLTLELIREVEAERDQVTKTKSQDQAHHKITALCRIRGIGENFAAVLTREVFYRSFDNRRQIASYVGITPMPYQSGGMDRDRRISRAGNPRARTTMIQLAWLWLRYQPDSELAEWFRERVGTLAGRTRRIAIVAMARKLLIALWRYVETGVIPTGAEIRAETTVAA

SEQ ID NO: 298967 - protein, 405 aa, unidentified
MEIIYPRCCGLDVHKATVVACVITPESKDIRTFGTVTPELLKLKAWLSECKVTHIAMESTGVFWKPIYNLLEDAFSLMLVNAQHIKTVPGRKTDVKDAEWIADLLRHGLVQGSFVPDRGQRELRELVRYRRTLIEERAREVNRIQKVLEGANVKLSSVATDVVGVSGKAMLEAMINGVDDPKALAEMAKGTLRRKKASLEEALQGIVSNQQKMLLRIQIEHLDFLDKQIAQLDSEINSRMHPIEESIERLDSIPGLDRRNAEDVLAEIGTDMNRFPTSAQLSSWAGLCPGNNESAGKRKSGRTRNGNRWLCSALVRAARATTRRSNNYLSALYHRIVRRRGDKRAIFAVAHSIIIIIHNMLKSGTTYQDLGDLYFDKRDQERLVHRTVQRLQKLGYTVSLQVALT

SEQ ID NO: 298968 - protein, 345 aa, unidentified
MDVHSKKLTSFAVPQNDEDIEETEFCMEFNKEFRSTPADKATLSRAAYWLKDREHLILIENSTKTHEVFWILTDLGCTVVVANASDLFRITMSVKKTDYHDCRELAHYARRYLDGEKEFSTCLMVTAEQLNRRQLCRTYAHASSDLSDLRRRIRSYILARGIAVSVPGRDIVSEATLRELDKVADSSMRLLIDEARHQRDRMRRIKNEILKEFKDDETFQLIYSIPGFGIVTASYLSAMIIDIDRFTSPGAYAAYHGVVPKQRESADHSVRCGITRRGDDIAREMLVTGTFIHISQDKDRVSDVSRFYDRLRNRGFPHKKALLACSNKMAHKIYTILKTKTPYRS

SEQ ID NO: 298969 - protein, 353 aa, unidentified
MSGCKSNAFNKSGETTVKSITSVGIDLAKSTFHVLAVNRAERPVFSKKIRRDKLMELVTGLPPCTIFMEACGSAHYWGRRFEAAGHQVRLIAGQHVKKFVVGNKDDAKDAEAIVTCGLRPKTRFVPLKTGRQLELQALHRVRSRLVRERTALGNEIRGLLYEHGVAIPQGIANLRAELAALGDEVPALLRKTMKDLAKELRTKDVRVKNYDLLIARENADNPVVERLMTIPCVGILTATAIVAEIGQPRAFKNGREFAAFLGLVPMHTGTGGHTTNLSISKRGDKYIRTLLVQGAQSGLRFTGRKDDKLSRWCEDVKRRRGIHKAAVALANKNARIIWRLLTSEEEYKVNLAA

SEQ ID NO: 298970 - protein, 321 aa, unidentified
MAYFRDVVGIDVSKENLDLYVLSAQQRRTVPNTAAGYRDLVSWLKSLGVRMAVMEASGGYERDVAKALRQAGFDVRIVDPKRVRHFAKAAGRLAKNDRIDAEMIAEFGAVFAAAQRCEIPLDAKREHLAGLVATRQALMDHQTSLQNQISACPKGPARQALAAALKPIPASIKQLDRLIAQAIAAHPQFAALAARLNTVPGVGPVTIAALISWLPELGRLDRRALAALVGVAPFDDDSGKRTGQRYIKGGRGKLRNIVYMAVMGAATQHNPVLKAYYDSLLKRGKLKKVALIACLRKLLTILNTMVAKQQDWNPASMAIAA

SEQ ID NO: 298971 - protein, 425 aa, unidentified
MSPKKENISSISVVHPVCCGLDVHKDTICACLLWSDAEGKEQQEVAEFGTFTTHLINLKEWLFAHECPIVAMESTGQYWTPVHNVLEHQFHVLLVNPKHMKNVPGRKTDASDSKWIASLLRHGLLRGGFIPPKFQRQWRDLTRMRKSFVRNLGDFKRRVHKLFQSANIKIDSVATNLFGVTGRNLMKLLVENTEPLSLSQVQRCLMGKLKAKAFELHESIQGHFEDHHRHLLSVLLRTIEHLEDQIDSLDDSIQKMMADHKDLIEQLKEIPGVSDVAAYSLLSEIGPTLEAFQTPAALASWCGLCPGNNQSAGKKRSGKNRVRKNHLKQIMIEIAWPAIKKKGSYFKSKYYALKARLGPKKAIVAVAHRLLVAIYHVIKYRHPFKDLGEHYLLNLNRNSKLKYLKKQAILLGYELVPKEPIFELS

SEQ ID NO: 298972 - protein, 344 aa, unidentified
MEDFDVAGIEVSSESFLVRVVRHGRLGSPQTFPNTTEGRLAILRLLTRSGARVRVCLESTGLYGLDLALALHEKAVIEVMVANPRSVRHFGEAMMQRSKTDPLDAALLCEYAARMPFQRWQPPTLTARQLCAITRQIHALTVMSTMDKNRLHAANLSETTPKIVRDELERNLAAQKASIGRLTRAALKLIDTDPELKRRFALLVNGPQKAPGIAQTSALQILGELVLVGPDFNVHQWVAYAGLDPREYQSGKSVHKKVRISKVGNAHLRRALYMPALVAVRCNAYFRAFYQHLLAKGKLKMVALVAAMRKLLHALYAMMKYNQPFDGSKLFPNACPPLSEATRA

SEQ ID NO: 298973 - protein, 414 aa, unidentified
MNSPGNTRDIQRYIALDIHKEYVMLGAMKATQEWVIRPRRVEMSHFRAWAANNLCTGDAVVIETTTNVWDIYDIVAPLVTRTVVAHARAVRQTAEARVKTDTEDIKRLLRLLIADIVPEVWVPPAHVRELRGMIAYRNRMVKTGAMIRNRLHSLLHRHNLPLAEGGLTDQKWWEAQALNTLERLQVRQELALLEKVEQNKAELDLELQKMSVGQTWGRQATRILQLPGLGVVVTMTILGAIGDIRRFEDAKHLVGYAGLGAGVHDSGKEHKDKGITKSGRKELRWALVEAAWRAIRMSELWKQRYEELKERKGPCKAIVAIARKLLVAIWHVLSKEETDCNASDEDLAWKMLLWSWSLGDEARLGLTPKQFAKYSLLRLGVQSDVTSFMRGKVLRRIAPTDEVLARAAELGIPT

SEQ ID NO: 298974 - protein, 353 aa, unidentified
MNNSRNKAEVILGVDTHMDTHVGVLLNAQGHQLGCLMVTTNTSGYERLVTWANSFGCLKRAGVEGTGTYGAGLASVLRKHGIEVFEVNRPDRSKRRLQGKSDPTDAESAARSVLSGSANAIAKTQSGAAEMMRVVSVARRSAVKAKTQAMNQLRALLVSAPQDVRERLWKSKPADCAKGCARVRSLGTTELLHTLTTTLCLLAKRWLLLADEVEKLDAMLDALTHQHARRLREQFGVGPQTAAVLLSTADDNPERLRNEASLAALCGVNPLPASSGKTVRHRLNRGGNRAANNALWTIAMVRMRGDPQTQSYVARRSAQGLSSKEIQRCLKRYIVRELYPLILADLADSARAC

SEQ ID NO: 298975 - protein, 341 aa, unidentified
MQITTIGLDIAKNVFQVHAIDSEENVVVRKQLRRGQVIRFFEELPPCLVGLEACATSHYWARELTKLGHEVRLMPARDVKAYVKRNKNDAADAAAICEAVRRPTMRFVQVKSAEQQAQLMQHRARDLLMHQRTQLINAMRSHLAELGIIAPQGREGIKELLGIIANDANTQLPDNARASLIVLAAQLQALQTTIGAIEKRIVVHHRANKDSKRLQTIPGIGVIGASAIASTVTNPKIFRSGRDFAAWIGLVPREDSTGGKRRLGPITKQGDRYLRRLLVVGAVSVLRRAKLKPEKFPWITRLLARRPFKVVAVALANKMARVAWALMMSGKTCRAARFATT

SEQ ID NO: 298976 - protein, 394 aa, unidentified
MKLVGIDVGKNSHHFCVMDKETGEFNVAPSSFSNNKEGFDLLINSLKPYSKKSILIGMEDTGHYHVALLKFLLSHGYTVALINPKTTDLTRKMEGGITKNDKLDTITICDVLDTPERKKQYRITKVDRFDLYEQRQLTRHHHNLKEELNVYCNRLQKSIDLVFPEFNTLFSSKYSIVYMNLLKTFGSAEAIASTDIRTIRKCFEIKGSGKRISLTPEKLKECAKNSIGISSEVETIQIKHLVSQITLIKEQIAEIDKKIEEFSIKNNSPILTIPGISHFSGTSILAELGDIGNYSKPSQIIKFAGVAPYHYESSQYNAQHTGITKKGSKYLRKTLYQIILTVINNNTVFKKYYLLKISQGKGHRCAQGHCIRKLLRIIYHLLETGQSFDPALLR

SEQ ID NO: 298977 - protein, 430 aa, unidentified
MKSNTQNAKIEAITEKTLVLGIDVGSEMHYARAFDYRGIEYSKKPFKFSNTEAGFVTFKEWILDLKERHEKDKVIPGMEPTGHYWFNLGKFLQDNEMKPVLVNPHHVKKSKELDDNNPTKNDRKDPKVIAGLVREGRYMIPYLPDGVYADLRTASNIRFQLQAELTRIQNRISRWFNIYFPEYKTVYGKPDAKSGMLILKAAPLPEDILTLGIDGVNQIWRDAKLRAVGKARAKTLIEAAEHSVGSKEGAVSARMEIRMLLEDYESRNTRLQEVMVLIEELVRKIPMAEKLLEIKGVGIRTVSGFLAEVGDISRFNNPKELQKLAGLALVENSSGKHKGETIISRRGRKRLRYLLFEVAMSLVSKNQEFRELHNYYTTRRLNPLKKMQSLMAIAAKLIRVFYAMLTKGVDYDPKKMVSDIKRPAVYLQAA

SEQ ID NO: 298978 - protein, 452 aa, unidentified
MGRKKKISLEVVNPNASGIDVGSRSHFVSIGQDLKDVKEFGVYQENLEELGKWLLSNGIDTVAMESTGDYWQNLHAELERIGIEVILTNGKFTKNIKGKKTDVLDCMWIQKLHSLGLLSGSFLPDDLAIEIRAYTRQRKNILDQCAKYSKKMQKNLKLLNFRLDVAVSDVCGKTGIKIIRAICEGELNPKKLAKLRNYRIRKSEEEIAKALNGNNRREYLFCLKQDFASYNFFRGQLIECDLQLEKFLEEYFLSLDFAVDDIPSKKPYKRKNKNSPKNIDMNIVAYQYFGGVDLMSIEGVSEGTLLALMGEIGPNGIEKFKTGKQFTSWLRLAPNNKISGGKTLSNRTPKGSGRLKIALRNAANAIGNLKEGSLAKFFRRISHRKGRQVAITATARKLAMIIWNMLVHKTEYKPAEGHMFLDEKRKLGLVKRMQKNIAKFDLKPEDLGFASD

SEQ ID NO: 298979 - protein, 365 aa, unidentified
MDQTARGEIVRVGVDLAKRVIQVHAVDSLGRVIVAKALTRERFTAWCAQLPPKVLVAMESCGGAHHWARKLAAMGLQPRLIAGHFVSPYRMEGKRGKNDANDAAAVCEAASRPSMRFVPMKTVDQQALLAVHRLRECYKEERTACVNRIRGLLTEFGLVFAQSPDALRLALPEVMEDATNELPAIARLALQRAQLQWLELDGHIAWCDERIAVHVHNDEQARVAVQLCGIGPVTASALVATVGDFKQFRTGAQFGSWLGLVPTQNSSGGKVSLGRITKRGDNYLRTLLIQGGKSAVMTAHKRQDRISRWLVQLLARVGWQKAAVAMANKNARILWAVLAKGRRFDPHHISIKPDGPATVVPTMAG

SEQ ID NO: 298980 - protein, 353 aa, unidentified
MKCDKYMGMDVHQAMTVVVVLDADGKVILETMIATEAAPIIRLVQSLSGPLHVTFEETTQAAWLHDVIRHFVTEVVVCDPRRNKLLAEGSKTDKVDARKLADLLRTGMLRSVYHGHEVTRKLKELVRAYETLSGDSRRTMTRIKAIFRGRGIRTAGRGVYQPKQREQWLEMLTEPGIQQRAAWLYEQLDQLRVLRRKAKQVMLEESRKHRAVGLLKTIPELGCIRAAFIVATVDTPHRFRTKRQFWSYVGLAVVTHMSSEYEMKAGQVVRRRKPLATRGLNHNCNHRLKEVFIGAATSASQHKSYESVRERLNHNGMRAEMARLTLARKIAAIALMVWKKGVEFDPKKLNATT

SEQ ID NO: 298981 - protein, 455 aa, unidentified
MPKKTTSDRPELKTVNVSTAAIDIGSKMQMAAVNPACTEVPVRSFGTFTQDLHELADWFTACGVTSVAMESTGVYWIPVYEILEQRGFEVILVNARYAKNVPGRKTDVSDAAWLRQLHSYGLLRGSFRPDAEIATLRAYLRQRERLVEYAAAHIQHMQKALMEMNLQLHHVVTDITGATGMRIIRAIVAGERNPDVLATYRDVRCHSSTETIHAALVGNDRHEHVFALTQSLELYDVYQAKMLDCDRKLEVLIAALNNKGEKPVGKLSKPRIKTKQVNAPTFDVRTALYGVLGVDLTEIHGLGPSLALKLVGECGTDLRAWPSAKHFTSWLCLAPGNKVTGGKVLSSRTRRSSSRAAALLRLAATTVGRSDTALGAFYRRLSSRAGKSKAVTATARKIAVLFYNTLRHGMSYRDPGAEHYEQQYRSRVLANLQRRAKSLGFVLQAIPGDANPAVS

SEQ ID NO: 298982 - protein, 343 aa, unidentified
MQAVTTIGLDIAKSVFQVHGVDCNGQVVIRRQLKRRYVLAFFEKLAPCLIGIEACASSHHWSRQLLALGHDVRLMPPSYVKPYVKRQKNDATDAEAICEAVSRANMRFVPTKTPEQQSGLVLHRTRHLFIRQQTSVINAIRAHCAEFGIVAPVGRQGVEELLNVIADAEDEQIPEIARACLSALGDQLHRIKAQILEFDRMIGAWHRSCEASRRLDEIPGVGPALATALVASIADPRTFRSGRDFSAWIGLVPKQSSSGGKPRLGSISKQGDRYLRGLFTAGALAVIRYAKIHGIGHRPWLTALLARRPIKVAAIALANKIARIAWAMMARGERYREPVALAA

SEQ ID NO: 298983 - protein, 335 aa, unidentified
MHYLYYVGLDVSKETFDASLVAFEDANEMAHRKFANSRKGICSCLHWVEKRHGIRLDDVIFCAEDMGSYISEMAVCASDRTLTFNFSLISPLVIKYSMGIARGKTDRVDARRIAEYAITHYRKIALYLPAEKELCQLRTWLILRAHLAKQRVAKLVLLEKLDYKEKFADVSIQRSMLQEEIAYAETHMKTIEREMKELIAADSNICRNYKLLTSIKGVGPITAIVMLCSTLNFTKITDLRKFACYCGLAPFEHSSGTSVRGGCHTSSMANRDIKVQLNRSALIAIRCDPQLKAYYERKVAEGKHKFSVLNAVRAKIAARCFAVVRRGTPYVALQI

SEQ ID NO: 298984 - protein, 425 aa, unidentified
MHERIEIGDRNEYIHPICCGLDAHKKSVFAAVFIYDNSDSPVKYYTAQFTTYPKDLKKMTDWIISKNCHDVCMESTGQYWHPIYDAAEEAGLHPLVSHPKYTKPLKGKKSDPADAKWIAKSYASGRVVASFIPSKEFRIMRSTIRYCQKIHNAMTGEKNRILNCLTGEGIKLDVVFSDVFGKTSRSIIDYMLNHPGEKFNVAPFIGKRCKTPIPVIQEAVAKASSVDISSLSKLKVAFSRLDRTVKDEAVLKQDVAERMKPYAHQLELIRTVPGFDRDPFTAMRVLAEIGPDMSVFPSARHLCSWAGVCPSHDSSAHKVKGRKISRAGKYLKPLLVNIARSVVRSKDHPEITSRFNRIKSRRGYMKAIIAICKMFLTAIWHILSKDEPYKTDGYMTAKKPKKAKRVMTRTQLAEYLASQGITVVD

SEQ ID NO: 298985 - protein, 350 aa, unidentified
MLIIGCDYHPSVQQIAFVDTDTGELRERRLGHREEAEQFYRELKQQNLTVRTGMESSGHSRWFERLLQELGFELWIGDPAEIQSKRVRKQKTDRQDAQLLLRLMMEDRFPRIWIPDAVNRDLRQLLWHRHRLVQMRTRVMNQLHVVALNEGLRRKKALWRPAGRAELEAIMLAPWATRRRQDLLDLLDQLTPKIQQLTQALEEEVEKRPVARLLMTHPGVGPLTALAYELVIGTTERFHCGKQIASYVGLVPEEKSSGDRRRLGHISKQGNALLRFLLVEAAQVTVRSQPQWRSKFMHLAMRRGRKIAKVAMARKLAVHLYWMWRKGHDYGQSQQFGSHAGEPGNLDGVQ

SEQ ID NO: 298986 - protein, 309 aa, unidentified
MTTSSYVGIDVSKDKLDVAVLGEKQAWQVENTKEGIQKLVQQMQKACPELIVVEATGGYQRSAVEALFHAGLCVAVVNPARVRQFARACGLLAKTDKLDAFVLAEFGRKMQPRRYEGKSEAEKQLSALLVRRKQLEEMLKAEQNRLRTISPSLRGSVERIIAILKEEKKRLDEQIRELMNEQKAWQEQREILSSAPGVGMVTTATLLAELPELGKLDRKKIAALVGVAPMNYDSGRKRGYRKTKGGRGDVRSVLYMSTLVATRHNPLIQTQYQQLLKRGKLKKVALTACMRKFLTILNAMARDQQPFRG

SEQ ID NO: 298987 - protein, 410 aa, unidentified
MTVITIAQNTPVLVAVDIAKARHEVLISVPGKKRHRRLTVLNELADFTRLIAALKDYGHPVRAAFEATGNYHRALAYHLATAGFEVKLVSSVALARTREALHNSWDKNDPKDAQVILHMMEIGNEQFYHDPLVRGTNDIQELSKTHDIVSKSKTELWHRILTHYLPLYFPEADRFHRSSRSDWFFAFLERYPSPHFISAMSKDAFIADAWDVVGRKVAKERLLADIYETSKVSVGLPVGLDSDAISMFRLVLGEGRSLIAQRNQIEDRAVALLKDLPDYQLLTSIPGIGPINALTILAEAGDLRRFGPHRQFLKFCGMDLATIQSGTFRGQTKLSKYGNARLRRTLWMAGQVAILQRANSFRDKFERYIAKDRYNTHLRRKAYTAIAAKMARTVHGIIKNGDPYRPFFEG

SEQ ID NO: 298988 - protein, 341 aa, unidentified
MSDYSYFCGIDLAKNHFSLHAVDQNGKVILHKSITRSKLLTTIANMPLMRIGVEACGGAHYWARTLNKLGHDARIMAVRYVIPYRTKGKNDLNDAVAICEAVQRPSTRFVPVKSPEQQAILSVHRMREHWVREHTALMNRMRALLSEFGLIIPVGRSSLMKHVPLMLEDTENELPHLARTVIADAYHHLGELNQRIADTEQVFDSFAKVSANVQRVMKVRGIGPQTATAILASIGNGSQFDKSRDFSAWLGLVPKQYSTGGKPRLGRITKHGDKYLRTLLVHGARTVIANLGDKQDKLSQWCRGVLERREMNRAIVALAAKNARIIWSLLHNQTEYENYAA

SEQ ID NO: 298989 - protein, 402 aa, unidentified
MNAVGIDVSKGKSMVAIMRPFGEIVSAPFEIKHTASDIHSLVELINSVEGESRIVMEHTGRYYEVLAHQLSKANLFVSAINPKLIKDFDNDSLRKVKSDKADAVKIARYALDKWQNLKQYNVMDELRNQLKTMNRQFGFYMKHKTAMKNNLIGILDQTYPGVNTYFDSPARSDGSQKWVDFASTYWHVDCVRKMSLNAFIDHYQNWCKRKKYNFSQSKAEEIYGKAKELVPVLPKDAITKLIIKQAVDQLKSASTTVESLRTLMNETASKLPEYPVVMAMKGVGTSLGPQLMAEIGDVSRFTHKSAITAFAGVDPGVNESGSYEQKSVPTSKRGSSDLRKTLFQVMDVLIKTHPQDDPVYQFIDKKRAQGKPYYVYMTAGANKFLRIYYGRVKEYLSSLPES

SEQ ID NO: 298990 - protein, 355 aa, unidentified
MDNLRYIGLDVHRDTISAAVLNREGQLIMQSVVPTRAPAILDLLDGIRGTLHVTFEEGIHSAWLYDLLQRRVARALVCDPRKTSLLKSGNKGDLIDARKLAELLRNDALSPVYHGELSSLEVQRRTRSYTMLTEDTTRIMSRVKAVFRGLAIPYHGKSIYRPDRRESYLAQLPTEGLRQRVELLYQELDAVHRLRLRAKREMLAECRKHPAMKWLQSVPFLGKVRTAVLIGRVQTPHRFRTKRQFWSYCGLALETHDSAQYHVVHGQVERKPRFVQVRGLNWNHNHDLKDVFKSAATMAAVREGVFRDYYCGLLAKGIRPEMARLTLARKIAAITLKIWKEGETFNAEQVKPQAA

SEQ ID NO: 298991 - protein, 352 aa, unidentified
MKKNSARAEVSTIGMDLGDKYSRICVLDGAGEVVEEGRIPTSATGLVRKFKSLERHRIVIETGTHANWVHDLLVGMGHEVVVANARKLHAISANERKCDELDARMLARLGRSDLRLLQPVTVRPAQMRADLCLIHAREALVEARTALVNSARGLAKTTGERLPTCAAASLYKHKLEVKLEPALRPLMTALEALEGQIKECDNRIAELSRTRYPQTALLRHVKGVGPITSLYFVLAIADPKRFTDGRDVGAFFGLVPRRDQSGAQDPQLRISKCGDPLGRALLVQCTHYILGHFGPDSDLRRFGQRLEAQGGKRAKKRAIVATARKLAVLLFALLRKSEVYEPLRNSAKSQAS

SEQ ID NO: 298992 - protein, 357 aa, unidentified
MLSMGDSAPRKGADAMTFVGCDLHTRMQQVAVLDTGTGEVSEHRLPHDGLTVDEFYAALPQPVTIGIESTGYAVWFHTLMQRLGHTLLVGDAAKIRAMVVRKTKTDRRDALHILDLLRHDRFPTIWVPDPATRDLRALRTHRMRLVCIRTMVKNGLHAIALNSRLTCGSKLLRQAGLVQLQALALPPHTAQRRDQSLELLAGLTTQIRVLDDAITTAAGGHPEAPRLMTHPGVGALTALTTIVVLGPTSRFHDSKHVVSYVGLAPALNASADKYHLGHITKQGSPLLRFVLGQAAAHAARMDPDLKRTYGALVHRRGRPKAKVAVARKLLVRLFIMLRDRIDYDEFRRRGRPAPAAA

SEQ ID NO: 298993 - protein, 342 aa, unidentified
MDHFAGLDVSVKDTSVCIVDGTGKIAREVKVASEPAALLAVLTGSSYRFKRIGLEAGPLSQWLFSALAEADLSVICVETRHMRAVLKAQINKTDRNDARGIAQMMRVGLYRPVHVKTLRSQKLRMLLTHRKLLQAKAIAVENDLRATLRNFGLKVGMVGTIKFEARVKDLVDNFPDLVTLVQPLLVVRRVLREQISILHRRVLAVVRDDEVCRRLMTVPGVGPVVALTYRATVDVPARFRKSKSVGAVFGLTPARDQSGERDRPGAISRCGDEMMRTTLYEAAQVMLLRSAKWSWLKAWAMKIARHRGMKKAIVALARRLAVIMHRIWTDGTEFRWTREAAA

SEQ ID NO: 298994 - protein, 357 aa, unidentified
MKVTTIGIDLAKDVFGLHGVDGEGRVALKKRLVRSRLLEFLSQLPPCLVGLEACSSAHYWARKIEQLGHRVRLMSPRFVKPYRKSDKNDANDAEAICDSVTRASMRFVPIKSEAQHEVQALHRVREQLLKSRTALVNQARGLLAEHGIVAPQGIARARRLLLEILADPQRHGLSGLFRETLQEMAERLRFLDERVGAYDDRIERVFKEDERCKRLAKIEGVGPLVATAVVAAVGNASEFKSGRELSAWLGLVPRQYSSGNRSQLLGISKRGDRYLRTILIHGARAALRRADHKSDQRSRWALRIKLARGYNKAAVALANKNARIIWALLTRGENYRPPAISVASAGVGRISLTQVQA

SEQ ID NO: 298995 - protein, 408 aa, unidentified
MTVVGIDVSKGKSMVAAMKPGGELVAAPYEVRHSDIELSRLALDVLCMEPDTRVVMEATGRYHEPVAALLHSEGIFVSILNPLLIKQSGAGSLRKVKSDPKDALKIAKYGLDNWSTLREYTPTEAIRQQLKLCERQCDLYSKNIVMLTNNLISLSDKTFPGVNELFSSPEKADGHLKWVDFYRTFWHCDCINRMSPDTFGERYKKWCKRKGYHFSADAADALYAASCGLYTTLPRDNNARLLVTVAADQLIALRENQSKLEAEMLNLCKQLPEYETVMAMYGVGKSTGPHLMAELGDVRRFPHRSSIVAFAGVDPGVVGSGKMQLSSVATSKRGSPQLRKALFQVVSTYVKCKPENEAVYQFYTKKRDEGKPFFVCTTAAANKFLRIYYARVKECLNAAESATQVEEG

SEQ ID NO: 298996 - protein, 413 aa, unidentified
MDLEIIHQVACGLDVHFAVVAACLARSGPKGGPRYEEQQFPTTQAGLRGLREWLREADCQAVGMEATGVYWMPVYAVLEGDCGVVVGNPQHMKNLRGHKTDRKDARWIAGLVRHGLIRASFVPPPEFREARESTRFRRQLIQARSSIRNEVLRLLARHGITLSNVLSNVFGASGMAILEALSEGRTVVAELPHLIHGSVKGKLGALTAALEAPLPGGSRRILCIQMKRLEEAEARLGEVEALIAGQMAPHQRQVDQLLKIPGISQTSCCIILAELGVEMKVWPTEKHIAAWAGVAPGSRESAGKRMSTATRKGNVHLTTILMECAGAAVRTKGCHLGVKFQRLKARMGYKKALMAIARKLLLIVYRVLGGETEYKEPEPTKGDARAKHRAIQKRVKDLQNLGFEVLLTPRPAC

SEQ ID NO: 298997 - protein, 346 aa, unidentified
MMIIGCDFHPSWQQIAWLNTETGETGEQKLVHAAGDAKLFYQQLAAPVLIGMEATGNSQWFLELVQDLGHEIWIGDAAQIRASYVRKQKTDKGDAAHILKLVVESRFPRLWTPDREQRDLRQLVLHRHKLVEIRSRVKNELQHLSLNKGIQRKAKLWSQAGQKLLRELPLKPWAACRREDLLGLLAMLHQQIGKLDQAVQQAADEHPQAQLLMTQPGVGPNTALAFVLTIGDVSRFPRGKQVASYLGLIPREESSGGRQKLGAITKQGNRLVRSLLVEAAQIAVRFDPGMKKQYLHRCHQKPKGVAKVAAARKLAVRLYWMLRTQKPYPEIVRIESSPRVPLVGAS

SEQ ID NO: 298998 - protein, 607 aa, unidentified
MSTIASLDRIGVGIDTARYGHRVSFLRPDRKPAAKPLTVMENRAGYQALQDRLNQLHEQHPTAHFHVRIDAAGQYAVNLELFLRGLKLPMTISVGEPKRNKDYQKAHFPKRTTDDTESQAMARFAVIELPNATPAPSTPMILLREVAGRLQSKVKQTTQAINRLHNLLARVFPELATLTEDISVGWVLKLLDKYPTAERIAQAQIASLEKIPYLSVEQAHAVHQAAKQSVASLRGELAEALVRDLVNQLRLCQKAEQHLHQLLLEAFADLPASPHVQVLTITGIGEATAAALVAKIVDINRFATPNHLVSYFGVFPEESSSGVDKHGKPLPPGTLIMSPKGNDLVRFYLWNAARTAIQHNPAIRALYRRLRAKGKRGDVAFGHCMRKLLHLVYAVWKTDRPFDKEHFPWEGSSDTQPSATTPPSADAGTTPSANEEAVGHKRDLPAEEVVTTADSTLEPASPAVKPASQSAAPRPKVDFACVREHVTMEQVLQHLGYFASLRGRGRQRRGPCPVHSQPTAPERTFSVHLGKNAFQCFHAECAVKGNVLDLWAAIHRLPLYEAALDLAETFQVPRNREEEPVKGTSSPRTATAKTSAPAAATATDGAK

SEQ ID NO: 298999 - protein, 370 aa, unidentified
MDVHTTNYTLCIFEPSFEHDGTVHCITQVKPEVKNIIHVIETFKKKHENEELNIVCGYEAGCLGYSLYHELKEKGIECVILAPTTMKTEKGGRKLKNDYRDAKMIAECLAYGGYSAVHIPTELDNSVKEFIRMRDDIKENLKSIKQQIIAFLTRNGKQFEGKSFWTRKHIDWINTVSFSEPLLQDTLKEYMIEYNHLCNRIETLDRQIEEISLKEEYVEKVQQLQCLIGIKTHTALSLIVETSDFNRFKKGNMYSAYLGLIPGDDSSGGHENKLGITKAGNSHLRRLLVEAAQGYTRGRVGFKSKDLKSRQEKCSSEVVAYADRANERLRRKYYRMTLRGKKFNVAKTAIARELACFVWGIMTDHIDLCN

SEQ ID NO: 299000 - protein, 359 aa, unidentified
MFTERTSVGLDVHARSVAAAAIDGVTGEVFKARLVPAPEVVIRWVESLPGPSAAVYESGPTGFGLARALTAAGIRCEVAAASKLQRPAGDRVKTDAKDALLLAQLLQVGQIVPVRVPTVSQEAARDLVRAREDVRGDLMRARHRVSKLLLRHGHVYYGGAAWTGKHAQWLGSVRFEELGTRAAYDADREAVDFAVTRRARLDAAIAAMAADSEFTAVTRRLCCLRGISTLTGFALAVELGDWDRFTGASIGAYLGLVPSEHSSGDSRRQGAITKTGNTHARRLLVEAAWHHKPRYTVGPVLQARWNQATPAARARGHAGNQRLHHQWVGYAARRKKHTVANTAIARELAGWCWSLATLE

SEQ ID NO: 299001 - protein, 410 aa, unidentified
MKQLFVGIDVGSQNNAIYLMKPNGEKHSSFSVQNNQGGAKLLSEKIVSALESQRLERVVIGMEATSIYGDNLVYALREDGKLGRYPRKIHVLNPKQVSKFKEAYSDLPKNDDVDAFVIADKLRFGRINKEVYMDDYRYKALQTLTRARFYAVQGLTREKQRFANYLLLKFSGLAQDKNIPNTSATTLALVEYFETVDELARISLDELTAFLIKTGRGRFADPEATAKAIQAAAKGSYRLPRTVNDSVSQAMSVSIATMRALDNQIKSLDKAIEQQLEIIPNTLTSVPGIGKVYSAGMIAEIGDINRFHSHASVAKYAGLAWTQHQSSTFEAEDTRLIRSGNRFLRYYLLEAANSVRRCDSEFRRYYDLKYKEVKKHQHKRALALTARKLVRLVFRLLKDNRLYNPPEKRA

SEQ ID NO: 299002 - protein, 375 aa, unidentified
MKKDTKYYAAIDLHSNNLVVAIVDAGGRRIKDARLFCEMHEVEKFLKPYRSRIAAVAVESTFNWYWLVDGLQDLGYEVVLANPAALVQYDGLKHADDKSDAYFLAEALRLGIMPTGYVGDREVRAVRDLLRRRASLVGKRTSLILSLRNLQMRTKGHCPIPTPRLQRGPRRDLVDLFDDPSEKLTAEIQKSHIDAFARSIRRIERHALASARALPNFERLCSVPGIGRILAMTIVLEVGDIRRFSSAEKFASYCRMVKSTRKSNGKSKGENNRKCGNRYLAWAFVEAANFIRRYDPRAQRWHDRKAAKTNPVLAKKALGCKIAKAVWHILAEGSEYDGDRLFGPGKRAAAAPAGGEELGRASASQRKGLNTQSAD

SEQ ID NO: 299003 - protein, 348 aa, unidentified
MKFYTKQHEYTCGIDLHARSLYVCILDTAGNPVLHKPIKASPDALLKLIAPYRNDLVIGVECMFSWYWVADLCADHGIEFVLGHALYMKAIHGGKAKNDKIDAEKIARLLKGGMFPCAYVYPRQWRGTRDLMRRRMRLMRQRAELIAHIHNTLSQYNLPPNTDNLRYAQHRQKLREIFPDPSVQKSIDLDLNRIDFYDEQLAKLEWYLKQTAKSVDKNAIIRLKSIQGIGDILSLVILYEIHSIERFERVQDFVSYCRLVKCKRESAGKTYGTGGAKIGNAYLRWAFGEAAVLFLRGNPPAQQWLAEKTQQHNKAKALTLLAHKLGRAVFYMLKRQTLFDQDKFLATS

SEQ ID NO: 299004 - protein, 412 aa, unidentified
MRRVIGIDIHRTFGEVVFWEDGRLRPAGRIDMTRTALEGFGKSLLATDEVVIEATGNCMAVSRVLSPFAKRVVIANPLQVKAIAHAHVKTDKVDAGTLASLYAAGYLPEIWTPDATTERMRRLVARRYQVVRHRTRIKNEVHAILHAHLIPRCPHADLFNRRGRDWLARQPLPDDEQAAIERHVRELDRLGEDLAILDREIAQSTLDDPAIKRLITITGVNLTVAAGLMAAIGDIGRFKSPQKLVSYFGLNPRVRQSGLGAAHHGRISKVGRRHARAMLVEAAWAAAKTPGPLHAFFVRIRARRGHQVAAVAVARKLTVLCWHLLTKEEDYFWARPALVANKVRAMELQAGKPQKKGNRRGPAYAYNVKALREQEMRIAEQAERSYEHLVAHWQPRHPKAGVRGRLKPAGPE

SEQ ID NO: 299005 - protein, 567 aa, unidentified
MSAAATGRAEERDGLARRESDFVEHQVLEPYGVGIDCHSKFVAVCVLVQRKGRVERLEKSFPVDWPSLTAARSWAVAAIGGSRAAEPLRYCIESTGCYHMPVLRSWGGKPSVVNPLLAGPTRRKTDVLDARLLAHHSITGMWPESFLASEAGLQLRVLWACRAEAMRAATRASNRINNIILRFGHVIAAKNAIRSSVGRALVDSLVAGDVPPCPQVSPLGLPAPVRPVIAELAADLDAATAREAAARRQAQDFVAKRAWPAGKGRLRGGELLRLLMTVPGVGITTALTWLSEVLDPGRFACADQVAAFCGCDPSVKVSAGKVTDHVRRKGSSRLHKALLFAASGLMRQPLSAHGAWGLSIAGRHKKGVYRKATSAIARRLATSLWHVHRLGEPYDESKYSFGAEQRFVPGLLAEVGLSRAQAACLPPHVTRADELARLYRRGLLGGLPGLGKGGLEKISRWAESHRARDNQPNERSQSGKDRKGRPLPARRAAGTAEEGSEKIGRRPEVLHQPVRPDPGQGGPGGPLDGQSNAPGRPVGGRPRRGRSLCWGILEPRGGDGSRKLGGG

SEQ ID NO: 299006 - protein, 348 aa, unidentified
MVYFVGLDVSVKTTSVCVVDDAGKVILEQKVPTEPADIIAVLTPLGVSFGRIGIEAGPLSQWLVNALTAAELPVICVETRHMKALLTAQQISKTDRNDARGIAQMMRVGLFKPVHVKTMVAQEQRMLLTSRKLLQRKLLDVESDLRGALRNFGLKVGVVSSFRYEARVRELVAGFPRLAAIVEPLLSVRRVMRQQLAVLQKMVLDTVRGDPVCRRLMTAPGVGAVVALTYRATVDQPQRFVHSRAVGAHVGLTPKRYQSGETDYEGGVSKCGDALLRTMLYEAAHALLTRGAKWSWLKAWGVRVAQRRGMRRAIVAVARRLAVILHRMWVDGSEFRWSKDSTAVPAVA

SEQ ID NO: 299007 - protein, 405 aa, unidentified
MAIIGMDIHRSFAQAAFLQDGQVKREQRVDLVHDRLVRFAKTLSIDDEVVIEATGNSAAVERILRPFVKRVIVANPRMVRAIAYARVKTDKIDAVILARLHAGGFLPEVWVADDNTQRQRRQTVERMGVLEQVVRTKGRIHAILHANLIPKYSGHLFGKAGKKWLAGLPLPEEEKAIVGRLVDELERNSDQLAKLDKTIIGEALENPRVVRLMTIPGIGPVVASTVLASIGDISRFETPEKLSCYFGLTPKVRQSGDRPARHGRISKQGNTHARKMLVEAAWSAKTAPGPLKAFFQRVQRNRGAPAAAVATARKLAVMIWHVLTDGTEYAYARPAFTAMKLRKAALKAGAPREYGKAGPGRDYWIKEIREREADYVRRAEQAYERMVAAWKEKPPTAPAMTATPG

SEQ ID NO: 299008 - protein, 354 aa, unidentified
MTSTKYIGMDVHTESISIAVRNSVGKVVMECVIETNASTILQFIDGLSGDLRVTFEEGTWATWLYDLLKPHVTEVLVCNTRKNASRNGSKSDRIDARKLSEQLYMNNIKSVYHGEHGLRTLKELARSYLTITKDLTRVMNRLKALYRSWGIPYAGKEVYAPRHRAEWLAKISETGVRRRAEHYYQQLDVLRPLHQEARRDLLLEAKKHKPWKLLRLIPGIGPIRAAIVIAVMQTPHRFRTKRHLWTYSGLALETHDSAQYRVAEGQLERSRKPATVRGLNKDYNHDLKDIFKGAAMRASTAAGPMHDFYEALLAKGRKPTMARLTLARKIAAITLIVWKKEVRFDANYLKPQAA

SEQ ID NO: 299009 - protein, 415 aa, unidentified
MALKIVYKICCGIDVHKTFVVACIASTNDKGVTSYESHRFSTYTSGLKTLLQWLLDRNCRDVCMESTGKYWIPVYNILEKDCSIVLAHPKYVKAIRGKKTDKKDAKWIADLFKHDLVAGSFMPPADIRQLRDLMRYRFKLTCFKSSEKNRLQNCLTVSNIQLGNVVSDTFGKSAQAILDKILEDPADTSFDLEPLVFKSLKKKLPELRDAIDGYITPEQAGKLEVIKAHYENLEARKAELEELILALAAPYQQELTILQTAPGINSEFTAIGIISEIGTNMEAFPSAKHLCSWAGLTPTSNESAGKKKSVRVSKAGCYIKPLLVQCANAIVKSTKHPEMRNRYLRLKKRRGHKKAIIAIERMLLTALYHMLKNGENYNAELYRKSDLLPVDREITVEQALMIARNQGYKIKSATT

SEQ ID NO: 299010 - protein, 414 aa, unidentified
MESGYRLMVGIDWATEAHQVCLLDRQGRLLEQRRVVHRAEAIATMIDRLIELAGGDPASIAVAIEVPRGAVVEALVERGLHVFAINPKQLDRFRDRHTVAGAKDDRRDAFVLADSLRTDLSAFHRVHLDDAWTTQIRELTRIEADLNTEITRLANQLRDLLLRFYPQLLRLCPAADQPWLWALLKLAPTPTKAQRLRRSSIERLLRQYRIRKWTTDQVRTELKTAPLSVAPGVAEATCAHIALLLPRMELLMAQLKLCSKAIQTALNERMSEQEQRREHRDVEIILSLPGIGRVVAATMLAEAPQLLAQRNYHALRTLGGVAPVTRQSGKRLAVRRRHGCNHRLSNVFYHWARVSSQCDPRAKHHYQTLRQIGHSHGRALRGVADRLLATLVAMLRDQTLYDTTRADAPNPIAA

SEQ ID NO: 299011 - protein, 347 aa, unidentified
MYPFYLGIDLHLKRTFMVLMNANGEVVDKQRISNDDISRYLQEKVPQETYAVLEATRNWPFMYDLLQEHVQQVDLVHAKAVRTIANAAVKTDQIDASTLAHLARLNYIPKAYAATKEMRDLRQLLRHREWMVNQRTRAKNRVHAVLAGYNLVSPVTDLFGVAGRKYLDEVMEKGLRPAARQVVQDHLALIDHLEERIHALFKSISLDEQEEHIVKLLMSMPGVGRLIAMILLAEIGDISRFQSPKSLCSWAGLTPKVHNSDTVVQHGHITKEGSRYLRTAMVQAATVACRVSPKWYAIHSHLALHCGRRSARVAVARRLLTVIYYMWKREQPYQENYGQNQSEALGA

SEQ ID NO: 299012 - protein, 325 aa, unidentified
MRLIGCDLHASQQSIAMLDCDSGAVNEKTLKHEGEAVREFYASIPPPVVVGIEATGSMGWFLRLMEELAIECRVGHPTAIRKAETRRQKHDRRDAALLLQLLAEDRFPTIWMPSTEYRDLRSLLLHRHQWIRMRTRVQNALHAIVLAHGVRRGHTLWNRDGQALLASLPLPPHTADRRSELQALYQHLQAHIDRLDDRVGHVANERARATLLMTHPGVGPVTALATEVFVGDPARFLDRKALASYVGMIPREYSSGKRQRLGALSKQGNPFLRFLWCEAAAHAVRRDPELQRFYRRKVLQRIREGPRRCGAEAGHSSLDHVARSD

SEQ ID NO: 299013 - protein, 400 aa, unidentified
MPQPNDLSRSLAALDHDSTLIAVIEMSQSTWLVAGIVPGINRQPLKKLAADEATLLQLLYRWRDEATKAGRTIDRIAVAYEAGRDGFWLARWLRGRGIEAHVIHPTSVAVSREHRRAKTDRLDTELLKRAFLGWLRGEPRHCSMAKIPTPEEEDAKRPNRERENLVSERTRIVNRMKSTLARLGLRGFKPTLRKAAERLDRLRTAEGVPLPPNTLAELRRDMARLRFVMDQIREIEAARLIRLKQHPELASHAMVRLLARVIGVGIETADMLVHEILSRNLRDRKAVARYAGLTGSPDESGARRREKGLARPAPGREQGAGNARVRRGMIQLAWRFLMFQKNSALAQWYRTQTADRRGTTRKTMIPAFARTALARKLLVALWQLVTSGEVPEGVVLRPAA

SEQ ID NO: 299014 - protein, 411 aa, unidentified
MEVVHARCAGLDISKKDAKVCVRVAGAGRRKTVETVTTWSSMTSQILALREHLIAERITCAVMEATGDYWKPFYYLLEDAGFDLLLVNSRHVKNLPGRKTDVADATWLAQLGAHGLVRGSFVPPEPIRQLRDLTRARTAITRERSREVQRLDKLLEDAGVKLSVVASDIVGVSGRAMLESMITGNRDPAALADLAKRRLRCKIPALTEALTGRFSDHHAFLTRVHLDLIDQHTAAIEEITMRIEEVIAPFHGFRDLICTIPGISTLTADVIIAETGADMTRFPTAAQLASWAGTTPGNNESAGKVKSSRTRPGNPYLQGALGAAAMACAQNPTTYLGARYRRIASRRGPQKANVAVQHSMLIAIWHMGTNGCLYEDLGADYFNRLHPDRAKKRAINQLEAMGYQVTLTRAS

SEQ ID NO: 299015 - protein, 373 aa, unidentified
MKYSTIYVGMDVHKETFSLCCYTNEKEQAEYPQKVDGHYSKVINYIEAMRFHYGDDALFICGYEAGCLGFTLYHQLTAHNVKCVILAPTTMLQQKGRKKVKTDKRDAALIARCLAHHDYSPVHIPTEQDEQTKEYIRMRDDHKLALKKVKQQILSFCLRHNYRFDGTTNYWTLAHLKWLRALKPEGLYAEILQEYLLTYDTLTDKLERFDKRIEELASNVTYQENVRKLSCFMGVKTVTALTVLTEVGDFKRFASAQHFASYIGLTPGEDSSGDDQIHLGITKAGNRHVRSLLVEASQSYSRGHIGFKSKALKARQDGNPPEVMAYADKANERLRRKYYRMVLKNNKKNNVAKTAVARELACFMWGMITGNVA

SEQ ID NO: 299016 - protein, 358 aa, unidentified
MQTNILKQALGIDVSKDSLSFCLGALKDTLEKEFKLGSDVSNDKSGFKQLSKWLKSHSNKEGLPIVVMESTGVYHEKISYYLHNLGYKVCTMQSGRVKRYAQSLVQRSKTDALDSKMLSMLGLERNLTPWTPPSETLLELRLLSRERSTLVKERTVEKNRIHAIKAASHTHKNTVKRFNKRVKLLNLQITEIEEEMLEIVNQDSVLSMKLKFLKSIPGVSFISGITVIAETLGFSTINNAKQLVSYTGYDVVLRQSGNYTGKTKISKKGNKHIRAILHMPSMTAIRLNPTLKPFYDRLKSKKAKPLIALVAVQRKLLVLMYSLWKNDQYYDAEHELKKAARKQVLAAQDRDKIEFVTS

SEQ ID NO: 299017 - protein, 449 aa, unidentified
MWLATKIQLTAKYFLKEDELVTRISAGVDVPKNRSTVCIMDQDGKFIMRPFLVWHSTEELDFLADTLKRLNGEVRVIMESTSIYQYPIALQLKERGLFISIVNAYEMKQFANIDFRGGKTDKKDSRTIASYGISYWDKLVEWQIPKDTYFNLDLLNRTYMNAKKHRQIILQELQHYIDCAMPGMDKELHSLNLSTKKGFMLDFVEKFWHRDEIVNMTEAEFTEVFTAWAKKKGYRPVEGKAAKIYAIAKSCIPYYPANPTVKTILQCIVDKLSGVNRTLVTIVTQMIEEAKKLPEYQIVREMPGVGDPLAARFFGSAGDIRRFKNSKALVAYAGIDSPPDESGDFSSTHRHITKKGSKVFRDTGYEIMMALRAQKRTWEKVRKNPEVYDYMLKKEAEGKPRKVAKIAALNKFLRIVYARIKELYDNMALAERAKTKTRSKTRAKTKVTA

SEQ ID NO: 299018 - protein, 469 aa, unidentified
MNLEERLREVAQKTLLVGIDVAKDKHWAVIGNISGKELMKPFNFDNNQEGFNLLTNRISSLGKFSNGEVMLGLEPTGIYWKPLGAYLKNNNYRLVLINPSHTHKTKELQDNSQTKHDRKDSRLVQTLVREGKFLEPIIPVGDYASLRRLIKARESLTKRSRALQNKIKGIIAEYFPELPLVCKTLKGKTVIGLLKECPFPKEIKELGREILFKKLSLFGNNRFGRDRAQKLWELANNSIGIKEACDEARLELRQLIEEYELLNRQKKELEEPIKAITLRLPETGYIINLPGIKYLSIARLLSETGPLKNYSNSKDIEKLAGMNLVENSSGRHTSVKVISKRGRKLLRYTAYQIALSSIRNNPAIKYEYEYRVDKLKQNKMKALVAISAKMLRIIFCLAVKQKQYDQDKASKYYYLSKIKDRNKTKDIYEWARPIEPPSGSPIKTGDDTVYENIGCPLSVTLNEVMSGSR

SEQ ID NO: 299019 - protein, 352 aa, unidentified
MNSYIGLDGHSKSCTFVVLDEKGSVKRQAVVETNAQALIEFIKQIPGRRYLCVEEGAQSQWLYELLSPFVHDMAIVHGRKRQGNKDDGRDAHDLAHRFRIGDLGPRIFKTPASLTTLKAHVRSYETLTRDLVRVKNRIKHLHRSHGIGYMKEGCRFCKEPGGNGSGCTKPGFHQSLMLWREQQEKLESLKSEAQKAMLAEASRDPIIRVLKTTPGFGPVRSAELLAIVVTPYRFRTSRQFWCYCGLAIVQRSSADWVMQPNGQWRRAPVYHTRGLNQNYNRQAKAIFKGAAMTVIISKSHESLRTDYERLLANGTKPNLARLTIARKIAAIVLSMWKHQQRYEPRRYQVETQ

SEQ ID NO: 299020 - protein, 328 aa, unidentified
MDPTTTTTVALFAGVDVSKDRLDVCLRWSEPESHQKEETFFVTYDDNGIDALLSRLLREPTVLVVLEATGGFERTVVGALAAVGLPVVVVNPRQVRDFARATGTIAKTDRIDASILARFAEAVRPAPKPLPDREIRALQAIVARRRQLLGMIAAENNRLSSAAKPVAKRIKAHIRWLEKELSRTEGDLEAAIESSPALGENEALLRSVPGVGPVLARTLLAGVPELGTLTHKRVAALVGVAPLNRDSGTLRGHRSVWGGRAEVRGALYMGALVAARRNPVVKEFYERLLAAGKPKKVALVACMRKLLSILNAVLKHRTPWRSPQYLSP

SEQ ID NO: 299021 - protein, 340 aa, unidentified
MEITTIGLDLAKNVFQVHGVNERGKTVLRRQLKRDQVAPFFANLPPCLVGVEACASAHHWARKLQALGHRVRLMAPQFVKPYVKSNKNDAADAEAICEAVSRPSMRFVPIKNVEQQSVLSLHRVRQGFVKARTAQANQIRGLLGEYGLVVPQGIAYIAQRVPALIEDAENELPGSFRLLIQRLLDHLKVLQDQVDEIEVQIKAWHRDSEASQRLEKVPGIGPLTASALVASIGDAKNFDNGRQFAAWLGVVPRQHSSGGKPTLLGMSKRGDAYLRTMLIHGARSVIYRATQKADPDSWLVKLTTRRNKNVAAVAMANKTARTVWALLAHGREFKAGYAAA

SEQ ID NO: 299022 - protein, 341 aa, unidentified
MTLYIGVDIHARQQTLSYLDTADGTAGQVELSHERDDIKGFYSKFEGEVIIGIEACGYTNWFEELVEQLGHQLLVGDAAEIRRLARRRQKNDRRDADLLLELLLHNEFPALFRYSRASRELLRQLRYRHKLVKLRTMVVNTLHALAINAGLSLRAKLLTKGGRRQLAGLQLSLISQQQRDELLSLADELTRRIGTVEQWLQAQAKSDVRVQRLQTHPGVGLLTSLCLVHTLGDLSRFPSTRKVAAYVGFDPMEDSSAERKAYGGISKAGSRLLRYLLVEAGQTAAKDDEQLKQFYRRLLPRRGKARAKVAVARKLLIRCFIMGRAEIDYAEFLRRGKKEAE

SEQ ID NO: 299023 - protein, 426 aa, unidentified
MIPAVIERCAGIDVGKTFLTVCLLTGPADGEPKVQTRKVSTFHDDLEALRQWLSNEHCTHVVMESTGSYWKPVFNILESSVTVFLANGQDVKGRKGHKTDWNDCRWLAHLLRHGLIRPSFVPSRAIRELRDLTRRRKQVLSTAASERNRVQKVLEEASVKIGSVLTDVFGVSGQLILEALLEGKSTLEQIADLARHTARRKIPEIIRSLEGNRLDDHYRLLIQLSLDHLAFLEKQLEEIDSEIMSRVEQPEFRQAFALLQAIPGIKQDAAAGILAEIGPNMSQFPSEAHLSSWAGVCPGNNCTGGKAKPAKIPRGNRWLRTILVECAWAASKKKDCFLKDRFWRLAARGKKRALVAIAHSILVLIYRSLSNGQAYQEGGAVELNQQKRRRLIRHHVRRLGRLGIAVSSLRLDGSVISPPLLARDTV

SEQ ID NO: 299024 - protein, 343 aa, unidentified
MQTITTIGLDIAKSVFQVDGVDAAGRVVIRRQLKRRHVLAFFQRLRPCLIGIEACASSHHWSRELQAVGHTVRLMPPVYVKPYVKRQKNDATDAEAICEAVARANMRFVPTKTPEQQSGLVLHRTRHLFVRQQTSVINVIRAHLAEFGIVAPVGRHGVEELLGIVADPSDKRVPEVARACLAALGAQLRVLKAQILEFDRMITAWHRSSETSRRLDDCPGVGPALATALVATVADPKAFRSGRNFSAWIGLVPKQHSSGGKDRLGSISKQGDRYLRSLFVAGALAVIRYAKIHGTKHRPWLTALLARRPTKVAAIALANKIARMAWAMMAKGERYKQPVALAA

SEQ ID NO: 299025 - protein, 400 aa, unidentified
MNAVGIDVSKGKSTVAVLRPFGEVVASPFDVIHNDNDLKRLVKLIRSLPGESKVVMEYTGTYFEPIAQFLHNNGIFVSVVNALLVHNYGGNSLRKVKTDKKDALKLASYALDRWTELDEYVPADEQRKILKLLNRQYNQSIKIQTTMKNNLISLTDSVFPGINRLFTSLERQSDGHEKWVDFLHAFPHKDCVAKLYLSAFKAKYKSWCSRNKYRYSESKAEKIHSYAKSVIAVLPLNESVKLIVTQVVSQLNTILETAFSIRTEMDRIASSLPEYDTVMSMFGVGKVYGPQLIAEIGDTRRFRNRRAITAFAGLDAPPYQSGQLDVSSRHISKRGSAALRKVLFQITEIFILSKPENEPVYQFIIKKRSEGKHYYSYRIAAANKFLRIYYAKVNQILNAT

SEQ ID NO: 299026 - protein, 393 aa, unidentified
MALDHHFDEPTAIRTNLDAIFVSLELSRSTWLITSVSPGGGEKMSKRGVSAGNVAALLTRLSELKQKAFARTGKSFHVVAIQEAGLDGFWIHRVLQSEGVESHVVDPASIATSRRRRRAKTDKIDGEALVRALLAYKRGEPRVCAMVRAPTPEEEDRRRLCRERKTLTNERVQHVNRIKGLLFAQGISDYQPLRRNRHQRLDELKTGDARPLPPHVKAQISRELDRLELLLEQIKAVEIERDALISAMKPGGMNADAVRSPPAMLTKLNGIGPEFAAVLWSEGLYRSFANRRQVAAYAGLAPTPWQSGSVRHEQGVSKAGNSRLRTTMLQLAWLWLRHQPQSALTLWFHERVRRNGARLRKTTIVALARKLLVALWKYVNAGVVIDGAVTRAV

SEQ ID NO: 299027 - protein, 410 aa, unidentified
MPLYCGIDWATDHHDVAVVDDDGRVVARGRVGNNAAGFAQLLTLLADAGDTATHPIPVAIETDRGLWVAALRETGRAIYPINPLAASRYRPRYALSGAKSDATDAVLLANIVRTDADAHRPLPADTELAQVIRVLARAQQDAVWARQQIGNQIRDLLKDFYPAALVAFDQLSNGGLARADARAILAAAPTPEAAARLTPARLRQLLAKAGRQRRLDRDIDRLRAIFTDTYLHQPQQVENAMGIQLSALLRQFDAACAAADELAEAAIAHFERHPDAEIITSFPGLGNLAGARVLAEIGDDRTRFADARGLKAFAGSAPITRASGKKTVVLHRHIKNRRLAVAGAIWALGSLRASPGARRHFDARRAAGDWNRQAQRHLFNKFLGQLHHCLQTGHLYDEHRAFPPPLPLAS

SEQ ID NO: 299028 - protein, 372 aa, unidentified
MPTVADRPEAQTAIQTNLAAIFISLELSRSIWLITSLSPGGGEKMSKHSVPAGDIAALLARFSELKQKALARTGKSFPIVTIQEAGLDGFWLHRVLQSEGIESHVVDPASIATSRRRRRAKTDRIDGEALLRALLAFKRGEPRVCAMVRVPTPEEEDRRRLCRERKVLIAERVKHVNRVKGLLFSQGVSGYEPLRRDRRQRLDELTTGDGHPLPTHLKTQISRELDRLELLLDQIKAAEAERDALLAAQQAATPAPAGRMLLDLKGIGPEFAANLWLEGLFRHFDNRRQLASYAGLAPTPWQSGSVDREQGVSKAGNPRLRTTLIQLAWLWLRHQPQSALAQWFKERVSRNGGRLKKTTIVALARKLLVALW

SEQ ID NO: 299029 - protein, 355 aa, unidentified
MSGEKYIGLDVHQATISVAVMDSQGKVIMESILETKASTLLEFFAGLRGSLFVTFEEGTWAAWLYDLLKPHVTEVLVCNPRRNALLKHGNKSDKIDARKLAERLRLHDLKPVYHGETGVRMLRELTRSYLTVVKDLSRVMNRLKALYRSWAIPCTGRDVYYTRHRSQWLEKIPEAGTRRRAEQLYQQLDMLQHLRQQARRELLAESRKHAITAKLRQIPALGPIRSALAVALIQTPHRFRSKRQLWTYSGLGLETRDSGEYHYVRGQVRRRKKQATIRGLNKDYNHDLKGLFKGAATRASVQPGPFQEFYQRSLAKGIKPTMVRLTLARKIAAITLTLWKKGEDFDIDKLNSQAA

SEQ ID NO: 299030 - protein, 417 aa, unidentified
MEAAMEATAVPCRVLAGIDVHKKMLAVVVRRDQNGETSYQKRAFGTTRSEIEHLTAWLQHNFVTEVVMESTAQYWRPVWYGMEAHFTLHLSHPLQTRAPRGRKRDFRDAQRLADRLSAGDLEESFIPGAEQRAWRWLARTRVDLQRKITRVRNQVEGVLEEGGIKLAAVVTDLFGISGWCMLERMAAGETDTEALVELAQGKLLKKKAQLREALKGSLPSHCRLLLRQHMEQVTLLRRQVVELTAELGRALKQHAGIVERLCKLPGVDHCAAQALLAEIGPRAAAFATPEQFASWIGVCPGSQESAGVSYSTRSAKGNRYLRRVLCQIAWAAVHSKGTFFKQLFNRLKPKIEAKGAVWAVAHRIAKVIWLMLAHEVDYIEKGPAPPNQRTLMRKLRRLARDFALLGIDINKAALASV

SEQ ID NO: 299031 - protein, 341 aa, unidentified
MENCGIDMHMKWSEVWVLDEQGRMSERSRIPTTEAGLRRWFGERAAMRICIEASGQSAWVERILRSLGHEVVVANPQRVRLIAESTLKNDRVDAETLARLVRIDPALLCPIRHRKEETQRLRAMLRVRRALVESRTAYLNTARGLLRSFGHRLPGQKAERLARALARGSVPEALCALVAPLVVSALEVDERIATLDEQVVEAGEAFEVTARLMEVPGIGPLVALSYVLCIEDPWRFRSGRDVPSFIGLRPRMRESAERSHFGRITRHGDREMRMLLVQAAHGCLRSRVDSDLKRWAKDLAARVGKKKAVVALARKLAVVLHRLWVTGEHFEPIRQRVAAAA

SEQ ID NO: 299032 - protein, 378 aa, unidentified
MLYGQVDTRQTEVIMDKAWAGVAAGKEFHWAHVLDASGTQLLSRKVENDEADLVALIEEVFSFAEDVVWAVDQPGESAALLLALLWERAQRVLYIPGLTVDRVRDAYRGEAKTDAHDAYVIADQARMRPDLGKLTPSEVELAELRLLLARRRDLVTDQSRTIIRLKEALLALFPALERALDLNRKGSLTLVAHYQRPAQIRRVGRRRLAAYLRNRSVQGAEDIASKALEAARAQNVALPAEDVAARIVAELTKEALSLKERIEALDEELGERFFARPEAQIITSLPGMGLILGAEFLVCVGDLCAFKSADELAAYAGLVPAAHDSGKRTGNHKRMRGGNKILKRAFYQSAFASLWVALRSPEPSTTATDERARGTLRP

SEQ ID NO: 299033 - protein, 351 aa, unidentified
MLIIGCDFHPGFQQVAMFDNRTGEVEEKRLQHREEAERFYRGLSGPVRVGMEACGHYPWFERLLAELGWELWFGDAAQVRRRWLRRQKTDRRDAEHLLQLLREERFPRIWVPSLEERDVRQLLVHRHKQVQARTRTKNQLQAMALSHGVQKKWKLWSRAGRVQLEQLPLLPYAAQRRQQLLQALDGLDADLLELNCRVEEEVRKRPAARLLSTHPGVGPVTALAMVLTLGPAQRFASGKDVGSYFGLIPREDSSGGHQRLGKISKQGSSFLRFLLVEAGQTAARYDPLLKRFYLRLARRKNRGVAKVAVARKLATRLYLMLREDWNYAQLCQAVMRVSPSHSVVGERKPSA

SEQ ID NO: 299034 - protein, 364 aa, unidentified
MRKKNTSTSSISAGHTMGIDLGDRFSHVHVVDAVGGGVFDGRVPMSPASVESFLKSLPRLRVAMEAGTHSSWVARIAAATGHEVIVANPRKVRLIGQNTRKSDRADAERLARLARMDPALLGPITHRDVQAQRDLAVVRSRDALVQSRTMLVNRVRGTLKSFGLHPAKCSTANFAKKLAADVPDELKPAILPLLEILFELNLRIACFDREVERLSEEQYPVVQGLCEIAGVGPITALAYVLTVDNPRRFAKSRDVAAYLGLVPRQRQSGERDPQMHITKTGSTLMRRLLVSAAHYIIGPFGKDCDLRRFGLALAARGGAAGKKRAIVAVARKLAVVMHRLWSSGEVYDPNRNRRGETRNQPAAA

SEQ ID NO: 299035 - protein, 337 aa, unidentified
MDNYIGIDVAKSTLQVFIPKSEMDIEITNSPEGLKKLYSKLKKRYRKSIEDIVFVYESTGSYSAILEHYCQSKSIKCFKVGAYQSASFSKVVKNRSKTDKLDARMLSQMHILAKEGEIKVPSRDVKAHRIRALIKYYQSLIKEEKRKANYLEAATYNLEDGYVLKKVKRKINHLQKEQSEVIEKIMEIIQGNPEYLEAYNNIISIKGIGEKSAIILLYLFLRYPNASRQQLTALCGLDPIQRSSGTSVQHKERISKQGLSLIRDILFMPTMIAVRYNEEMKMIYERLVDRGKPKMVAQMAVMRKIILLAHSLYKNKQQYDPERYLMFHQIKEENSMK

SEQ ID NO: 299036 - protein, 392 aa, unidentified
MYIVGIDIGKNHHEASIVSPEGKQIGHSLRFATTHKGADSLMSFIFNNIGNSSCIFGMEATGHYWYPIYSFLKARGYTIYVINPIQSDSLRKMYIWQTKNDSIDSFLIAEVIRFGQFTTTSMADENILAMRQLCRYRDSVISSRTEIKLRISTIMEQIFPEYEKQFSSLWLSTSMGILEKYLTPENIENAPIDELFEIIKDKSHNKLTMKKAISIREAAADTFGIKIAQDAFSFQLKQLIDRMNFLDKQIEALDCQILEYYEKFDCYLHTIPGIGMIAAATILAEIGDINRFKSSSALVAFAGIDPTVRQSGEFSSTHNHMSKRGSPYLRHAIFLAATTCSFHNSPLNAYYKKKRDQGKHHLTATGAVARKLTTVIYAVLRDSKPYEPKKFW

SEQ ID NO: 299037 - protein, 391 aa, unidentified
MIIVGIDIAKHNHEATIIDSQGNILTKSFKFPNSHKGSSTLITNITKANTSNEPVVIGMEATGHYWLPLYSRLLSEGFEINVINPIQSDSLRNLYIRQTKNDSKDSFIIAEVIRFGRFSSTCLAEEDILSLRNLSRFRLFQVDMVSDLKRKVISLLDQVFPEYSKLFSDTFGKSSLEILTEYSTPEEFLNVDTDALAKTLSLASKGRLGLAKAEQIKDAATNSFGIKLALDTFSFQIKQLIEQIKFIEKHIAELEVEISILLRKLDTPIETISGIGPVLGAIIVSEIGDIKRFKDGSKLVAFAGIDPTVKQSGEFVGTKNKMSKRGSPYLRRAIWLAASVACFNDPVLSAYYNKKRKEGKHHFTAVGAVARKMLYIIHSVLRNNKPYTPIA

SEQ ID NO: 299038 - protein, 379 aa, unidentified
MNTLEDFQRLSAALASYDLPVRIGFEATGNYHRTLAHHLGRAGFDLKLVSSVALARTREALHNSWDKNDPKDAQVILHMLEIGAVQFFHDPLAAGTSDIQELSKTHEIVSRSKTELWHRILTHYLPLYFPEAERFHRSARTDWFLAFLEKYPSPHMISAMGRDAFIADAWDVVGRKVSKEQLLSDVYATAAGSVGLPVHPDSDAVRMFRLVLAEGRSLVRRRDEIEARAVELLSDLPDYQLLTTIPGIGPINAMTILAEAGDLRRFRHHRQFLKFCGMDLATVQSGMFRGQSRISKYGNARLRRTLWMAGQTAVLKRTNSFRDKFERYISKDRHNAHLRRKAYTAIAAKMARTVHAVVNHGEPYRPFFEGVSPGGRTSL

SEQ ID NO: 299039 - protein, 286 aa, unidentified
MTDDTIGIDISKATLDIHRLSDGKTMSFSNCPAVFKALSRFCAKTAVARVVYEATGAYHSGLERALGAHLPLVKVNPLQARRFAQAQGLRAKTDAVDAKMLADMGNAFALEPDEPAAEIQHDLKELRSFRSGLIKDRTGIMSRMKTQTLSITRRQSKARLAQVDKQIAEINAEIERLINSSDTLAHSMKILRSIPGVGAICAATILIEMPEIGSMDRKQVASLTGLAPMTRQSGQWRGKSFIQGGRKIVRDALYMPALVAMRHNPDFKAKYQALIKADRNWVTKGA

SEQ ID NO: 299040 - protein, 404 aa, unidentified
MTVVIGIDPHKGSHTAAALNEAEAVLGELRVRSGAAQLEHLLAWAAQWPERTWAVEGAGGLGYLLAQQLVAANEHVVDIQPKLAARVRLLATSSTNKNDPNDARSVAITALRSPEANQVRAEDHAAVMKVWAKRRHDLVSARTRVVCRLHAVLCELVPGGISGQLYASKAATMLDEFEPENAIAAARHELGLELLADLRRVDEQMRDTKKRIALAVAASKTTLTEIFGVGPIVAATVIGYVGDVTRFASSDRFAAYNGTAPIEVSSGPRKIYRLSRRGNRRLNHSIHMAAVTQIRNLRSEGRAYYDRKVAEGKTGKEALRALKRRISDALFRQLQIDAQRAQASIMGPGGQTGNDSKACVTDSHPEGRLFGEATPEPGTTLRPAATAVRSGRSKTPTRVAKRAS

SEQ ID NO: 299041 - protein, 339 aa, unidentified
MKHKTITIDLAKNVFQVCGVNEHIKPQFNKKLKRNELLDFMRQQLPTVVVMEACYSSHYWGREIAKLGHDTKLIPAQHVTPFVRGNKNDHNDAFAIAEASQRAHIRFVPVKSEHQQEISCLHRIRERLVKNKTAMSNQARGLLSEFGVVFPCGHKALLSGLSSVIDNPQYSQRLQDMVSEYNVTLKRLKSIEKQLGEFVDGSESGKILSSIPGIGVINASALLAAIDKGQAFNSPKEFAVWLGLTPKQHASSNISKMGGITKRGDRYLRKQLIHGARAFVSRAVKSTDPLALWATKLRLTKPFNKVAVAVAHRLARLIWILLTRQEHYRVMPTSLEVNA

SEQ ID NO: 299042 - protein, 470 aa, unidentified
MKSTAKKNKSQLNSHLSSEEIAAMSKKAFEEATAITWRLAEVRRCLTQNDKISLVDDKTLVIGADIGSEKHDIRAFDNRGREFSRKAFEFTNDEAGFVLAKEWMVTIRKTYHLHKIMVGMEPTGHYWFNLAAWLIKEGITVVMVNPHHVKKSKELDDNLNRKTDKKDPKVIAGLVHEGRYSIPYLPEKVYAELRNLNTLRSMNTEEKTRFINRLDRWLSIYFPEFRTVFKDVTGTGSLFLLEKAPLPEDIVSLGADGINKLWREAKLRGVGYSRALKIISAAERSIGCREGLNTARQEIRWILDGLKRYLEYDRDYLAQIEALSKQIPYVDNMLEIKGLGIRTIVGIFAEIGDISRFASVKPIQKLAGLALVEDSSGKHNGQTIISRRGRKRLRYHLYQAALSLIGHNAEFKEVYKYYLTRKENPLKKMQALMVIACKLLRVLYTMVTKGIKYDPGKLLGDIHRTQETAA

SEQ ID NO: 299043 - protein, 317 aa, unidentified
MSVASEVFVGIDVSKAELEVCWLPQLERLQVARDEGGLVRLVERLKELGPSLVVLEASGGYEMPVAMALAGASLPCVVVNARQVRDFAKASGKLAKTDRIDAQVIAEFAQAIRPQVRALPDAAAAHLIALVARRRQLVEMLTAEQNRLALSHAAVREDLKQNIAWLKSRLQDLDGELARAVRSSPLWRENDKLMQQVPGVGRVVSAVLLALLPELGRLSPKKIAALVGVCPFNRESGRWNGKRAIFGGRAGVRSVLYMAIVSAIRWNPLIKTFYQRLLAAGKPKKLAMTACMRKLLVILNAMMRDRSDWNPNGALAT

SEQ ID NO: 299044 - protein, 410 aa, unidentified
MDEQQTTSAAGIDWAKDYHALCVVEQTGRVLLERRFSHEEGAIAKLCRVLVEMGVSSVAIERPEGVLVERLLDCGLVVLAIHPNQLKAARPRFRASGARAKSDSFDAFCLAELARTDWHRFRALVPDSDETKALRALSRSREELVGTRVALANRLRAELEAFWPGAAIVFAQIDSAISLAFLARYPSPKEASSLGEKRLSGFLSRHGYPGRKGASELLGRLREAPKGLAGEAETLARRQTVLALVETLETLVGQIRLFEERIAKAVRAHPDGDLFLSLFRSPNSTLTAACLLAEIGDCRESYPTNEALAADAGMSPVAVESGKRKVAGFRRACDKRLRKAVATVAESTRHHNPWAKDIYRRARARGCDHAHAIRILGRAWVRVIFRMWRDGVPYDRARHGGLRRLQSAGG

SEQ ID NO: 299045 - protein, 376 aa, unidentified
MKKRSSSQKSQKRTVKTKSTQERVTIGMDLGDKTSRYCMLSSEGEILREGQVPTTKAGMVEAFGSLGRARIAIEVGTHSPWVSRLLQKLGHEVVVANPRQVKLITESSRKDDRLDAQTLARLARIDPQLLRPIQHRSDKAQSALMIIRVRAALLAVRTSLVNTARGLAKSMGERLPKCDADQMGVLQAGSLPPKLRQVLEPLLKEVESLTEKIKDSDREIEQIARKDYPETALLEQVAGVGPLIALTFILTIEDKGRFQKSRDIGCYVGLRPLRSDSGQSQPQLRITKEGDPYLRTLLVQGAHYIISRRGPDTDLKRWGLHLAESGGKRGKKKAVVAVARKLGILLHRLWVTGEVYEPLRNHNLRQERKKIVPDRV

SEQ ID NO: 299046 - protein, 345 aa, unidentified
MKIRTVGIDLGKTVFHFVAVNARGEVVVRKKGSRTQLLRFTSNLQECLIGMEACGGSHFLGRALREQGHDVRLMPAQYVKPYVKTNKNDYIDGEACAEAVTRPTMRFVPIKTDDQLDLQSLHRVRERWVVRRTAVINQIRGMLLERGITIRKGRHHIEECLPAILEDPDNKLSGALRVLLTQLRLEMQYLHEQIEETDKLIARICGELEQCRRLVAIPGIGPITATATVAAIGNGAAFKKGRGFAAWLGVVPGEHSTGGKQKLTGTSRRGNKYLRKLFVQGAHTVLLQKTKQTTCLSTWLVNLTSRKRTQVATVALANKMARMVWAVLFRGEAYRPPSLPQVIAA

SEQ ID NO: 299047 - protein, 446 aa, unidentified
MNLEGSGVTVGLDAAVVANHHVIVRRPSPFGPGEVVANFVASPTLAGMDMLSKRLSAFAPVMAVAEPTSMTWLPLSIALGRAGCSLALVGNRHSARLRSALAGKNKSDPIDADMLSRAGEFFSLQPARIPSADELALKRVCQRRGKLIVDANRRLRRIISLARWAFPDVWNAFAGSRSSALAVLTRWPDLAQLARARTSSISDVVAAHTRGVDNVDDRAVRIRSAARAWIEFWDGHLDMEALAWETTELLDDYAAAHARQERTTDVARRRWEQLWGDDPLLLSVPGMGPITAPTVRAFLADGSQFDDAKQAQSFVGLNPSNWSSGQMEAPSRAITKEGPAVLRLAFYQAGNVARTLDPQLAEFYRRLMIERGHCHTQASCAVARKLVARTWATLTAGRGYQLRDLDGQPITRRQAKQQAAALAVPDDVRRRARARSAATHRARLTR

SEQ ID NO: 299048 - protein, 355 aa, unidentified
MNGYTGIHSYYCGIDLHARTMYVCVLDKDGQKVYHKNIPCTPERFLEAVEPFRGDLVVGVECIFCWYWLADLCEEEGIDFILGHALYMKAIHGVKTKNDRIDSLKIARLIRGGNFPVAYVYPPEMRATRDLMRRRNHFVRKRAELLSHIQNTTMQYNLKPLGTISRPHHRRDKNIVGHFPDPVVQLIVETDLQLIDHYDPIIKNLDKQILSLAKGHEPKSLGLLHSVPGVGEVLGLTMLYEIHTIERFPSRGEFCSYARLVKGQKQSAGKNYGTSGARIGNAHLRWAFSETAVLFLRHTPSAERYYNRLISRHGKAKALSIVAKRLGIAVYYMLKRGQPFNLNQFLNGSMSKEKA

SEQ ID NO: 299049 - protein, 347 aa, unidentified
MPTYCGVDFHSRQQLVVWCDTSDGEIRSIKLDHSEIEKVRAFYVSLQGPVIVGLEATGYSQWFEDLLFELKHEVWIGDAAEIRKRARSRQKTDQRDAETILDLLLKNEFPRIYRPDAASRSILQKLRHRHRLVQLRTKAINHLHAIAISAGLSIKSKLMTKDGRRQLKALLLSDTHQQQRDEWLALVDHLTPIIQAIEKELTPIAEQEPRVARLMTNPGIGLLTALAIVHTLGPIDRFSNARKVTAYIGLDPVEHSSGDRKRIGSISKQGSRLVRFLLVEAAQTAARRDQDLKRFYHRVMQRRDKPRAKVAVARQLLVRAYILLRDEIDYAEFRRRAVKVDVARVSH

SEQ ID NO: 299050 - protein, 340 aa, unidentified
MEIATIGLDIAKHVFQVHAVNADGTVVIRRSYSRAQLMRLFEEIPPCLVGIEACGTAHYWGRQLQSLGHDVRLMPAHYVKPYVKRGKNDAADAEAICEAVTRPTMRFVPVKAPDTQALALMHRLRTQFVGQRTAMLNALRAGMAEFGIVTNQGLGGATEILRIASAGDDRLPELIREPYRLLADAIRAVEARLATLDHQIAASTQFDDTCKRLSTIPGVGPVTSTTIIALAGDVSRFPSGRDFAAWLGLTPRQNSTGGKARLGRITKAGDQTLRTLLVLGAFSVIKRALVAPEKASPWLMALMERRPPLVAAVALANKMARIIWAILTRGGSFRTPARTS

SEQ ID NO: 299051 - protein, 345 aa, unidentified
MELHTIGIDLGKTVFHLVGLNLCGEVVVRKKFSRKQLLHFTANLKVGLIGMEACGGSHFLGRALREQGHEVRLMPAQYVKPYVKTNKSDYIDAEAIAEAVGRPKMRFVPIKSDDQLDLQSLHRVRERWVMRRTAVINQIRGLLLERGITLRQGRGHVDAALPGILEDASAMLSGALRMLLAQLKLELDHLQVRIDEADAMIQKVAGENEACRRLVAIPGIGPVTATAIIAAIGNGAAFKKGRGFSAWLGIVPGEYTTGGKQKLLGISKRGNPYLRRLFVQGARAVLQQRAKQSSGLSAWLAQLTTRTHSNVAAVALANKLARMAWAVLAKNEPYRPPMLVGAATA

SEQ ID NO: 299052 - protein, 391 aa, unidentified
MIYIGIDVAKDKHDCFITNSEGEVLFNAFTIPNNADGFHDLFQKISSLTNDFSNVKVGMEATGHYNYNLLGFLIDKGLPTFVINPLHTNLFRKSLSLRQTKTDKVDAHTIALMMMSGVNLQSYSDTSYHNEELKSLTRYRFDKVQERAKLKTSISRLVNILFPELEKLVPSLHMVSIYALLAEFPSSAQIASCHLTRLTNLLANASKGHYNKEKAIEIRNAAKHSIGSNMPAKSLELKHTIRLIQELTSEIDEIECFIKSIMDEIRSPILSIPGINYRMGAMIIAEIGDFNRFSSPDKILAYAGLSPSTYQSGQLDGCYSHMEKRGSRYLRYALFNATKFVCIWDNQFSAYLAKKRSEGKHYNVAISHAAKKLVRVIYQLEKSGQLYHRAA

SEQ ID NO: 299053 - protein, 347 aa, unidentified
MLIIGCDFHPGFQQVAIFDNRTGEMQEKRLQHRGEAEQFYRDVAGQEVRVGMEACGHYPWFERLLAELGYELWFGDAAQVRAAVVRKQKTDRRDAEHLMHLLIEDRFPRIWVPSLEVRDVRQLLVHRHKQVQARTRTKNQLQAMALSHGVQKKYKLWTQAGRGELEQLPLLPYAAQRRQKLLAELDAGEAEIGELDRRVAEEARQRPEAVRLMTHPGVGPVTALAMVLTLGPAERFGSAKQVGSYFGLIPSEESSGGKQRLGRISKQGNAFLRFLLVEAGQTAVRYDPQLKRFYRRLAARKNRGVAKVAVARKLATRMYLMLREGWTYAQLNQVVMSVNPSHSVAGE

SEQ ID NO: 299054 - protein, 338 aa, unidentified
MQVTTIGLDIAKSVFQVHGVDARGKVVLRKRLARGKVLAFFANLPRCLIGLEAGGGAHHWARELIGLGHDARLMPPQYVKAYGKTNKHDAADAEACCEAVQRPSMRFVPVKSADQQALLMLHRVRDQLIGQRTATINALRGHLSELGIVAAQRQAGLRQLLVALGEVEDDRIPPLAREVLQTLATPLRDLADKIAGLDRRLVALTRTDPTCRSLAAVPGVGPVIATAFAATVPDAGAFRSGRHLSAWLGLVPGQHRTAGKDRILGISKRGDGDLRRQLIHGARAIVKVSVHRDGTLWSWINGLLARRPFNVVVAAVANKLARILGAMLRHGEAYRAAA

SEQ ID NO: 299055 - protein, 358 aa, unidentified
MQKQNSKLNFKGQPFYIGLDVHLRNWAVTIRNNDLTLKTFSMDPRPDLLLSHLNRNYPGGKYFSVYEAGFCGFWIHRALNDMGIENIVINPADVPTTHKEKHRRRDPVDSSKLSRELANRSLKPIYVPDLFHEELRSLCRLYHRCVSHQTRLKNRIRSFLYRHNVQIPPRTEVFPWSGRFITWLSFLSFEAETAQTNLHFCLDELQSERNRIKDILKTLRLISRKPPIKKIIHDYLMSVLGVGFITAITFYSEIMDIHRFSSFDKLAAFVGLVPDVDASGDRETTTGLTFRQNQYLRHMLIESAWIAARLDPAMTLKFSELAKKMKKQQAIIRIAKKLLSRMRHVWINETSYVKAIVY

SEQ ID NO: 299056 - protein, 314 aa, unidentified
MADPCSVGIDVSKATLDVAWSTNPTTPWQTTNDDAGWAALVAHVRALAPTVVVLEATGGYEIGVASALSTAHVPVAIVNPRQVRDFAKALGLLEKTDRIDAAVLATFAARIRPTPRPLPDDLQADLQALVTRRRQLVDMLTAERNRVPLARSAVRKNVLQHIAWLEKQLANTDRDLRTQIEASPIWRARDHLLQSVPGIGPATSARLLASLPELGTLSHRQISKLVGLAPLPDDSGRRSGYRRVQGGRGSVRSALYMATVSAITHNPTIRAAYRRWRAAGKLPKVALVAAMHKLLIHLNAMIRHQTPWHPPATA

SEQ ID NO: 299057 - protein, 391 aa, unidentified
MPMYFVGIDISKYKHDCCIISAADQQIISKFTITNDKDGFEQLLTALNSLSNPEDIKIGFESTAHYALNLELFLENANHSFMEVNPVLIKEYKKSTTLRRTKTDSVDCESIARWLMTVEYKPHSKGFYHAYSLKSLTRLRDRLIRQRSFYLVKITNVLDHTFPEFKPFFNERLSKTAIYLLENYGSAEKMAHMNSVSYDKLRCISRGKFSIQQFLRLKELAANTVGVNNSIFDIELNSLLTLYNSLCKEIKNLEAEITRLIEEVHPHYMSIPGIGPISAAVIYAEYGDISNFSNPSQMLAFAGIEPGINDSGTESHGGRMVKHGSSQLRYVLLNACLPLIRFDLTFATYYAKKRAEGKKHRVAITHVAKKLIRVIYALERQDVDFNAQKLR

SEQ ID NO: 299058 - protein, 343 aa, unidentified
MEYYVGLDVSLRQTSICVVNQTGSIVQEGVVDSDPDSIASFVRSKAPGTVRIGIETGPTTTWLWTELKRLGLPVICIDARHAKAVLKMQINKSDRNDAVGIARIMQTGWFKEVRVKDLDSHSVRALLASRALLVKIKRDLENQVRGLLKNLGLVIGRAKFNVFAVRAEELIEGRPELVVAVRPLLEARKAIEQQVDDLDRKVQKLARHDAQVRRFMTAPGVGPITALCFKATIDDPTRFKRSRSVGAYVGLTTRRHASGEVDWSGRISKCGDAMLRMYLFEAAGVLLTRVPKWSGLKAWGAKLTKRNGLRKAKVAVARKLAVILHRMWIDGTEFNWSTKKAAV

SEQ ID NO: 299059 - protein, 321 aa, unidentified
MNKYSKIYGVDISKDVFDVVCSDDAHHQFDNTPKGFSSFLKAIAQGSLVVMEATGYYHYRLAQYLFKHGVVVSVVNPLSVKRFIQMKLAKVKTDKSDARAICEYGRVNDVPCYTALTDVQAECLQLFRLLDSYLKKRTATKNKLHGEETLGIPSKFVHQSLKRDLKHLDKEVKALEERLLLLVKQDQQHQLTLLKGIPGLGTKTALFLIVITDGFDKFETAGQLCSYVGITPTIRQSGSSVRGKSRISKVGNQKLRNLLFLCAFSASKHNKACREIYERIVAKGKSKKLALIAVANKLLKQAFAIAKSGLPYDEKFVSKLN

SEQ ID NO: 299060 - protein, 368 aa, unidentified
MDAAYCTTIGADVSDRTTKICVMSKADGKPKIVQETTVPTTPDGFRAFLERQDKAAALVFETGTHCRWIDKVASGLGFKTFVANPCRLRMITESTTKNDKNDARTLARMALADIELLHPVKLRGDEHQKMVNLHEIRDQLVKERTAEVLQIRAIAKSMGFRLPDCSAECFHNVAKRDLPKELSDIVWPLMKELKSKAVTIKTVEKQMRRLAKSDTFRVQVERLMEIPNVGFITATCFVAVTGGDMDRFDRSRDIGPWLGVTPKQDQSGDIDRQCHITKAGSKMLRWKLTECAQRVLQKNSADIDLKVKGLRIRARGGKIAKGKSITAVARGLAVLMVAMLKKPDEPYVPLSEDKARELEQIRAAMTSA

SEQ ID NO: 299061 - protein, 306 aa, unidentified
MAYGVGIDVSKQWLDVHVHGLGASARFGNTPAGYGKLRAWLSSHAVRLVVLEATGGYEQAALDALHAAGLPMVRLNPRQARDFAKATGQLAKTDALDARVLAQMAAVLELTRYQPAEPWRRQLAQYQQRRAHLVLLLQQERQRLSQFSDAWLRQQARSAVQRWQKMLAEVDARIARQIAAQSDLAVLGQVKGVGPVLLATLAAQLPELGRLNGKAIAKLVGVAPLARDSGSMRGARSIWGGRANVRQALYMGALVAVRFNPRMRAFYQRLREQGKVAKVALVAAMRKLLVILNAKMRDQMAAAATN

SEQ ID NO: 299062 - protein, 355 aa, unidentified
MSQEKYIGMDVHQATISVAVMDAQGKLIMEGLLETKAATILEFVQGLQGTLSLTFEEGTWAAWLHDLLKPHVSRLVVCDPRKAALLKEGNKSDRIDARKLAEMLRTNQLKPVYHGEHGVRTLKELGRSYLTLTKDVTRVMNRIKALYRSWAIPCGGTTVYAPRHRAEWLAKIVEPGVRVRAQRLYQQLDGLQPVRQQARLDLLQESHKHAAVKLLRQIPSIGPIRAALLVALLQTPHRFRTKRQLWAYSGFAVETHDSGEYRWVRGKLQRNRERVTVRGLNDNHNKDVKSLFKSAAISASTRPGPLHDFYVARIAKGMRPTMARLTLARKIAAITLTLWKKGEVFDAEKLKPQAA

SEQ ID NO: 299063 - protein, 412 aa, unidentified
MQAIIERCCGLDVHQETVVACVLVGAPGAQPKKEVRTFRTLTRDLEALRDWLLEAGVTHVGMESTGVYWRPVYSVLEGCFELIVGNARHIRNVPGRKTDVKDSEWIADLVRHGLIAKSYVPPRPLRELRELLRYRRKLVESQAAERNRLLKLLETANIKLASVASDVFGVSGRAMLRELIAGEASPEAMADLARGRLRHKRGDLILALDGRLEEHHRFLLAMQLRRLEAIEADIAALDLRIGKRLEPYCAQHALLMQIPGVDWVVAAVLIAEIGVDMSVFVSVYHLAAWAGVCPGNHESAGKQKSGRARKGNIHLRAILVGAAISASKTKGSYLKDKYHRLKARRGALRAALAIAHKILVSTYYMLAKNSPYRDLGEAYLDQIGQSRTVTNLKRRLERLGYRVTLEPNAQAT

SEQ ID NO: 299064 - protein, 338 aa, unidentified
MKITTVGLDLAKSVFTVHGVDQYGKTALRKTVRRARLLELFAQLPPCVVGMEACSGAQHWARELRKLGHEPRIMAAEFVEPYRQGGKNDTNDAAAICEAVSRPKMRFVAIKSVEQQAVLAVHRLRQGLVEERTALANRLRGLLTEYGVVVGVGLDRLRRALPAILEDGANGIPGIAREVFADAAQQLRELDARIAAYDRRIAALARASTPVQRLMKIEGVGPVTATAIVATVGNAAVFKNGRQFAAWLGLTPRQHSTGGKQRLGAMTKHGDVYLRTLLIHGARAVLRVTAHRSDAKSRWAERLRRRRPDNVAAVALAAKHARIIWALLARAQDYQPAA

SEQ ID NO: 299065 - protein, 475 aa, unidentified
MGRDSGKQKKENMKALSPEQEAGLKQKAEEISKGLQSYTWRDLETGGKFTHNDKLTFIRDDMLIVGCDIGSERHYARAIDAKGRELSKGAYSFENSAEGFQSAKDWALCLAAQHGKNQIVLGVEPTGHYWFSLAAWMIAKGISVVQVNPYAVKQTKELADNSQAKNDAKDPKLIAELVKNGNYGVPYLPEDVYAELRVLCTLRDQLMEDRVRNMNRLHREMKIVFPEYREAFGKIDGIFTLSVLANAPLPSELVALGEDGVKDIWHAEKLRGGGYKRAKEIVRLASVSAGLTQGAEARKIAIVSFVGKVMELAAELEEIEAQIALKCREIPRADNILEIHGLGAATVSGILAEMGDIDRFDAAKEIQKLSGLGLVACSSGKHQGQTKISHRGRKRLRYWLFQGALSVVSHNEAFRQIHAYYTTRAENPLKKMQSITVIACKLLRIIFTILKKGVRFDPDKMLSDITHPAPLDAAA

SEQ ID NO: 299066 - protein, 349 aa, unidentified
MRTFQPPADTRFYAGVDLHARSLYLIVLDRDGQIRFGRNLPAQPEPFLRAVAPFREGLLVACECVHPWYWLADTCRDHTIAFVLGHAWAMHAVHGCKNKGDRKDAEAIARLLRGGNFPPAYAYPKERRGLRDLLRARLRLVRQRAELYGHVHTARRQANLPPVSNDVRYKSKRAAITQDILDPFVRRRVETDLALLEPLDTAIRQLEAEIEEAARGHYPTELAVLQSAPGVGAVLSLTILLEIDTIGRFDTRQQFCSYARLCGAVQESAGQRTGAGNRRAGNAWLKWAFSEAAVLSAQKDERIGALLQRLASKLGKPKALSALAHKLGRAFYHMLHTKEVFDVERFVRH

SEQ ID NO: 299067 - protein, 474 aa, unidentified
MARTRKNPASPVPGDAGSEVTDEPVQVISRAAAIDVAKASGMVCMRLPHESRAGRRVQKVWEVTATFASVVELMDHLRCQGVERLVLESTSDYWRIWHYLAEAAGLEVWLVNARDVKHLPGRSKTDRLDSVWLCKLNERGMLRRSFVPPEPIRDLRALTRLRANLTHDRVRHQNRIEKILEDALLKISVVVSDLMGVSGRRFLQALIDGERSPAALAELGDYRLHAGKAELKEALTGRFRDIHAVEIRMLLELIDGLSAKITELDERIEAHLENVPGLGGACMSCGQRGPDGPCTGCGEPVLGVLERLDEITGIGRQAAQVIIAELGTDMTQFPTPGHAASWAKLTPRAIQSGGTSKTGRTGKGDPYLRGVTGAAVMTAAKTDTFLGASYRRKARRRGKKKAIVAGSRTIIEAAWRIIAGPGFRYIELGPDYHDHHDARRKTRDKIRQLEKLNPGMTVTLTPLAESGSGQAPAA

SEQ ID NO: 299068 - protein, 369 aa, unidentified
MDKDTTYVALDDSKRKIVAGILRPGDAQPELREIANDARQIRRLFERLKREGPVAACYEAGVSGYDLHRQITGLGVACAVIAPALTPRRPGQRIKTDRRDAAKLVRLFRAGELTAIHVLDESEEAVRDLVRCRDDIRRDVLRWRHRVLKLLARHGRAYLTGKNWSHAHWRWIREQRFELPPLQRAFEATVFALEQALARQAELDKELEALAATAPYREPVGWLRCFRGIDTLSAIILLAEVVDFQRFRRPRELMAYLGLVPSEDSSGETQRRGALTKAGNSHARRVLVEAAWHYRHRPTIGRALANRSQGQPDEIVSHAWRAQQRLHRRYRHLLGHGKRTPVAVAAVARELVGFIWAAMTRHESRRQAA

SEQ ID NO: 299069 - protein, 348 aa, unidentified
MTVTMIGLDTAKAVFQVHGVDAAGRAQLKRKLRREEVIPFFEQQERCTVVLEACGAGHHWARVLTGLGHEAKLLAPEAARPFVKKGKKNGAADAAALCAAAARPEVKFVPVKSAEQQGVLALHSARALLVKQQTMLANAMRGLAAEFGLVVAKGVRKLDELEALLQAEASVPATAKRAFAELHGHSRAAAVRILELEARIVEHARQDDTARRLATIPGIGPITASLLAATVGDNIGAFRSARHFAAWLGLVPQQFSTGGKTRLGRITKTGDSVLRKLLVIGATSMVRRAAQWTSAAGAWLRAVLERRPVRLATVALANKMARIAWAVMTRGEVYQAKGRVLAAAAAVV

SEQ ID NO: 299070 - protein, 388 aa, unidentified
MLLDHPSDGQTAIRTQFGAIFVSLELSRSTWLVTSLSPGNSEKMSKYSVKAGALPELLKLFSELKQKALARSGESYRIVTIQEAGLDGFWLHRALQQEGVESHVVDPASIATPRRRRRAKTDRLDGETLLRSLLAYKRGEPRVCAMVVAPSPEEEDHRRLCRERRTLIAERIVHVNRIKGLLFAQGIFDYVPMRRNRRAALDLLRTGDGRVLPAHLKLQIRRELDRLELLLEQIATVEREQDALLAASRPAGGTERSNPVAMLLDLKSLGPNFAAALWTEAFWRQFANRRQIASYAGLAATPWRSGGIEREQGVSKAGNPRLRTMMIQLAWLWIRHQPQSALTQWFNANSPRGRKRTIVALARKLLVALWKYVTAGVVIEGAVMKSAA

SEQ ID NO: 299071 - protein, 362 aa, unidentified
MNKGQSNKLDFKGQNIYVGIDVHLKSWSVAVLSEHSVLKKFRQDPGPESLHNFLTTHYPGADYHSVYEAGFCGFWIHGKLTGFGIHNIVVNPADVPTMSKEKLRKTDAVDCGKLARELRSGTLKGIHVPDIATLEMRSLIRLRNRIVKDTTREKNRIKSFLRFHGIDIPEEFTRHSVGNWSKRFLAWLRGVLLSTEYGRQALNMHIDQFVRLRGMLLEQTRILRMLSRSEALKGGAIRLLTSVPGIGITTAMSLAVEIDDIGRFSCADALASYIGLIPMCHSSGESQGNGNITLRKHAMLRCYIIEAAWIAIRKDPAMTLAYEGYRKGMNAQKAIVKIARKLVNRIFFVLKHQQQYVPCVVN

SEQ ID NO: 299072 - protein, 415 aa, unidentified
MRVHRNCCGLDVHKKIIAACLIKEDGEGNSIQEKRLFGSMTRDLQELAQWLCAGQVTAVAMEATGVYWMPVWNVLERYGLQLLLINPEHYKAVRGKKTDLKDGTRIAELLQDGRLEGSYVPAVAIRVLRDLTRYRTKLVQYQSSLANRIQRLLEQCNIKLAAVASDVLGVSAMAMLRALAEGETDAVRMAEMAKKQLRKKIPQLQLALEGYVLPHHRWLLREMIEDLDHVGDKITRIEETIEQQMRPFQSAVERWVTVPGIKHRLAWTLVAEVGPSVEAFSSAADIVSWAGVCPGNNQTGGKRKSGTTRAGNPWLRRALCEAAWAASKTKGTYLQAQFRRLAALRGPKRALIAVANSILTAGYYMLQRATAYQDLGPDYFDKRNTVRATHRLVKRLEALGHRVILEPRFIADPSS

SEQ ID NO: 299073 - protein, 411 aa, unidentified
MNNTLFVGIDISKRSNVATFMNCEGKVVGRLTFSNNGSGADRLVAKILSYYEKEDFEAIRIGMENTSVYSKNLVWLLYEHEALNEHKLSIIPLNAIMVANYKKSFLDMDKDDITDSFAIADFIRIRPGLLPFKLDDRQEALKIMTRSRYNYVQALSRMKSQFLTRLFLSFSEMEAGKPFYSIFSKTSLSLLEEEFTLDELAEKPIPELVEFLQEKGGGKFQNPEEIAKVLKKAASSSYRVPAMVRESLNRTMASDMEIMRILENEIHNCDKNIEKLMKSVPAILVSIPGIGPVLAAGIMSEIGDISRFQKQESLGKMAGFKWKRNQSGKKESEDKAAVLSGNKKLRYYLVEAANRVRIHDPVFEAYYRKKYAESKTHAHKRALILTARKLVRVIFYLLKENKLYKPDVGIS

SEQ ID NO: 299074 - protein, 386 aa, unidentified
MKPTSQMTLDVYFRQCVGIDVSKDKFTACLYMYDRAGDVGCCTKSIDFANTKSGFNQMVRWSRREAVKERPLTYLMEPTGVYYEHLAYHLHKIGQTVYVVLPNKARKFCEAEGIKTKTDAMDARCLALLGCVSRRLKPWSPPAPIYRELRQMTRFHADLCEVRTSVANRMEALDHMEGMARSVHKNCERLLQEIDMLMEKNNKAIMEKVAEDKELLAKVKRIATAKGLREPTIVCIIAETEGFHYIENRKQLVSYAGLDVKAKQSGKDDPKHCISKKGNAHIRTALYMPALVAVRYNRQIKAAYGRICQKHPNEKMIGITAAMRRLLLLIYTLWKNGEEYDETRDTTHTPRKNEPELEYGPNDCIGRIDNEPADWDVADENGEPPL

SEQ ID NO: 299075 - protein, 354 aa, unidentified
MNSEKYIGLDVHQATISVAVMDSTGKLVMESILETKAATILEFFAGLRGTLSVTFEEGTWAAWLYDLLKPRVAKLVVCNPRKNALLKDGNKNDRIDARKLADLLRGNHLKPVYHGETGVRMLRELARSYLTIVKDLTRVMNRLKAVYRSWAIPCAGRDVYYTRHRAEWLGKIREAGVRRRAEQLYQQLDMLQHLRQQARRELLAESRKHSSTAKLRQIPFLGPVRSALSVALIQTPYRFRTKRQLWAYSGLALETRTSGEYRYVEGQVRRSKKLLIRGLNKDHNHDLKGLFKGTATMASVRPGPFQDFYQALLSKGMKPTMARLTLARKIAAITLTLWKKEENFDAKKLKSQAA

SEQ ID NO: 299076 - protein, 346 aa, unidentified
MVETAIIGLDVAKQIFQIHGVSADGMVTLKRQLRRSDVLGFFGKLGRCIVGLEACGGSHFWAREIRALGHDVRLIPPAYVKPYVKRGKTDAVDAEAICEAVSRPTMRFVPIKTTECQAALMVLKTRDLLVRQRTQAINAVRGHLAELGIVAAKGLAKVGTLIAIVRDESDQRLPSAARTSLKLLADQIEALTKQVDALGRQIVTEVRQDDTMRRLSTIPGIGPITAATIQALVPDPGAFTSGRHFAAWIGLTPKMHSSGGKEQLGRISKMGNPALRSLLVVGATAVLQHARRGATISPWLTALLARRPAKVAAIALANKMARIVWALLTKGGTFVRKNRVAEHAVA

SEQ ID NO: 299077 - protein, 464 aa, unidentified
MKLPLNHQTNQPLKKKKLSSHLEQINHNAAGIDLGGAEHWVCVRADKTEKNVRRFGCFTPDLMAMADWLIDCGVTTVAMEATGVYWIPVFQILEARGLEVKLVNAHHVKTVPGRKTDVNDCQWLQQLHTYGLLSGSFRPEDQVCILRSYIRQRDSLIKSASTHVQRMQKALIQMNLHLHKVISDLTGLTGMTIINAIVAGERDPQVLAALKDRRIKSSTADIAKALTGDYRSEHLFVLKQEFTLYEVFQQEIATLDVEIEKCLASFIPKTLEAPPTTGKKRRKKPTANHPHFDLHSSLYRLAGVDFTQIDGLDALTVQTILSEIGLNSQRFPTVKHFTSWLGLCPGQKITGGKVKSSQTRKVVNRAANAFRLAAFSLTRSRSALGAFYRRLRSRLGAPKAMTATAHKLARMFYRLWTTGQSYNDPGVDYYEQKYQSLMRKKLQKKAQALGLELVPKSSLPADVS

SEQ ID NO: 299078 - protein, 350 aa, unidentified
MQQQINKKDFTGQNFYCGIDMHKKTWTITMEADELYKKTICQSSDKQSLIRYIKNNYPGANVTAGYEAGYFGYGLYHYLRDNGISCSVLHPADIPTTQKEKEQKRDPIDSKKIARALRTGSAKAIWVPPLSIQQDRQLLRTRRTIAKDVTRSKNRIKAFLQTYDIDYPDAFKKKGSHWSRKFIAWLEQIKLEEGSATISLQVMVRQLQFLRSELIIVLKQIRILAKDNKYVDQYNKLINITGIGVITAMTILMEINDIRRFKNTDHFRSFIGFIPRSHSSGEKSYDGKITNRANHHLRSLLVEATWSAVGNNPYYYNLYSQYKKRMKGNKAIVRVASKMANQIYFCLKKN

SEQ ID NO: 299079 - protein, 388 aa, unidentified
MNFEADKSEPLTAVHTDLGAIFVSLELSRSSWLITSLSPGGGEKMSKHSVPGGDFAGLMERFARLQEKARLRTGQSFRIIVVQEAGLDGFWIHRALQNEGIESHVVDAASIATSRRRRRAKTDKIDGETLVRALLAYKRGEPRVCAMVKVPTPGEEDRRHLCRERKALTAERVRHVNRIKGFLYSQGVSGYQPLRRDRRQRLEELQTGDGRAFPQHLKALVNRELDRLELLLKQIKTVEAARDALLAVEQTAKPASAAMLLDIRGIGPEFAAILWSEGLFRHFENRRQIAAYAGLAPTPWQSGAVDREQGVSKAGNPRLRTTLIQLAWLWLRNQPRSALSVWFHERVSRNGGRLRKTTIVALARKLLVALWKYVTAGVLIEGVTMKVA

SEQ ID NO: 299080 - protein, 442 aa, unidentified
MRTLSVINPNAAAIDVGSEQLHLSIAAERPVIFGTVTNEVYRLRDYVKGQGVTTVAMEATGVYWLYAYVVLEAAGLEVVVVNGRHVRNLPGRKTDMADCQWLATLHAHGLLRGGFVPPAAIRRLQDYQRLRADHIIGAASQVQKMQQALERMNIKFHDVISDLTGVSGLKVVRAILAGQRDPGRLLELCDVQIQKKKRERVLESLHGVWAPEHLFALQQALAVWEFYQKLLADCDRQIEAVLKDLAGPEPQPPTSAGPPVSSAPVKALGKNAPGIEHLHEMLVRICGGRDVTALPGVGDHLLLQLVAETGTDLSAWPTEKHFTAWCGLAPGSRQSGKRRGSIKRQRNRAGRLFCTGSRSLAQSVDKALGAFYRRMRGRKGGLLAMKALARKLAELYYRVLRYGLAYAEKGLRAYEEKYAESQRRLLAKLAAKQGFKLVSVQA

SEQ ID NO: 299081 - protein, 375 aa, unidentified
MTAMTRSSVSVPEVLLYVAFELGKKDWKLAMTSGFGVKPVLKTVPSGDWSAVERALTLGRQRLRLSAAAPVISCYEAGRDGFWIHRALTARGVSNRVVDSASIEVNRRARRTKTDRIDAVKLVTMLVRAAAGERTVWREVRVPTAADEATRHRSRERQTLVRERTRLINQMRSWLATWGTALPPHATGEWWTTVRDWAGAPVPPEVQARIARAAARLRLLAEQIATLQVAQRTTVRAAAAETPVARLRRVKGLAATTISVLLDEGLVWRAFANRRQVGGMLGFAPAVYASGTQEHQLGISRAGNTRLQSVMTQLAWRWVRWQPSSALTLAYQRRFGDSARARNVGIVALARKLLIALWRWAVQQIEPAGAIIAAA

SEQ ID NO: 299082 - protein, 448 aa, unidentified
MDVLQLDVEDEEEVLARVAAIDVAKASGMVCTRVPHEKTPGRRVTRVWQVSATTNAIIELADQLVGAGIERVVLESTSDYWRPFFYLLEARGLGVWLVNARDVKNVPGRPKTDKLDAIWLAKLNERGMLRASFVPPEPIRQLRDYTRLRLDLTTERSRHAQRLEKLLEDALIKISTVATDIMGVSGRAMIEALIAGQRDPHALADLARGRLRVKHAALVQALTGQFDAHHGELAQILLDQVDALSAQIDHLTARIDELIAAIPAAQGVDADGTTGPHAGTGPDAAVLSAIARLDEVPGIGTRAAQIIIAEIGLDMAVFATPGHLASWAKLCPRANQSGAKNRSGATGKGNRYLKGVLGEVAAAAAKTNTFLGHRYRRLVKRCGKLKALVAVARSILVIIWHLLSDPASRFHDLGPDFYDNRLGPERTKRNHIRQLEALGYKVTLEPAA

SEQ ID NO: 299083 - protein, 392 aa, unidentified
MVCVGIDVAKDKHDCFILSSEGEVLADVFTIANNLEGFETLLQRIRFCSRPADTIKVGLEATGHYSYNILGFLLDKGLPTYVINPLHTNLYRKSLSLRKTKTDRIDARTIASMLMSGVDLKSYTNTAYHNEELKSLTRYRFGKVQERARLKQSVSRLINILFPELETLVPTLHMASVYAMLSEFPGARQIADAHLTHLKTILSDASKGHYDRDKAAEIREAARRSIGSFMPAKSLELQHTIRLIRELDKEIDEIESAIKTIVDDMAPPILSIPGMGYRMGAMILAEIGDFSRFDSPDKILAYAGLSPSTYQSGKLNAAGAYAHMEKRGSRYLRYALYNAAKYVCHWEPTFAAYLTKKQAEGKHYNVAISHAVKKLVRVLFALQTSGRAFQTI

SEQ ID NO: 299084 - protein, 352 aa, unidentified
MNLLKYIGMDVHKATTVIAVMNCAGKIVSESIIETTASSILDFIKSQRGTLHVTFEEGTQAAWLYDLIRPHVANVVVCNPRKIAKQGNKADKPDARRLAELLRTDALTPVYHGELSTRALKELVQNYTAVVEDGTRIKNRLKAMFRGRGIACSGSGVYDPAERKEWLAKFDTDAARTRAATLYDELDCVELICKAAKEEMVDEARKHAAIKILRSVPGIGLVRAAVILGTASTPHRFRTKRQFWAYCGMGVVIETSAEYVVINGRVSRSKKRPLIRGLNRNYNHALKLVFKSAAMTAASGVWKPYFDAIVSKGTPESLAMLTLARKIAAITLAVWKKGERYDQKKLKILNAA

SEQ ID NO: 299085 - protein, 343 aa, unidentified
MKYTMIGVDLAKNVFQLHGASLTGEVRFRRKLSRGQFLRFMGSQPACIVVMEACGSSAHHWAREMAALGHEVKLIAPQYVRPFVKRQKNDAADAEAIVIAARQPEMRFVEPKTPDQQARAILFRARERIVHQRTELVNALRAMLYEYVHVVPVGIGHIKRLEAALNDVANNLPDLVREEGLDLLAQIDEMTAKIDSKTQKLASLAKQTDVARRLQTMPGIGPMTAVAVEAFAPAMESFKSGRDFAAWLGLVPRQFSSGGKERLGKVSKAGQADIRRLLIIGAMARVNWASRKEASADPWMMRMLGRKPRMLVAIALANKMARMIWAMLMRQEDYRNPTLTTAA

SEQ ID NO: 299086 - protein, 334 aa, unidentified
MKSDVVHIGVDVSKEKLDVFVTAQKEGMRPTAKELDNGVAGFRELRDLARKAGATVCVEPTGGYELELIAFMHKFGIPVAYADALRVRQFARAEGCLSKNDSIDAALISRFADKIGVRVLEEKDVEAVELKRRARFRQAMSDSRTAMVNRLETEVDPDMKALLKEQIKRINKLIAKAERLCLETVRKNDSTNKLCERFTQVGGVGAITAISILAGLPEIGTLSDEKLNRLVGISPEEDQSGSRDRLRRIWGGRQDVRNALYMAATASLMWNSILGAYYRKKRAEGHPHKWAMVPTMRKLLSLLNRIARDPDFTPRPEPESTKRNAIATRKRKAA

SEQ ID NO: 299087 - protein, 430 aa, unidentified
MKSNTQNAKIEAIIEKTLVLGIDVGSETHYARAFDYRGVEYSKKPFKFSNTEAGFVTFKAWVLDIKEKHGKDKVIPGMEPTGHYWFNLGKFLQDNEMKPVLVNPHHVKKSKELDDNHPTKNDRKDPKVIAGLVREGRYMIPYLPDGIYADLRTASNMRFQIQSELTRVQNRISRWFNIYFPEYKTVYGKPDAKSGILILKEAPLPEDILTLGIDGVNQIWRDAKLRAVGKARAKTLIEAAEHSVGSKEGAVSARMEIRMLLEDYESRNIRLQEVMALIEELVNQIPMAEKLLEIKGVGIKTVSGFLAEAGDIRRFNDPKELQKLAGLALVENSSGKHKGKTTISRRGRKRLRYLLFEVAMSLVAKNPEFRELHNYYTTRRLNPLKKMQSLMVIAAKLLRVFYAILTKGVGYDPKKMVNDIRRPAAYAQAA

SEQ ID NO: 299088 - protein, 320 aa, unidentified
MSRKRAKLFIGIDVSKQLLEVAAHQHDYQFRCANKASAFGMLIAELITLRPALIVLEATGGLERTVAVALRSAGLPVAIVNPRQVRDFARALGQLAKTDRLDARVLAAFAAAINPPPRPLKASDELELDALTGRREQLVGMLADEKNRRASAASDSVRDEIQEHIDWLTERIAELDQQLKKLLQASARWQIKDQILQSTPGIGPVVSYSLLAQLPELGNLNRQQISKLVGVAPLNRDSGQQRGSRHIYGGRAQVRRVLYMAALSASRCNPVIKVFYERLRARQKPFKVAITACMRKLLTIINFMVRDGSQWKSAPSNISA

SEQ ID NO: 299089 - protein, 315 aa, unidentified
MAMVVADSKRLIGVDVAKAELVIWDDESAELIAIPNTKAAIKKWLKGLSGAMSVAIEATNIYHVLFTDLAFEFGHTIYVVDGYALSHYRKGVNVRAKTDAIDAQLLARYLKNEGQDLTPWAPPPAIYRQLLSLFRRRAGLVQARTSLTQGWANEPLLKAAFKTHLRAMQRLELLVEKMIKGLLAKAGLMPQVKRCMKVEGIGFLTAARLTATFQRGNFSGGDAFIAFLGMDLRIAQSGQKKGQSKLTKRGDPEARRLLHNAAMSACRTAVWKSYYEERLARGFSTTASLVMLARKLARVVFALLKSGDEYRSKAA

SEQ ID NO: 299090 - protein, 391 aa, unidentified
MSVYFVGIDISKYKHDCCIISAADQQVVSKFTFKNNKDGFSELLTALHSLSSPEDIRIGFESTAHYALNLELFLEKAHHSFMEVNPVLISEYKKSTTLRRTKTDRVDCESIARWLMTVEYKPHSKGFYHAYSLKSLTRLRDKLIRQRSFYLVKITNVLDHTFPEFKPFFNERFSKTALYLLENYGSAEKIARMNSASYEKLRSLSRGKFSPQQFLTLKSLAANTVGINNSIFDTELNSLLTLYKATAEQICILETQITELIEEVHPHYMSIPGIGPISAAVIYAEYGDISNFSTPSQMLAFAGLEPGVNDSGTESHGGRMVKRGSSQLRYVLMNCALPLIRFDMTFAAYYARKRAEGKPHRVALSHVVKKLVRVIFALERQNTDFVAQALR

SEQ ID NO: 299091 - protein, 369 aa, unidentified
MGKSSTLYVGLDVHKDSIEIAAADPGRAAPRHIASVAGGCEAVTKALRRQVSVGRRLHIVYEAGPCGYALARHFAGAGWHCEVVAPSSIPRAPGERVKTDRRDALKLAKLARSGELKPVRVPDAADEALRDVVRAREDAVREQRNARHRLKALLLRNGIVYAGRSAWTGAHLRWIARVKLPEPAQQLAFQEYLHAITEAGARVARLEQHLRDLLPQWHLAPLVAALQALRGVQLIAAITLAAEIQDFWRFPSPRNLMAYVGLVPGEHSSGPRRRIGAITKAGNSPARRILVEIAHHYRLPARVSPVIARRQAGLPKAVTDIAWAAQARLCARFRRLAARRLMTNKIIVAIARELCGFVWAIAREVTRPN

SEQ ID NO: 299092 - protein, 412 aa, unidentified
MRLFAGDDWAEDHHDIEVMDQAGKVLAKKRLPEGPAGMAQLHGLIGQFVPEDDMDSAEVVIGIETDRGPWVAALIAAGYTVYPVNPLQASRYRERHGVSGAKSDAGDAHMLADMVRTDSHQLRAAAGDSPEAAGIKVLARTHKTMIWERTRATQRLRHQLREYFPAAIEAFDDLDAPDTLELLAKAPDPARAARLTRAQVSAALKRARRRNIPDKATAILAALRSGQLGQPEILTAAYAATVRSLIAVITVLNEQVKTLQGQVEEHFGRHPAAEIYLSQPGMGKILGARVLGEFGDDPRRYRDGKARRNYAATSPLTRASGKKKVVAARFIHNDRLVDALNAQAFAALNASPGARAFYDELRAREIEHNDALRRLANRLVGILHGCLKTGTLYDEATAWGHRENLPQSSIAA

SEQ ID NO: 299093 - protein, 319 aa, unidentified
MAKRVEEVTLGFDVSKRQLEVLGSDEAGNRFIDNDPVAIARFLDRFDGPVVIAVEATNVYHEQLVDLALARGFTVYLIDGYKLNKYREAVGVRAKTDANDAELIHRYLVSERPHLRPVNPQSQAERRLWRLLKRRAKLVKLKSQMDLSLRDLDMDLPEVGAVLKELDRLIRRLGQLANALARSCGWQGMLSRLRSIPGVGPLNALALVSMYHRGEFRTVDQFVAFLGLDVRVRDSGTFKGRRKLTKKGDPEVRRLLFNGARAAANRNNEWAAMKQQLMARGMSEIQTSVILARKIARIGYALLHTGRSYESARITCKAT

SEQ ID NO: 299094 - protein, 351 aa, unidentified
MMIIGVDYHPSFQTIAFFIEETGECGEQELNHSDGQAERFYRDLKQRGICVRVGMEATGYSRWFERLLAELGFELCIGDPAEIKAKRVKKQKTDRKDARLLRRLMRENNFPQIWVPSPENRDLRQLLWHRHRLVQMRTRIMNQLQALAMNEGYRWKKKLFSEQGRAQLEKLTLAPWASRRRQELLELLDRMNPTIEELTAAVEREARMRPEVLRLMTHPGVGPLTALAYVLIIGTPTRFQRGKQIGTYVGMIPCEDSSARKQRLGHISKQGNSLLRFLLVEAAQAAARVHPDWRRRYVHLAMRRHKSIAKVAMGRRLAVRLYWMWRNGCEYSRSLEFGSYAGQLEIGHGVK

SEQ ID NO: 299095 - protein, 363 aa, unidentified
MAKRGPHEGGLTASEEKRSHATYVGLDLSVKQTSVCIVDKAGKVIREVKVATEPMAILAVLTEEALAIERIGLEAGPLSQWLYSALAEAGFPVICVETRHMKAALSAQINKSDRNDARGIAQMMRVGLYRPVHVKTLASQKRRMLLTSRQLLQAKALDIENDLRGTLRNFGLKVGMVGTVKFEARIRELVADHPDLAAIVEPLLIARRVLREQLGVLYRQLLEIVRQDEVCRRLMTTPGVGPVVALTFRATVDVPSRFNNSKAVGAALGLTPRRQQSGEIDRMGGISKSGDAMMREMLFEAALVLMTHSRKWSWLKAWGMKIARHRGMKRAIVAVARRLAVIMHRMWVDGTEFRWSRKEAAAA

SEQ ID NO: 299096 - protein, 356 aa, unidentified
MNEGSWVGLDVHARSVVAGVIDRASGEVRSLRVPPRCEATVEWLKTLPAPVQVVYEAGPTGYGLARACAEAGISCVVAAPSRVRAAADRVKTDRRDAERLARLLRLGEITPVRVPAPEEEAARDLVRAREDARGDLMRARHRLSKLLLRHGAVYDATAWTRAHDGWLRRQRFQSAPLAIVFDECYGRMLDAKTRRDALDQAIAELAATEPYVDVVGRLVCLRGVSTLTAFALTVELGDWSRFRPESLGSFLGLTPSENSSGERRRQGGITKAGNTHARRLLIEAAWHQRRPPRLSVTLERRRTGKSLALRAQADRSARRLHGRWHALERRGKPRSVVVVAVARELTGHCWALATME

SEQ ID NO: 299097 - protein, 376 aa, unidentified
MERGSLMLNTTTFVGLDVHARSIKAVALDAMTGEVRSATFAYDAAAVAEWVRSLDPAAKCVYESGVTGFDLQKRLAALGVDCVVGAVSKMIKPSADRKRKNDRNDAEFLARMLSVGNVVEVWVPDDGCEAARDLSRALDDAREDLKRCKQRLSKFLLRHGYAFSETTPTGRRKGNWTAAHWAWIKSISFPEKADNDVLAYYVDAVRQATEDKARLERLVEAEASKPRWKRRIDSIRCLKGIDVTSAADLVFEAGEFSRFKSARSFAAWLGLTPSEHSSGESVRQGGITKAGNKHLRRVLVESAWHYLGCSPHSKDLAKGQVPDPAARRHAAKGVRRLVERRRAMLERGVHKNKANVATARELACWCWAVGCMVEGA

SEQ ID NO: 299098 - protein, 372 aa, unidentified
MCILDEQGKKTEEKFGVTTREIKRLGSVMRSHFVSEVCMESTGIYWIPVWRLLENDFQLRLVNAQFLKQLPERKSDVKDAEWIATVLLKELVRDSFVPDGNIQSLRQYGRRINEINKDLVRCQQRIDMILQRCNIRLSNYVSNVDSKSYRKVVDALIKGESSSCELVKLVHGRTINRFSKSIIEDALEGDVKQSDRDLLEQYTQMLDLYQLQKQQCVDSMIQKCRELYPKAFSILLGICGIDKLSAAIIISEIGDNMKLFATAAALVSWAGLRPRNDESAGKIHSRKITHGNKYLRKALMECAWGASRNIGSVFYCRFWHLKEMKKHHNAIIVAIARQLLTIIWTLLSKEEKFDNQYHLKKNIPSITSIKVG

SEQ ID NO: 299099 - protein, 402 aa, unidentified
MRVCGVDPTRGDIAVSFVEDMKEFKYQEYDNSIEGFKDVEERIKDYSIDVVCIEGYGDAAKQFAIHLKGKGVKVYEINPLMLERLKESITEHKTDHIDAYTCALFPFFRRDLKELTLDMDKEGLKSLSRLYEKISKQITRYKNQLHAALNQGFGAIYKKIFPRLNKTSLNFYLKYSSYKDIAEASISDIRNTLKSTGSCMYKGKYGLKKAKQIKDRVNNIEYSDLNDFMEIQSSIIKSYCRLLLTLMEEKERIKRKIEETVNMLFPGYKEFFKSIKGLTELGFGRIMAEIQDINRFPDDGHLASYAGQSPKQFQSGTMNEVRNKKRYNRHLAHLIHQLACNNVIKGRNFYNDYIEAKKRYSKKIRAIKNIKRKMVRLLFYGLKEYTEYMQKNQIKRDILYVA

SEQ ID NO: 299100 - protein, 338 aa, unidentified
MNHYAGIDVSLEWASVCVVDASGKIVAEGKVASEPEALISWLGSRDVSLARVGLEAGPLSQWLFAAMRQAGLAVELLETRHVRDAFKAMPVKTDRRDARGIAQLMRLGWFRPVHCKSMEAQETRAMLTARKLVQAKLHDVEMSLRGILRGFGLKVGKTTPRQYEGRIKELVAGHASLEVVATALLAVRAVLLREFCAFEKRVRSMARSDARARLLTSVPGVGAIVALTVASAIDDPARFKSSKSVGAHFGMTPRKYQSGETDVSGRISKIGDGSVRTAAYEAAHIILTKPLKGCAELKSWGMKLARRAGMKKAKVALARKLTVIMHRMLADGTTFQSA

SEQ ID NO: 299101 - protein, 319 aa, unidentified
MTNVNVFTGFDVSKDSIDFFSIDGSGKSGGQKVAYTKEGLKSLSRKVPLGSHCVLEATGPYHLKLATWLYQQGYAVSVVNPLVIKRFTQMRLVRAKTDKADAQMIAAYAQTERPPLWQPPARYIIELGHMETTIEMHIKHRTALKNQLEAFEATGMIAPAIRSSLKKSIAQLEKTIQDLEGRMEEIIENEHNAMMKNLTSIPGVGKKTAIALIVATGGFTRFDSHKKLSAYLGLCPRIYESGSSVKGKARICKLGMSRIRAMLYMCSWSAIKANVACKELYDRLLEKGKAKMLALIAVANKLLRQAFAIAKNGVQYQPI

SEQ ID NO: 299102 - protein, 348 aa, unidentified
MDHYAGIDVSLECSSVCVVDGNGKIAREGKVASEPEALIAYFGSLRLSIVRIGLEAGPLSQWLYAAMKEAGLAVELLETRHVHDAFKAMVVKSDRNDARGIAQLMRLGWFRPVHCKSIGAQELRAMLTARKLVQSKLHDIENSLRGILRGFGLKVGHTTARSFAVRIRELVEGQANLETIAQALLGVHAVLLREFNGFEKRVRMMARQHGNARLLMTTPAVGPIVALTYAGAIDDPARFKSSKQTGAHFGLTPKKYQSGQTDVTGRISKIGDAAVREALYQAAHVMLTKPVKGCPELKSWAMRIARRAGMRKAKVALARKLAVVMHRMLADNKPFNPTAKTTAVAAAA

SEQ ID NO: 299103 - protein, 360 aa, unidentified
MPTNHPYDLVIGLDRSDRKADLHLIDTRTGNAQKQTVATSPEELHDWLARLRQDHPQASVAICLEQPAANLIVFLEAYSWITLYPINPISLQKFRETFVTSRAKDDGKDAEYLAQLLLSHHDKLKAWQPDDTQTRQLQHLVSHRRALVNERTGLTNRLKALLKQYFPQALDLCGEDLWRPLATAFLLKWPTLESLKKARKESLKQFYYLQGSRSQKLIEQRLERIEKAVPLTDEIALLQSYTLRVQLICKELQLLLKTIQRFEEQIAKVFQQHSDREIFQALPGAGPVLAPRLLASMGSERERFARAENLQSFSGVAPVTKQSGGKCHVHRRYCCPKFLRQSFHEYAKESILHSRWAAAY

SEQ ID NO: 299104 - protein, 414 aa, unidentified
MEDILECCCGLDIHKESIVACVLKGPLEKGLKPQSEIKEFGTQLKDLMVLRKWLDEHSCRYVAMESTGIYWHPVYAVLENALSDEMHLLVVNARHMKNVPGRKTDMRDAEWIATLLRAGLLKGSFVPEHDIRDLRQYTRYRKALIRDITSQKNRIEKLLQSSGFRLSSFLSDIFGSSGLAIMQQLVQVGCISEQSLEICLKGQARRKAAEISSSLNGTLSLPQRQLLKMQLAHLKDLQDNLQEVEEEIRRDFSQFEGPRDLLDSIPGINLTAAYTILAEIGNNMSAFPTAQHICSWAGLAPGNHESAGKKKNQRVTQGNNYLKTILCEVAWVIAAHKKQYLSGWYWRLKQRTDSKRAIIALARKLLVIIYTMLKTNQPFNEQKFLERKEITDRKRVNRMVGELTRLGYVVSTPA

SEQ ID NO: 299105 - protein, 345 aa, unidentified
MKQYAGIDVSLEYSSVCVVDADGRIVREAKVLSEPDALIAWFCEYGVAMERIGLEAGPLSQWLYAAMAKAGLAVELIETRHVRAAFKTMPVKTDKKDARGIAQLMRLGWFRPVHCKSLPAQEVRALLTARKLIQGKLHDIEMSIRGILRGFGLKVGPTTRRTYAARVGELIEGHPTLEAIAASLLKVRAALMDEFAGFERKLRTMARQDDNARRLMTTPGVGVLVALTFMSAVDAPERFRSSRAVGPYFGLTPKKYQSGETDYSGRISKVGDVGVRTALYEAANVILTRPVKGSDIKSWAVAVARRAGPRKARVALARKLAVVLHHILRDKTNFIPHRATPAMAA

SEQ ID NO: 299106 - protein, 346 aa, unidentified
MVLIGCDFHPSWQQVSWMNRETGEAGDQKLVHEPGAVEKFYQQFPAGTWIGMEATGNCQWFVEMVTGLGHKVLVGDAAKIRASDSRQQKHDKRDARLLVQLLAEDRFPQIWVPSREQKDLRQLLIHGYKLVRIRAQVKNGLQHLAMNQGVMKKQKLWSTAGEKVLRELPLAPWASRRREDLFKVREMLNGQIDLLDQAVVEAAEKNEKARLLMTQPGVGPITSMAFVLTMGDVKRFQRGKQVASYLGLIPREYSSGGHQRLGSISKQGNTFLRMLLVEAAQGAVRCDPGFRNEYLHRCHSKPKGVAKVAAARKLAIRLYWMLRTNTGYPEVVRVESSSRVPLVSAS

SEQ ID NO: 299107 - protein, 367 aa, unidentified
MKKVSTIAARASRNISQPTLIIGFDLGDRNSWYCVLDESGQIQREQRVRTNAKALREVFGEMPRSRIALETGTHSPWISRLLSELGHQVIVANARKVRLIGESRKKDDRLDAQTLARLARIDPGLLCPVKHRSAQAQADLTVIRARAGLVRSRTALVNTARSLAKSYGQRLHGCNVRNMNPEKAESLSPELQAALEPLLNAIESLSERIVEYDDRIENLAQQNYPQVALLKQIKGVGTLIALTFLLTLEDPHRFRKSRDVGCYLGLQPGRRNSGQSEPQMHISKEGDPYLRTLLVQGAQHILGPFGVDCDLRRWGLKLAERGGRNAKKRAIVATARKLAVLLHHLWVSGEVYEPLHNSRRVIVAAAA

SEQ ID NO: 299108 - protein, 307 aa, unidentified
MKTVCTVGIDISSQWLDVALVVDPSAKPLSLFRVKNSQEGIESMFKRLKKEVPAGSPPWFCMEHTGNYGLLLCCLLQEKGMTYSVIPAREIQQSLGVTRGKSDRTDAERIGVYALIHHHKLRPFVIPQKSILQLKELISYRASLVQQHTQNVNSLKSRSKLNIVIDNHLVTEDLEQHIQRLEKSIKAVNEAIEKVIASDPELKQNFDLIQSVKGIGLIAATMMLVITQNFTQFDDGRKFACYAGTAPFEHSSGLTKGRTRVHPMANKQMKAILLNGANSAMIYDPEIRVYCQRKRPRANTTKSSQTP

SEQ ID NO: 299109 - protein, 354 aa, unidentified
MIYIGIDVHKKMCVACLQDETGHIITELEFENKKSGFEKLLQLVEGKEAKAVMESTANLWIRLYTELEAAGIGVVLSNPSRNRIIAESVKVTDKVCAGMLTTLLRTGFIAQCHVPPPEVRAMRVLIRYRTKLVQDLTRVKNRIHSILQKYELPPCTYTDLFGKRGVQWLETVVPLVDPVDQFVLGMELSRISELKGRIEQVEQKIASQAVITEEVTTLLSLIGVDYFTATLFLCEVSDINRFPSASKLTSWLGLVPRVHQSGETMYQGRITKRGSPLVRWALIQAAQVAVRHDPHWAEKFNRISSRRGSQIAYVAIARELAVTMYHMLMRNEPYRYAKQPTYEGHEHQFPCSAI

SEQ ID NO: 299110 - protein, 341 aa, unidentified
MREFIRIGVDLAKSVFQVHGIEREDGSSFQRKLSRAKFREFFSRLTPCRVGMEACGSAHYWARVLRAMGHEVVLIAPAYTKPYVKRGKNDAADAAAICEAMSRPEMRFVPVKSADQQAVLMLHKTRDLLVKQRTMSVNALRGHLQEFGLIAAKGIHRVQELVALALADEGLPEEAKQAAALLAWQSEQLNMKIDGLEKTIAAASAKHPMSRLLQEIPAIGPLIASAMAASLPDPSVFKSGRDFAASLGLTPSQHSSGGKEKLGAITKRGNRYLRKMLVVGCTSVLRVAHKRKGALAEWIVALKAKKPERVAAVALANKLARICWAVLSTGEAFREELYARA

SEQ ID NO: 299111 - protein, 394 aa, unidentified
MIYAGVDIAKTDHVIGAVDERGAEMCPPMPFKNTEAGLERAVAWLEGLAGSPSDVVVGMEATGHYWMACYSFLVARGYSVAVINPMQVKAVRKLKGLDKVKNDRVDAGLIAEALRIGQYDETRLATDEMASLRSLSRYLQSLRGMVAELKTQCICLMDAHFPEYAGIFSDMFGAGSRAVLSKSPLPFELARRRADSLARDIAEASRRGGKSSGYAAKIKAAAKSSIGVRLGQEAASFQVKSLIRQIEFADSECAGVEARLRSLLDEVEPLVLTIPGVSYVTGAQIVSEIGDVSRFRSAPALVSYAGLNSSVSQSGQFDSGGGPITKHGSPYLRRALWLAANRARQYDPGLRAFYDRKRAEGKPHRVAVTAVARKLCHIVFAVMRDQVPYDPGRE

SEQ ID NO: 299112 - protein, 342 aa, unidentified
MDHFAGLDVSVKDTSVCIVDDSGKIVREVKVESEPEALLAVLRSPTYRFKRIGLEAGPLSQWLFSALAEAELPMVCVETRPMQALLKAQINKTDRNDARGIAQMMRVGIYRPVHVKTLRSQKLRMLLTHRKLLQSQAIAIENDLRGTLRNFGLKVGMVGKVKFEARIKELVESLPDLAELVEPLLIVLRALRQQIVVLHRRLLAIVRDDEVCRRLMTTPGVGPVVALTYRATVDVPARFRKSKAVGAVFGLTCSKYQSGEIDRSGRISRCGDEMMRVMLYEAAQSMLRSKKWSWLKAWAMQIARRRGMKKAIVALARRLAVIMHRIWVDGTEFRWTRETAVA

SEQ ID NO: 299113 - protein, 439 aa, unidentified
MSTPYLPVLDPTAAAIDVGSEQLHVSIAGGPPRVFGTMTGDLHALRDYLLAQGVRSVAMEATGIYWLCPYEVLEKARLEVVVVNGKYVKNLPGRKTDMSDCQWQSTLHAHGLLKPGFVPPEHIRRLQDYLRLRSDHIILAGSHEQHMQKALDRMNLKIHDVLSDLTGVSGLKMIEAILAGERNPVALLALCDPQVQKKKASRLRQALEGTWKTEHLFALRQAYELWQFYQKKIAECDQAIENVLKELAGPEDPNNPAAPSTKRGGVNAPEIAGLHGLLFRLCGGKDPTTLPGVADYVWLQLIGEVGTDLGKNWKSEKHFTAWLGLAPGSRQSGKRRGSQKRGRNRAGRLFCVIARSVGRGVDKALGGFYRRLKGRRGGLVANLALARKLAELFWRLMVHGIAYVEKGLKKYEEKVAQTEQRLLQKLARKYNLVLQPAAA

SEQ ID NO: 299114 - protein, 353 aa, unidentified
MEQVKPQAQVTLGVDTHLDVHVGVVIDAVGRVQGTLAIATNPSGYEQLLDWAQGFGVLRRAGVEGTGSYGSGLTRFLEQRGITVLEVNRPDRSRRRSRGKSDPTDAESAARAVLADDAKCIPKAQSGLAEALRTLSVARRSAVKAKTQAVNQLRALLVNAPPFIRDVVLKVKPEDCVAACAALPQGDVNPVLASLKTTLRLLAKRWTALHEELRELDKQLTRLTKLAAPRLLARFGVGSQTAATLLVTAGDNPTRLRNEAALAALCGVSPLDASSGKMHRHRLNRGGQRQANNALWTIAMVRMRSDARTREYVARRTREGLSKKEIHRCLKRYIVRELYPLILADLKESMRPS

SEQ ID NO: 299115 - protein, 402 aa, unidentified
MNAVGIDVSKEKSTVAIYQPGDQVILKPRDFHHTQSDISSLISIIKGLDGETKVCMEHTGRYYEPVATWLSDAGIFVSAVNPILIKNFGDDSLRAPKTDKADAKKIARYTLDRWTNLKQYSHMDETRNQLKTMNRQFGFYMDQKTAMKNNLIALLDQTYPGANTFFDSPARNDGSQKWVDFVYTYWHVDCVRGKSLEAFTEHYKNWCKRKGYNFSTAKAEKIYHKSADLIAVFPKDANTRMLLHQAVDMLNLASRTVETLRTEMDQKAATLPEYPVVMAMNGVGPTLGPQLMAEIGDVTRFEKRGSLTAFAGVDPGKNDSGKYSQKSVPTSKKGSPHLRKTLFQIMDGLIKRSPIDDPVYAFMDKKRAQGKPYYVYMTAGANKFLRIYYGRVNEYLSTLSNS

SEQ ID NO: 299116 - protein, 429 aa, unidentified
MNSQAESHSADEPAFGAFVAIDWADRKHVWSMQAAGSERRQHGEILHTPEAIEVWVGELSSRFPGQPIAVAVEQSRGALVFMLSKYEHLHIYPIHPRAAAQFRAALYPSGAKDDPIDANLLLDLLVHHRVHLRRLSPDTEQTRLVQQLVEARRKLVNEKTRQSNRLTAKLKLYFPQVLTWFDEVDSELVGALLERWPTLEALQKSRQASLRSFFTQHNCRHAKLIEQRLEQIRQAVPAIRDGAVIQSAVAMVSVLVRLIATLREGIGALDRQIDRAAGAHPDSAIFHSFPGAGPVMAPRLLAAFGSQRDRYQSAAEVQQFSGIAPVLVRSGKTAWVHYRWACPKFLRQTFQEWAGHSIGFCGWARAYYEQQRKRGAGHHAAVRALAFKWIRIAFRCWKDGVPYDDSRYLQSLRQRGSPLATLCPGGLSG

SEQ ID NO: 299117 - protein, 430 aa, unidentified
MKSNTQNAKIEAITEKTLVLGIDVGSETHYARAFDYRGIEYSKKPFKFSNTEAGFVTFKEWILDLKERHEKDKVVPGMEPTGHYWFNLGKFLQDNEMKPVLVNPHHVKKSKELDDNNPTKNDRKDPKVIAGLVREGRYMIPYLPDGVYADLRTASNIRFQLQAELTRIQNRISRWFNIYFPEYKTVYGKPDAKSGMLILKAAPLPEDILTLGIDGVNQIWRDAKLRAVGKARAKTLIEAAEHSVGSKEGAVSARMEIRMLLEDYESRNTRLQEVMVLIEELVRKIPMAEKLLEIKGVGIRTVSGFLAEVGDISRFNNPKELQKLAGLALVENSSGMHKGETTISRRGRKRLRYLLFEVAMSLVSKNQEFRELHNYYTTRRLNPLKKMQSLMAIAAKLIRVFYAMLTKGVDYDPKKMVSDIKRPAVYLQAA

SEQ ID NO: 299118 - protein, 444 aa, unidentified
MLPVIYERVAGLDVHKKMIVATRMRIIEGQVEWETNTFGSMTPDLLLLHDWLDEWSCIRVAMESTADYWKPVYNILEEVFEIVVVNSSHVKHVPGRKTDVKDSEWLAELMMHGLLTASFVPPKPQRALRTLTRYRTTLVQERARVVNRVQKLLEEANIKLASVATNIQGVSARAILAELAAGQTDAKHLANLARGKMRSKIPALEKALTGLVQPHHRFLLTRQLAHIDFLDEQVEELNTEIARQVETMSDSSTSTDPSAGAETDRDSSGTEQPRNPLTWNEAVVLLDTIPGVDRCTAEVMLAEMGLDMSHFPTDKHLATWAGLAPGNHQSAGKRYSGRTPHGNRPLSSIMVQAAWAAIRTQDSFLKARYHRLAARRGKKRAIVAVAHSMLVSAWHMLTNRQAYHELGGDYFDQRQKDTKVNYLIRRLEKLTGGSVSVEIQPAAA

SEQ ID NO: 299119 - protein, 323 aa, unidentified
MNHKVGKDNTVARFIGIDVSKQWLDVACLPERETRRYGNDCAGLEQLCTWIVPLAPELIVMEATGGFETNAATALAAGGLALAVVNPKHVRDFARAFGILAKTDRIDALVLAGFAQKVHPPVRPLPDEERRELIDLVDRRRQLVTMRAEEKTRLTQATPAARQDIKEHIEWLNERLRRLDIDLTAKLRSSSLWKTKEQILTSAPGVGRVTVATLVARLPELGTLNRRAIAALTGVAPFARDSGQHRGRRMIWGGRADVRNVLYMATVTAARINPVIRSFYLRLKQAGKPPKVALTACMRKLLTILNTMVRNNQPWQIPPTQTI

SEQ ID NO: 299120 - protein, 329 aa, unidentified
MSEAYEGRQIVGLDLHRRRSVLVRMTESGEQLETVRISNDPEYLRQVMARAGECPEVVLEATYGWYWAADTLTELGAHVHLAHPLGVKMFSLRRVKNDQRDAADLADLLRMGRLPEAWIAPPGTRELRGWVRHRAKLVGLRTNLKCQVHAVLAAAGVQVPMSDLFGLGGRTLLAGTRLAPESRARVDSLLRVITALDFEIDTYAKLIAGRLRTDPGYTTIQQIPGVGPVLAAVFVTEIGDVARFARPQQLASWAGLTPSHRESDTTVHRGRITKMGCGGRRRGLRLRSARVRGGCRGDRGWYRHSPGAVDIRLRGSRLRRSVPRADRPG

SEQ ID NO: 299121 - protein, 345 aa, unidentified
MDHFGGLDVSVKETSICIVDDTGRIVKEVKVASEPEALLKVLGNPAYRFKRIGLEAGPLSQWLFSALAEAELPVVCVETRHMQAVLKAQINKTDRNDARGIAQMMRVGLYRPVHVKTLRSQKLRMLLTHRKLLQSKAIAIDNDLRGTLRNFGLKVGMVGATKFEARIKELIENFPDLAVLVEPLLVVRRVLREQLGILHRRLLAVARDDDVCRRLMTVPGVGPVVALTYRATVDVPARFRRSKSVGAVFGLTCAKYQSGEIDRSGAISRCGDEMMRTLLYEAAQSMLFHSTRWSWLKAWAMQIARHRGMKKAVVALARRLAVIMHRIWVDGTEFRWTREQATAAA

SEQ ID NO: 299122 - protein, 438 aa, unidentified
MKVMYERVAGIDVHKDMIKVAVRSPGDKPWTRKTEILTFRTFYGVLRAMARELRRRGVTHVVMEASGVYTEPVYYALCEEDFTEVAVVNPAHAKALKGHKTDAKDCARLAELFECGLLQGSYIPAAGLKEMRDLSRYRMKTVQARTSEIQRLAKALESAGIKLGSVASEITGKGPVAMIEALISGERRGAVMADLAKGRARTAGKLADLSMALEGRFTDHHALMCRLHLDRITALDAAVADLEARIAATAADWQREIGLLKTIPGFGDIVAWAWIAEIGPAPHQWFASHHKLASWVSLAPGNNVSAGKRKYGRTGDAGTYIKPMLIQAAWAAIQVRGRLQARYNRLVRRLGGPKNPAAKKKAIVAIAHTLLKIAYTVLKTGTGYQEPGADFYTRRESPGHRQAWLERQIQKLHPGCTVTITISPSPDPAPEAALPPGA

SEQ ID NO: 299123 - protein, 384 aa, unidentified
MKESITLYVGLDVHKESIDVATADSGRDGEVRHVCSIGGDLVGLDKALRRLISKGHRLHVVYEAGPCGFVIWRHLSARGIDCEVVAPSSIPKRSGDRVKTDRRDAMMLARLSRSGDLTAVRVPDAADEAVRDLARSREDAVRECRNARHRLKALLLRSGIAYAGKSAWTAAHLRWLSTLKMEHAAQQIALQEYLHAVTEATTRIGRLEQAMRDTLPGWGLAPVVQALQAMRGVQLVAAMTLVAELQDFLRFDNPRQLMAYVGLVPGEHSSGPKRRQGSITKAGNSAARRMLVEVAWHYQHNPRVSPIIAKRHDQLPKAVTDIAWKAQLRLNAKFKRLVARRVMKNKAVVAVARELTGFVWAIGREVQTSGWQGIKIEPAGVAAD

SEQ ID NO: 299124 - protein, 411 aa, unidentified
MSDSIFVGIDVSTKSNKVCILDASGNRLANMSVHNNSHGSSQIVNRVIDLLCKTGCTKVSFGLEATSVYGDGLIFYLKQDKLLKNYATKVFLLNPKQVHNFKKAYSELPKTDDVDAWVIADCLRFGRINLREIYFDEQYKALQRLTRARYHVAQNIVREKNRYLTNLFLKFSGLYQENLFSNKFGATAMELSNGAFSLDEIVHMPVDELAQFINTSGKGKFADPKALADGIQKAARSSYRLPKTVEDSVNRVLAVSTLAIKSYLEQLKSLDKSISSLMETIPNTLTSVKGVGPVYAAGILSEIGNINRFKGQASLAKYAGLSWSRYQSGNFDSDNTHMINSGNRYLRYYLIEAANLVRRHDPEFKRFYELKYRETPKTPHKRALALTARKFVRLVYALLRDQRLYIPSRIE

SEQ ID NO: 299125 - protein, 421 aa, unidentified
MFKIIKFNCCGLDVHKTWIYACIGITDTNFRTEYYEARFSSFPKDLRRLSSWLQEHKCEEVCMESSGKYWIPVFNVLEQTCKVTLAHPKYTKPQKGNKTDRKDARWICDLFMCGMIKPSFIPSPAIRHLRDLIRYRTKLTNMLTSEKNRALNCLTVSNMKLDDVFSDVFGKSSRSITEYILAHPGERFDVAPFVDKRCKTPIDVIQDAVDGAISPEQAVKLRECLNHIDELEVHKDRIEKEIYTLVEPFSACLNLIRTVPGMDKNPMTAITILSEIGSDMSVFPTAKHLVSWAGCCPRNDRSAKHVKSTRISQAGSCLKPLLVQVANALIKSDKHPEFRERYRRIKSHRGHKKAIIAVCKMLLTAIWNMLSTGEVYNPSGYLIQTPRPTPETKVLTQKQALELLRLRGYVIKNDPPEPSPA

SEQ ID NO: 299126 - protein, 388 aa, unidentified
MFFLGIDIGKNTHVASLLDEKAKIIFKAYSFANTLDAAEALLVKLEPYKDSLEIGMEATGHYWLSLYSFLAEHKFIVHVLNPIQTDGWRKGIEIRKRKTDVIDSVLIADLIRYGNFLETSLADEDILSLRNLSRFRVYLVNSVSDLKRKAIAVLDQIFPEYASVFSNVFGQTSKELLKSLSLPSDYENLSATKIEEVLSNITQKKKASKTISTLSDKASRSFGISFCKDSFSFQLKLIIEQICFIEEQIASVELEIDQLMSKLGTNIKTIPGVGSVIGAVILGEIGDIERFDNPSKLVAYAGLDASVSQSGEYEASSGKLSKRGSPYLRKALYMAAQRAEFCDPVFHAYYEKKRNEGKHHLVATNAVARKLCHTIYAILKKDIPYEVQ

SEQ ID NO: 299127 - protein, 418 aa, unidentified
MQTKLSQFTAIIGIDWADKKHDICIQAAASEQRQIYQVPHKVDELDQWARSLHRQYGGPIAVALELSKGPIVSVLQKYDFFVIFPIDPTTLANYRRTFTPSGAKDDPTDAEYALKLLLTHTEHFTALRPQSVEMRTLMTLVEQRRRLMNDRVRITNRLRSTLKQYYPQALEWFDRIDTRLFCDFIRRWPSLVQARRARMATLEKFFREHNMNRKALLERRMTAIKSALPLTEDEAIIVPYRLQATTLVAQLEVALASIKIYDEEIAALAPQHPDYGLFEALPGAGPSLAPRLLVAFGEQRERYSKAAELQKYAGIAPVTERSGQSTWIHWRWQCPTFLRQTFVEWSAQTINKSYWAGLYYYQQKAKGCSHQAAVRALAFKWIRILYRCWITRTPYDEAKYLKALQERGSPLLKMAEAA

SEQ ID NO: 299128 - protein, 404 aa, unidentified
MDVVYPRCCGLDVHQRTVVACLITPGYREVRSFGTMTSDLARLSEWISSQGVTHVAMESTGIYWRPVYNVLEALGITLLVVNAQHIKAVPGRKTDVKDAEWIADLLRHGLVVGSYVPERPQRELRELVRYRRSIIRQRSQVVNRIQKVLQGANIKLTSVASNIMGASGRAMLEAISNGVEDPEALVALAKGRLREKKAELREALRGLVGSHQRMMLKSQLRLIAFLDEEMSRLDAEIAERMHPCEEALERIDGIPGMGRRTAEDVLAEIGTDVSRFATAAHLASWAKVCPGNNESAGKRKSGKTEHGNPWLRDTLVEAAWGATRTRDTYLSAQYHRLASRRGAKRAIMAVAHSILTIVYSLLKNGGEYRELGGNYFDERNRSATIQRAIRRIEGLGYEVQLQPV

SEQ ID NO: 299129 - protein, 338 aa, unidentified
MALYCGIDLHSRDSWLAILDDGLEVIGETKVGNDLETILRVLEPHREALAGVAVESTFNWYWLVDGLMDAGHRVHLTNTWAVKQYEGLKYTDDRHDARWLAHLLALGILPEGYIYPKEERSARDLMRRRAFLVRKRTSFILAMRGAFECRTGMRVNSNDLKKWKAEDVKVYVKDPVDAFGITCLLEPMHALSAQIKKIEKAALSRGRLRPEFAPLETVWGVGKILALTIMYEVGDVARFRKVGNFTSYCRLVNTARLSAGKRKGSGNRKNGNPYLSWAYSEAAHHAVRHHPEAQKYFQRKRAKTNGIIAIRALAHKLARASYHVMRDHVDFDPEKTFA

SEQ ID NO: 299130 - protein, 435 aa, unidentified
MEIVHPRVAGLDVHKKVVWVAARLPGERAGERTVTVRRVKTFWRSLRQMAAWLAGLGVTDAAMESTGVYWWPVYHALAQAGIQVCVCNAAHMRNVPGRKTDLADCQWIAELHEHGLLRASFIPTGAVAELRARTRYRKKLIQQRVSEGQRLSKVLEDAGIKIDSVASELLGKSGRAMIEALIAGEREPGRLASLALGRLRRKTEELAMACDGRFTAAHAQMCRLHLDAYDHLTGQIAELDALVAEAAAPFAVLIPRLVTIPGIGRRTAEVIVAETGGDMARFATAARLAAWAGLAPGDNESAGKRKKAPTRKGDQHLRAAMAEAARVTARTATRPGTRFRRLARRFGRGNEKKAAVAAAHTLLSIAWAVMRYDSDYTDAGTDYYDRRDQRNREHLARHYQQALTRPGYQVTLTPPGDGGPPPRTDPSTAVASQTA

SEQ ID NO: 299131 - protein, 315 aa, unidentified
MYYLGIDVSKKTIDCCLISDSIFYERRFDNTEDGFRRLDDWIQGHTAESVHCCCEATGIYHESIAAHLRQKHIVSIVNPSKIKGFREAEQTRTKTDRQDARLIAEYCRRMQPQAWQPPTEEQEYLQAIIDYIARLKQQRAAEQTKSQTAPDTIRHHIQTTIDHLNRLIAIVQNELKDFYRQNPAYNEKKNRLKTIDGIGESAASALLAKLTRYDFANQNQFAAYLGLDPKIKDSGTSVKGKPRISKQGQKNARKALYMPALVAYRMNAFPAFTARLKARGKPPKLIIVAIMRKLAVIAYQLYKTGKDYDRSRYRN

SEQ ID NO: 299132 - protein, 409 aa, unidentified
MQPILKSCCGLDVHKSMVMACVAHGPLDNPPIFEIRKFSTMTNDLRSLSEWMKEYGVTAVAMESTGIYWKPIFNILEDDFDIVLANAQHIKNVPGRKTDVKDCQWIAHLFRNGLISGSFIPPREIRELRDLTRTRRKLVGAMTSEKNRVQKVLEDANIKISSVVSKVFGVSSLAMICALLEKDDLSADEIAEMAKGKLKKKVDQLVEALNGNVTDHHRFLLKQHLGHIDFLVEEIKEFDEEIQRRLVPHEKEFEDIQSVTGIKGISAASVIAEIGVDMSRFPDEAHISSWAGVCPGNNESAGKKKSGKTRRGNNYLKATLTESAWAAARTKETAFSAQYRNIAGRRGTKRALVAVGHQILIEVYRVLKTGDRYQDAGAEAVTERRSKNREQRMVRELKRCGYDVSKVVA

SEQ ID NO: 299133 - protein, 365 aa, unidentified
MLHRLNSAVTLIQRTTTEAPRQHMYYIGLDVHKKTISYCVKDVSGRIQQAGKIRSTQRELDCWMKTLPQPWTVAMEATIFSGWIYDHLLPHATQIKVAHPLMLRAIAAAKKKNDQIDASKLADCLRCNFLPECHMMPRAIRDRRRTLRYRHLLVRQMVQMKNRVSGLLMETGVEYNKQRLHKVSYFRELLFANEEVPPSLRPLLKLSRETIERCQKTEYALVSSLQRDPVLADRIKRLRTVPGVGPITALTWALEIGDVSRFGSIKKAISYCGLCGDERSSADKAMRMPLSKQRNKHIQRVLVEAAKLAPRQSHEMAVIYDQERQKGNSNRATLAVARKMVAYLLAVDRQQRDFVPAEERRTSAA

SEQ ID NO: 299134 - protein, 408 aa, unidentified
MLFVGDDWAEDHHDVEVQDESGRRLAKARVPEGVAGMARLHALLGEHLATVDGAAGNERVAVGIETDRGPWVRALVAAGYQVFAVNPLQAARFRQRRSVSGAKSDAADAHTLADMVRTDRHQLRQVTGDSELAEAIKVVARAHKTLIWERTRHTQRLRNALREFFPGALDAFEDLTSGDALELLGKAADPAAASRLTRAQIAGALRRAGRRHVDDRAEQIRTALRAEQLTQPPAVAAAYAATVRSHVAVLTTLNAEITTMQDEVAAHFGQHPAAEIYLSQPGLGAVLGARVLAEFGDDPHRYADAKSRKNYAGTSPITRQSGKHKFVLARYVHNDRLLDALGRQAFSALSSSPAARAYYDQLRDRGKDHNAALRQLANRLVGILHGCLKTDTTYDEDTAWPTAHDAAA

SEQ ID NO: 299135 - protein, 371 aa, unidentified
MSQYITDTVWVGMDVHQDTITAAVLFGNDPEPKIERLPGDLNAVRRMFRRLSKHGTPRSCYEASGAGYVLQRCLEHDGFHCEVIAPSLVPKKPGDRRKTDRLDAIHLARHYRAGNLVPVTVPSPYQEEVRQLVRSRLAVQSHVVRLKHRIVRVMATHGHRFTGGKSNWTQKHRVWLRKLHHELDGPLDTVLAHHLEHLEYIEAQKNALEMEIDRYARSEPYRKKVEALCCFRGVKTLTAMTILTELGDIRRFKKATGLMAFAGLVPSERSSGNVQRRGRITKSGSQELRRILVEASWHYRKQATSGLILRRRRMGQNPEVVSIAIKAQHRLQKTYWKIATRKHPCTAVTAVARELCGFIWSALWALESQED

SEQ ID NO: 299136 - protein, 434 aa, unidentified
MLPSGKHDEETLHERASIPGSMEDGVKVMYEKCAGADVHKDSVVVCVLVGPPGGVVAKEVRTFGTTTDQLLELEGWLEERGVTHLAMESTGVYWKPVFNILEGSVEIWLVNARHVKAVPGRKTDVRDCEWLADLMRHGLLRASFVPPEDTRNLRETTRYRRSLIRDRAGEVNRVQKVLEDANIKLGSVATDVMGVSGRSMLRALIAGETDGAKLAELAVGKLKTKREDLARALTGRVKPHHCRVLREIVDHIEYLEKAIDRLSLDIESQLRPFEEAIQRLDEIAGVDRRTIEEVLAEIGADMKRFPDAAHLASWAGLCPGNNESAGKRLSGRTRRGSPWLRAALVQAAWAAARTKKSYFHAQFLRLKHRGAKKAIVAVAHSLLGVIYHMLSRKTTFKDLGPDHFDKLNKKRTASRLVRRLTELGYKVSLEEPAA

SEQ ID NO: 299137 - protein, 344 aa, unidentified
MSKVTIGLDIAKSVFHLVFMNQSGRVLRKKKLRRHQMLSYFSQLEPCIVVMEACGSCHYWCRELTKAGHEVKAIAPQYVVAYRKGNKHDYNDAEAIAEASQREGMRFVPFKSQDQQDIQLMHRIRERMIAQQTALSNQIRGLLSEYGIVYVRGVATLVKELPLTLEEADNGLSMLARRQFQGLLNDLRELREHIKEMDKGLKAFSQSQPVCERLMSMTGIGPLIATALYAGIGQGQAFNSGRHLAAWLGVVPKQHTTGDNPRLLGISKRGNTYLRTQIINGARAALRHIGDKTDKVSEWCRACLARMSFNKACVALANKMVRMAWAMLHYQQDYQPGLINKAAA

SEQ ID NO: 299138 - protein, 410 aa, unidentified
MEVFLERCAGLDVHQASVVCCVLIGAPGRKAQRLLRSFGTTTRDLEALRAWLTEHGVTHVGMESTGVYWKPVYAVLEGHFDLIVGNAHHIKNVPGRKTDVKDAEWIAQLVRHGLVAKSFVPPPAIRDLRELVRHRRTLIETRTAVRNRVLKLLEGANIKLSGVASDVFGVSGMAMLEALAAGTNNASEMASLARGRMRRKHAALEAALEGRMREPQCFLLAMQLRTLGTIDQDLEALDARIEAQLEPYQAQHRLLMQIPGVDWVTAAFIIAEIGTDMDVFATARRLAAWAGVAPGNYESAGKPKGAGTRRGNVFLKSALFAAASAAVRTKGSYYRDKYNRLRARRGPVRAIMAIAHKLLIAAFHMLSTGEVFRDLGESYLDQVARKRSTTKLVQRLSNMGYDVMLVPKAA

SEQ ID NO: 299139 - protein, 418 aa, unidentified
MSETDTCDPAAFLARFTHFGGFDWARRSDHQLVVVDAAGRVVLSLRFADDAAGWAGLRERVAAFPALAVAIETNCGPAVERLLDLGLAVYPMNPKAAERYRDRKAPAGAKDDALDAWSFADALRTDGHGWRALAPQDPLTAELRLLCRDEVKLIEQRTALILQLQAALHDWTTPGAWEFVIQFPDPHRLASAGRRKWERFLHAHKLYRPQTAPGRLEAFAGAEAPGKAKAAVTAAKSLLAVTLARQLCLLESQLDEYRRRIADLFHDHPDGGCFGSLPGAGPKLAPRLLGEFGADRRVFETAEAVQCYAGTAPLTRQSGRSRVVAVRHACNKMLRTTVHLWANLSRQGCAWAEAYYQKKKADGMSHAAALRCLGQRWLKILWKMWQTGSHYDEALHARNQTRHGSWVIQLLPQSAPEN

SEQ ID NO: 299140 - protein, 372 aa, unidentified
MLIVGCDFHPSWQQIAVFDSDTGEGNEYKLSNGDGAAEQFYRKLPAPARIGLEACGNSQWFVQLLQELGHEVWIGDAAQIRASYVRQQKTDKRDAMHILKLLLENRFPRLWTPTAEIRNQRQLLVHRHKLVRLRAQVKNQLQHLAMNQGVQKKARLWSQAGQKLLRELPLAGWAASRRANLLELMKLMDRQIAELDRALEQAAEENPQARLLRTQPGVGPVTALAFVLTLGDVSRFPRGKQVASYLGLIPREHSSGGRQRLGAISKQGNRFLRQTLVEAAHSVVRLDEGFRKQYQHRCHRKPKGVAKVAAARKLAVRLYWMLRTNIGYPEIVHIESSPMVPLVDHGQTETLNGRSRLQQTGAKDGPAGLGKP

SEQ ID NO: 299141 - protein, 268 aa, unidentified
MDIAVLGIDLGKNVCSVVGLDASGAVVMRRKVRRETLIAVVAKLPPCVVGMEACCGSHHLGRLFAAHGHDVRLMSPEYVRPYVKAQKNDDRDAEGIAEAATRPTMRFVGLKSQDQLDMQTLHRSRDRLVGERTALINQLRSILLERGLVAPQGKRKLEQFLAVLMDEQGGAGLSPRMIELVADARTQWAGLDRRIAAFDAEFVCWAKENEDARRLTTIPGIGAIVATALVAAIGRAEVFDRGRDLSAWLGVVPRQFTTGGKPKLLGIS

SEQ ID NO: 299142 - protein, 335 aa, unidentified
MYTLGIDLHKDESHVVVLDNNDEIADEVRVQNANLEEIARQYAGCKAAIEATSNYYTVYDTLNEYLDVVVADPNQTKALGVVEAKNDRLDAKLLAQLRSAGMIAESYVPSKELRERRALVRGRKQLVEKRTDFKNQVHAVLEQQGISYDWNPFTQKGREILADEDLPLNSVSRTLIWSYLEVIDTLDEQIDQLEDVIQERAASLKETQLLMSIPGVSFFSSLLITSELGDIDRFDRDKEVVSFAGLDPVVRESADSRTEGGISKRGNPRLRSILVQCANVAVHTCNDEYLSSFFERLKRRKNYSIAIVATARKLLVSIYHMLDREEVYDPPGVSS

SEQ ID NO: 299143 - protein, 446 aa, unidentified
MTKKRAYRAKEINKVCVSEIVKGRKGKRATVGIDVGKADMYLMLRWEEGEFVGPWHAKNTVQIREIVELLAMLAQDRELIVALEPTGTYGDPLRYALTQAGLNVHRVQGKASHDYAEVFDGVPSQHDRKDAAVVAELAALGKSAAWPYDEENMENQERTYWVQRLNANQQTLQVWTGRLEGLLVRHWPELTGLLKLGSISLLKLLVHYGGPAGLAADEKAAERLSSWGRALLTEEKIAAVLASARETAGVPQGPYERQWVQECAKELLTARRMKHKAKQELKRLTQGHPTLSRLSAAIGFATASVLWVYLGNPQNYHCGEAYRKATGLNLKEHSSGKKKGQLRITKRGPGAVRRWLYLASMRLLREGEVRRWFAAKKARDGGRGGKALVGVMRKLTVALYRVAKDGVKFDAAKLFPGKPLKAKASARARQKGPPLRAFAITSIPEG

SEQ ID NO: 299144 - protein, 388 aa, unidentified
MIYVGIDIAKLNHFAAAISSEGGILIEPFKFSNDYDGFYLLLSKLAPLDQDSIIIGLESTAHYGDNLVRFLISKDFKVCVLNPLSTSAMRKNNVRKTKTDKVDTFVIAKTLMLQDPLRFISLKDLDYIELKELGRFRQKTVKQRTRLKIQLTSYMDQVFPELQHFFKSGVHQNSVYTLLKEAPTPNDIASMHMTHLTHLLQTASHGHFGKDTARGLRILAQKSVGIHDSSLSIQITQTIEQIELLDSQLFHTELEMANLVTCLHSVIMTIPGIGFINGGMILGEIGDIHRFSEPKKLLAFAGLDPSVHQSGNFQAQRTRMSKRGSRVLRYALINAAHNVVKNNTTFKAYYDAKRAEGRTHYNALGHCAGKLVRVIWKMLTDEVEFNLE

SEQ ID NO: 299145 - protein, 361 aa, unidentified
MLDPRETPGRTTVGGVDTHKDLHVAAVVDDHDVTLGSACFAATRHGYKQMLTWMRSFGQLRRVGIEATGTYGAGLLRHLQAAGVEVLEVTAPDRQDRRRRGKDDDLDAQNAAHAAFAGRRTATPKSRDGMIESLRVLKACRKTAVAARRVALQMIHNTIVSAPDELRETLRKLTRMQLVRMLAAWRPDLSDYRSVVSAYRITLKSLGRRYLELHDEIGDLDRMIGAIVAELAPTLLARNSIGCESAAQLLLVAGDNPERLRSEASFAALCGVSPVPASSGKVTRHRLNRGGDRAANSALHIIAVGRLRTDKRTKDYVARRVAEGHSKLEAIRCVKRYIAREVFGLIRHQQQSAVRQAQITA

SEQ ID NO: 299146 - protein, 418 aa, unidentified
MFKIFRKNCCGLDVHKTWIYACIGITDANSRTEYFQARFSSFSKGLQELSHWLDKYNCKEVCMESAGKFWIPVFNILEKTCLVTLAHPKYTKPQKGNKTDRKDAKWICDLFMCDMIKPSFIPPPAIRHLRDLVRYRRKLTNMLTGEKNRAQNCLTVSNLKLDDVFADVFGKSARSITEYILAHPGEPFDVAQFVDRRCKSPLSEIQAAVDGAVSPEQAVKLRQCLDHIDQLRLLRQRLEQEILRICEPFADILQLLRTVPGLGNDPMTAIAVLSEIGGDMSVFPTAKNLCSWAGCCPRNDQSGAKVKSSRISRAGSYLKPLLVQVANALIHSRKHPEFAERYRRIKARRGHKKAIIAVCKMLLTAIWNILSKLVPYSPAGFLSTSHDLPPSKSLTVAQGLSLLRRRGFILTDDPLSAP

SEQ ID NO: 299147 - protein, 401 aa, unidentified
MQENQQHSSVDVFVGVDVGKGHHHAVALDRRGKRLYNKALPNDEAKLRALITELKTHGQLLFVVDQPATIGALPVAVARDEGVLVAYLPCLAMRRIADLHAGEAKTDARDAAIIAEAARSMPHTLRSLRLADESLAELTMLCGFDDDLAAQITQTSNRIRGLLTQIHPALERVLGPRLDHPAVLDLLERYPSPAELASASEKTLANRLTKLAPRMGKSLAADIVQALSEQAVIVPGTQATTIVMPRLAQQLASLRKQREEVASEVERLVHAHPLWPVLTSMPGVGVRTATRLLTEVAHKAFASAAHLAAYAGLAPVTRRSGSSIRGEHPSRRGNKVLKRALFLSAFAALRDPISRDYYARKVQQGKRHNQALIALARRRCDVLFAMLRDGTLYQPKSAPTA

SEQ ID NO: 299148 - protein, 349 aa, unidentified
MAEQRLSYTGARIDVGIDVHKETYTVTCLCQRQIVKTATVPANPARLAESLPRWFPEARLFTAYEAGFSGFVLHRALTTAGITNIVVNPASVAVAANDKVKTDRRDAKKLARDLADGRLRGIYVPTEAEELARLLPRTRAQLVAHRATLTRQIKAKLHQFGLIPPTSRRLMSSRYLREIAAWELPTELRVSLTLLADQWRFATRQLLEVRRLLREQAKGQVALETVYRSVPGVGEVVARTLATELGDMTRFANERALFSYTGLTPSEYSSGTAIRRGHISRQGVSRLRHVLVETAWRALPRDPILQAMFDRIAATRGKQRAIVAIARRLIGRIRACFRHGTTYAVGTVG

SEQ ID NO: 299149 - protein, 420 aa, unidentified
MVYLERGYNLKELPWSKIVSNSFLFKEACMILVGVDVAKDKHDCYIMTSEGEVLFKSFTIANNMEGFNQLYEKILSVIDNFDNVKIGLEATGHYSYNILGYLLDKGLTPYVINPLHSNLYRKSLSLRKTKTDKVDSRIIASMLMSDVSLKPYSNTLYHNEELKSLTRYRFTKVQERAKLKISISRLVTILFPELEKLVPTLQMNSIYALLYEFHSAHAISKAHLTRLTNLLNTTSKGHYTKDKAVLIREAAKNSIGSNMPAKSLELKHTIKLIKELTSEINEIEEEIKIIMNKINSPILTIPGIGLSTGAQILAEIGDFKNFSSPDKLLAFAGLSPSTYQSGNMYSSNAKMEKRGSKYLRFALFNAAIYVSYWEPTFSQYLKKKRVEGKHYYVAISHVVKKLVRLIFHLEKTNERYSTVV

SEQ ID NO: 299150 - protein, 371 aa, unidentified
MKKDSTIKFIGLDVHSKTISVAIADEGRKGEVRHYGTIENTFEAIDKVIKSLTETGVELRFIYEAGPCGFALYRYLTGNGFKCIVTAPGLIPKRSSVRIKNDRRDAMTLARLYRAGELTGIYVPEPEDEAVRDLGRARDDARVAERKAKQRLNSFLLRHNLIYPGKTKWNRTYFNWLGSVGMKYPAQKVALQEYIEAVNECTGRVARLSEQIGLAVEEWRMAPMVKALQALRGVSLICATVTVAELGDLSRFQNPKELMAYVGLVPSEHSSGETIRRGGITKTGNGHARRVLVEGAWTYKHHARITPPLIKRQRDLSKSICQISWKAQLRLCARYRKMVARKKPNNVVVIAIARELAAFMWAIAQEVRTAA

SEQ ID NO: 299151 - protein, 316 aa, unidentified
MNTILQSNPPVHIGVDVAKAELVADLQGTIKRYPNTPAGIARLTRAAANLPGAHLVCEATAGYEKALVAAAWKLGIPVSTVPPQRVRQLAKVLGLHAKSDPIDASLISRFGATALPKPSSPKAETRAKLDSLMRFRDELMDSLKRENCRHEHHDHALVRKLAKARIARLQKDIAELDRAAADLIASDAELARADAKLREVTGVGDQSSRVLLAFMPELGTLNRRQIASLAGLAPFDRDSGTTTGKRFIRAGRGNIRSTLHMAAISAARFNPVLRPVYLHLRKAGKPFKVAIVAITRKLLIHLNSIMTKILQIPLAG

SEQ ID NO: 299152 - protein, 401 aa, unidentified
MVSDFKKGRYNLMKIFVGIDIAKLNHFAAAISQGGEIILEPFKFTNDADGFQLLVSKLKSFDKNSIIIGLESTAHYGDNLVRYLVAEFYQVCVLNPIKTCQMRKNNIRKTKTDKVDTFVIAKTLMMQDDLRFVSFYDLDMMDLKALGRFRQKTIKQRTRLKIQLTTYVDQVFPEIQYFFKSGLHQNAVYALLKEAPSPKEIASMHMTHLANLLKVNSHGHFTKEHAKELRVLAQKSVGANDSAISIQITQTIQQIELLDSQLDKIEAEMTDIMKFNDSVIITIPGIGYINGGMILGEIGDIHRFSNPNKLLAFAGLDPSVYQSGNFQAKTTRMSKRGSRVLRYALVNAAWNVVRNNATFKAYYDAKRAEGRSHYNALGHCAGKLVRVIWKMLTDEVEFNLE

SEQ ID NO: 299153 - protein, 364 aa, unidentified
MKRKLYVGMDVHKETIRIAYLTSNSKEILKEQQIKHNEVQIKKFIKKLKTEWNEIYCCYEAGVTGYPLYRYLKSLGVNCILVAPGKIPRQSSDKIKTDKRDAIKLARLMRSGELESIHVPSEEDEAVRDYLRSRDSLRLDLGRNRQRLKKFLLRKDIKYSTTKYWTVSHYKWLNNLHFNNEILQETFNDYYSRVRVQEENLKAMDKKIQEIAESEPYREKVGILRCFRGVDYLTAMFLLCEVNDFKRFKTAGSFMSFLGLVPGEYSSGSKRKQTGITKTGNPRLRRILTEAAWQHRFPGTGSKIVTARRSGQPALVVALAEKASLRLHKKFRNLQLRGKTPQVMITAVSRELSGFLWAAMNLVA

SEQ ID NO: 299154 - protein, 312 aa, unidentified
MAMLSFCGIDVSKDRLDVVVLPEGWFFSVSNGTAGWAELVVRLRPLTVSAIGLEPSGGYERGIIRALLAAGLSVRRINPNKLRQFARARGVLAKNDRLDARLIAEYVAIMPTRVVQRDAAVERLAEIVTMRRQLCDEHVAAENQAAHLEDAMLRRLSKRRQMRLEADIRLLDKRLAEMVAANVALAQRYELLTSMPGVGPVLAVTLIALLPELGKMSRKQIAALVGLAPYDFDSGKLKGHRSIYGGRMPVRNVLYMAALSASRYSPALKAFHNRLADADKKSKVIIVAVMRKMITTLNAMLRDNAVWQPRSA

SEQ ID NO: 299155 - protein, 343 aa, unidentified
MEAYAGKQYVGIDLHRRRTVIVRTTEAGEVLETVRIVNDVQRLASVMARAGECPEVVLEATYGWYWAVDALQAGGANVHLAHPLGVKAFEYRRVKNDVRDASDLADLLRMGRLPEAWIAPPATRELRELVRHRAKLVGVRSHCKAEVHAVLAKCGVQVLMSDLFGVAGTELLDRLDLPAPYAARIASLRRLMDGLEFEIDLFAGMVRGRMAREPGYTAVQNIPGIGPTLAAVFVAEIGDITRFASASNLTCWAGLTPKHHESDTHVHRGRITKQGSRLVRWAAIESVKNVPAASVAGVMRERVADRRGRNVGTVAAARRQLEFVFYALRDGHVRALEHLPRVA

SEQ ID NO: 299156 - protein, 341 aa, unidentified
MKVSTLGLDLAKNVFQIHGVDDKGNVTVRRQLRRQQMFSFFSDLPPCLIGLEACGTAHYWARELEARGHDVRIIPPSYVKPYVRRGKNDAADAEAICEAVGRPSMRFVPVKSEDQQAALMQHKARELLMRQQNMLVNALRSHMAEMGLIAAQGRERLDRIVDVIMEDEDESLPALARASLRPLVAMLQANEAAIDDIDRAIKAAHKENEVSQRLASIPGVGVLTASAIAATVPDPSFFKSGREFAAWLGLVPRQNSSGGKERLGRISKQGNRYIRKLLVIGATSMLNVVRRQSSRQADWAKRLLERKPTRLVTIAMANKAARIAWALMTKKEIYRATTIAA

SEQ ID NO: 299157 - protein, 415 aa, unidentified
MASDWSEAVIFVGIDWAEEHHDVHVMNPDGQPLGRARVPEGIDGIARLHALVADHADDPGEVVVGIETDRGLLVTTLVAAGYQVYGINPRAVDRYRDRHAMSGAKSDGADAKVLADLVRTDRHNHRQVAGDSDLAEAIKVTARAHQNLVWARQRQVNQLRSALREYYPGALATFGTDLAHRDVVAVLVKAPTPELGRRLSTAQIAAALRRAGRVRNVDARAAAIRDGLRAPQLAAPDVVADAYGTSAKALISVIATLTAQIDELESALADRFEQHPDADILRSLPGLAVILGARVLGEFGDDPNRYANAKARKNYAGSSPITKQSGSRKLALARYVRNRRLADAITLWAFSSLQSSPGARMLYDRRRAAGDTHHKALRALSNRWVGILHGCLRHRTPYDEHIAWGHLTDNLPTAA

SEQ ID NO: 299158 - protein, 330 aa, unidentified
MNIHSQGGATQPGELPNVGIDVSKQHLDVCWDVQSARISNDRQGWEELTAKLKGQVGLVVVEATGGYERGIVVALQTAGVTVARVNPRQSHDFAKALGVLAKTDRLDARTLRDFADVLARHPERERYITAVIDERRELLVGLTNRRRQLLDMRVAETNRLEHAGTSVAVKSIKSVLRLLDRQIKQIDDDIDRTLEQHFKPQKKLLDSVKGVGAVTTLTLLAALPELGKLGRKPIAKLAGLAPLANDSGGRRGQRRIWGGRAQVRSALYMATLSAMRYNPPIAEFYQRLLAAGKPKKVAMVACMRKLLTVLNAIMRDGTTWNAAHSLVQVH

SEQ ID NO: 299159 - protein, 324 aa, unidentified
MIDGRLGIDVSKNTLDASMASCNKVRARSFANSSDGWRHLLDWLISQKVQRVHACLESTGRYSLGIACALYEAGHVVSIVNPAQIRDFARTKLGRNKTDGVDASHIREYCELFKPQPWAPPSEAHRRLGELQTIRAGVIAGLTEWKNRKSSGMVDVVAQSLADVTISHFNNQLEAVDEAIAQTIDNDSGLRRKRDLLLSISGVGEILAGVVLAELPGPDVLRSSAAVVAYAGLNPRQHQSGTSIDRVTRISKIGNAVLRAALYMPAMSAMRHNPAIAALVARLKSRGRLNPKQIVVAAMRKLLVLCFGVLKTGKPFDPAIAMGC

SEQ ID NO: 299160 - protein, 346 aa, unidentified
MTYSTTVGVDLAKNVIQISVVSRRGKELSNRSLTRKKFAEFLGKQKQSLVAFESCATAHYWARAAQRHGHEARIIPAKAVTPFRQGHKTDSNDALAVAEAARRPNIKEAPMKTVEQQGLQAIHRSRELLNQECTALSNHLRGLLMEFGIVIPKGFASLLRTVPEILEDGENELPDLYRPTLHRMYSRLRELRGDIEVMTKEVARLAKAHPICSKLMALEGIGPISALMLYATMGSGAAFSGSREFAAYLGLAPKQYSSGGKTNIVGLSKRIGNSRLRSVLILGARAYTYKLREPKSSKDKWLKAIIERNGESRAAVALANKNVRTAWAMVTQGTEYQRRPQLEMAA

SEQ ID NO: 299161 - protein, 423 aa, unidentified
MTLWVGLDWADKKHCLVVRPLEGTPAQTHFVDHKPQSLEDFFLDLRQKHPEGQIGVCLEQSRGPVLYALLKHPFLRLYPVNPRCLADFRAVFKVSGAKADPSDADLLCELGFKHSDRLRALELNDPATRQLWLQTEHRRQTVDQQTGLTNQLTAALKNDYPLALELFGEDVGLPMSLAFLKRWPNLASAQKAKASVLRAFFYSQNSRSEDKILARLEALRTARPLTEDAAILAAMQLRMETLWEQVAAVQKSIKRYDQSIAKVFATHAKAKVFASFPGAGPALAPRLAAAFGTLESNFPRSLDMLCWSGVAPVQKASGQSKVVLFRYARPKFLHQTFVEYARLSVPYSAWASLLFEQLRQKGWKRFRIYRYIAFKWIRVLWRCWKDGVEYDEAKYLRGLQQRGVTFYQSLYPDPPAAMAPKPQ

SEQ ID NO: 299162 - protein, 318 aa, unidentified
MNKSEHTNKYLDRPFVGIDVAKETLVIFIDSLNEHLTCSNTKKDLTAFAKRLSKLDPQLIVLEASGGYEKAAADAFSQAGLPFAVVFPRRVRQFAHGLGIIAKNDEIDARIIARYGRVAEVQPQPQQTQELRTLRALTQRRTQMIEMRIAEQNRLETSHPSVHKGIKQHIASLKQQELKMNIEIEQCVTANASLKAQEERLRTVPGVGPTLSSTLITELPELGLLSNKQLASLVGVAPFPHESGKQKGKRFCKGGRNQIRRVLYMATLSAITFNPVIRAFYQRLCDRGKLKKIAIIACAHKLLSILNSMTKYQTAWSL

SEQ ID NO: 299163 - protein, 369 aa, unidentified
MRENMSVAALNELKKRTIVGRMTIGIDLGDKKSHFCVLNDRAQVIARGFLPSTISAFRREFEGLPPSLVAIEAGSHSLWANQVLKVCGHDVLVGNPRKIRLITESDRKSDRVDAESLARLARADRLLLAPIQHRTQEKQVQLAVIRARHVIVRSRTALINCARGLVKPMGLRFRACSADAFAKRAAATPLPEVLRIALAPLLKQIEAVNESIREYDRQIEQIAVTEYPETSLLKQIKGVGTLISLTYVLTLEDPHRFAKSRDVGAFLGFLPRERQSGERAPRLGISRAGNEYLRTLLVQGAHYILGPLGPDTDLRRWGLQLASRGGGGAKKRAVTAVARKLAVLLHHFWKTGEVYEPLRKNPVSDVAAA

SEQ ID NO: 299164 - protein, 328 aa, unidentified
MMKDQNEPYPFSQFVGIDVSKDKLDLLFSADQRAAQIDNAEQSIVEGLIQQIQNPECTLVVLEATGGYERAVVALLHQYQIAVAVVNPRQVRDFAKGIGKTAKTDRIDAAVLALFGQVVKPAAQVSRSEDDQKLKALVQRRRQLLDLMNQESNRLKQTRDREIQEFIRQSLEALKKQVKLIDQRLEQCVQESTENARKVEILGSVCGLGPVAISTFVAELPELGKLNRTQIAKLVGVAPINRDSGQSTGQRRVLGGRSYVRRVLYMATLVAARFNPKIKAFYQHLLKRGKPKKLALTAAMRKLLTILNTLIKNDVLWSSPANETSVPG

SEQ ID NO: 299165 - protein, 404 aa, unidentified
MQVYIGLDWSSKKHDIVITDETGKRISAGVMEHSQEGFSKVEQMRKRLGVSQDECVIGLETAHTILIDYLWESGYEHLRVIHPNIVNKSRERYSQSGAYDDQSDAFVISDLLRTDGHRFAPWHPGSPLLQEMRRTVSFAQFMTKQSTMQANRLEAVLRRYYPAARQLFTWPSQIACHFLLAHPTFEAARRLSFEEFGTFLKTHGHTQTKNWLKIYDKLQADYPQAAPAAVAAGQAEALPLAQMLLDTQKSKQQTLRHLQILFQQHEDAPLFSSLPGAGELLAPALLVKFGEDRARFPKASTVQMLAGTAPITKRSGKRKRVLFRRACDKSFRYFVQQFALNSLRDSDWAQAYYQAATQRGMKRNQAFRSLGNRWLSIIWRMWLDRTPYDEAYHLQQRLARRRAC

SEQ ID NO: 299166 - protein, 321 aa, unidentified
MTQDSPFVGIDVSKERLDVAVQPTAEQWSVANDHTGIERLVTRLQKLQPARVILEATGGMELPVSAALATAGLPVVVVNPRQVRDFAKATGKLAKTDTIDALVLAHFGQAIRPDIRPLPDAATRELSTLLARRSQVMGMLTAESNRMTTVTGRVRSDIQDHVDWLKQYLKRLDKDLADALHSSPIWREEDNLLQSVPGVGKVTSLSLLAGLPELGTLNRKQIAALVGVAPLNRDSGSLRGKRTIWGGRAPVRAALYMAALSSTRWNPVLRAFYLRLLSKGKAKKVALTACMHKLLTILNSMLKHRTTWNQATTAQFVGPCS

SEQ ID NO: 299167 - protein, 370 aa, unidentified
MKQIRSFIGMDVHKETISISVAEDGRNGPVRFLGVIPNTVEDVTKMAKRLAKHGELDFCYEAGGCGYVIHRQLTALGHKCVVVAPSLIPRKPGARIKTDRRDSEKLAILHRAGDLTPVWVPDTTHEALRDLVRARVDASMHLMRARQQLLAFLLRHGRSYPTGKHWTQRHRSWLAGQTFQEQAHGIVFHDYLETVWTAQQRRDALIEQITVMVGSWSLGPLVEALRGLRGIDTISAATFLASTGDLSRFESPRMLMGYLGLVPSEHSSGGSIRRGGITKTGNREARRMLIEAAWSYQYPARIAQEKAEILVRLPKNIRDIAWKAQSRLCPRYRSMVARGKKNTVVVAAIARELAGFIWAIGQEMRAQMAT

SEQ ID NO: 299168 - protein, 362 aa, unidentified
MRIIGCDLHARQQTLAMLDTTTGEVVEVTLKHEGDNVREFYSSLPRPVRVGIEATGSMQWFLNLMEELGIECQVGHPAQIRAAAPRKQKNDRRDAELILKMLVEGRFPAIWLPSKELQDLRALLRHRHQWVRMRTRIQNALQSIALANGLRRGTALWSHDGQSRIASLPLAPHTAYRRSELQGMYEKFEAEIEKLNQRVEEQACKRPGARLLMSHPGVGPITALATEVFLGDPARFADSKALASYVGMIPREYSSGGRQRLGGLSKQGNPLLRFLWGEAGAHAARKDPELQRFYRRKLVQKGLGKASVAVARKLGIRLWIMLRDQIEYNEFCRRGQKQQKSSDACVGMPETRYGAKSHRPID

SEQ ID NO: 299169 - protein, 351 aa, unidentified
MKYYKTTTKYNCGIDLHTRQMYICVMDLDGNILVHRNIRNNDFAFFLKLVEPYKDDLTVTCESCFVCFWLADACEDAGIKFVLAHAYYVKSIAANKHKNDKEDARELAECLRTSRIPPAYVCPRDLRPVRKLLRRRNKYVKNRAELTGHSTCEVMAAGHQPLTISANSKERWREGIRSSFDNPLDSFTAEMELSIVERYDEIIMKMEQRIEKHARDFKQQDYRLLRTAPGIGKILALTILYETIDIERFPTVKDFISYCRLVCGTNESGGKDFGGKGRKMGNPYLKWAFMQAAILGKRADPKLNAYYERLERKKGKHTANAIIAAKIARAVYFMLDRKTGFSVDQLIKGRR

SEQ ID NO: 299170 - protein, 395 aa, unidentified
MRFVGIDVGAERHVVASVDAVGAVLLKPTGFSEDAAGYQHLRTVLGSATDTLVAMEATGHYWKNVFAMLVTQGFAVALLNPLRTRRFAAEELQRTKTDAIDALGIARFAAQKRPVASRLPDPATEELRERLRYRDRLSQDFGNRERQLHRLLDLGFPEFPRHVHDVGSELATAIPRDYPTAAAFQGVSVRRLGGLRYDGRHPVGAELAAALLAAAAASVGQHHGPAYQVQVRDACEDLDIVRRRLRTLDRDIERLLERHEVGTLLTTIEGIGPQTAARLVATFGDFSGVRSGAALACYVGAIPGLRQSGKRTSVRAHLTPIGAARLRAKLYMPVLSAVRYNPWLRAYYAALIARGKLPKVALIAAMRKLLHAVYSVATHRRAFVPHVGVPLEART

SEQ ID NO: 299171 - protein, 344 aa, unidentified
MPTIDYIGFDIHKKTISFCDKAQDGTILEEGTIPALRKKLLAWAKTRPRPWIGAMEATLFTGWIYDLLKPLAQALQVAHPPMVQAIAAAKKKNDKVDARMIADLLRCNLLPECYMAPVAIRDLRRVLRYRNLVVRQATRMKNRIAGLLMETGTAYNKERLHGKAYFSELLGSLQEVPRSVVELLQLSRGQVELFAAIQRRLLQGLRKHPELSQRVMRLQSIPGVGEILALSWALEVGEVDRFPSLAQAVSYCGLTSAQHSSAGKEQRGPISKQRNRHLQTILIEAAKLAPRYNPQLAAVHQRELQRGNRNRATLAVARKLVAYLMAVDKSGQPFQMRASGEEAA

SEQ ID NO: 299172 - protein, 429 aa, unidentified
MTRISAGVDVSKNRSTVCIIDQDGKVIMRPFLVWHSTEELDFLADTLKRLNGEVRVIMESTSIYQYPIALHLKEKGIFISIVNAYKVKKFANTDFRGGKTDKKDSRTIASYGISYWYKRVEWQIPKDTYFNLDLLNRTYMNAKKHRQIILQELQHYIDCAMPGMDKELHSLNLSTKKDFMLDFVEKFWHRDEIVNMTEAEFTEVFTAWAKKKGYRPVEGKAAKIYAITKSCIPYYPANPTVKTILQCIVDKLSGVNRTLVTIVTQMIEEAKKLPEYQIVREMPGVGDPLAARSFGSAGDIRRFKNSKALVAYAGIDSPPDESGDFSSTHRHITKKGSKVFRDTGYEIMMALRAQKRTWEKVRKNPDVYDYMLRKEAEGKPPKVAKIAALNKFLRIIYARIKELYDNMALAERAKTKTRSKTRAKTKVTA

SEQ ID NO: 299173 - protein, 388 aa, unidentified
MQDVADQSAAPTTIGADLCAIFISLELSRSTWLVTSLSPGGGEKMSKHSVSAGDVAGLLARFSELRRKACARTGRSFPVLVIQEAGLDGFWIHRVLLSEGIESHVVDAASIATSRRRRRAKTDRIDGETLLRALLAHKRGEPRVCSMVRAPTPEDEDRRRICRERKVLIMERVQHVNRIKGLLFSQGASGYEPLRRDRRARLEALQTGDGRRLPPHLKAQVCRELDRLELLLQQIKAVEAERDALLNAEQTKASAPPPMLLGVHGVGPEFASVLWSEGLSRHFDNRRQVAAYAGLAPTPWQSGSVHHEQGISQSGNRRLRTMMIQLAWLWLRHQPRSALTLWFKDRMERNGGRRRKTTIVALARKLLVALWKYASAGVVIEGAMIRAA

SEQ ID NO: 299174 - protein, 325 aa, unidentified
MTLSIGIDVSKSKFDAALMTAQGKYRSKVFNNTTGGFEEFLKWIDVNVEQGRSNVQVCMEATGVYHEPLANFLFDSQVKVFVINPLRIKRFVESEGLRNKTDKGDAKALARFALHKELDAWEAPSTGVRELQALVIRLESLQTMRHSELNRLDVAHPSICDSIAAVVAALDEQIETVRLLISKTIDDDPDLKQRQDLLETIPGLGATTIASLLAYIGRPERFKTVKSLVAYAGLTPAIRQSGTSLDKRQGLHPVGHPALRKALFYPAMTACRYNPIVAAFWQRLKAQKKPGKVILVACMHKLLAIAYGVLKSKRPFDASLATKNA

SEQ ID NO: 299175 - protein, 362 aa, unidentified
MFTERTSVGLDVHARSVAAAAIDGVTGELVQAKLTPSHEHIRSWLAGLQGPVAVAYEAGPTGFGLSRSLNAAGIRCEVVAPSKLQRPSGDRVKTDAKDAVHLARLLRLDEITAVSVPSVDQEAARDLVRAREDARGDLMRARHRLSKLLLRQGYVYSGGKAWTGAHDVWLRHTGAQLDSSATRLTFESDYDAVLHVKARRDRLDDAITTMAADCEFTPMLRRLGCLRGIGTLTGLALAVEVGDWERFTGKTIGSFIGLVPSEYSSGQSRVQGSISKTGNTHLRRLLVEAAWHHRCAYRVGKTMRDRWELAGPAARARGDEGNRRLHHRWNTMRARHKRHTVANVAIARELAGWCWSLAVLRE

SEQ ID NO: 299176 - protein, 391 aa, unidentified
MTMYFVGIDISKYKHDCCIISAANQKVVSKFTFKNDKSGFEQLNLILNSLSTPEDIKIGFESTAHYALNLELFLENANHSFMEINPVLIKDFKKSQTLRRTKTDSIDCELIARWLMTVEYKPHSKGFYHAYSLKSLTRLRDRLVRQRSFYLVKITNVLDHTFPEFKPFFHERLSKTALYLLENYGSAEKIARMNSASYEKLRSISRGKFSPKQFIRLKELAANTVGVNNSIFDVELNSLLTLYKSLVDEIKTLESEINRLVDEVHPHYMSIPGIGPISAAIIYAEYGDISNFSSPNQMLAFAGIEPSVHESGTEAYNGKMVKHGSSQLRYVLINCCLPLIRFDVTFATYYARKRSENKPHRVAITHVAKKLVRVIYALESQDIDFDPKKLR

SEQ ID NO: 299177 - protein, 389 aa, unidentified
MLCVGIDVAKRKHDCCIIDSDALKTVESFTFPNSREGFDMLLSKISELGIPKDKIRVGLEATGHYSSNLAHFISEHDIPLLTFNPLLTNRYKQGFSLRKTKTDKVDACAIAQMIVSGKGSQTYSSSLYHNEEMKSLSRYRSQTMQKCSKLKISVSRLVTILFPELEGLTSSIHLASIYALLKAYPGHEQIAHCSMKRLTHLLSDASQGRFDKSKALEIHQAACRSIGKVSLSASMELVHTITDIEVLKQHIVEIDEKLKEMVDQEESSIIDIPGIGYTLCASILGEVGDFKRFPDVDKLLAYAGMSPSKHDSGDYHSKHNKMEKRGSPYLRKTLYLAARLVAQNVPKFKEYLEKKLSEHKPYKVALSHVAKKLIRLIYRLGISGCPYLA

SEQ ID NO: 299178 - protein, 392 aa, unidentified
MVVSVGVDVSKDKHDCFIVSSEGEVLADVFTIPNTMDGFHYLLQRIRHCTAPQDKIKVGLEATGHYSYNLLGFLLDNGLTTYVLNPLHTNLYRKSLSLRKTKTDRVDARTIASMLLSDAGLKPYTDTAYHNEELKSLTRYRFDKVKERAKLKSSIARLVCILFPELEKLVPSLHIASVYALLEEFPGAKQVAAAHLTRLKALLETASNGHYKRDMALEIRNAARNSIGSQMPAKSLELQHTIRLIRELDREIDEIEEQIQSIMDELHSPITTIPGLGFRMAAMILAEVGDFTRFDSPDKLLAYAGMSPSTYQSGQLKNCYPHMEKRGSRYLRYALYNATKYVCHWDPAFADYLAKKRAEGKHYNIAISHAAKKLVRLIFAMEKSRQPYCSAA

SEQ ID NO: 299179 - protein, 342 aa, unidentified
MDHFAGLDVSVKDTSVCIVDGTGKIVREVKVASEPAALLPVLTSPTYHFKRIGLEAGPLSQWLYSALAEAGLPAICVETRHMRAMLKVQINKTDRNDARGMAQMMRAGLYRPVHVKTLRSQKLRMLLTHRKLLQSKAIAIENDLRGTLRNFGLKVGMVGKLKFETRIKELVENLPDLAVLVEPLLVVRRVLREQLIILHRRLLAIVRDDEVCRRLMTTPGVGPVVALTYRATVDVPARFRKSKSVGAVFGLTCAKYQSGESERSGRISRCGDEMMRVMLYEAAQAMLHSKRWSWLKAWGMKIARHRGMKKAIVALARRLAVIMHRIWVDGTEFQWTREAAVA

SEQ ID NO: 299180 - protein, 386 aa, unidentified
MSRPSNILVRAINYDHTLVLSVELSNKSWVLAAQVPGLPRTKAQRTIEPNKNALLAAIDGYRARAAAVGYTVDRVITTYEAGWSGFWLARWLVAQGVEVHVVQPSSVPVDRRLRRAKSDGIDAELLLRTLLAWLRGEPRVCSMAPIPDEADEDARRCVRERTELLSDRVGLTNRIGAVLATLGVNDYNPLLQSRRRRLAGLRTGLDEPIPPNALAKIERLLARLELVLAQIAELERERDEVAAADAPDRAGKMIQQLASLRGIGVQSATVLVREAFVRHFPNGKALGSYAGLTSTPYSSGGIDREQGIGKAGNRRLRTVMVELAWLWQRYQPGAAQVAWFRDRVGSTGRRIRKVMVVALARKLLIALWRFVIDGVMPEGAVMKPSI

SEQ ID NO: 299181 - protein, 413 aa, unidentified
MERLLERCAALDVHQASVSACVRVPGEGDQRREFNERFGATTPDLLALCDWLRGHGVTHVAMEGTGVYWKPVYYALEDEFELLLVNAAHVKQVPGRKTDTKDAAWLCQLLECGLLRASFVPPKPIRELRDLTRYRKTLIADRASEANRLHKVLEDAGVKLSSVASNVLGVSGRLMLEALCQGANDPVALAELARGRLRSKLPALRRALESRFRDHHAFLVAQILAHLDYLDEAIAACSARIDEQIAPFASALTLLESIPGVGRRNAEVIVAEIGADMSVFPSSRHLASWAKLAPGNNESAGKRKSGSTGKGSPWLRSALVESALAGTRTRGYLRAKYWRIRQRRGHQRAVIAVAHAILEISYQMLTTGELYRELGDDFFERRDNERTTQRHLRALERLGYRVTLDAVPQPEAA

SEQ ID NO: 299182 - protein, 412 aa, unidentified
MDILYACCAGLDVHKRTVVACVRRLGADGKVAREVRTFGTMTADLLALSDWLAEAGVTQVAMESTGVYWKPIFNILEGRFPVLLANPQHLRRVPGRKTDVKDCEWIAQLLQCGLVQASFIPPRPQRELRELTRQRTQLVAQRASVANRIQKVLEDANIKLAAVATDVLGKSGQDMLRALVAGEQDPVALAQLARGRLQEKIPALQQALRGQVTAHHRFLLELLLDQVQSLDALVKRLDGRIQELTSPFEETTQRLDTIPGVNRRVAEALLAEIGPDVAAFPTEGHLAAWTGLCPGQRESGGKSRGGKTRKGNRWLRQVLVQAAWAASRKTGSYLRAHYRRLAGRRGGKRAAVAVAHTLLGIIFHVLQRGSTYQELGEVYLDRLQPDRLTRSLVKRLERLGHKVVLEPQGRVA

SEQ ID NO: 299183 - protein, 343 aa, unidentified
MGEVSTVGLDIAKSVFQVHGVDADGAVVMRKRIGRAKLLEFFAALPPCVVGIEACPSAHHWSRKLRVLGHTVKLMPPTYVKAYLKRSKNDANDAAAICEAVTRPSMRFVPIKTQEQQTGLMLHRTRQLLVRQRTMLSNAIRGHMAELGIISAKGRNGTAELLQIVGDVADDRIPPVARFCLDLLARQYLTLNAEVYAVDKRIHAWHRSCEESRRLEEIPGIGPIVATALVAEIGDWRAFRSGRNLAAWIGLVPKQHSTGGKERLGSITKQGNRYLRWLLVTGAMAVIRYARAHGTKRPWLTRIMDRRPAKVAAVALANKIARMAWAIMVRAERYKEPKLLLAA

SEQ ID NO: 299184 - protein, 318 aa, unidentified
MTPHPIALAAGIDVGQRFLDIGLAPSGKTFRVPNVADGIAIIIERLTQEGVGRVVLEAIGPYAQRLVSALAIAGFEVGLINPRRIKAFREFEGRRAKTDRLDARLIARFALAMTDAIRPLPTAEQLALKALSTRRRQLTEMIAMEKTRLKQAAEPLILASHRTAIASLTAQCRHIETELARRIGDDPQLACSFEILTSIPGIGERVATALITELPEIGRTDRKAIASLAGLAPHISQSGNAPPRAAIAGGRPCVRTALYMAALVASRHNPQMKLAYQSLRNQGKPAKLALVAVARKLLVTANALVKNNTRYKPHSLGS

SEQ ID NO: 299185 - protein, 422 aa, unidentified
MSCLPALAGVCPTQHQVRRDTIILTESTLIVAGADTHADTVHVAAVTMTGAVIGDREFPTTRAGYTAAVAFLHSMGHVERIGVEGTASYGAGFTRAVTAAGLEVVEVTRAVKSTRRLKGKSDPLDAYSAARTALAGDGLATPKDDTTSGLRALHIARRSAIKHRTAVINQIKAMLVAAPDAVREKYRGLTTLRIIEAIARCRPDAQAEPWAQSVLVAAKMLAQRVQFLEAQAEALEAQIDAIVTDANPGLRAAYGIGADTAAQLLITAGANPHRLHSEAAFAALCGAAPVPASSGKTNRHRLSRGGDRAANNALFRIALVRMSHHQPTKDYVQRQLALGHTRMEVLRKLKRAIAREIFKLLTRQIAVPEYADLRSARQAKNITVTAAANHFGVWPTVISRIERGLQRDDDFADTYRNWLKAA

SEQ ID NO: 299186 - protein, 393 aa, unidentified
MQNCLAIDVAKGKSMVSLISSCGEVLIDPYEINHSINDFTNLLNRIKKLKLDNVSVIMESTGIYHRPIERFFLENNFNVYTINALYSKMYKRNLRKTKTDKLDCISLAELFFTADFKQYIKPDDLYLNMNALSRQYFALNDLCTNIKNRYKNLIYLCFPEYEIIFKSEMIYSNIALAFIEKYPHADIISNTRIDALQHFFKKSNFRYWKRKTNIIKEYALKSYPSVNMNDESVSNLSQIARLINDYQKEIETIKYKLVFLAKKSKYFESINSIFGIGDFTTSILIAELGDINRFNNIKELTAYCGLDPSIKQSGRSIDVHGPISKSGNKYLRKILFVSCLNIVRLSTKCHVQNDIEIYYRKKRNEGKHHYAATIACTTKLLRKILALCKQLDK

SEQ ID NO: 299187 - protein, 316 aa, unidentified
MDRSITTFVGIDVAKHSLDVCLLPEGKPLSLSYDRKGLKQLLAQLPDAGTCLIVVEATGGYQRRVVTELTDRGHLVAVVNPRQVRDFARGLGILAKTDRIDAEVIARFAQQTRPRCVAQVSEKQAELQQLVTRRRQLVGLRTAEMNRTETITSKTVRKSIQRVVGLLEKQIEQIEKEIYALLESDDDWKGKAQLLGSVPGIGPVTIASLLAQLPELGLLNRQEIAALVGLAPFNRDSGRFRGKRSIWGGRADVRSVLYMAALTARRFNPHIRKFAARLEGEGKAFKVVITACMRKLLVIINTMVKHNTHWNPNLAY

SEQ ID NO: 299188 - protein, 353 aa, unidentified
MISVGIDVSKGKSTVCVLKPYGEIVCRPFEMQHVEKDLEAFHNLLQKLDGEIRIVMEATGIYHLPILIFFHNKGYFVSVINPFAMKKYAKDNSIRGAKTDKLDSIMIANYGIEKWFKLQRYEGDEEIYAELKLLGRRYRYYMELHVKALQELTHILDYVMPGIKKLFSSWNEANGKDKLSDFVERFWHFDLITSMSLETFTDEYLVWAKEKKYHRSRSKAETVYELASSGIPTLPSSTPSTKMLVQEAISVLRTVDSSLSLIVTRMQVLAKSLPEYSTVREMGGVGDVLAVKLIAEIGDVRRLHSAKALIAWAGIDPPPYESGQFIGSKRKITKRGSSTLRKIGYEVMRVLKS

SEQ ID NO: 299189 - protein, 354 aa, unidentified
MDTRRYIGLDVHQANISVAVLDSTGKSIIDCVLETKAATIVEFIRGLRGSLSITFEEGTSAEWLHGLLKPHVAHLIVCNPRKNALLKAGNKNDRVDARKLANLLRAGRLSPVYHGECGLRTLQELARSYLTITKDLTRVMNRLKAVFRSWAIPCAGQTLYSPRHRSDGLQKLPEPGVRRRAEQTYEQLDNLMTIRRKARIELLAESRKHPATHLLQGIPRVGPIRAALLMALLQTPHRFRTKRQLWAYSGLALQTQISGEYRLSGGELQRGKKPFVRGLNINYNRDLKAVFKSAATRGGRSSDAFGVFYQGLLDKGMKPSLAHLTVARKIAAIVLKVWKKGERFDPAQVKQPAA

SEQ ID NO: 299190 - protein, 313 aa, unidentified
MPVSLSKPIVGVDVAKNELVIYQSDGDLLEEIANTKTSIKQWLKALSGTVAIAIEATNIYHLDFADLAYEAGCTIYMVGGYELKHYREGVKIRAKTDALDAKLLARYLKNEAEELRPWTPPSPLYRQLLSLFRRRAALVQARVGLVQSWSNEPLLKAAFAEQVKSMQQLETLIEKTINDQLKEAGLLGQLKRCLKVEGIGFLTGARLITAFQRGDFRNADAFIAFLGMDLRVAKSGQKDARRSLTKRGDPEARRLLHNAAMSASRTKAWKGYYEEQRTRGFSTTQALVMLARKLTRVVFALLKGQSEYQPKAS

SEQ ID NO: 299191 - protein, 430 aa, unidentified
MKSNTQNAKIEAITEKTLVLGIDVGSETHYARAFDYRGIEYSKKPFKFSNTEAGFVTLKEWILDLKERHEKDKVVPGMEPTGHYWFNLGKFLQDNEMKPVLVNPHHVKKSKELDDNNPTKNDRKDPKVIAGLVREGRYMIPYLPDGVYADLRTASNIRFQLQAELTRIQNRISRWFNIYFPEYKTVYGKPDAKSGMLILKAAPFPEDILTLGIDGVNQIWRDAKLRAVGKARAKILIEAAEHSVGSKEGAVSARMEIRMLLEDYESRNICLQEVMTLIEGLVKQIPMAEKLLEIKGVGIRTVSGFLAEVGDISRFNNPKELQKLAGLALVENSSGKHKGETTISRRGRKRLRYLLFEVAMSLVAKNPEFRELHNYYTTRRLNPLKKMQSLMAIAAKLIRIFYAMLTKGVDYDPKKMASDIKRPAVYLQAA

SEQ ID NO: 299192 - protein, 417 aa, unidentified
MKKNFILGMDIAQHSAVAQLDRADGSNCWRGTLTTDRSGWQMLENVMASNGARACDTLVLIEATGVYHLAWAAHLHHADAEVFVLNPLLAARLESTANALRGHKTDRVDAAKLCETGRLHAAELARFRYHPQPDRQGLKQLDHARRMLRKQLTNLKKAFKSHLELVFPALLAAGIGADTVRAAAILDKASTAAAWRALSEPERKQLAGDKLAELDHACEQTLADEPLAQACAPAVFALLQAKQAMAEQLRACDRQIAPRLPRERVALIQTIPGFGEHTAPVMATYLPDSFEGWGPRKKIVARLQALFGMDPRLRQSGKWTGKVKISKRGIAAARTALFQAAFCTLGNDQEMTAYYKKLREVDKNEHREAMVELMRKQLRRLVAVLCNNRPFKPAVPSTGHASTKPTHPASLKTHQAA

SEQ ID NO: 299193 - protein, 316 aa, unidentified
MRTAPLIGIDVARRTLEVAVEGQATTTQSANDVAGRRRLVQRLQRLAPELVVLEASGGYEQALLEALWAAALPTLRVNPRPVRDFARARGRLAKTDVLDAHNLVAFGRALQLQAQTPPSPVRRELAQLQARRQALVKMRVAEENRLQQTPQPTVQATIRAVIACFQDQERALETAMDTLLESDPELAAQARLLRTVPGIGAGTVRLLLGALPELGQVSSKAIAALVGVAPYNRDSGPVRGQRTIWGGRAAVRHGLYLAVWSAAKHNPVIRSFYVRLRAQGKPKQVAYIACVRKLAVILNAIVRDGVPFQPASMSAA

SEQ ID NO: 299194 - protein, 355 aa, unidentified
MNSIKYIGLDVHTATISVAVLDAAGKFIMESVVETKASTILQFMQGLRGDLHVTLEEGTWAGWLYDLLKPHVTNIVVCDPHRNALLKEGSKSDRIDARKLAELLRAGLLRPVYHGNQGLRMLQELARAYVTIGKDLNRVMNRVKAIYRSWAIPCHGQSVYAPRYREEWLNKIAHHGVRCRAELYYQQLDGLVLLRKQVRKELLVEGKRHKAWKLLRSIPTLGPMRVAVLMAIIQTPHRFRTKRMLWKYSGFGVVTHTSADHRYVQGRMERSNKPVFVRGLDTNHNHQLKDLFKSAATQASTSTGPFREFYKALLAQGMREEMARLTLARKIAVITLTIWKKGVAFDANYLKSQTA

SEQ ID NO: 299195 - protein, 375 aa, unidentified
MKELIRIGLDTSKSVFQLHGVDAGEQPVLRKKLRRSRLLDFLRKLPRTRIGIEACGAAHHWGREFAALGHDVLLLPPQLVKPYVARNKNDAADAEAICEAMSRPRMRFVPVKSVEQQAALMLVGMRDQLIARRTQLSNMIRGHAAEFGVVAAKGHEKIKPLLTRIAAHEGVPELAKQLFATLGEDYAGVTARLGSIEAKLVTWQRGNEMSRRLAEIPGIGPIGATLLVMKVIDPKAFRCGRDFSAWIGLTPKDHSTAGKKRLGVITCAGDEALRSTLVVGATAVVQQINKGRGHASPWLIALAKRKPAKLAAVALANKSARIAWKLMVSGERYNSALAATAGRRAPLTRGSAARPTVAARRTPRNPSREAATIEA

SEQ ID NO: 299196 - protein, 344 aa, unidentified
MDQIIRIGMDTSKHVFQLHGVNAAEEPVLRKKLRRQDLITFFGKLPPTVVALEACGGSHHWARLLQSLGHQVKLIAPQLAKPYVKRGKNDAADAEAICEAMSRPTMRFVPAKTADQQAALMLVGVRDRLIRQRTQLINVIRGYAAEFGLIAPTGLCRVGPLLDRVKTDETLPALARELFEMQATEYAQLQARLEEIEDRLMAWHRAHEISRRLAKIPGVGPIGAAMLVMKTPAPEAFRSARHFAAWLGLTPKDHSTAGKVRHGVITRAGDEALRSVLVVGATAVIRQLRRGQCAPPSPWLVALLQRKPSKLVAVALANKIARIAWKLMVTGDSYRAPTSVSAAA

SEQ ID NO: 299197 - protein, 408 aa, unidentified
MGSPEWFVGVDWGNETHQVCMVDPEGKEVAQRSFRHGGGGLAEMVAWLRERCADVSRVGVAIEVPHGPVVDTLLDAGCQVFSINPKQLDRFRDRHTVAGAKDDRRDAFVLGNSLRTDVGLFRHLEPSEPVIVRLRELSRLHMSLTDDFWRKANQLREQLVRYFPALLELSPAADEPWLWALLEAAPTPAQAKRLSSKRLAALLKSHRIRRISGDDLRAVLAQPAVINAAGVTDAAAEHVLLTLPTLRQARDQLRECDRRLGKIVDELAADQQGHRDVSVLLSLPGLGKTLTAAVVTEAEGPLSRRDYRMFRSLAGIAPVTRATGKRSKQHAPVSMRRACNHRLRNACHHWAQGAVLFDAAAKTHYAELRGRGHGHARALRGVADRLLRIAFAMLRDQTDYVRQLPAAA

SEQ ID NO: 299198 - protein, 398 aa, unidentified
MGCFVGVDVGKSKHAYAVVDVAGAELASGEFTGTAAGFEKLKWVLLRFDVEGIGMEATGHYWRNLWHALGHAGYERRLLNPTATVYYRRMSLTKHKTDALDALCIARYLASVRPDGRGLGVEAQESLRSLARAQATIAEQITESVNRLHKQLDLSFPEFPKLVGRLDAPKALMLLEHYPTALLMGRARTLADKCYGQQNHRIGAPLAGRLQEVARNSFGCAQTSSDALLIRQSVSHIRLLHEQSKELIREMEVLVAEQDQDAANLLSVPGIAIKSAAAVIGEVGDISRFETARKLTGYIGAHPRFHDSGNKSGHARMSKAGNKRLRRILWQCTIVAMKHNPIIKAHYEKKLAEGKKKMVAIGHCMNKLIHIIWGVLTYHEPFDPNGGIRVQMVAQNAG

SEQ ID NO: 299199 - protein, 371 aa, unidentified
MMIIGVDYHPSFQQIAFLIEETGEYDEQRLNHEGGEAERFYRDLKGKGIRVRVGMEATGYSRWFERLLAELDFELWIGDPAEIAAKRVKKRKTDREDARLLLRLMREDRFPQIWVPSPENRDLRQLLWHRHRLVQMRTRIMNQLQALAMNEGKRWKSKLFSQKGRAEFEKLALGPWASRRRSELLELLDRLNPSIEELTTAVEQEVNKRPEALRLMTHPGVGPITALAFVLIIGTPERFARGKQIGTYVGMIPIEESSGGKQRLGHISKQGSSLLRYLLVEAAQAATRFNPHWRRRYIHLAMRRHRSIAKVAMGRRMAVRLYWMWRNGCDYSPSFEFGSYVGQLGNRHGGKYQHTVNMNEHPAPCKGSLKK

SEQ ID NO: 299200 - protein, 417 aa, unidentified
MNTPTSKSLPLDACGALLAFDWADKKHDYAFKLSNSQEVKSGVVNNTPKAVHAFISKLLESMDGKPVAVILEQSRGTLVHMLCQHQGLVIYPVNPLTVSNFRKSFAVSGAKSDQADAAIMLELLEKHHQRLRPLVEESTETRMLERLVKERRQATDERTRCIEQAQAVLKEYYPLALEILDGDLTTNMACAFLEKWPEFNSIKRSQSQTLRKFFYANRSRSETKILQRLEMKERAVALTDDRAVIEPSVYRVRRLVRQLRALNTSIAEMETRIDELFASHEDAQIFESLPGAGAALAPRLLVAIGTDRERWRDANHLSVYSGIAPVIAESGNLSITSFRWTSNKFLRQSFHEFANYSRQHSKWAGEFYRRRKEKGIKHNTIIRALAFKWLRIIYACWKNRVPYSAAIADRKFMRNAA

SEQ ID NO: 299201 - protein, 360 aa, unidentified
MRHQCAKLVFSKNHQEREPSMSEITTVGLDLAKHVFQVHGIDAEGTTVLRRRLRRNQVLAFFSRLRRCVVGMEACATAHYWARELAALGHEVRLMPAQYVKAYVKRNKNDAADAEAICEAVGRPTMRFVSVKTAEQQASQLLHRGREQLVRQRTMLVNALRAHLAEFGIVAAQGLRNVSQLIAIVRDNGNKHLPDVARQVLKVLACQIEQIEAAITALERQLLAWHKSNPVSQRLASIPGIGPIIATAIATSVADPHAFRSGREFAAWLGLVPRQNSTGGKPRLGGITKRGNRYLRRLLINGASANLLRSKATKADPWVIGLRRRRPPLVVAVALANKTARIAWAVMLRQNEYQPRAVAA

SEQ ID NO: 299202 - protein, 323 aa, unidentified
MEKSSTLYVGLDVHKDSIDIATADAGRDGEVRHVGSIGGSLAALDKSLRKLLSRGHRLHVVYEAGPCGFVIWRHLTALGTACEVVAPSLIPKRAGDRVKTDRRDAMQLARLSRDGSLTAVRVPGVADEAMRDLVRAREDAVREQRNARHRLKALLLRNGIAYAGKSSWTAAHLRWLATLKMAHPAQQIGFQEYLHGITESTARITRLEQAMRETLGDWTLKPLVQALQALRGVSLIGSMTLVGELQDFLRFEHPRKLMAYVGLVPGEYTSGEKRRQRSITKAGNSAARRMLVEIAWHYQHPARITPIIARRQAELPKAVTDIA

SEQ ID NO: 299203 - protein, 348 aa, unidentified
MAHFVGLDVSVEETSVCVVDDVGKVLCERKVRTEPEDIAVLLTSIGGDYVRIGIEAGPLSQWLVNGLIEADLPVVCVETRHMKALLKAQQINKSDRNDARGIAQMMRVGLFKPVHVKTLIAQEQRMLLTSRKLVQRKLMDIESDMRGTLRNFGLKVGVVSSIRYEARIRDLVEGFPRLAAIIEPLLTVRRVMRQQLATLHKLLLNAVRVDPVCRRFMTVPGVGPIVALTYRASVDQPHRFIHSRAVGAHIGLTPKRHQSGEIDYDGGVSKCGDSMLRAMLYEAAQSMLTHSKKWSWLKAWGMRVAQRRGMGRAIVAVARRLAVILHRMWVDGTDFRWRNGSTAVVQGA

SEQ ID NO: 299204 - protein, 343 aa, unidentified
MKIASIGIDIGKTTFHLVALDEHGSIVIRRKFSRKALLVYTAKLASSLMGMEACGGAHCLARLLRDQGHQVRLIPGQFVKRYREANKNDYLDAEAIAEAVTRKKLRFVPIKTEDQLDVQGLHRVRERLVHNRTEVINQIRGFLLERGVTFNRGPLSLRKGMPDLLEDAEQNLTPQLRSLLAHLWQEWQSLNSQIERIGAAIEEVAESDAACQRLRKIPGVGPLVSTATVAAIGNGAAFKRGRDFAAWLGLVPKQHSTGGKAKLLGITKRGNRYLRKLFVHGARAVLLRVKYDTGGFGQWVHRLAARAPRNKVIVAIANKLARIAWVVLASGNEYQHQPVAAAA

SEQ ID NO: 299205 - protein, 354 aa, unidentified
MPRSAETAVARTIGIDTGKNTLHMIGLDEKGAIVLREKVSRTRIAARFVNLPPCLVGIEAGMASHYVARELAGLGHEVKQVPPAYCKPFRQSHKNDFRDAHAVAEAVERPSTRCVPIKTDGQLDLQALHRLRSRLIGNRTAAINQTRGFLLEHGIPVRQGHHFLRQRLPQILATRTDVLSPRMVRIIGDLMTDWKYLDERIEGVTDEIEALAHADEGCQQLITVPGIGPIISSAMVAAIGNGAAFCKGRDFAAWLGLVPKQRSTGDRTILGRITKRGNRYLRMLFIQGARAVLLRPASWAKHGFGSWLTAATRRLHRNVLAVALANKLARIAWTVLAQGRRYEARVEPRVEAAA

SEQ ID NO: 299206 - protein, 346 aa, unidentified
MEHYVGIDVSLELLSVCVVDGRGKIVKEAKVASEPEALVYFLKELGFPVNRIGFEAGPLSQWLHAGLTQAGFEAVLLETRHVKAALSAMPVKTDRKDAFGLAQLLRMGWFQQVHAKSIGSQEIRALLVARKQLLGRLLDVELSIRGILRGFGLKVGQVTRKTFEARIRELVTGHTTLERIAEAMLSARATLKAQYEKLHKAVLAIVREDAVCRRLITVPGVGPVVAVTFKSAVDDPSRIAKSKAVGALFGLTPRKYQSGEKDVTGGITRTGDEMVRTALYEAANVLLSRITRFSKLKRWGMDVAKRRGSKRAKVALARKIGVILHRMWIDGTTYRWAEAKPIAAQA

SEQ ID NO: 299207 - protein, 312 aa, unidentified
MGIDVAKDSFVVAIRLEGKVTTTLYNNDKKGIQGFLKSLPSDSWCIMEATGVYSIQLAIALYEKGIKVSVVNPLQIKRFAQTKLKRTKTDQVDAALIAEYGERMQPKLYEPPTPFMRQLQQQRMSLKLLVKTKRSFLNQFHALTQLEAADKVALKACKTVLKSVEKQIVELEGQMQLLAEEHCQELFTLLQTIPGISKKSALELIIVSGEFKNFTSAKQFSSFIGICPCINESGTSIRGYRGISRMGDKNIRATLYMCSLAAKVYNKACQELYERMLAAGKAKKVALVAVMNKLLKQVFGIVNSGEVYCINN

SEQ ID NO: 299208 - protein, 358 aa, unidentified
MAGKVTETAVVGGVDTHKDLHVAAVVDQNNKVLGTQFFSTTRQGYRQMLAWMTSFGALKRIGVECTGTYGSGLLRYLQNAGLEVLEVTAPDRMERRKRGKSDTIDAECAAHAAFSGIRTVTPKTRNGMIESLRVLKTCRKTAISARRVALQIIHSNIISAPDELREQLRNMTRMQLIRTLGSWRPDASEYRNVTNVYRISLKSLARRYLELHDEIADLDVMIAAIVDELAPELIKRNAIGYESASQLLITAGDNPQRLRSESGFAALCGVSPVPVSSGKTNRYRLNRGGDRAANSALHIIAIGRLRTDDKTKEYVARRVAEGHTKMEAIRCLKRYISREVYTLLRNQNRQINSIPITA

SEQ ID NO: 299209 - protein, 311 aa, unidentified
MTDDTIGIDISKATLDIHRLSDGKTMSFSNCPAGFKALSRFCAKTAVARVVYEATGAYHGGLERALGAHLPLVKVNPLQARRFAQAQGVRAKTDAVDAKMLAEMGNAFALEPDEPASGIQHDLKELRAFRSGLIKDRTSIINRLKTQTLSITSRQSKARLAQVDKQIAEISAELDRLISSCDTLAHSMKILRSIPGIGAVCAATILIEMPEIGRLDRKQVASLTGLAPMARQSGQWRGKSFIQGGRKIVRDALYMPALVAMRHNPDLKAKYQALIKAGKPPKVALTALMRKLIELANALIKADRNWVKRGA

SEQ ID NO: 299210 - protein, 405 aa, unidentified
MRVVHERCCGLDVHKRTVVACVLTADGQQTRTFGTMTRDLIGLSEWLHLLDVNEVAMESTGVFWQPIYNVLEDTGMNVLVANARHIKAVPGRKTDVKDAEWLADLLRHGLIRGSAIPTRARRELRELVRYRLSLGRQRAQVAHRIHKVLEGANVKLSSVVTDIMGVSGRAMLEALINGTDSPEMIAELARGALRRKRTQLANALDGVVGPSQRLLLASHLRNLDFLTEEIDRLSSEIEEQLSPSQELLERLDTIPGVGERVAQAILAEIGTDVSRFPTGSHLASWARVCPSNDESAGKRRSSHIGPGNPWLRATLVEAAWAATHAKHTYLAAQYRRLAARRGHKRALIAVAHTILIIAYRIIRDGTIYEDLGSNYFDERDRRATLRRSVQRLERLGYKVTVEEAA

SEQ ID NO: 299211 - protein, 345 aa, unidentified
MTNRSKPDVEAFAGIDVSAREISVARLRSKEENPKFATFANSPSRHKALLAFLLEGTDRIRVCLESSGNYSLDLALALHAHRQVEVSVINPRRARRFAESLGERSKTDPVDAHVLCQYAIRMPWVGWQPPSSLALRLRAITRAIESLGVMLTQEKNRAHALGSSQALPALVLRERERHQRYLEHRMRQLRREARRLIARDSELERRFRLMLTVPGIGETSALQILGELVVLSDTMDARQWVAFSGLDPCHFSSGTSVEKRPRISRGGSRHLRHALYMPALVALCHEPHLRAFYQRLLSRGKKPLQAVVAVMRKLLHALFAMFRSNSSYDGSKLSPIELTTKVVAA

SEQ ID NO: 299212 - protein, 345 aa, unidentified
MKKVYAGMDIGSKECAAVVIDSKGKPVDSAVFKTSERNLRAFFSRHPASRVLVEECEMAAWVRATIKPCVALVTVCDPKRNAWVAKGGNKNDRVDAAKLAELNRLGSFSEVWHTDDQDIAGFKVLVKHYDDTSARLAALKCQIKARLRKQGVIARGEAVYGARRHEALCRVENTFVRIAIEQDYELLDYLVGAKAAARQSVIAASRRFPVTGKLQEIPGVGPILAARFVAYVGNPHRFNKRTLASYSCLGIVKRSSDGSPIGREHLSRAGNSALKDLSRTAFERAMATRKTNGIKEFYASSMARTNDKTKARLNTQRKILALMLAIWRDGTDYRDDLVTKAFTGA

SEQ ID NO: 299213 - protein, 372 aa, unidentified
MNYNTVYVGMDVHKESFTFCAYTIDAEKGSRFQRTEADYKNVLRYLEFLRTVYGNDANFICGYEAGCLGYTLYHQLTEHHVNCVILAPTTMLEQRRKKRIKTDKRDAEIIAKCLAQHNYSPVHIPTAADEETKEFLRMRDDHKLALKKVKQQILAFCLRHNYRYDGNSHWTAAHIKWLKSLKPEALYKEILDEYLLTYTALSDKLERLDKRIEELASKDEYKESVKKLCCFIGVKTHTALSVLVEVGDFHRFASAQNFASYLGLVPGEDSSGDGQTRLGITKAGNRHVRMLLTEASQCYARGQIGFKSKKLKSRQAGNSPQVIAYADKANERLRRRYYKMVLGKSKKPNVAKTAIAHELACFMWGMMTDHVA

SEQ ID NO: 299214 - protein, 398 aa, unidentified
MTESSDYESVQVFIGVDVGKDTHHAVAVNRSGNRLFDKALPNDENKLRSLISDLKQHGQILLVVDQPATIGALPIAVARSEGILVGYLPGLAMRRIADLHAGEAKTDARDAAIIAEAARTLPHALRTLKLADEQIAELSMLCGFDDDLAAQTTQASNRIRGLLTQIHPALERVLGPRLDHPAVLDLLQQYPSPEKLASLGEKKLATQLCKLAPRLGKRLAADITQALTGQTAVVPGTNAAVVVLPRLALQLITLRKQRDEVALEVEQRVLAHPLYPVLTSMPGVGVRTAARLLTEVACRAFASTAHLAAYAGLAPVTRRSGSSIRGEHPSRRGNKTLKRALFLSAFAALRDPISRAYYTRKMSQGKRHNQALIALARRRCDVLFAMMRDGTFYTPTAS

SEQ ID NO: 299215 - protein, 341 aa, unidentified
MKRFIGVDLHKNSFTVCYMQEGGEYGLKSFGVNTRSIEEFKKTLAKDDEVALESTGNAGYFTRQIEGLVARIRIINPVQFKVISESIKKTDEHDATVISRYLSKGLIPEVRMRSKEEAKLASLIGTRDKFVKLRTALKNKIHNILNANGIVTTKEMFNADKSLDRVLEMELDEGDLFELRVIIDEIKNLNKSIDEINKELTNRGKKLSGHSNLTSITGIGDITATILLNTIGDIGDFDDDKKLAAYIGIVPRVYVSNEMSHYGRITKMGNKIARTALVQSTLIAIRYNPYMRRFYLKLKTKKGSGKAIIATSRKLLTIVYRTLKNNWVFEDFNRFKLAVSI

SEQ ID NO: 299216 - protein, 337 aa, unidentified
MMYGGIDLHSNNSVIAIIDDADRVVAQKRLPNDITKIIGFLARWQDQLAGVVVESIYNWYWLVDGLQDAGMQVHLANTAAIKQYEGLKHSGDETDAQHLAHLLRLGILPTGTILPREHRALRDLARKRMQLVQSCTAHVLAVENIMARQLGGRITSNQIKRLTDDTIDSLPLAADVGLAIKANVAVIATLQSQIEVLEKRLQERVKPRPQYGLLTSVPGIGQTLATVILLETGPIDRFADVGNFASYARCVDSVHTSNRRKKGEGNVKNGNTYLAWAFVEAANFARRFCPEAKRFHERKKARTNNIVATKALAHKLARASYHILKEGKPFEAMRCFA

SEQ ID NO: 299217 - protein, 354 aa, unidentified
MQSPIIASPKLFIGMDIHKKSWSVHLRTDLFDHKGFTMPPQPQTLVDYVSTHFDGHEVSLTYEAGCCGFSAARHFLSMGWQVKVVNPSDVPRSDKQQYQKTDKLDCRNLCKQLQQDQLHGIYVPTEPEEQLRSLLRQRNQVVKQLRTIKSHIKGLLLFHGIHLPEQFDNPNWSKDFIAWLRDIPWSQSTGAASMQSKLRILELLNKEYLQTSNELRAWCRKNQGKDYYLLKSIPGIGGLVAAAILAEMGNIRRFNNEREFSNCIGLVPAIHQSSETDIKKGITPRCKALLRSYLIESAWVAIRTDPEIQAYYRKHVGKNPKNVIVKVAHKMCRRILSVIKNERPYQISYSKTVK

SEQ ID NO: 299218 - protein, 420 aa, unidentified
MNKEVRAWIGIDWADEKHDVSLYEVATGRQERLEVKQSPEALAEWIGQLRTRYGNAGQVAVVLEQGRGALLNVLMGCEFLVLYVINPKSLSCYREAFYGSGAKSDPVDAELMREMVRQNPERFRAWHPDDVLTRSLRLMTEGRRDLVNQATAVTNQLTALLKGYYPQALRWIGALDTHWACDFLDQWPTLQALQSSSRRQILRFYEKHPRHHLDLEQQIQQFHQTLPLTGDEAVLEYSTLMVQALIPQLRALLDSIDEFDRKIAEVFRKHPDRPIFESFPGAGAALAPRLTAAFGADRDRYAAASEMQQFSGIAPVTEKSGKQHWVHWRMACPKFIRQTFHEFADHSRRWSAWAKAYYQLQIERGKKHNAAIRALAYKWIRILFRCWKQRVPYNEQVYLASLLKHQSALLLKATPAVEKL

SEQ ID NO: 299219 - protein, 427 aa, unidentified
MAAREKVGEPEFVAFVGIDWADQKHVWCLQPANSRKREGGELEHKPEVVEAWVSELRQRFGHGAIAVAVEQVKGALVYMLGKYECLHLYPVPSTMSASMRQALYPSGAKDDPRDADLLLDLLLQNRDKLRRLTPDNEATRRVQNLVEERRKLVEEKTAQLNRLTGYLKVYFPQMLEWFAKLDTKLACEFLERWPSLEELQAAAPAEVRKFFRQHRGRHPELTEWRLQGIGQAMSAIRDGAVIEAKRMVVQVIARVLRTLLEGIAALDAKITEAAEAHPDFFIFQSFPGAGAALAPRLLAALGSHRDRYASAEEVQKYSGIAPVTERSGKKKWVHFRWACPKFLRQSFHEWAGHSIAQSVWARAYYQQQRQRGKDHHAAVRALAFKWIRIVFRCWQERAAYDENRYLAALAKRGSPLTSVVAAAAISM

SEQ ID NO: 299220 - protein, 341 aa, unidentified
MPNSTGFQSIVGIDIAKSVFQVYSCDTDTGVITNEKIKRDKLLERFTNVPPCLIGMEACGSSQYWARKLIALGHTVKLMDAKLVKPYVAHNKSDKADAEGIYHALMNGTRCVPVKNATERDIDALLTMRTRLVKLQTGDINHVRGLLAEYGQIMPCSRKQFLEKVDKCINSLEGDAVQPIIDEMRTAVSGIRDREMRISKISSTIGDLAQKTKHAAHLLTVPGVGIITMAYMCVLLADPTVYSSGRQFAAFLGLVPMHTGSGGKTITTHIPRRCNQQLRALLIECAHAVARAKYKTPWVKAILAKKPAKVALVAIANRIARQCWAVAAKGEAWKDLSVTAA

SEQ ID NO: 299221 - protein, 420 aa, unidentified
MGRLKIVYPVCCGMDVHRDFLIACIAATNAQGVTEYQSRRFSTYTGSLRELRDWLLANDCKDVCMESTGKYWFPVHNILEESCHVVVSHPKFVKAIKGKKTDKKDAQWIADLFKHDLVRGSFIPPKDIRQLRDLCRYWVKLSSYMTGEKNRAQNCLTVSNFKLDDVFSNVFGKSASAITTQLLEHPGEQFDVAPFVDGRCKTPIAQIQEAVDGIFTYEQAKKLKIIRGHMDSLERHKAELESLILEIAQNYLPQIELLLTVPGIHDAFTAIRILAEIGADMTVFDTSKHLCSWAGLTPQNAESAGKKKTTRIGKSGAYLKPLLIQVALAASRGEKHPEIYGKKQALQKRRGKKKAIVAIARRLLTAIYHILSKNEPYNPAAYIQEDKNPMARQISQEKAFEMLARMGFIVSNPSPLSSSG

SEQ ID NO: 299222 - protein, 430 aa, unidentified
MEIAKSPESLKEEVTIMSKTGKRMIVNSTAVIVGIDIGKYTHVAVALMPDGRFTKTLSLHNTREGYETLLERIRLWKDECGAGEVIIGMESTGHYWEVPARWLAGKELQVVLVNALHTKRAKEIEDNSPGKTDAKDSRIIAQLVRYGKYLNCVLPEGVMAELRELTRIRQHIVTELTQKRNYLRRLLDSVFPEIFTVFRKSWGKTFLHLARLYPLPEDLINAGLPAGAAKLKQSCRNLKIKKLERLHALAGSTVGVPVARGAYSSGIRNTAGRILTLQEEKARVEKQMENLLAEVPESRFLLSLRGVGVVSAAIILGETGGLCRYTSSKEVIKLAGLNLFEISSGTHRGRVRISKRGRPLLRHILFILATVQAKKGMPLNGEYRALIERKMPPVKALIALSRKLVRLFFALTRDQRCYTETLSAVTTKAA

SEQ ID NO: 299223 - protein, 412 aa, unidentified
MEGETVIAGVDTHKDVHVLCLLDGLGRKIWSGSFRADPEGYDRLAEAIGDPGSCLVVGVEGTASYGAGLTRRLAELGYNVVEVLRPKRDKARPGEGKSDPLDAERAARKAASGRGCSVPKSQDGWVEAVRQLYVARRLAVATSTSCVACAKSMLTTAPGALRERFRGCERPKDLMPLLARRRKAGDALEESVLASLRSVATVWKEARSQVESCDARIRALLEANAPALLGIEGCGTTTAAALVVAAGDNPGRLKGEAAFSMLCGVSPIPASSGKTERHRLNRGGNRQANWALYEIAIKRMAYDERTKRYVAKRTSEGKSRREAIRCLKRYIAREVYRVLMDPNPDGAAPEGPELAKMRKAMRVTQKQAAAGLGMSAASLGHLEHGRRRSTKLERRYYELLCELKGALPQTAY

SEQ ID NO: 299224 - protein, 369 aa, unidentified
MTGVGSRHRPRRDRKPVAASVDRPRVSQVLQSFLPFPDSCQGTSPYQQGRGTKMVTKTVEHCYGGIDVSMDRLDVMILPERRGFSVDNNAAGWTELIERLHGSPVAAIGIEPSGGYERGVIRALLAASLSVRRINPNKLRQFARARGVLAKNDRLDARLIAEYVAIMPTRIVQRDVAAERLAEVVTMRRQLCDERVTVENQAAHVEDAMLRRLNKRRLARLEADINLLDKRLAEMVAADPTLAQRYELLTSMPGVGPVLAFTLIALLPELGQMSRKQIAALVGLAPYDFDSGRLRGHRSIYGGRMPVRNVLYMAALSACRYNPALKVFHNRLAAADKKSKVVIVAVMRKMITTLNAMLRDRAEWQPKPA

SEQ ID NO: 299225 - protein, 365 aa, unidentified
MNKCHSNTELSSHEETRCQFNGGRCAIKLGIDVHQDFYVVVEQAGGSNPKPPQRFQKEAFLFWAARLKQKSGAQVYALYEACGFGFSLQRKLSALSIKCYVVCPQKLDEQNRRVKTDGLDAKALCLKLDRFVQGNRDALAIVRVPSEEEEQARAIHRQREQLVKARKQLEAQGRSLMVNHGLEPVQNWWKPRTFTALPMPQWMKELLANSQPILVALQQKIAALTVQLQNAASPDQPCGLGKMTSVIIDREIGDWKRFNNRRQIASYTGLCPGEYSSGNTRVQSCVTKHGNPRLRAALVELAWRLVRFQPNYHPVRKWRQILAKGAPATGAARKKEIVAVARKLAVDLWRIKTGRLNAEELGLIN

SEQ ID NO: 299226 - protein, 335 aa, unidentified
MEITTIGLDLAKHVFQVHAIAADGTVVLKKRLRRGQVYSFFAALKPCLVGVEACATAHFWARQLRELGHDVRLMPAQYVKAYLKRGKNDAADAAAICEAVTRPSMRFVPIKGEDQQAALMLHRARDLLVGQRTQLINAIRGHLAEFGVIEAQGPWNVPRLLAGMEEADLPDPVPGLVRLLASQLEEVELHIHEIDTQITAWHKASPVSQRLAGVPGIGPLVATAIVATLPDPTVFRSGREFAAWLGLVPRQNSTGGKTRLGRTSRQGNAYIRRLLVIGAQSALFCSKATKANPWIQALLAKRPRLVVAVALANKMARIAWALMARQTTYQAAAAA

SEQ ID NO: 299227 - protein, 319 aa, unidentified
MRKRTIEFDQVIERGCGLDVHRDTVVATVMGKGIQTETRTFGTTTSSLKELGEWLESLQVTDGAMESTGIYWKPVLHVLREYPLNLLVVNARHIKNVPGRKTDKVDSQWICKLLISGLLKGSFIPPENIQALRDLHRYKKKLVGIVASEKNRIIRVLEDANIKLSSVVSDTSGVTATNLINGLIEGRKDLEKLVSECYHRKLQSSPEEIVEAINGRLTPHLMFLLKSMQKHIQSVEEQIAEIDAEIEKHIKDFEKEIELLQTIPGVGKEGAIGIVAEIGVDMSVFPSEHHLASHSGMCPGNNESAGKKKVQEHDKGTNI

SEQ ID NO: 299228 - protein, 397 aa, unidentified
MYIVGIDIAKRKHEAAVIDGEGAVIIKPFSFTNNCSGYNRLLAMLTKAKLPLDEVSFAMEATGHYWLALFTRLQKEGFRVQVINPVQTNSIRSFYIRQAKTDPRDALLIAEVIRFGHFSESTLHPENIYELRELCRGRHAIVSMQADVKRKVVALLDQVFPEYETAFTNLFGDTSMAILQACPTPKELSEMPLEEFCHLIEVPSRKRFRTEKAQELQALARNSFGFAMAGGVFSTMIRLYAKHLDFLKQQVREMDRKIAEIMDTLDTPITTITGIGPTLGAYILSEIGDISRFSSAAKLAAYAGIDPTMRQSGEYNGVRNRMSKRGSPYLRHAIWLAASSAVLHDPALKLYFQKKRDEGKPYMASVGHACRKMVSIIYAVMRDNKAYTPYIPNEISA

SEQ ID NO: 299229 - protein, 454 aa, unidentified
MQPKGFLGIDVSKGYADFLLLDEKKAVIEEGFQLADNQEGRQQLKVLIEQWMRQGMEELYCGVESTGGYESNWYKFLRGVAVKGKVNVARVNPRGVKALSDAALKRTITDAVSAENIAVYLMSFPEKADYGKHNQQEAEGKFKEGRQHYTYIRMQLKQKVQLNNQLEKLLYQNFGEMMVYCRHGMPGWLLRMLIKYPCATAVLKAGRAKLSAIQGSSADKAEALLKKVEHCTETISEQTKHVIAVTAKEILHKEEVIKEEKAYLARMHEQDQEVQLLNSIKCIGMDSAVGLMMEIEDVTRFNDAKKLSSYFGVPPLFKQSGDGTWGTHMSKQGRSEVRAILYMTSMSGIRCNPILKPLYARFRAKGFSHYQAMGVVMHKLLRIIYGVLKNKTKFNAAIDEKNIQQAAERQQQKNQEVKEGKKTAELKKHRYQSLSTEAPISRRNAQKRKKQIAS

SEQ ID NO: 299230 - protein, 316 aa, unidentified
MPSTESFVGIDVSKKTLDVAVMPDGARWTFSNDEQGVTELLACLRENPPTLIVLEATGALEGLVTSTLVTAGLPVAVINPRQARDFAKATGKLAKTDSLDARVLAQFAQSVRPHPRPLNDALTENLKQLNTRRRQLVEMLVAEKNRLTRASTQTREDIQAHIDWLEKRLKEIEGKIQKCIKNSPLWKEKDILLRSVPSVGPVLSSTLLSPLPELGTLNSRKISALVGVAPFNCDSGQFRGHRRVWGGREHVRLALYMATLTALRYNPIIKAFYLRLRSTGKKPKVAITASMHKLLVILNAMMRDGSPWNPNHLVSH

SEQ ID NO: 299231 - protein, 398 aa, unidentified
MTESSDDESVQVFIGVDVGKDTHHAVAINRSGKRLFDKALPNDENKLRSLISDLKQHGQILLVVDQPAAIGALPVAVARSEGVLVGYLPGLAMRRIADLHAGEAKTDARDAAIIAEAARTLPHALRTLKLADEQIAELSMLCGFDDDLAAQTTQASNRIRGLLTQIHPALERVLGSRLDHPAVLDLLQRYPSPEKLASLGEKKLAAQLCKLAPRLGKRLAADIAQALAEQTVVVPGTNAAAVVLPRLALQLITLRKQRDEVALEVEQRVLAHPLYPVLTSMPGVGVRTAARLLTEVACRAFASAAHLAAYAGLAPVTRRSGSSIRGEHPSRRGNKALKRALFLSAFAALRDPISRAYYTRKMSQGKRHNQALIALARRRCDVLFAMMRDGSFYTPQAS

SEQ ID NO: 299232 - protein, 387 aa, unidentified
MPQPNDLSRSLVALDHDSTIIAVVEMSQSSWLVAGMLPGIERQPRKKLEPSAERLLGLLHRWRDEAVKAGRKITRIAVAFEAGRDGFWLARWLEARGVEAHVIHPSSVAVSREHRRAKTDRLDTELLKRGFLGWLRGERGHCTMARVPTIAEEDAKRPNRERECLVGERTRIVNRMKGTLARLGIRNFKPTLRKAAERLGTLHTPEGSALPPNVSAELQRDIARLGFVISQIKEIEEARQERLEQEPETGPHAMVRHLARVVGVGIETADMLVNEVLSRPMRDRKAVARYAGLTGSPDESGAKRREQGLARAGNARVRRGMIQLAWRFLRFQKESALARWYQARTADSRAGTRKTMIVALARKLLIALWRFVTTGETLEGVILRPAG

SEQ ID NO: 299233 - protein, 356 aa, unidentified
MSRDIKYIGMDVHKEATVIAVLNGSGKLVMESIVETKASSILQFIHGLRGELHVTWEEGTWAAWLYDLLKPHVHQVLVCDPRRNALLKEGNKSDKVDARKLADLLRTGMLRPVYHGEHGLRTLRELGRSYQTLGQDLNRVMNRIKALYRGWSIPCAGTQVYAPRYREEWLHKIEHAGVRRRAELLYQQLDGLQALRRTLRPELLAESRKHKASKLLRQIPCIGPIRAARLIALMQTPHRFRSKRQLWTYSGLGIETRDSAQYRYVHGQLQRSKKPQQIRGLNRNHNHEMKEIFKGAATRASCGVSPLRDFYVALLAKGMKPEMARLTLARKIAAVALTLWKKEERFDAEQLKPQAA

SEQ ID NO: 299234 - protein, 341 aa, unidentified
MNYYAGIDVSLECSSVCVVDASGKVVREDVAASEPKALIAWFGSLGFEVTRIGLEAGPLSQWLYAALRDAGFAVELLETRHVRDAFKAMPVKTDRKDARGIAQLMQLGWFRPVHCKSIAAQETRAILNARKLVQSKLHDVEMSMRGTLRGFGLKVGRTTPNRFAARINELVDGHPTLQVIATSLLAVHAVLLREFKGFEKRVRMMARDNEPVRLLMSTPGVGALVALTYASAIDDPGRFKSSKQAGAHFGMTPKKYQSGETDITGRISKIGDKGVRTALYEAAHIILTKPVKGSGLKSWAARLAKRVGMNKAKVALARKLAVIMHRMLVDRTPFNPAAAAA

SEQ ID NO: 299235 - protein, 341 aa, unidentified
MKPELSVVGIDLAKSVFHLVGMDERGTIILRKRLARGEVMPFMAKLPRVLVGMEACGGAHYWARQLREQGHEVKLMAPQYVKPYVKTNKNDLRDAEAIAEAVTRPSMRFVPIKNVAQQDLQALHRVRERLMGARTALVNEMRGLLAEYGIVLPAGINVFRNALAAKLEAEQAKLTPLSQELFGKLCAECKKVEAEVAYYDEKLQAIAATHPESQRLLTIPGIGPITATALIAAVGDMGGFTNGRQFAAWLGLVPKQHSTGGQTRLLGISKRGDSYLRKLLIHGARATLRWARTKTDSRSQWIRGVLERRGWNRTAVAVANKNARIVWALLSRGGVYGESTN

SEQ ID NO: 299236 - protein, 386 aa, unidentified
MQYPSDTSRCLAALDQDTTLIAVIEMSLSTWLVAGVVPGIERQPLKKLAADEHALLKLLHRWRCEAAKAGHKVTRIAVAFEAGRDGFWLARWLRAHGIEAHVIHSSSVAVPREHRRAKTDRLDTEMLKRAFLGWLRGERDHCKTVAIPTLAEEDAKRPNREREGLVGEAGRLVNRMKAVFVRLGIRGFNPKLKKAAERLDALHTPEGEPIPPNTVAALRRDMERLRLVREQIRQIEAARQERLQSAPGEGAHAMVRLLASVRGIGIETADMLVQEVLSRELRDRRAAARYSGLTGSPDESGRRRREKGLAKAGNPRVRRGMIQLAWRFLMFQKNSALAQWFHLRTQNAPRTRKTMIVALARKLLIALWRFVREGVVPEGLLLRPVG

SEQ ID NO: 299237 - protein, 348 aa, unidentified
MIIIGVDFHPEFQQIAWVDTDTGEFQEKRLVHPEEAENFYRALAGKKVRVGMEASGHARWFERLLSELQFEQWIGDAAVIHSKRVRKQKTDRQDAQLILQLLLEDRFPQIWVPSWENRDVRQLLWHRHRMVQARTRIMNQLQAVALNEGLRCKKRLWRERGRQQLESFRLAPWASRRRQDLLELLDRLNPTIAELTQAIEQEAEKCPAAQQLRTHPGVGALTALAFVLIIGEADRFHCGKQVASYLGLVPLEDSSGKRRRLGHITKQGSSILRFLLVEAAQVTVRSIPEWRTKYFHLALRRGRKIAKVAMARRLAIALYWMWRKRWDYEQVKKFGSHAGQPENRHGVK

SEQ ID NO: 299238 - protein, 344 aa, unidentified
MIIIGIDPHKSSITAAAIDSSGCRLAVRRFIVNAGTARQLLGWAAQWPERRFAIEGANGLGRGTAQILVAHGEAVVDVPSTLAMKVRVLSTGGGRKSDPADAFAVALTGLRQESLRVVVAEDQSTILRLLAERREDLGHERARLLNRLHRLLRELLPGGVEPGLSADKAAAALRTIRPATATDAVRRELTKELLADLRRIDSSIKSNEAQTRTALDASNTTLQEIPGIGVVLAAKLLGHVGDITRFPSASHFASYTGTAPLEASSGNHNRHRLNTGGNRQLNSVLHTMAVCQSRDPGPGRDYYLKKIAEGKTPREARRALKRRLSNVLYRQILHDHHHAEKTAA

SEQ ID NO: 299239 - protein, 387 aa, unidentified
MRPISQTTTQKLSHCRRDDATLYASLELSQATWLVTALSPGSERMSKYSTPGGNGAALLGLLRRLQARAEQITGGPVAIVVIQEAGLDGFWVHRLLNANGIESHVVDPASIAVPRRRRRAKTDAIDGETLLRTLLAWQRGEPRVCAMVVPPTPEQEDRRRTSRERAVLLRERIRHVNRIKGLLASQGITDYEPLRKDRRARLAALKTGDGQPLPLRLKAELLREIELIELLIRQIAEVEVERDTVELDAEGNQSPVALLARLKAIGPQIAAVLYLEGLYRSFANRREVAAYAGLVPTPWRSGTIDREQGISKAGNRRLRHIMIELAWLWVRHQPDSALSRWFRARVGTERGRIRRIAIVALARKLLIALWRYVTHGEVPEGAVLKAA

SEQ ID NO: 299240 - protein, 457 aa, unidentified
MSQRKRKTRKSKIHVNNLPQHLRHINLSAAGIDIGSDRHLVAVPEGSDDVSVRQFGAFTSDLHEIADWLDKCGVTTVAMESTGVYWIPLFELLEQRGFEVKLVDARHVKNVSGRKSDVLDCQWLQQLHTYGLLQGAFRPPDEVCILRSYARQKEMLTQASSMHIQHMQKALQQMNLLLHNVVSDITGVTGMNIIKAILAGERDPNVLSLNRQEGCRNSKETIAKSLVGNFRDDHMFALKQAVELYETYQAKIAECEQALIKHLGTQPNVTDDQPPESGKHVRARERMRADVDVRVKLFKMTGVDLFAIPGLAADTLLTLASEVGFDMTPWKSDKHFTSWLSLCPGTKVSGGKKLHRRNKRNANRGAQAFRMAASSLARSQTALGAFYRRIRSRTDGRRAITATAHKIARIYYSMLTKGTSYVEAGQQAYDQMFKERRINALKKQAHSLGYHLQPCES

SEQ ID NO: 299241 - protein, 425 aa, unidentified
MNSNTNEKINQVSENTLVIGIDIAKHKHFACAVDDRGRELQKSFPIFQSRIGFEAFYERLLALKAIHEKQEILVGFEPTGHYWMNLAAFLMNYGIPFVMVNPMHVNRSKELDDNLQTKNDQKDALVIARLMRDGRFSYPRLLTGVEAELRNGATLRTKIQEDLNALQNRLIRWLDRFFPEFTQVFKNFGKMAYAALEMTPLPSDIKGKSPEELLFLYRQVDGMKSPQLPKAKQLVEAAENSIGLTEGLVMARYEIATLLSQIKLMQAQLDELTIQLTELAKQMTDYDYIASVPGIGDITIVDLLSEVGSLTQYQHPRQLIKLAGLTLRENSSGKQKGQKRISKRGRRKLRALLFRVMMPLIKHNRAFKQLHEYYTTRTFNPLRKKQSIVVLCGKLLKILHALCKKKRLFNEQQMMNDFATLKATA

SEQ ID NO: 299242 - protein, 311 aa, unidentified
MAQQDEFVGIDVSKSDLDIAIGPEGEKMNFPNDRQGWAEVVRHMGPRKVRAIGLEASGGYERGLLNALLDAGLPARRVNPLRVRQFAKACGIMAKNDRVDAVVIARFIATVPQRAVERNPAAEAMAELATARRQLCEELTRAQNQAEHARQTIVKRMAKRRIARLKGEILVLDKALAQTVEADEQLTHKNALLRSVPGVGPVFAHTLLGLMPELGSLTSRQAGSLLGVAPFDFESGAYKGQRRIYGGRQAVRDVAYMAALAAGKSNPVLKAFRQRLTEAGKRPKVILVAIMRKLISFLNAILRDNQPWAHN

SEQ ID NO: 299243 - protein, 376 aa, unidentified
MSNFSNIYVGLDVHKATIAVAVARAGRDEVVYHGDIENTPKAVRKLVQRLSATGEVLNVCYEAGPCGYGLHRELTALGHECEVVAPSLIPRKAGDRLKTDRRDALMLARLHRAGELTPVWVPDQEQEAIRDLTRAREDMKGLELKARQRLGAFLLRHSRVYPGKSRWTKAHYRWLEQIKFDVPVQQIVFQEYVEAVKEAQRRVAALELQMREALPQWSLGPVAEALMALRGVSLITAMTTLAELGDLTRFDSPRELMGYLGLVPSEHSSGGTRRQGGITRTGNGHVRRVLVEAAWNYRFPARKTRCIEKRAEQTSERVQAMAWQAQKRLCGRYQSLMRAGKEKNQVTTAVARELAGFIWAIACETAGKAHGSKALA

SEQ ID NO: 299244 - protein, 408 aa, unidentified
MYMQSVIAFDVSMGKSYMVIYNAARSCIFEGEILHNRPHFEQLNKRIIDLVQKDGQVPAIVFEATGVYSRPLERFMNDHGFPYCLLNPLESKIQTATMRIHKTDKSDAHRLAQTHFTTERRIKKPQDHYFDQMRALSRYYHELDEELAMLRSRMHTLLQLTFPEMELLFTQKSELFLNILQLFPHPDYVKNLSKTVVRNRLLANTDKKLAPKTAEKKAIQLIGAAQDSYPAVDQDDIRCEQLKDYAKRSLAILRKREELIQQMVVLSEERNEYQILISIPGIGKNTAVRLIGEIGDMTRFENHKQLNAYAGIDIRRFQSGTLFYKDKINKRGNSHLRKILYFTIQNMIRQRRFGHNHFVEYYDKLKTQPYNKCHKVASIACVNKLLKCLFHLITHNLTYNYEIASVSS

SEQ ID NO: 299245 - protein, 324 aa, unidentified
MRLPILGIDIAKLKFNLCLINTNGKLKHKVLPNTSTGFEQLREWLTKQGVERVHACLEATGSYGEALALSLHEAGHTVSVINPAAIKAFAQSRLSRTKTDRVDAELIARFCLAQAPPAWTPLPQEVRELQALVRRLESLIEMRVMEENRLSSIITVETVRSSVEAHLSYLNQEIKRTEELIHNHIQNHPGLKQQSQLLDSIPGIAETTAALLLSEITDIRQYRSARQVAAYAGLVPRERQSGSSVRGRTRLSKIGNARLRRALYFPAITALRCSPFFQSWAKGLQARGKSKMSVICAVMRKLVHVAYGVLKTGKPFDLEWAKTA

SEQ ID NO: 299246 - protein, 427 aa, unidentified
MTSTPPPLAFAATIGLDWADKKHDLWIQAAAGGKPEHLVIPQTPEALHEWVAQVRARFVNERIAIAIETSRGAVISALGAYDFIVLFPINPGMLCSYREAFCVSGAKDDRTDAMLLEEYLRLHAVKLRPLEPDTELTRKLAALVENRRGLVDERTRLVNQLHSLLKTYYPLMEVLFEDMTSPLAAHFLLKWLDLASVKKAGSATLRKFFYGHNCRSDKALEERLQAIEKAQPLTKDPALIEPAVLKAQALAGMLKVLHQSIELMETRIEQTTDAHPDAAIFRSFPAAGPTMTPRLLVAFGTNRDRFASAQEAQQFYGIAPVKKQSGQSKVIHMRHRCPKFGRQTFHENASHAVRKEGWTKSCYERQRARKKGHHAAVRSVAFKLMRIYFSCWKHQKCYDANLYEKALEKHGSPLASLLKNPAPAVGE

SEQ ID NO: 299247 - protein, 338 aa, unidentified
MTCYSGIDLHSTNSMVHVSDEADRVLYQRRLPNELGKILAALEPHRAQLAGVVVESTYNWYWLVDGLQAAGYSVHLANPAAIKRYEGIKHGDDETDAAYLAHLLRLKILPTGYICPPAERAVRDLARKRSQLVRTRTAQMLAVENGFARETGARLSSNVIKRLETVELGEFGLGEDVTCALAASVAVIQALNAEIGKLEARLRQRVRPRAQYRWLITAPGIGEVLATTIMLETGAIERFAAVGNFASYARCVDSKHLSNGKKKGEGNVRNGNKYLAWAFIEAANFARRYCPEAKRFHERKRAQTNAIVATKALAHKLARACYHMLKEGQRFDVKRCFS

SEQ ID NO: 299248 - protein, 322 aa, unidentified
MRYIGIDVSKATFVVAYSSDKGGEIRTFNNTTTGIKQFIGALPKDSSIHCVMEATGNYSAMLLYLLNVAGIAVSMENPLKIKNFARAMLSTVKTDKIDARLIALYGEKMNPQPFKIQGEAILRLRQKRTVIRQLTKQITAMSNLRGSLAYLPVPDKGATHTVDETIEFLEKRRDRLQSELTDLVEVEFSRQLALLTTIKGIGITLATALIITTGGFTYFQNAKQVSRYLGICPTYEQSGTSVNIRGHINRNGDAYTRGLLYVAAWTASRFNTKCGETYTRLRQNGKPGKLAMIAVANKLVRQAFAVVTHDKEYVDGFVSNRP

SEQ ID NO: 299249 - protein, 343 aa, unidentified
MGEVITIGLDIAKSVFQIHGVDGDGAVVIRKRVSRGKGLEFFADLSPCLVGIEACPTAHHWSRELQSLGHTVKLMPPSYVKAYLKRAKNDANDAAAICEAVTRPSMRFVATKSKEQQGALMLHRTRQLFVRQRTMLSNAIRGQLAEFGIIAPVGRLGFARLLEMMDGPEELGVPKTAWVCLMGLAEQYQRIQGEIGKLEQCIQAWHRSSELSRRLEEIPGVGPIVATALVGTITDPHAFASGRHMAAWIGLVPQQNSTGGKDRLGGITKQGNRYLRWLLVAGAMAVIRYAQKHGTAKRPWLARLIERKPTKVAAVALANKIARIAWVIMARGERYRGPAPLAA

SEQ ID NO: 299250 - protein, 367 aa, unidentified
MQDSTIWMGLDVHKESVTAAILEGESSDVQVVKLSSDFNKIRRLFRRLSSRGHVQSCYEASGAGFVLHRALKDHGYSCEVVAPSLIPRKPGDRRKTDRLDAIGLAKLYRSGHLTPVKVPDAEQEAVRNLVRLRLSYRKQLKSTKHRICGILYSQGLVFRGGKSYWTQKHRAWLAELRSTLTGAIGTSIVIELEHLEYMEAQLQALDAEIERYAQRPPYRETVEALQCMRGIKTLTAMTLTTEIGDIRAFRSPRQLMAWVGLVPSERSSGEREKRGPITKAGNSHLRRILVEAAWNNRSKAGAHLILNRRRQGQNPEVVAIAVKAQHRLSKRFWHLMHTKHPNVAVTAVAREICGFVWAIMKAAPQTV

SEQ ID NO: 299251 - protein, 476 aa, unidentified
MARTAGLNRKQRKALARQLRSDDPGLEVMHPHAAGIDVGNSAHYVAVRPDRDPDSVRRFECFTADLHRLADWLQRCGVTSVAMQSTGVYWIPLYEILDARGFEVYLVNARHTRNLPGRKSDVQESQWLLKLHTYGLLRNSFHPPADIRVVRTFWRQRGDHVQAVSTCIQRMQKALTQMNIQLANVISDLSGWTGQRIVRAILAGERDPVKLAALRHPGIHATPETIAKSLEGTWQPDLLFVLQQEVAMYDAYQQRIAECDQQLEQHLKGFADKAADTAADGEPSPTPPQRQLRSGPKRRRKAGSHAPQFDLGRELHRITGVDLTRIDGIDVGVAQTLISEVGLDMTRWKTEAHFASWLGLCPDNRISGDRVLRRGTRHVVNRAATALRLAATTLLRSQSYLGAQYRRLRTKLGAPKAITAMAHKLARLVYRMLTWGQEYVDKGLQYYEDRHRDQQVQLLKKRAAKLGLQIVELDAA

SEQ ID NO: 299252 - protein, 462 aa, unidentified
MQDSQKRQSSSGNRREIEGLPVIRRRIAGIDIGSERHWVCAPTIEESGREVADFGATTPELIRMAKWLKERNVESVAMESTGVYWIAPHEVLEAEGLEVMLVDTRQLARVPGRDKKTDPVDCEWIQRLHSCGLLMGSFRPQEAVCMLRTLVRDKGNLVAEAGDWLRRMQKSLDQMNVRVHRAVADLQGATGMAIVQAIVEGERDPRKLAKLRDHRCHKSEAAIAEQLSGHWREDHLFSLRQALKMYHSILERISDYEQELLKKLAAMEREECRGQEAPKVNNPQKAHAIRRRGEEPMRHALYRMSGVDLTGIDAIGVATVEVVLTEYGPDMSRFPTEKQFISHVTLAPHRPTSGGKPVKKKKRNSASTRVAAALRMAALSLRHSDTALGAYYRNIARRKKGDVAVFATARKLATLIYRLLRWGQPYVDEGAQAYERRYQQTRIRGLMARAKELGYQLTPTTA

SEQ ID NO: 299253 - protein, 404 aa, unidentified
MNAVGIDVSKGYSTVAILRPFGEIVASPFEVTHTNSELSELAGKLKSLNGETKVIMECTGIYHLPIACALQEAGLIVCTIHAQLIHDFGNNTIRKGKTDKIDSLKIANYGLTHWLNLPEYIPEDEIRHMLKAFNRQYNKYIKIKITLKNNLISILDQTFPGANELFTSPPRKSDGHEKWIDFAAKFWHCKCISSLSQKAFTDQYRKWCRRSGYNFSESKAEDIYIESLGHFNVMPKNNTTKLLITQAIMQISTIAESLAVVAREMQHLASLLPEYPVVMDFRGVGDILCPQLMAEIGDIYRFKRKESLVCYAGLDVPPNQSGTFESRNMGISKKGSPHLRKALFQVMDCLLKHSPSDDNVYQFLDRKRAEGKHYYSYMTAGSAKFLRVYYARVKQYLDKLCDEA

SEQ ID NO: 299254 - protein, 353 aa, unidentified
MKPKTDFSTASLAVIGVDIGKEVFHIVGLAVDGKIAFRKKVRRLGFEDAFEKLPPSIVGMEACLSAHFVSRVLRRLGHEPRIIPAIYVRPFVKGQKNDYNDAEAIAEAALRPNLRAVQEKSQDQLDLQACHRVRSRLVSRRTATINQIRAFLIEQGITVRSGARALRNSLFAILENRRDEISPRMASLILGLYEDWCQLDKRIETITSAIEELSQVEPKCQRLMSVPGIGPIIATGIVAAVSMGEAFERGRDFAARLGLVPRQHSTGGRSVLGRISKRGSKYLRTLFIQAAKVLLMRPHNWPRYSFGAWLTAAASRLHKNKLAVALANKLARIAWSVLRNEKAFDTHLEVAAI

SEQ ID NO: 299255 - protein, 362 aa, unidentified
MTGQRTSVGLDVHARSVVGRGLDEHTGEVLAARLTPAHEDVIGWLRSLPGPVRATYEAGPTGFGLARALEAAGIDCVVAAPSRLLRPSGERVKTDAKDALHLAQLLAVGQVTAVTVPDEETEAARDLVRARDDARGELMSTRHRVTHLLLRQGIVYSSGTPWTGIHQNWLRSQHFGRPALQLAYDAALAALAAAEDRRDRLDEAITQLADGSRFTPIVDRLACLRGISTLTGFGLAVEIGDWSRLAPATIGAYLGLVPGEHSTGENRMQTGVTKTGNSHARRLLIEAAWHHRPPYRPSARLQRRWQHASGAVAAHAAKGNRRLHARWRAFDARHKRPVVANTAIARELAGWCWALAVMNPDN

SEQ ID NO: 299256 - protein, 360 aa, unidentified
MERVIERCCGLDVHKKTVVAGVRVPGGTGGRDQHVRTFGTTTAELLALRDWLEAYGVTHVAMESTGVYWKPIFYVLEDAFTCVLANAAQIAQVPGRKTDVRDCVWIAQLLEHGLVRGSFVPPVPIRELRDLTRYRKALIHEHTREANRLQKGLEDAGIKLASVASDVLGVSGRAMLDALLRGTTDPDVLADLARGKLRKKLPALRQALAGRFRPHHAFLVSQLLAHLDYLDEVIETLSTHIAEVIAPFAEEVSRLDTIPGVNRRTAEVLIAEIGVDMGVFPTAAHLASWAGLCPGNNESAGKHKSGKTRKGNRWLRGALIKPSWPPAPDRRRAPSRLGIGALCGIAAIRRLSSPWRTRCS

SEQ ID NO: 299257 - protein, 344 aa, unidentified
MQYYVGLDVSVNETSVCIVDKAGKVMREVKVATEPVAILAVLTEEALAIERIGLEAGPLSQWLYSALAEAGLPVICVETRHMKAALSAQINKSDRNDARGIAQMMRVGLYRPVHVKTMASQKRRMLLTSRQLLQAKAIDIENDLRGTLRNFGLKVGMVGTVEFEARIRELVADHPDLAAIVEPLLIARRVLREQLGVLHRQLLEIVRQDEVCRRLMTTPGVGPVVALTFRATVDVPSRFKNSKAVGAALGLTPRRQQSGEIDRMGGISKSGDAMMREMLFEAALVLMTHRGMWSWLKAWGMKIARHRGMKRAIVAVARRLAVIMHRMWVDGTEFRWSRKEAAAA

SEQ ID NO: 299258 - protein, 485 aa, unidentified
MATHRMSTFERLESGRLNRKQRRELGRKVAAADPGLTIVHANAGGIDVGNESHYVAVPPDRDPDPVQEFGCWTAALNQMAEWLKSCRIDTVAMQATGVYWIALYDVLEQHGIRVVLANAQHTKNVPGRKTDVQECQWLMKLHTYGLLRDSFRLAREMEGVRTIWRLRDRHVKEAGRAVQHMQKALTKMNIQLANVLSDINGLSGQQIIAAILKGERDPWKLADLKHYSVKASRDEVARSLEGNWREDVLFELQQAVDSYHFAHRQMLECDGKLEGYLASLPARMLDIPAQPEDTLAATPKKKTKKMRKPSGNQPHLDLKTELKRICGVDLTSIDGIDVMTALTIVSEIGTDVSRFQDETHFASWLGLTPAKDVTGGKTIGRGKRKVKNRVAVALRTAATTLFKSDSYLGARYRSLRRQLPSFASAVKAMGRYLAVLIYRLLTKGEAWVDRGTMQFERRRTELELESLTFKARVKGFKLIPITEPG

SEQ ID NO: 299259 - protein, 356 aa, unidentified
MTNAIPMDVIIGVDTHKDVHAAAAISGAGVHLATTTVPVSSKGYGELEAWAKSMGAVQAFGIEGTGSYGAGLSRFLRERGHTVVEVNRPNRQLRYQQGKSDAVDAESAARAVLAGQAVGQPKSGTGAVEMIRHLKIARDTAVKARTQAMQTLKAIIVCSPDALRERLDQISGKMTLLRRLVALRPGPLTSTLASAKASLRAIARRWLVLDAEIKQHDAHLETLTATRAPELMEAHGIASGTAAEMLLLVGDNPERIHSESAFAKLCGACPIPASSGKTIRHRLNRGGNRQANAALYRVVIIRMRGHQPTLDYVRRRTAEGKSKSEIIRCLKRYVAREIFGYLCTKPALADAAATSS

SEQ ID NO: 299260 - protein, 411 aa, unidentified
MDTLHPRCAGLDVHKDTVVACVRHAAAGGRATEQVRTFGTTTAGLLALGDWLAEQGVTHAAMESTGVYWKPVWNLLEGRLALLLANAQHIKNVPGRKTDVRDCQWIAQLLQHGLLRPSFVPERPQRELRDLTRQRAQLVADRARVSNRIQKVLEDANVKLGSVASDVLGASGRDMLKALVEGKMDAAAMAELARFRMRAKIPQLREALAGKVTDHHRFMLRQLLAQVEGLDAQVAAFDARVEAVMTPLEREAVARLDGMPGVEVRSAQVIVAEVGTDMGRFPSAGHLASWAGLCPGNNESAGKRRTGHVNPGNPYLRATLCQCALAAGRTKGSYYSSQYRRIAARRGRKRAALAVAHSQLVAAYHIIGGAEHKDLGADHFDKLAPDRLKRNLVARLEHLGFKVNLEEKPAA

SEQ ID NO: 299261 - protein, 427 aa, unidentified
MYRIAGIDVHKKKLAVVVSDVEVHGEHKFERCWFGANPEQLRFLSQWLAEHQVEEVVMESTALYWQPVWGALERYWPPICQKREGASATSGILHLAQAQSNRGPRGRKKDFRDAERLVKRLVADELKLSFVPDREQRLWRTLTRRRYQLKRARVQLQNQLEALLEEAHLKLSSLVSDLLGVSARRMLQAIAEGENNPETLAGLADRRLRATPAQLSDALGACTELHPVYRRLIKMMLGEWKVIEEHTAELNQELATLLRPHQDAVERLAEVPGLGVDSAQQILAEVGANAAVFASEKNLCSWVGVCPGDEESAGESSSHRSPQGNRQMRRLLNQAANAAVKTKGSIFEIVYRRLVPRLGHNQTIGAVAHRLCRLIWLILRKGVRYEERGPAVSQRSRQNRTSKMIRELRGLGYRVEFLNAVPSNPMS

SEQ ID NO: 299262 - protein, 394 aa, unidentified
MCQHYQTEASMIKHNILFIGLDTHKTFTEVAYIEDQRGAKSTHLGKILSNKAAFKKLARQLQSKYPDATLHFVYEAGPCGYWIYRFLTSLNHCCYVIAPSLIPKKPGEKIKTDKRDALKLAKLLKSEDLTPIYVPEPEDEAVRDLSRARETGMKDLKDAKYQLKALLLRNNINSKIKDNWSLQYLRWLAELVLPHPCQQIVLQESVSTITERLKRLKRLDNELTHQVKNWRFYPVVKAIQALRGVRLLVATGVIAELGDLSRFDHPRKLMSYLGLVPSEHSSGDKRHLGAITKCGNSRARRLLVEGAHSYKHNANISKEMQLRQEGLSKEIIDMAWQAQLRLCRRYNRLMHKGKHRNVVVTAIAREMIAYIWAISREVVLPKIDVKLRISRVPA

SEQ ID NO: 299263 - protein, 356 aa, unidentified
MSHDVKYIGMDVHKEAIVIAVQNESGKLVMESVIETKASSILQFLHGLRGELHVTWEEGTWAAWLYDLLQPHVQHIVVCNPRRNALLKEGNKSDKVDAGKLADLLRTGMLRPVYHGENGLRTLRELGRSYQTISKDLTRVMNRLKALYRGWGIPCAGTQVYAARAREEWLNKLPQAGVRRRAELLYQQLDGLQALRREVRPEFLAESRKHKAAKLLRQIPCIGPIRAARLIALMQTPHRFRSKRQLWTYSGLGIETHDSAQYRFVRGQLQLSKKPQQLRGLNRNHNHEMKEIFKSAATRASCGRGPFYDFYAALLAKGMKPEMARLTLARKIAAITLTLWKKEERFDVEQLKTQAA

SEQ ID NO: 299264 - protein, 372 aa, unidentified
MQESSKIHVGLDVHKDSISIAAAEPGRVPGRLIGKVTHDVSKLLKVLAKVGNADQLHIVYEAGPTGFGLQRALHSRGYLCEIIAPSQIPRRPGDRIKTDGRDCVQLAECSRAGQLTAVWIPDPEDEAIRDLSRAREDAVNSRVQARHQLKGFLLRHDVRYTGKTSWCGAYYRWLGTLNFGAGAAQTAFTEYWQAVTAADDRVDRLTKALQASITGWRFEAVVGALQALRGVAAITAIGLAAEIGDLGRFAHPRKLMGYLGLVPSEHCSGQRTSRGSITKTGNAHARRLLTEAAWNYRFKARIGKQAQIRQQDLSEPIRRMAWTAQLRLTQRFAALSARGLQANKACIAVARELAGFVWAIGMQAQREQGQPN

SEQ ID NO: 299265 - protein, 412 aa, unidentified
MACLYVGIDLGLSNFVVRVIDEQGKPVSGALTYTNDLVGAEKLLDKLLELLESTGSTQLRIGMEATNLYWWHLHEFLSQNDALQPFDTEIFVLNPSLVDGFKKAYTKLPKTHAMDAWVIADRLRFGGLRPTLPQDPRYAALQRLTRFRYNLVQNLIREKNRALGMIFLKFSPLRDDQQNPFSDPFGKAVTAVLSELTPDEVAERPLEELAQFIAEHGNNRLRDPQELARELKRLAQRAYRLNPAMADAIEVTLSMTLSNIQFLQRQLKELDKVIARHLAAIPQTLDTVPGIGPVIAAGIVSEIGDISRFDDQAALAKFAGLTWSVHQSSQFRADDTKLTKSGNYYLRYYLIEAANSLRVHNREYAEFYQKKYREATTHHHKRGLVLTARKFVRLVYALLSNGQIYDERRATG

SEQ ID NO: 299266 - protein, 430 aa, unidentified
MKSNTQNAKIEAITEKTLVLGIDVGSETHYARAFDYRGIEYSKKPFKFSNTEAGFVTFKEWILDIKERHEKDKVVLGMEPTGHYWFNLGKFLQDNEMKPVLVNPHHVKKSKELDDNNPTKNDRKDPKVIAGLVREGRYMIPYLPDGVYADLRTASNIRFQLQAELTRIQNRISRWFNIYFPEYKTVYGKPDAKSGILILKTAPLPEDILTLGIDGVNQIWRDAKLRAVGKARAKTLIEAAEHSVGSKEGAVSARMEIRMLLEDYESRNTRLQEVMVLIEELVRKIPMAEKLLEIKGVGIRTVSGFLAEVGDISRFNNPKELQKLAGLALVENSSGKHKGETTISRRGRKRLRYLLFEVAMSLVSKNQEFRELHNYYTTRRLNPLKKMQSLMAIAAKLIRVFYAMLTKGVDYDPKKMVSDIKRPAVYLQAA

SEQ ID NO: 299267 - protein, 410 aa, unidentified
MDAFCGIDWAEDHHDVALVDRDGGVLARLRISDDAAGVTRLLELLAEHGDSAENPVPVAIETPRGLLVACLRAGRPVYPVNPMAVARYRDRHSVAGRKSDKGDAAVLANVLRTDIHAHRPLPADSELAQAIAVLARAQQDAVWDRVTAHNKLRSHLREYYPGFLAAFASAKGGIMRPEARTILAAAPTPATAARLTLAQLSALLRKAGRSRGIDAEATRLRETFRQEQMRQPPLVEEAMGRQARALLRQLDAACQNAGDLEIAAIESFNQHPDAGIITSFPGIGALTGARVLAEIGDDRSRFADGKGLKAYAGAAPITRASGKSRSVTRRHVKNNRLAAAGYIWAFSALTASPGARAHYGRRRDAGDRHAAAERNLFSRLLGCLHHCLTTGQDYDEATAFPTHPAMPVAA

SEQ ID NO: 299268 - protein, 352 aa, unidentified
MTVAIVEARAETRAITGGVDTHADVHVAAALDPIGGLLGVREFAATTAGYARLLDWLGGFGTVCLVGIEGTGSYGAGLSRHVTAAGARVVEAGRSDRQDRRRQGKSDPLDAVSAARAAQSGRARGAPKGRDGAVEAIRALMVAKRTARSERTQTINQARALVLTGPDDLRARFAGHAAAGLVAGLAALRPRPGDVVGYATRIALRELGRRAEFLDDQLERLDELIVPLVATRAPGLLALHGVGPDTAALLLVAAGDHPERLRSEAAWAHLCAAAPVPASSGKRTRHRLNRGGDRQANHALWRIVITRMSSHPPTRAYVERRSKEGLSKKEIIRCLKRYVAREVYPCLRMTAG

SEQ ID NO: 299269 - protein, 355 aa, unidentified
MKQYKDIKKFVDSKMVFVGMDIHKRHWNLAFLCDGEFVETVRIRSDYLRLLHLLSKYSTARGISLVYEAGFCGFWLYRRLNADGYSCIVTPPTSIPKSTSKVKTDKRDCRKLASYLASDLLKAVYVPPQEVEADRRIFRRRLDLVDQMRASKNKIKSFLHLHEIDRPENIGKNWSKTYIAWLMLLDWEYNSDRFFFNHLLKVYLGQREDLAEVTKQLRYLSRSDKYHMSYQRLSKCKGVGLITGMMFLLELYDIVRFKRSDQLASYLGLTPSQYSSGEEVHMGHITRQGNYRARAMLVESAWTVIRYDPHLRNKYERIRAKGNNGKKAIVAVAHSLAIRLRRCLLDQTDYVIGVC

SEQ ID NO: 299270 - protein, 343 aa, unidentified
MKRNTIGLDLAKNIFHAVGFDHRGEQIFRKQLRRNQVTNWFAQQPVSLVGIEACGGSHYWARTLMALGHEVKLIAPQHIKAYLRAQKNDYNEAAAIAEAVTRPRMRFVPIKSAAQLDLQALQRLRTRLIRERTGQGNQLRGLLAEHGIVIPRSLAILRRRLPELLEDADNGLSALFRRLLHTGWQHLLQIEDQVKILDRELDIAVAEDEDCQRLMTIPGYGPVVASGFSVAVGDGRCYRRGRDVSAVLGLVPRQHTTGGKPKLLGISKRGDNMLRVNLIQGARSVLMHAKGKDDPLCRWALKVCAKRGFNKATVAVANKLARIGWAVLRNQVTYQPGYRLHTA

SEQ ID NO: 299271 - protein, 316 aa, unidentified
MAEELYVGIDVAKDSFEVASDPVGLTVSLPSTHKGRGELLNALQNRRVVLITLEATGGYERVLAADLLQAGYRVVVANPRQVRDFARGMGQRAKTDAIDALMLAAFGRVVQPKPRHKPTDQAVALAELVSRRQQLSGLLTAESNRLPMARHPKVRKSLRQVIRTLESQIAALDKLIRDHIESDDGFRHKDQVLRSFKGVGPQTSAMLLSHLPELGRLNRQEIAALSGLAPWDAKSGKWSGKSRIRGGRQEVRHMLYMAALVAIRWNPVIGEFYQRLLSKGKEFKVAITACMRKILVILNTLLRNDTLWSPNHSQHP

SEQ ID NO: 299272 - protein, 300 aa, unidentified
MKQEMHVLGIDIAKRVFHAVGMDDRGKIVYRKRLSRYDLMPFIAKLPPVLIGIEACGGAHYWARRFREHGHEVKLMAPQFVKPYVKSNKNDSRDAEAIAEAVTRPTMRFVPIKDVDQQDIQALHRVRERLIGERTALINEVHGWMQEYGIVMPKGVSKFRQAVVEKLESAKDKLTALSQEMFWKLVEEFAALEKQLAYSQEKLDTLATTHPECQRLMTIPGIGPLTATALVAAVSDVSAFKNGRQCAAWLGLVPRQHATGGKERLLGISKRGDSSLRTLLVYGARTTIRWTMQGGIELMT

SEQ ID NO: 299273 - protein, 418 aa, unidentified
MDVEQDDQEIIARVAALDIGKAELVCCVRVPGPGPRRMQEVRTFSTMTRSLLVLLDWLTGLGVTRVVMEATSDYWKPSFYLLEDSFETWLVNAKDVKHLPGRPKTDRLDAVWLCKVAERQMLRPSFVPPRPIRILRDLTRYRVDLIGARTAEKQRVEKLLEDAQIKLSVVASDIFGVSGRAMMAALIDGERDPKTLSEMALGRMRSKTALLQEAFVGRFNEHHAFLLAKMLSRVDQLTADIAAVEARTEEQIGPFAAAVARLDEIPGVGVAAAEVIIAEVGVDMTRFPTPAHLASWAKFVPGVRESAGRKKGNGATGKGNRYLARVLGEAAVAAGSTDTFLGQRYRRIARRRGKKKAVVAVGRSILVIAWHLLHDENTTFRDLGPDWYDSRVNLNRKMRNHVRELQSLGYRVTLEPAA

SEQ ID NO: 299274 - protein, 440 aa, unidentified
MIDTNQKQEIEFAAFVGIDWADQKHAWALQIPGHLDVERGDLDHTPEAVELWAAELARRFAGRPIAVALEQSRGSLLFMLTKYAHLVLFPVNPATLANYRKGFRPSGAKSDPSDAGLLVDLLVHHREKLRRLDPDTEQTRTIQFLVEARRKFVNDKTRYSNRLTAYLKMYFPQVLDWFSEVTSPIAGDFLERWPTLQKVQKARPETLRRFFVQHHSCKSESIDRRLEEIRRAMPATHDAAVTCSCSAAVLALVRIVRAVRDAIVCYDQQIETLAREHPDFAIIDSLPGVGPALAPRLIAALGTQRDRYQSASELQSYSGIAPVLASSGKQCWVHWRWACPKFLRQTFHEWATHSIGSSAWARTYYKQQRAKGKPRNTVVRALAFKWIRILFRCWKDHKPYSEEGFRQALARRHQLAVKSSPVQLQWKTCAGFSKITAITS

SEQ ID NO: 299275 - protein, 339 aa, unidentified
MKTMYCAVDLHSNNGYYGIVEKSGKRVFGKRIPNQLEAVIAALSKFKEHIKTIAVESTYNWYWLVDGLMQEGYEVKLANPAAMEQYSGLKNTDDKTDAFFIAEMLRLGVLPEGHIYPKEERGLRDMLRRRMLFVQQRTAQILSLQNMMSRQSGKTFSMRAMQKMETSEFMEVLGDDNNMFIAKQNLDMIRLISEKVKMLENYILPRADLKPEFQKIMTVHGIGKILGLTIMYETGDISRFDKAGNYTSYCRCVKAEATSNQKKKGNNNRKNGNKYLSWAFVEAAHKMKQYCPPAQKFYDRKYNKRCGALATKALASKITKAVYYILKNDQEFDVKKMFG

SEQ ID NO: 299276 - protein, 345 aa, unidentified
MQITTVGLDLAKRIFQVHAVDASGDVVVRKALRRSQVLPFFTKLPPCLIGMEACGTSHHWARALTELGHEVRLMPPAYVKPYVKRGKNDAVDAEAICEAVTRPTMRFVVMKSAEQQAALSLHRTRNLLVKQRTQLVNMIRGLLAEFGIDIPEGLERALRLARQIAAKKSTLDVPAMAMQILCLLCDQVLDTHARLQTIDRSILVQQRTNEVARRLSTIPGIGPIGATALAASVADPGQFRSGREFAAWLGLTPSQNSSGGKDRLGHITKMGDRYLRKLLVIGATSLIRRARYKPEAADPRLLALLARKPARVASVAMANKMARVVWAIMARGETYQARHAPNLAA

SEQ ID NO: 299277 - protein, 438 aa, unidentified
MSPPEIRDYSKEATFRGGRLDFSLGNKPRAWRLADASCRLIIVVESTVLEYGNSPETKVAKHKPYQGVGMKQRANGREKVIYAGVDYHKSSFTVAYLDRLTGVLSTRKYKTEEIGKFKEHLKNFQENGYGVRAAVETLTGVTYFTEEIRNHVEELVYVNTNRFKHILKGVNSAKNDRIDAETIAIYHEMGLLPTVYIPTRKEKELRMKIKERDSYVDMRRDVMNRLHSILLEYGIKTNKRELTTKKGVERIKEETKEKVPPSMQEMIWRYIETIEYLTQKIRETEEDIKGFIENEEEFKERVELLKSIPGIGDIVAISFISSICDEKRFENGDKVAAYLGLVPRVRSSGDNERNGRITKKGNSRMRNKIVQAARALLNSKSDNSIKRFYKGLLKRGVDKKKALIATARKLVKVMFAVLRERRQFVDFVDDKCNLCVVG

SEQ ID NO: 299278 - protein, 401 aa, unidentified
MVSDFRKGRYNLMKIYVGIDIAKLNHFAAAISSDGEILLEPFKFTNDADGFQLLVSKLESFDKNSIIIGLESTAHYGDNLVRYLVAEFCQVCVLNPIKTCQMRKNNVRKTKTDKVDTFVIAKTLMMQDDLRFITFFDLDMMDLKALGRFRQKTIKQRTRLKIQLTTYVDQVFPEIQYFFKSGLHQHAVYALLKEAPSPKEIASMHMTHLANLLKVNSHGHFTKEQAKELRVLAQKSVGANDSAISIQITQTIQQIELLDSQLEKIEAEMTDIMKFNDSVIMTIPGIGYINGGMILGEIGDIHRFSNPNKLLAFAGLDPSVYQSGNFQAKTTRMSKRGSRVLRYALVNAAWNVVRNNATFKAYYDAKRAEGRSHYNALGHCAGKLVRVIWKMLTDEVEFNLE

SEQ ID NO: 299279 - protein, 344 aa, unidentified
MLYVGLDFHKYFSFVTVMDGQGEIVKRAKVQNHPDTLLAFFGQLKDEVTVAVEATWNWYWLQELFEDHRIPMKLVHPQRAKAIACARIKTDKIDSEILAHLLRTDLLPEAYIPTRETRLLRERLRYRASLVRLVAQLRHKLHAVVAKNGLRLPNRNILGKKSLSYLREISLADAFRQGIDGYLRVAELLRQEIERVSETIASEAQQDPRALRLTELYGIGYYLALLIVAEIGDITRFPRAKSLCAYAGIVPSVHSSGQTHYTASITKQGSKWLRWALVEAAQHIHKKPPFDCFYQRVKSRRGPKVAQVAVARKLCKTIYHMLKEENSIIVRQTRWGHGLRGPQV

SEQ ID NO: 299280 - protein, 406 aa, unidentified
MLVYLGIDWSEQKHDLSFQNELGAEILHLRIPHSENGFLTLNQSVANLGASPAECMVGLETAHNLLIDFLWAHGYTQIYVLPPNLVKSNQGRHRQSGAKDDRCDAALIAELVRTDRSHLYPWRPGSLLLQQMRAKVSYLYFLTRDIVQHTNRLRSILLRYYPAATQVFSALDTKICLDFIQAFPTPQQAAQLDFETFSAFARSHHYPQPKRLLLNYARLQQPQPIPAAETVQAFQDEAVQLCQLVKMLVQRKEETLQELDRLYQQHPDHVIFASLPGLGARLAPAILVKFGEDRQRFPQPELVQALAGTCPITVQSGKSKYVRFRQSCDHEFRHYVQQWAWHSLQHSSWAEAYYLRVRPNCRSDSHVLRCLGNRWLAIAWKLWVSETPYDETYHLRQHALRLRPRA

SEQ ID NO: 299281 - protein, 357 aa, unidentified
MAIVAHTHPFVIGVDTHARNHALSILAAPNGEVIDDAQFPATTAGLARAVAWAARRTGGDLDALWVIEGIGTYGARLARAAADAGYLVVEAARMNARANRGVGKSDPLDARRIAQAVLPLDVSMLRQPRADDGVRAAVRVLIASRDHMSAERTATVNALTALLRVIDLGIDARRPLTNGQITTIAAWRSRKEDLATATARDEATRLAKRVAALEEDLKVNSKRVTELVHQSPARGLLEQPGIGPVTAAVALTAWSHPGRVRSEAAFASLAGVNPIPASSGNTVRHRINRGGDRRLNRALHMAVVTRMRMDPRTRAYVDRRTAEGRTLREIRRCLKRYLARQIYRHLNAAAQSAPSTP

SEQ ID NO: 299282 - protein, 332 aa, unidentified
MDTDTGELQERRLEHREEAEGFYRDLAAQGVKVRVGMEASGQARWFERLLAERNFELWIGDAAEIRTKRVRKQKTDRQDAQLILRLMLKDDFPRIWVPSWENRDLRQLLWHRHRMVQARTRIMNQLQAVALNEGLRCKKRLWREAGREQLEAFPLAPWASRRRRDLLEVLDRLNPTIEELSQAIEQEAEKCPEALRLRTHPGVGSLTALAFVLIIGRAERFQCGKQIASYLGLVPSEDSSGDRRRLGHISKQGNALLRFLLVEAAQVTVRSIPEWRSRYFHLAMRRGRKIAKVAMARKLAIQLFWMMRKEWDYEQVTRFGPHAGQPENRRGV

SEQ ID NO: 299283 - protein, 335 aa, unidentified
MKKIYVGIDISKEKCNLCFRSGLEIVREEECPNDLKALKQAIKSALKTIGASLEEVLVCAEYTGRYIYPLTVACQELGIFLWMDDPTRIKNSMGLTRGKNDVIDAARIAEYAFRYSDKAIRYCIPDAALVSMKNLLADREFLLIDRKRYQSQLTDQKKYMAPGDFKHKNSRWKKVIRSIDEQIAAIDAEIEALIADDPVLTHQKELLVSIDGVGERIAINMIAITGGFTRFQNARQFCCFAGLTPYKYDSGTSVRSKAKISKRANQTMKALLHMSAVNVATRMKSGEYKDYYERKLKEGKHVMCILNVLRAKLVHRMFSVIKRDTEYTKEYKPAC

SEQ ID NO: 299284 - protein, 351 aa, unidentified
MLLIGVDYHPSFQQIACFEEETGECSERQLNHSDGEAERLYRELKQRGMRVRVGMEATGYSRWFERLLAELGFELWIGDPAEIKAKRVKKQKTDRKDAQLLLRLMREDNFPRIWVPSPENRDLRQLLWHRHRLVQMRTRIMNQLQALSMNEGRRWKTKLWSVQGRAELEKLALAPWASRRRQELLELLDRMNPTIEELTAAAEQEARKRPEVVRLMTHPGVGPLTALAYVLIIGTPARFHCGKQVGTYVGMIPSEDSSAGKQRLGHISKQGNSLLRFLLVEAAQAAARINPDWRRRYIHLAMRRHKSIAKVAMGRKLAVRLYWMWRNGCAYSPSLEFGSYVGQLGTGHGVK

SEQ ID NO: 299285 - protein, 397 aa, unidentified
MSVNAQLRVAVDIGSQLHQVAIGQSGGGVLEEFTIAHTPQGFRDFFHRIERHQYRLGVPVAVAMEGYNGWARPLDSQVLLRGYRLFNVNNVKLSRYKEIFPGAAKTDLIDTRKMLELFQLQEHLPVAKKVLQEVAPIPLENIKLKRLTRRRRQLVDEKVGIINRLQSDLQAVCPGLLALTKATDNLWFLRFLTCRDDLMQLARLRPKSLLAIPGIGKKYKDIILTWQPDAQFADEVEWAGAMIIEDAHRILELLDKIKTLDTAIDTLSAVSRLARRMGSLPGFGSTTMAELAGEIGTLERFSGESSLALYLGMANLDNSSGVYKGSKQSKQVNRRAKRAMMIAVARHMACVTESRAYYDKKRNEGKKHNQAIRALGRNLVRVMWSMIRQDRDYLCRD

SEQ ID NO: 299286 - protein, 345 aa, unidentified
MQLMYYIGLDVHKRIISFCVKEGSGKLHSEGKIPATRFDLNRWMKTLPQPWSAAMEATMFSGWIYDHLKPHAAALKVAHPLMLRAIAAAKKKNDRIDANKICDCLRCDFLPECYMAPTAIRERRRTLRYRNLLVRQMVQMKIKIGTLLMEAGVSSNKQKLHKAGYFRELLTSNPDINEGLRPLLRLCRETVVRLSKLESALVRSLERDQFLVERVERLMSIPAIGPITALTWALEIGEVQRFSSIKKAISYCGLCGAEKSSGNTVQRTPLSKQRNKHLQTTLIEAAKMAPRNSSQLAMLYDKERQKGNANRATLAVARKLVAYLMAVDRGQRNFQVVETSNCIAA

SEQ ID NO: 299287 - protein, 376 aa, unidentified
MREKLRFLGLDVHAETIAVAIAEPDGEVRSLGTIANREESIRKLIRKLGPVEHLRACYEAGPTGFVLYWQLTQLGVDCVVVAPSLVPKKPGDRVKTDRRDALKLARSHRSGDLTAVWVPDEHSEALRDLVRQREAAKQDQLRAKHRLTKFLLRTGQRPPLGLKAWTERYMRWLAQVRYTQPAQEVTRLDCMNEVEHMGARVKRLEEAILEVIQLAPAPMQEVIRGLQALRGVAHISAVTIAVELGNITSRFESARDLMGYSGAFPSEDSSGKRIRRGGITKSGNAHIRRIVVESAWSYRHLPRVGAKLRKRQQGIPAEIIEIAWKAQNRLHKRYMALTARGKEQRKTMTAVARELLGFIWAIGIKAEAAGKQQLAA

SEQ ID NO: 299288 - protein, 418 aa, unidentified
MNEDGNTRGTRRYVALDIHKHYWVVAGVDREGRVMLQPVRVEHADLEGWLKKNLRASDHVVIESTTNAWHVYDLLSPLAERVVVANPIKVKQIACARVKTDIRDTLILARLLAAHLVPVVWVPPLHVRQLRQLLSQRRQLVETHTGTLNRMHSVAHRHHLQHERGKRFNEKTTGWQKDKSLSSVEQFQLELEMENRAYIEKQIGRIGKEVAKMSHRKPWAQSMTYLMQLPGFGVITAMTVLAAIGEIQRFETPKHLASYSGLTPGLEQSGTKNRGKGITKEGRKELRWALVEVAQRAVKSDPLWTRRFQELQKRMHRNQAIVAIARRLLELVWYVLNRRQPYRHFSQERIAYKYLTWAWQMDDVARDGLTRQQFTRYYLMRLGIAKDMTRIALDPKHPRKIASEAELLALRPELQHLV

SEQ ID NO: 299289 - protein, 369 aa, unidentified
MGKYSEVFVAFDVAKKKHAVAVAEGGRSGEVRFLGDVENSPLPIERTIKGLADRYERLHVCFEAGPTGYGLYRQVQALGHDCMVVAPALIPKRAGERIKTNRRDAVTLARLHRAGELTGVWTPNAAHEAVRDLVRAREAAADDLRRKRQQLLSFLLRHSRIYSGGGHWTLAHGRWLANQKFEHAAQQIVFQEGIDAIEDALQRLRRLEKQLALIVPEWSMAPVVEAYQAMRGASFLVAVTFAAEIGDVRRFDTPRQLMSFLGLVPAESSTGDTIRRKGLTLAGNRRARRALVEAAWTYRFPARVSDTLRARLEGLPKPVRDIAWKAQVRLCARYRRLSATGKKLPIVVAAIAREMAAFLWAIGREVAPV

SEQ ID NO: 299290 - protein, 404 aa, unidentified
MPTIRTPHEQTKFQNKLLKQLGQSPEVPICIGLDVHKNSIHAAIHRDGSTLKDWRTSANYEALADQLLPLLPFTKTVAYEAGPTGFSLARILQRRGFNVVVCAPSHTPRTPARQNKSDRIDAGKLAKFAALGLLRVVTIPTEQEEQERLVLRHRNALVDKAKRVKQQIKAEFLFLGAGEIKSWSQKEIKRLSELPCSEDQRFALDSLLREMDLLHDEIGKTTARIERIMSEHHADAKAILQSHPGVGPITAATFALELFRPERFHSGRAVARFLGLAPGLDQTGETDRPQPLLKTGQGRLRAQLVECAWMWIRVDSAARKVYGRLLHNTGNAKKAIAGMARRLAVRLWAMLIRGEKYDPGKMSQIDTQAKDRNRVAERVARRETETPAAHERNKAARAVEKTAS

SEQ ID NO: 299291 - protein, 405 aa, unidentified
MKNVSKTTLLMSVDGSKDNHWVYLKEWRGDGWKPFVISNDRRGFDEVKEKIELFKRERGLDNVAMAYESTGSYLQPLVRYMKEKGAELIQVNPKHVKRIKELPDNSPGKTDMKDPGVIAFVAERNAGMSAVLPTGKYAELRQYIQIREQLIGDRTRNLNRMEAIIAEYFPEFLKIMKKVQGKTSMYLLRHYGTPEKMIALGKESLNQVLLKISRSKLKEDRTELLYQAAKSTIGVKEGVLCMEYRIHVLLDQYNLITSQLKELGNRIIEVCQSIPYAKYIESIKGMGWLTTAYLLGEVSDLRNYTKAKQLEKLAGLNLFEISSGRHIGQKRITKRGRELIRKILYLAALRMVRKSGIFYQIYQDLLKRGKCKTVALVNVSKKILRLAFAVARDEVTYTHKGIITT

SEQ ID NO: 299292 - protein, 342 aa, unidentified
MDHSAGLDVSVKETSVCIVDETGRIVREVKVASEPEALLPVLKNPAYHFKQIGLEAGPLSQWLYSALVEAGLPVICVETRHMRAVLKAQINKTDRNDARGIAQMMRVGLYRPVHVKTLRSQKLRMLLTHRKLLQSKAIAIDNDLRGTLRNFGLKVGMVGKMKFEARIKELVENIPDLAVLVEPLLIVRRVLREQFVIQHRRLLATVRDDEVCRRLMTVPGVGPVVSLTYRATVDVPARFRKSKSVGAVFGLTCAKYQSGEVEWSGRISRCGDEMMRVMLYEAAQSMLRSKRWSWLKAWAMQIARRRGMKKAIVALARRLAVIMHRIWIDGTEFRWTREAAAA

SEQ ID NO: 299293 - protein, 340 aa, unidentified
MSTPSHTPPSIVTEAATFIGIDYHKKYSVHHAVDAAGSELGKGRIEHHSPHDFATLVKRWSNARVVFEASMNWHWLYEVLEQSMPGEHITLANAYKTRIIAEAQVKTDKIDARILALLLRAGLVSSVHIPCKETRQRKEVLRQRCFFVRQRTMLRNRIHRLLGAQHDLKLPQCSDLFGKKGMGFLEKLELPAPAGLLLKQQLDMLKNVQARIKEDEAALVQMMSTTEAQQHVLSIPGMGPILAAVVVSEIDGISRFNSAQKLCGYIGLCPSTSSSGGKTYNGKLMKHCNKWLRWAFVEAAWVAMGCDSYCPGLSPYGVLFNEALRASQVATSAVETTSTD

SEQ ID NO: 299294 - protein, 341 aa, unidentified
MKKTLYCGIDLHSTNAMYVVIDGTDKIVFKKRIPNDLSKILSMLEPYRTQLVTVVVESTYNWYWLVDGLMEAGYPVKLANPAAIVQYDGIKQANDLTDAAFLAHLARLDILPTGYIYPKEDRPVRDLLRRRTLLVRQRTAVILSLQNLFTRQAGLNLSWRKIRRLTTPQRREALNDQDYLLFVMDAQIELIEQYNAHIEQFEKKVLERCQLKESYEPLLSMPGVGVILGLTIMLETGDITRFSKAGNFTSYCRCVRANRISNGKAKGSNNSKNGNPHLAWAFVEVVHHAIRTCPQAKRFYDRKKSKRNGALATKALAAKWSKAAYYVMKTQKDFDLKRVFG

SEQ ID NO: 299295 - protein, 343 aa, unidentified
MYYIGLDVHKKAISYCVKDAAGHVQGEGKIGSTRRELDGWIRALPQPRMIAMEATIFTGWIYDHLLPHAEKVKVAHPLMLRAIAAAKKKNDRIDASKIADCLRCDFLPECHMASTEIRDRRRTLRYRSLVIKQMVQMKNRVSGLLMETGVRYNKQRLHKLGYFEALMTSNEDVHDSIRPLLKLSREMISRSQKLDYALISSLERDPLLTERLRRLRTVPGVGPITALTWALEIGDFTRFTSNKQAISYCGLCGEEKSSADKVLRMPISKQRNKHIQRVLIEAAKLATRESPELAMIRARELERGNPNRATLAVARKMVIYLLAVERRQQDWVAAEQFRRTAAA

SEQ ID NO: 299296 - protein, 337 aa, unidentified
MEYFAGLDVSMEETHLCVVDQDGSVVFEATAKSHPAAIVQELGNAPACRRVVFETGRMAPTLHHGLAALGVPVICIESRQAAQALKTLATHKTDRNDARGLAQLARTGFFKPVHVKSLPAHAVRSLISARKKLVGQRVMLENQIRGLAVVFGVRLPRGLSRGFVEAALRAGEGVEGLSSAMRGLVEARAAVLAAVAAIDLDLKRMARASEPCRRLMAIPGVGPLTALSFAAAIDEPARFRRSRDVGAYLGLVPRRWQSGEIDYVGSISKCGDRRLRTLLYEAANVMLTRFKGASKLRDWALALAARSNMRKARVALARRLAVIMHAMLRTGAEFRPI

SEQ ID NO: 299297 - protein, 346 aa, unidentified
MEHYAGIDVSLEFSSVCVVDAQGKIVREAKVASEPEALVVFFASLGFAVKRIGLEAGPLSQWLHAGLKRAGFDILLLETRHVKAALSAMMVKTDRKDARGLAQLIRMGWFRPVHAKSMGSQEVRALLVARKQLLGRLIDVELSIRGILRGFGLKVGVVTRKGFEGRIRELVAGHITLERIAGAMLSARATLKVEYEKLHKIVLTIVREDAVCRRLMTVPSVGPLVAITYKSAMDDPNRIAKSKAAGALFGLTPKKYQSGEKDVTGGITRAGDEMARTALYEAANVLLARITRFSKLKRWGIDVAKRRGSKRAKVALARKIAVILHRMWVDGTTYRWTDAQPIAVQV

SEQ ID NO: 299298 - protein, 321 aa, unidentified
MQSSDFIGIDVAKATLEIATADATSPTQTLANDRTALSSWLATLPATAQLALESTGRYHELAVELATGRGLPVYLVNPRALHHYAKAVHRGAKTDRLDARLIARYLAHEHAQLRPYTPPSAAVQELLRLQRQRTQLVVTLTGLRQSLAELDVCRPEQRTALQGVRQLIAALDARSAELLAAEPARADLAKRLATIPGFGPLNSRHYATLLPRLDPPRLSALISYVGLDPRPRDSGTFRGQRKLSKHGPAETRRLSYLAAMAAARYDDDWKTLKNQLIARGRSTTEAFCILARRLLRIAYALYRDGGVYDPAKLAPEGGQTT

SEQ ID NO: 299299 - protein, 331 aa, unidentified
MGCHPSQLDFNNRSTRHATPLDIGADVSKDHVIVACAKQSFPTRKLLNQRAELSAWLKGLPAGSRIGMEATGCYHELLASLAQRLGLVVYVLNPKDVYHYAKATGQRGKTDRVDAALIARYVAKEHTELHAWFPPSPVQRQLQSLTRRRGKLTGARATLRSTLGALPALRGELRVMLEQFDAIITKLDAQARKLIQACPERGQAFERLDAIPAVGPTVGVGLLAALERWPLPRADAFVAFIGMDPRANDSGTKTGRRRLSKRGDPELRRLLYNAAMSGSRTRVWRPVYERARANGLTRVEALVVLARQIARTAWSIYTHKTDFDPARVHAA

SEQ ID NO: 299300 - protein, 424 aa, unidentified
MRPVLLWCRVPVLWEFGPGSRAATSLVTGSVPIPLGRLLQPSPLPRSLPQSIPCHPIVESAVAQHQRKKSPAEQQLPAQLHAVNLHAAGIDVGAEAHWVAVPVEADPQPVRAFPAHTASLHALAAWLTLCGITTVALESTGVYWIPLFELLETQGFEVILVDPGTMPKNGRPQTDVHDGQWLQRLHTLGLLSAAFRPDDPVVVLRSSLRLRLTLVADAARHMQHMQKALTQMHITLPHVVSDMTGVTGLRIIKAMLHGERDPRRRATLRDPRCKEDETPIAQALHGTWREEHLFALHQAVAAYEFCHQHIQEGDAKIAAQLQTFEDRSKGESLPPKPRKRHRNRLSFETRPLLYRMTGVDLTKIEGIDETTALIVVGESGLDMRRWPSEKQCTSWLGFCPRGRVSGGRVLSSRTRPTANRAAAA

SEQ ID NO: 299301 - protein, 416 aa, unidentified
MNAVGIDVSSRKSTVAVLRPLGEVVCLPFDVTHDIAGLASLAEKLKAIDGETRVVMEHTGRYYEAVAKALHEAGFFVCAVNPLLIKEYGANSLRRVKTDKADAIKIARYALDNWADLRDFTPMDAIRYDLKTLNRQFQLASKQRTASANNLIALLEQSFPGIRKCFDSPVRSDGTQKWVDFAHSFWHVDCVRKQPFPAFCERYRKWCKRHAYLFKLSNAEEVYALAKRAVVLTPKSKVVKVLVQEAANQLISISRSVEVYRAEMDRLAAMLPEYPVVMAMYGVGKSYGPQLMAEIGDVRRLERKQALVAFAGIDPMPNQSGDKNVRSNKSSKRGSPYLRKTLFNVIRTYLQCAPQDEPVFQFLNRKRAEGKPFYVYMLAAANKFLRRYYAKLRDYFASLDTLQPVAPIPTILKATL

SEQ ID NO: 299302 - protein, 326 aa, unidentified
MRFYTKQHKFYCGIDLHAKKMYLCILDETGEIRLHKNINTDRELFLKAIHPFREDVVVAVECMFTWYWIADLCNQEKIPFVLGHALYMKAIHGGKAKNDKIDSRKIAVLLRGGMVPKAYVYPKKMRSTRDLLRRRNHLKNKRAELFAHIQNTRSRYNLPDTLGCIAKLQNREGVVERFNDPSVQKMIATDLSVIKAYDPIIAKMERDITNSAKHHDPVSHALLNTVPGIGKILSLVILYEIESINRFPRVQDFVSYSRLVKSTKESNGKKYGSSGKKIGNAHLKWAFSEAAVLFLKGNKPGKKYLDRLARKHGKGKALSIHSNFQV

SEQ ID NO: 299303 - protein, 354 aa, unidentified
MKKMQKFIVKDNMIFVGLEDSKRHWKVCVRCDGMIAHQTSMPTDYKNLRNYFMNRFPGCEVQVMYEAGFQGFWLHDLLQADGFDCIVTPPNKVTQEKTNKVKTDKIDARRLALNLENGDYTSCHVPDKERRKDRQISRTLNQIQKEIVRTKNRIRRFLDFHGLNGNMPSGRWGPGDYERARGLKLDSFLQISFDTYFRLLDELTKIRRHLMKKLHILCKKERYRESVNSKKNCPGVGWLSAIRFTLEWGDMSRFTTRKRFSSFTGLTSSEYSTGDTVHRGRITGQSSERVRAWLIQCAWRAIKLDPVLLMKYKAVCKNSGNNKKKAIVAVARKLAVRMRALELKKEEYCVGVIE

SEQ ID NO: 299304 - protein, 406 aa, unidentified
MKGSIVTVDVSKGTCHYQPFIEKGKPFRKPKVLHDTNEGFADLSSCIQKLKEKTEAETITVVFEATGVYHRCLQKYLDDHEMPYYIITPLLSAKYRQTNLHGNKTDDMDCTHIANAYYVDERLLPYFKQDDRFEKMRTLNRDYETELAHLRMRKVSFRSRLDIIYPRLDKCFKGSGSLYDPVPMEILKKYPHPSLLIKHRKETIIKAIEKKTDHKSDFITRVVDRMYECALHCYSGADPDSIEVLRFPKMIEELQSQMELCDDILQQLISEAKEVSYFPCIMSIVGIGENLAARLIAELGDMSRFKSRRAIAAYAGLNPKIRQSGDVDGIHLAIEKKGNRHLRCLLYLGASCNYRLKKNDQIYLFNQKKRQQSQSPLKHKAANIAAAHKLLVIIYALSKSGELYRS

SEQ ID NO: 299305 - protein, 372 aa, unidentified
MKKNSKKRKPQSPRSHDKRQRASKERSITIGMDLGDKRSRYCVLEESEVVKEDSVATQKKELVEVFGRYQRCRIALEVGTHSPWISRLLSELGHEVIVANPRQLQLIAQSSRKDDKVDAKTLARLARVEPELLRPIRHRSEKAQLDLMQIRVRAGLVEARTALVNTVRGLAKSVGERVPKCDPEALDQGRWAGLREPLRAVLKPLVEQVESLSEQIQQCERNLEQIAREEYPETELLQQVWGVGTLIALTFVLTVEDPARFVHSRDVGCYVGLRPKRCQSGQSDPQLRITKEGDLYLRRLLVQGAHRILSPRSPDTDLRRWGWKLAARGGKHAKQRALVAVARKLGILLHRLWVTAEVYEPLRNAPAVHRAA

SEQ ID NO: 299306 - protein, 312 aa, unidentified
MAKDTIGIDVSKDRLDAFWHSRTEACCLPNTPEGFGQLCDWLGNEKDVLIVFEATGAYHRGLERHLSLEELPFIKVNPKQARRFAQAIGRLAKTDSADAKMLARMGVVLDLTPQVVEGEDVHDLRELLTARRALVKDQVTAKTRLATALNPLVREQLGRRMEDIGADIQAIDKAIAQIAKERGTLEERICRLMTIPGIGRLTATTMLIDMPELGHLDSKKITALAGLAPMTQQSGKWQGKERITGGRSSIRRAIYMPALVAIRFNRDLHDKYQQLLKAGKAKKVAITAIMRRIIILANTLLRERRDWLPDHP

SEQ ID NO: 299307 - protein, 345 aa, unidentified
MLYVGVDFHKNYSFITEMDKDGEVKDQQKIDNDRTILKGYLSKLPSDTKIAIEATCNWYYFYELAEEYDFDISLAHPLKTKAIASARLMNDKISSTTLAHLLRANLLPRAYIPDQETRDIREVLRTHAFLISMRTRIKNRIHAILLKNGVSCPYSDILGKKSLKWLNTLNFRVCYQEAVKSYIRLAEAFNMEIKLLKQTIESLAVDNKYARLLDTHPGISYYSGLLIASEIGDVNRFSNHGKLCSYAGLVPTMHASGGKIRRGHITKQGSKWLRWILIECSTHAVKKSSRYYSLYHRVAYKHGKGTARIAVARSMLRVMYYMLKYNTPYEERSGSKRTPASALGS

SEQ ID NO: 299308 - protein, 353 aa, unidentified
MAEDPSSVIAAIGIDIGKNSFHVVGLDRRGAIVLRQRWSRGQIEARLANMPPCLIGMEACVGAHHLSRRLRALGHDARLMPAKYVRPYSKGQKNDFRDAEAIAEAVQRPTMKFVATKSAEQLDLQALHRVRARLVRQRTGISNQIRAFLLERGVAVRQGLRFLRAELPAILAQRCEALSPRMVRLIEDLAGDWRRLDERIESLSGEIDALARQDAGCERLMSVPGIGPIISSAMVAAIGTGDAFEKGRDFAAWLGLVPRQISTGDRTILGKISKCGNRYLRALFVQAAWVVLIKPKSWERYGLKPWIEAAKRRLHHNVLAIALANKLARIAWSVLARGRGFEARLIVGAAQPV

SEQ ID NO: 299309 - protein, 389 aa, unidentified
MKIFVGIDIAKLNHFSAAISSDGEIIIESFKFTNKADGFQLLVSKLESFDKNSIIIGLESTAHYDYNLVRYLVAEFYKVCVLNPIKICQVRKKNIGKTKTDKVDTYVIAKTLMMQDDLRFVSFYDLDMMDLKALGRFRQKIIKQRTRLKIQLTTYVEQVFLKIQYFFKSGLHQNAVYALLKEAPSAKEIASMHMTHLANLLKVNSHGHFTKEQAKELRILAQKSVVANDSAISIQITQTIQQIELLDSQLEKIEAEMTDIMKFNDSVIMTIPSIGYINCGMILGEIGDIHRFSNPNKLLAFAGLDPSVYQSGNFQAKTTRISKRGSRVLRYILVNAAWNIVRNNTTFKAYYDAKSAEGRSHYNALGHCAGILVRVILKMLTDEVEFNLE

SEQ ID NO: 299310 - protein, 415 aa, unidentified
MRRRAYGAVRVNDVDRERLLDSRKGLDATVGVDVGKFELLATCRWSNGSFERPWRISNPMELANLLGLLRHLGVGRKLVVALESSGTYGDALRQALADAGVAVQRVSSKAAHDYAEIFDGVPSQHDGKDAAVVAELAALGKSSPWPYQGEDAWEQELRYWVEWMVAQRQMLTMWQGRLEALLARHWPEATRVLKLSSATLLRVLGQYGSPQALAADPDAARQLRRWGGKYLAPEKIKELLAGARTSVGVRPGAWEMRQIQDYAGEALAARRQGQCAERRLRALGQGHVVLAAQGKVVGLPTACVLWVCTGDPRDFHAAAAYRKAMGLNLTERSSGTYQGQLRLSKRGHARSRQWLYFAVLRLVQKCGVRRWYEAKKAQDDKAAKLALVAVMRKLVMALYHVGVHGEEFHCSPMPH

SEQ ID NO: 299311 - protein, 417 aa, unidentified
MINDVKWYVGIDWATQSHCVCLLDAEGRRVGQREFVHGGAGLAELCDWLLEKTQAAPGQIAVAIETPHGPVVEMLLERGFAVFAINPKQLDRFRDRFTVAGAKDDRRDAHVLGGSLRTDPAAFRKLAADNPVTIELREWSRMADELKQERTRLANRLRQQLWRYYPQAAKLTDDVADDWFLALWQKVPTPESAAKASEKAIARILTAHRIRRLDAATALKTLRETPLFVAPGTTQAACAHIRRLAARLHLVNQQIKEAQQNLDRLCAQIEGEENASGQSFEQCDVTILRSWPGIGRINLATLLAEAAEPLRRRDYHALRALAGVAPVTRQSGKQRFVVRRLACNRRLQSAVHHWSRVAIQHDAAARQRYDTLRQRGHGHARALRSVGDRLLCGLCATLKRQIPYDASHNGAKTSAKA

SEQ ID NO: 299312 - protein, 340 aa, unidentified
MKITTIGIDLAKDAFQVHGIDEHGKICVKRSLKRKEMMEFFTRTEPCLIGMESCSGAHYWARRLRDVGHTVKLMAPQFVKPYVKGNKHDAADAEAICEAVRRPTMRFVPIKTVDQQSILAVHRVRQGMIKARTAQANQIRGLLAEFGLIVPVGISHLFLKVPTMLDEAKDTIPGVFRELIHRLLEHMKELTRQVDQLEIQIHQWHRASEVSRNLEQIPGIGPITASALVVSIGDARNFKNGRQLAAWLGLVPKQHSSGGKTRLQGISKRGDSYLRTLLVHGARAVVKSAERKPEQHVWLSKLMDRSHNNIATVAQANKNARVIWALMAHEQKFRSDYVRT

SEQ ID NO: 299313 - protein, 397 aa, unidentified
MKLAVGVDVAKGFHWASAVDEHGAEALSRRVDNDPGSIASLLGELAALAGGEPLAAGVDVVGGIASLLVVMLQEAGVEVVHVPGLAVNRARQGTVGGENKSDPRDARVIADQVRTRRAELRPVEAQDESAAELRLLVGRRRDLVADQTRRLSRLHDLVVSVHPGLERALDLGNKADLWLLTRYAAPAEIRRAGRARVLAHLLRLKGVRSARAEALADAALEAARAQRVAVPGERRAAELVREMAAEALDARDRLARLDAELEGLVAAHPDGALIRTLPGMGAVLAAEFIAEAGGAARFPTADRLAAAAGLAPVLKQSGRSRALRRPLGGNKNLKRVFYQSAFCSLGHPASRAYYDRKRGEGKRHHQAVIALARRRVDVLHAMLRTRQPFDAERARAA

SEQ ID NO: 299314 - protein, 358 aa, unidentified
MNSQKYVALDVDSANIVAGVFDSKGKSIMECFVKTNSTAVRQFFKLLDGTVHVALEEGTQAGWLYDLIRPLVAEVIVCNPRRNKLLQSGNKSDRIDVKKLAKLLRLGDLHSVYHGDQAIESLKQLVHGYQTLVEDSTRAMNRLRAVFRGRGIKCNSTAYNQDKRQEWIDKLDIKAAQMRVRYLYKELDCLMKLRNEAETAMCRQARTHSAYKVIISVPGLGPVRTAQIIAVIGSPHRFRTKRQLWPYCGLAVVTRSSADYEWVGDRTRRRKKPPQTRGLNNNFNRTLKAVFTGAALTAIGSNKEFKQYYQRLIDKGIRPEMARLTVARKLVAITLTLWKKGEKYDPERLNQAAGTGDQ

SEQ ID NO: 299315 - protein, 388 aa, unidentified
MQFAADRLEAPTAIRTDLGAIFISLELSRSSWVVTSLSPGGGEKMSKHTVRGGDVAGLLKRFAQLREKAKGRTGKVFPLIVIQEAGLDGFWIDRVVQNEGIESHVVDPASIATSRRRRRAKTDGIDGEALVRALLAYKRGEPRVCSMVRLPTPEDEDRRRLCRERKVLIAERVKHVNRIKGLLFSQGVSGYEPLRRDRRERLDALQTGDGRPLPPHLKAQVRRELDRLELLLAQIKAVEAERDALLAAEQTKAPVPPAMLLGVKGIGPEFAAVLWSEGLSRPFENRRQVAAYAGLAPTPWQSGSVDREQGISQSGNPRLRTTMIQLAWLWLRHQPDSALALWFHDRVKRNGGRLRKTTIVALARKLLVALWKYVTAGVVIEGAVMKTA

SEQ ID NO: 299316 - protein, 333 aa, unidentified
MKTTHPVIIGIDTHKASHVAVAIDTQGTRLATLSIPTNPKGYLELERWSQSLGKVQAFGIEGTGSYGAGLSRSLLAHGHNVIEVTRPNRQLRYTQGKTDSLDAEGAARSVLSGQATARPKTQTGSSEMIRHLKIARDTAVKSRSQAMVTLKTLIINAPADLRDALNHIRGKIALIRHIAAFRPGDIDNPLASAKAAMRALARRWLWLHEEIIAHDKELERLVTERAPELMASHGIATLTVAQMLILVGDDPTRIRSEAAFAKLCGVCPIPASSGKTHRFRLNRGGNRQANAALYRVAIVRMRSHEPTLAYVKKRTKDGKSKSEIIRCLSLIHI

SEQ ID NO: 299317 - protein, 348 aa, unidentified
MLADELDYVVGVDTHLEEHVFAVVAAPSGAVVAQRSLRASARGYSAALQFAEEAAGGARVWAIEGVGHYGAGLARYLAGRGETVLEISRTPRAERRLRGKDDSLDAARTARAALASETLALPRSGQRREALRLLLVARRSAVDVRREALGQLRGVIVTAPDQLREQLRGLPVGRLLERCSRLRRSSSASADELATRLVLRSLARRIEAATCEAAELERELLGHVRALAPRLLDEPGVGPIVAAQLIVAWSHRDRLRSEAAFARLAGVAPVPASSGQTVRHRLSRGGDRQLNRALHTVVLHRRQHDPATQAYIERRVAAGKSRRDATRLLKRYLARHLYRLLQQEPLMT

SEQ ID NO: 299318 - protein, 339 aa, unidentified
MTTITRIGLDIAKSVFEVHAVNAQEQVVVRRSLRRGQVLTWFARQPPCLIGLEACGTSTYWARELTALGHDARLIPPAYAKPYVRRNKNDAADAAAICEAVSRPSMRFVPIKTAEQQADSVAHKVRQMLVKQRTMARNSFRGLMAEFGIIVPQGPQHIGKLLTILADPEDLRVPAVARAALTTMREVLSVLEKQIDALDKDIKLRVRGNATARHLDTIPGFGPILSSAIAAIVTDPRHFDSGRDFAASLGLVPRQDGTGGKVKLGPISKRGNGYLRRLLVNGATAVLNGKNARNDPWRAKLLESKPKKLAAVALANKMARIAWAVMTRQEDFRPRAVAA

SEQ ID NO: 299319 - protein, 447 aa, unidentified
MRIVYQRCCGMDVHKDSITACLLLIDEVGEFRTESRRFGTMTRHLKEMAAWLASEGVQAIAMEATGVYWKPIWNILEAEKKFELLLVNAQHVKQVPGRKTDQKDSEWIAELLQHGLLRASFVPPVEIRHLRDLTRMRARIRQTLASFANRIQKVLEDANIKLGSVASDVLGVSGRHMLKALMAGEQDPQRLANLAQGHLRKKIEPLQLALQGHFTDHHRLQLKLLLEFVEFGEQQLSHLDSEIQLLLNKVHAEPDLPGPAEGTVAEAEASPPQPTSPLQTAVELWDSIPGIDQPAATTLVAEIGANMDQFPSAHDLASWAGLCPGNNESAGKRRSGKTRKGSVWLRRALCQAAWSASRTKNTYLAAQYRHLIVRKGKKRTIVAVAHSMLIIAYYLLKRQCTYQDLGPDYFNLRNEDAITHRLVKKLTGLGYHVTLEPARAEAGSETA

SEQ ID NO: 299320 - protein, 421 aa, unidentified
MPNIEIGVDSMVKENFIYVGIDLHKETHTAVMIDCYNQKLGEITFPNRPAAFLKLVTKVKKCNTDGKEVVYGLENAYGYGRALAVWLIDKGYLVKDVNTAISHRQAKHRGAMYRKSDSDDAKAIALATLNMLDKLPDACPNDAYWSLGQLVHRRDNIMKQRTRLVNQLHEQLCIAYPSYKQFFNDISRPTALYFWEHYPSRKYLKGKSVEDLRAELVPVSHNKCSTKTCEKILDAVASDKVKNNAYQDARDMVTLSIVSDLQHYDSQLAEVDKMLEQMYKMLGCTLTTIPGVNVITAVKILAEIGDIKRFSNANKLAQFAGIAPLHLSSSGKGKDVATKQGNRRLQATIYFLAIQMVQVSSKGTPRNSVVRAYYEKRKAEGKTSQQALICISRRLISIIYGMLKNGTEYHMPVVENAGENR

SEQ ID NO: 299321 - protein, 403 aa, unidentified
MNNVAGIDVSKGKSMVSVLRPFGEVVAKPFSVGHTGSELKELADYLKSLDGETRVVMEHTGRYYEPVARFLHEEGVFVSAVNPKLIKDYGNNTLRKVKTDKADSRKIARYGLDNWAELRQHTPMDTIRMQLKTLNRQQSLYSKTKTMMKNNLIALLDQTYPGVNALFDSPVREDGSQKWVDFATTFWHVDCVRNMSLTAFAERYRKWCKRHGYNFSQSKAVEVHTGAQDLIAMLPKDALTKTMVRQAIDALNAVSASLERLKAEMQALAAQLPEYPVVMAMHGVGDSLGPQLMAELGDVTRFTHRNAITAFAGVDPGADQSGTHEAKSTRVSKSGPPELRRALFLVMDCLLKTQPQDDPVYRFMDKKRAEGKPYLVYMTAGANKFLRIYYGRVKEYLAQLENS

SEQ ID NO: 299322 - protein, 358 aa, unidentified
MLTQSNKIDFKGHHIYAGFDVHLKSWKVTIMTEKLHHKTFTQPPKPEALHHYLTRNFPGGIYHTAYEAGFCGYWIHNKLKDLGIDSMVVNPADIPTTGKEKVQKDDSRDSVKIARSLRNGDLSPIYVPSLSTLEDRGLVRTRASLVKDLARYKNRIKSFLYFHGIEFPETFANPRTHWSNKFNEWLEELDLGDTSAQASLNALLEQSKYLRSSILSITKHIRQLSNADRYKTRQDLLRTIPGIGALTAMTILTEIETMDRFATFDQLCGFVGLVPSTNSSGEKDHIGELTPRGHGVLRSAIIESAWTAARLDPAMNKSYHEYCKRMETNKAIIRIARKLLNRIRFVLKNAHPYQHSVT

SEQ ID NO: 299323 - protein, 337 aa, unidentified
MTSQSHNDSACQAHDPAALLSPEERLVVGIDVAKQTLEIAMRGKPSREIRNTKTDITRWIATLPEPGHVLIVLEATGGYENLLVTELVGDGHLVARVNPRQVRRFAQALNVLAKTDRLDAQVIARFGEQLQPRTIDTLSTAHLELQELVTRRRQLVAMRTMERNRLQQVTGKHARKTINTMVTTITRQIDRLDREINDRINSDDEWKAQAELLISMPGVGTVTAVTLITELPELGKLNRQEIAALAGLAPFNRDSGQHRGQRSIFGGRARVRTVLFMAAVAAVRCNPALREFNQRLEQQGKPFKVRITACMRKLLTTLNTMVRDRHPWEDRLQTCSP

SEQ ID NO: 299324 - protein, 342 aa, unidentified
MGYFAGLDVSLEETAICIVDEAGHIVREARSASEPDALVAFFGACGLEMERVGLEACSLTAWLHAGLTEAGLAAICIETRQAKAAMGAMPNKTDRNDARGIAQIMRTGWYRAVHVKSPSCRSWRALLTARRMLVNKRRDVENGVRALLREAGLKVGTPSRRDFPARVRELTGDNPVLAELGQSLLSVIEVIDKEVVRLTRRALDEVKAEPTCRRLMTVPGIGPLTALAFRATIDQPGRFRKSRDVGAHLGLTPRRYQSGQTDVQGRISRCGDELARTALYEAAHSLLIRSTKWSALRAWGLSVAKRRGMARARVAVARKLAVILHRMWADGSEFRWGKQAVA

SEQ ID NO: 299325 - protein, 335 aa, unidentified
MSSNIKYIGLDVHKEAISIAVLNGAGKLVMESIIETKAATLVQFLQGLRGEMHITLEEGTWAAWLYDVLRPRVHEIVVCNPRRNALLKEGSKSDKVDARKLAELLRAGLLRPVYHGENGLRTLRELARSYQTIRKDLKRVMSRLKALYRSWGIPCAGTQVYAPRYREEWLNKIRQAGVRRRAELFYQHLDGLQVLRRQVRGEFLTESRKHKAVKVLRQIPCIGPIRAALLLALMQTPHRFRSKRQLWTYSGLGVETHDSAQHRYVDGQLQRSKKPQQIRGLNQNHNHEMKEIFKSAATSASCSTGPFHDFYSRLLAKGMKPEMARLTLARSRPLP

SEQ ID NO: 299326 - protein, 297 aa, unidentified
MRDSRTRYVGLDVHQESIAVAYAREARDAEVVCWGRLGTRQRDSDKRIRTLTSKTQQLVFVYEAGPCGYGLSRDLSRKHLRCGVVAPSLVPTKAGDRGKTDRRDATQLARLLRSGDLTAVDVPTGADAAIRDLARARAEAIRDRQAAKNRLTAFLLRQDLRYEGRATWGPAHRRWLAAVVCPTPAQPIVFQEDGRAVAAHDARRQRLETARREPVQGWRLAPVVQARQARRGGQCTVAVTRVAERGDRTRFEHPRPLMSDLGLTPREYSRGERRRPGTMTTAGHTCARRALIAGAWA

SEQ ID NO: 299327 - protein, 322 aa, unidentified
MAMLSFCGIDVSKDRLDVMVLPEQQCSSVRNDVVGWSELIERLRGFSIAAIGLEASGGYERGVMRALLAAGMSVRQINPFKLRQFAKASGVLAKNDRLDARMIASFVAIMPTHPAQRRSPAVEQLAEMVTVRRQLSDAKISVENASRMLENAMLQRLSRRRIARLATDIAAIDERLVEIVVSDAALAHRYRLLTSMPGVGAVLACSLIAFLPELGQLSRTKIAALVGVAPYDFDSGKLKGMRCIWGGRASVRSVLYMAALSASNWNPTLKAFHDRLAATGKKPKVVIVAVMRKMITVLNAMVRDGIVWVDRQNGRHSVPTAR

SEQ ID NO: 299328 - protein, 378 aa, unidentified
MSEITRGTMSAIVRVGADLAKQVIQVHGVDRAGRRVVGRTLKRDQFAAWAAQLPPGCVVAMEACSSGHHWARRLRAMGLDARLIAAHFVSPYRMEGKSGKNDATDAAAICEAASRPSMRYVPIKTCEQQGVMSLHRMREGYKEERTACINRIRGVLAEFGLVFGKSPKVLRARLADVIEDASNELSTSARLVVQRAFEHWRELDEHMRWCDSQVGQHVRGSPEAQRAAKITGIGELGASALVAGVGEFKQFSSGAQFGAWLGIVPSQNSSGGKASLGRITKRGDDYLRTLLIQGAKSAVMSAGKRDDATSRWLVQLTARVGWQKACVAMANKNARILWAVMTREQGFDPRHVSVKPQAKMPLKQRAATPAQIAVASPA

SEQ ID NO: 299329 - protein, 288 aa, unidentified
MSEITRAPIIARVGVDLAKQVIQVHAVDASGRRVVTRAFKRNQFFAWCAQLPVGCLVAMEACSSAHHWARKLRALGLDARLIAAHFVTPYRMEGKNSKNDATDAAAICEAASRPCMRFVPVKTCEQQGVMSLHRVREGLKEERTACINQIRGVLTEFGLVFGKSPKVLRAVLADVIEDASNELSTTARLVLQRAFDHWRELDAHLRWCDQQVGQHVRASPAAKRAAKVIGIGELGASALTAGVGDFKQFTSGHQFGAWLGLVPRQDSSGGKTIWDASPSAATTTYARC

SEQ ID NO: 299330 - protein, 347 aa, unidentified
MRPFGPRFQVVETRVDRPFKKHFLMDKGIKYFGIDISALVFDVTDSEGNYYQFKNNEFGFKKFAKLLTSKSHCVMEATGYYHYQLAYHLLESGIKISVENPLAVKRFIQMGLSKVKTDKSDSKLICAYAEQVELKLWQGNSKEEIECLQIVRALSVYTKQSTMLKNKLHGEAVLGNPSKIVVTSLKRSLRQLTKEVKTLEEKLLVLVKQSHQDLFTRLKTIPGIGPKTGIMLVVLTGGFDRFNSASELCSYAGLTPVIRQSGSSVKGRPKISKIGNQKLRNLLFMCSFNACKYNKACRDLYERIVAKGKSKKLALIAVCNKLLKQAFAIAKSGLVYDAEYKSTLIKN

SEQ ID NO: 299331 - protein, 400 aa, unidentified
MRVVFGIDVSKASSEVAILVNGEKIHGYTIPNDAIGFNRLLEDLGTVYQPEIVFEATGVYSRRLQAFFEDNSYAYIRLNPLESKKQLDSLRVRKTDKIDAEKLATSQFILNRKPSYVQEALYQELRDLSRFYQNLTEDIVCSKNRLHKVLQVTFPELENILSSPTGKQYWNLVMAFPCNSFVLELDDAALRAIIRQSTSKRISEKRVTYLVDKLTKLANHSYCAVKKTSPMMEEVKYYAGELLRLSEHRQSVLEEMVTLAQSLPEYEILLSIPGIAETTATSIIGELGDIRRFHSANQINAFIGIDLRHYESGDFLAKEHITKRGNPYARKILFKCIHNIASASHTNPCHIADFYEKRKRQSQVTSTKPHTIASIHRLIRTMYYLITHNKLYDYTSTQNR

SEQ ID NO: 299332 - protein, 346 aa, unidentified
MKVLLKQTVGIDVAQNELVVSLGKMDEQINIEVYDYKVFPNTKKGFSSLVSWVNKQTSNTTEVRYVMEATGVYHESLAYYLCSIQKQVSIILPNKISNYAKTLDIKTITDKSASQAIARFGLERKLEVWLPPLKIFNDLRQLCREREQLVHERTMLKNQLHAERTSATSSENSVQRTKKRIALIDLQEKEIREEIAILIKGDQTLVEKIKMVSSIPGIGNLTAVTIIAETNGFELIKNKRQLVSYAGLDVREKTSGTSVKSKPRISKRGNRNIRKVMHFPALAAIRTDERFRDIFLRIVSRHGIKMKAIVAIQRKLLELTFILWKNNSYYNSEHQYQIIPFQEVAM

SEQ ID NO: 299333 - protein, 423 aa, unidentified
MTSMTLDPPLTNLLPPDAELVAGVDTHKNTHHVAILDLVGRPVADREFRADGRGYAQIVTFLHAHGDVVRVGVEGTGSYGAGLARALTAAGLTVVEVARQDRQARRRRGKSDPLDAHQAAVAVLAGTDTAIPKSGDGAVESMRILLAERRSAAKARAQVMNQIHALLITAPELVRQAFRALSGQRLVNTLAKTRPGTIMSPDPEVVARQTLRRFAVRHLTMQAEIDLIEQQLEVLVRQVNPTLLSLSGVGPVTAATLLVAAGDNPERLGTRASFAALAGVAPIPASSGQRTRHRLSRGGNRHANAALHRIVLLRMRHREPRTMAYFERRRSEQLTDRDIMRCLKRHVANEIYAALLNPATDNPIGRELRARRQAVGIPISVLAATLDVPYQRLRRLEIGTRADPELEARATAVLEQIGPPLAA

SEQ ID NO: 299334 - protein, 320 aa, unidentified
MNKEQKYVGVDISKEYLDMAVVEPANKWRFGNNAYGIGKAVERLKKLSPVFVVFEAIGGLELSFWEALTEAGIEAAPINPRQIRDFAKAKGKLAKTDEIDAVVIAYFGQAMQPRSQPFPTTQEIKEMMSRRSQIVEMITAEKNRLNWARSSRIKEDIQLHIEWLEGQKDEVDKNLKQVINIDPEMREKSKLLQSTPGVGPIVSASLLTQVPELGTLNRHQIAALVGVTPLNRDSGQWRGKRSVWGGRSRVRSALYMATLVATHHNPVIRVFYQRLLDENKPTKVALTACMRKLLVILNAMLKNKTGWTTSIAQVSSIACP

SEQ ID NO: 299335 - protein, 419 aa, unidentified
MNKLFVGMDISLDDVKVHILDQDGNDACSRFSVDNNPSGCDILVSRILDCCNKYNIQKVFIGLESTSVYGWHIQYYLADHASLKPFNPSVTTFNANTVKAFKKSLGDLPKNDWVDAFVIAEKLRFGRLPKSCPVDFRYLALKRLTRHRFHIVDSIVREKNYFLSNLFLKFSGLCQIKVFSNNFGTTATEIFNEFLTLDDIAARPLEDLIAFLVDKGRDHFNDPNATAKLLQDAVRKSYRINANVNDSLNFVIKSCLDNIQYLEKQKKASEKTIANEVKGFKNQFFCLTSVNGIGPTIAAGLISEIGGISRFDNDNALAKFSGIYWSEYQSADFKAEDTYLKRTGNEYLRYYFIQASDQLRKYCPEFSQYYARKFNESKTHKHKRALVLTARKAVRLVFALLREEKLYKPPAMKGDDCKE

SEQ ID NO: 299336 - protein, 365 aa, unidentified
MNLNTATKAGQIIGTMNGLQVIGLDIAKNVFQLHSVDMSTGEIINVQIKRAKVLEYFVNKPPCLIAIEACGGAHHWAREFTALGHSVRLLHAKIVRPFVAGNKTDATDARAIWQVVQQPGVKFVGIKTTEQQATLTLHRQREMMMKMCTMQTNALRGLLYEFGATFAQGRQALFKDVERALEGLADQLPQMVRDSLREQVARIKAVIEDIKTIEKRLKVQLRQDRQMQRIFQIPGVGLLTATAAIATMGEASAFKSGREFCAWLGLVPSQTGTGGKVRLGNITKRGDTYLRTLIIHGARSVLTHTKEPGLWLEAIKGRRPASVVIVAQAAKMARTIWAVTAKEQDYKRDFQSVRPVVAAKASVQA

SEQ ID NO: 299337 - protein, 427 aa, unidentified
MGRFGKGPTVEIIYERVAGIDVGKKIIAVAVRTPGERPGKRRQQLRKFNTYYQTLTEMVAWLIAEGVTHVSMEATGVYWRPVFHALCEAERALEVLLVNARHVKNVPGRKSDALDAVWLAELTECGLLRGSFIPPREIAAIRELTRYRKKLIEQRTSELQRLAKVLEDGGIKIDSVASALTTLSARDMIEALINGERDPGVLAEFARGKMRRKISDLRLACAGRFGAQHALMCTLHLEHIDHLADMIARLDTRIDEASLPFVRQTTSLATIPGISERAAQVIISEIGIDMARFPTAAHLASWAGLCPGNNESAGKHRSGRTRKGSKELRALLTECAWSAGRTSTYVGAQFRRFHRRFGSKGGKKAATATAHTLIVIIWHVLAEATAYRDLGSDYFTRRLDSPEARKRRLIHELEALGHKVTIEPAAA

SEQ ID NO: 299338 - protein, 407 aa, unidentified
MISVGIDISKEKITVCALEQGSKIIWKPFDVSLNKTEIEKLIEKLEKLKEEIKITMEATGKYHLPILYELKDRGYFVTVINPLKMKQFCRALNFRKAKNDKIDAKQIAEYGLMYWKELEEYKIDEENYRVLKELNRNYQHYMNLRINQMNYIDQTIHQTFPGIKKLIPHNSGDFSKDKLLDFLEKWWHKDLIIEKTEEEFVEEYKTWAKEKRYHPNVNKAKAIYKIAEDSISTQPSHNSKIETNIREGINLIKQINQILKNILSQMIEISEPLEEYQEAKKFSGISEKLAVQIVAELGDLRKFKNKKSLISFIGIDAPPYESGNFKADQRKISKRGNAILRKVGYQAMKCMMSAKNPENEIYNYMIKKEKEGKAKKVCKFAGLNKFLRIYYARVMESKAQKQELKVA

SEQ ID NO: 299339 - protein, 330 aa, unidentified
MERIYGIDLSKEKFDVNFISSDGSEKHLVVKNTFKGICKFLKDFPKNSLIIAEHTGVYGELLIFLANAMNINICIETGYNIRHSLGLIKGKTDKIDAKRIREYGERFFDKLKEHKSHSADMFELKELYSLRAQLVKERKMFITHSKEKELAVSNSIIAHKIYLNMINEFNESIKKIEDEIEFIIVNNPAFKKSFEIVTSIKGVGAITTCDLIIKTENFKKIDTSRKAASFAGVCPFQNSSGKMVKKSRVSPMSDKRLKTLLYLCSKSAVKHNKEFNLYYKKKMSEGKQHFLIMNNVANKLLRIMYRLIESGEKWDPNYICLDPREAKKVA

SEQ ID NO: 299340 - protein, 408 aa, unidentified
MDVLYQRCAGLDVHKDTVVACARIMTRGEVARTVRSFATTTSGLLVLADWLSEHGCTHVAMEATGVYWKPVWHVLEESFALILANAAHVKNVPGRKTDVNDATWLGELLAHGLIRASFVPERPTQELRALLRTRKQLVREQVSHVQRVHKTLEDANIKLASVLSDIVGMSGRAMLRALIAGETDPVVLAGLAHRRVKAGRQELVEALRGDVRPHHRFLLALHLRQIDGLDEAIMAVDRQIDEQLAPFRRAVELLTSIPGVSALSACSIVAEIGTDMARFADAGHLVSWAGMCPRNDESAGKRRSTRLRRGNPWLKTVLVQCAWAASRAKLTYLQAQFHRLRARRGAKKAICAVAASILTAVYHMLRDGTLYRDLGPNHLRPASPDHLARKLVRTLNNLGFHVELTAAA

SEQ ID NO: 299341 - protein, 347 aa, unidentified
MRFYTGQHRYYCGIDLHARTMYLCILEHETGKTVLHRNLRCEPDRFLQAIEPYRDDLVVSAECIFCWYWLADLCARENILFVLGHALYMKAIHGGKAKNDRIDAHKIAVLLRGGAFPVAYVYPRGMRATRDLLRRRLFFVRRRSELFSHIRIVFHQLNLPAPTSQLHYAGNRSGLADAVPDPVVRASIEADLAMAARLDEIIRSLERTIRHQAKVDDPDTYKRLQTIPGVGRILALTLLYELHDISRFPRVQDFLSYARLVKSQKSSAGKVMGTSGAKIGNAHLKWAYSEAAVLFLHRNPRGQRLINRLRSKHGRGKALSVLAARLGRASYYMLRRDTAFDMDRFMN

SEQ ID NO: 299342 - protein, 367 aa, unidentified
MSSVIYVGMDVHQDSFSLCALAASSGEIIRETRCSADVENIVKFINHLPENESNQVTLGYEAGIWGYSLHNRLVELGYDCVILAPSTMYSNIKHQMVKNDHRDAQMIAHNLASGTYKAVYVPDQEDDEVKEFIRLIKAMKKELKQTKQRIRAFVLRNGFRFEKTPWTGVYLEWLSQLQLPRIKKMVLDEYLVHYHELTDKIERLSRQLGDLSHQERYQEPISKLRCFKGIDTVAAMTIHVETSDFSRFPNARAYMAYLGLTPSEHSSGKNVSLGRITKQGNSTIRTTLVESAQGLVRGNPSKKSKKLKARQINQSGRVINYADRAVNRLHKRYERMIHAGKPRNVAIIAVARELACFIWGMENGKIA

SEQ ID NO: 299343 - protein, 377 aa, unidentified
MHSENIAAYIGLDVHKETLAVAIAAPERLGEVRYYGTINNEAQAVRRLFQKLQGLYGNILSCYEAGPCGFGLYHQLTAMNIKCQVIAPSRIPKSPTDRIKNDHRDAISLARLMRAGELTPVWIPDLTHEAMRDLIRARAAAKRDSRVARQRILSMLLRTDKRYAGKHWTGKHRTWLANQSFSQPSQQIAFQHYCQSLEQIEDRILQLDQEISRLLPEWSLCNLVCQLQALKGVGQLTAITLVAELGDFSRFSSPKQLMAFLGLVPGEYSSGNSIRPRGITKVGNSELRRLLYEAAWSYRTPAKVGAWLIYYRPDSVTQYSKDIAWKAQQRLCSRYRSLTAKGKKSQVAITAVARELTGFMWDIALAAQSPFSQQKQN

SEQ ID NO: 299344 - protein, 340 aa, unidentified
MVVIGIDAHKRSHTAVIIDGNGRKLATKTCKTTSQDHLSLLRWAAGHGPDRVWAIEDCRSMTRRLEHDLLAAGERIVRVPPKLMAHARDAARTYGKSDPIDALAVARAALREDHLPTAHLDGPDRDLRLLVDHREDLIAERTRAINRLRWHLHELDPSWDPPARSLDRVSNLDRILSRLAQLPGVVAHLATAITERCRSLTQEINLVEAEIRDLAEKLVPTLIALPGCGALTAAKILGETAGITRFHSAAAYARHNGTAPLPVWSSNRARHRLSRTGNRQLNAALHRIAMTQARCHEPAKDLIARRKAGGDGGLEALRVLKRRLSDVVYQALHVDCALTG

SEQ ID NO: 299345 - protein, 417 aa, unidentified
MTNEARWFAGIDWASQTHQVCLIDVGGKIIGERAFAHGGAGLTELCAWLLARTGAAPAAIAVAIEVPHGPIVEALLEHGFQVYAINPKQLDRFRDRFTVAGAKDDRRDALVLSDSLRTDRHCLRRLAAEDAVVIELREWSRMTEDLQQERNRLANRMREQLWRYYPQALAIGDDLAADWFLELWAAVPTPAKAARIRESTLERILKRHRIRRVTAAEVLRTLRQPALRVAPGTAEAASAHIRAVGERLRLVNRQIREAHQRLDALCAELAGDGGERPPGQEPEQRDATILRSLPGVGRIVLATLLAEAAEPLRRRDYHALRALSGVAPVTRRSGKRCIVVRRQACQTRLRDAVYHWARVAIQHDELSRRRYAELRKRGHSHGRALRSVADRLLAVACAMLARQTPFDPEYAAKRAVA

SEQ ID NO: 299346 - protein, 351 aa, unidentified
MQSQMIATPKLFIGLDVHKKSWQAHLRTDISDHKGFSLPPDPEILSNYVFKHFPNHQVQLSYEAGCCGFSAAREFLNLGWSVTVVNPADIPHMDKQLYQKTDKIDCRNLAKQLQLGQLKPIYIPTEDQEQLRSLLRQRNQLVKQHRKVKSNIKGLLLFHGIVIPPEFDNPNWSKNFQQWLFQIPWSHVTGLQCLHSKLRIYKLLDQEILLTSNELRAYCRKVHTTDYYLLKSIPGIGGILSAAILAELGDIRRFNNERQFANCIGLVPGIHQSSETNNYMGVTPRCKALLRSYLIESAWIAIRLDPGIQAFYRKHVGKNPKSVIVKVAHKMCRRILSVIKSGKPYQLGFSA

SEQ ID NO: 299347 - protein, 449 aa, unidentified
MQELRLGIDVACAEHHRAALADQTGRLIWSNRRFRTVSGQLEALWAAVCAAGTGPVTVVMEPTRNAWVPLAAWLRARGAVVRMVPPEQSADLRKYYNKHAKTDRLDCELLARLPLLHPDGLLATPGLGPAEALRRAVAHRASLVARRTAGLQRLEALLELLGPGWAAALGSEPGKAALVVLEHYADPHALRRLGRARLIRLLVRASRGMWREEKADELLAAAAETLQLWPPDAIDFAELGEDIAAEARLIAGLTGEIEALEDRIAGHYQAADPAGIVASVPGVGPTLAAAILGRLGDAKRFTDLAAVRNYTGLVPKVDQSGVSDKRPGLTKAGDHLLRQALFLAADHARKIDPTLANRYRRLRAAGKHHNSALCTLAAVLVTRIAACWRTDQPYQLRDLDGRSITEAEGRAICAALGPNTGTGRRSKESHSAPSTGPSTTETRSPSKTA

SEQ ID NO: 299348 - protein, 333 aa, unidentified
MKDLSTLQHFVGCDVSKSTLDFAIYERGKDYRMFDHISVANTTEGFQAMRKWLRSFKINVKDAVIAMEHTGSYSNALAEWCFKKGITFVLLHPLDVKNAGARGRNKTDKTDAQFIADYAYTMREKLTPSLPEPQSIKKLRQLRNERQLAVRARTAYMNQLKTVTDKSTLHRMEKVTAAFNAQIKAIEASIRTAVEADSRIKNTYDLLVSIPGIGMLNALTTIIATGNFTRFQTARQYAKFCCVSPLSRQSGTSVRSGDHVSHAGHNEIKSILTEGARSAIHHDANLKSYYERKRAQGKTHGCVMNAVKFKLICRMFAVVQRQTPYVNVERYRG

SEQ ID NO: 299349 - protein, 344 aa, unidentified
MAIVGGLDIHRRQITYDWIDTDNGETCRGQLSPATRLELRAWLARFTGQQADFAVEATTGWRFVAEELEHAGFRAHLAEPADTRALRGPKRRAKTDRTDARHLRELLRAGTLPESWMPPAHIADARTQVRLRRALVGERTAWQQRIHAILFHHGLPDRSYLLTADGRAWLARAELPAVARQTVDLAVRMIDHLEVELDRLDTELAGIARAQPGCKALMGRYGIGWLTAVAIWAEFGDVRRFANSRQAVRFTGLDITISESDGKRARGHLTRQGSPVLRWALHEAAMSAARPGSPDHPYYLQVKQRLGGKRAALSVARKLAREAYHTLRELGDQALVPAELPTAA

SEQ ID NO: 299350 - protein, 485 aa, unidentified
MNNIGSNRVIGLDLGVTSAHSAVVLDVTGQVLLRRRVVSTVESLAELEQAALRGAPEQTHLTVVIEPTGPMWLPIAVYFGRGGHTVLRVSSAKAADLRRFLSRHAKSNGIDAETLARLPMVAPAGLHPVELSGTDRASLDRRVRTVARLTREIGQRKVRIRALAQTLIPTIGQALGDGLNRTDLAVLERYADPRALLGAGRARLLRLVRTESRGKLGDDKVRVLRTAAEQALQLWGDDPAIALSDLAEEITTEIRLLRLAETERARDDALTRVDPDGLATSLPGLGPVGATQLLAAMGRPGRFRNAAAFKSFTGLAPKASETGNTDRKSQPMSKAGNSALRSQLIQSANTARQLDPQLAAIYYAQMTQRGAPHLKALCVVAARLAERAWLTLSKAEPYIIRDLQGRPISPQRARELIAEQFTVPADVRRRRRSNKLAGRAPQQCSGHAKSRHTAGHEATLPSNTITPPNPAVNPTQHTALTPTPA

SEQ ID NO: 299351 - protein, 395 aa, unidentified
MTRVWAGVDIGREHHHVAVVDGDGKRVFSRRVANDETALLEAIGDVLGLAEELTWAIDLHSSESVLLLTLLLDHGQKVVYVPGIVVNRAAEGYRGAGKTDAKDALIIADQARMRRDLTILDGDDDLVVELRMLVARRKDLAADRTRAVNRLHDQLLAICPALQRALDLTTKGALILLTGFQTPAALRAIGVDGLTAWLKERQVRNAAALATKAITAARSQHTTLPAERTAALLAAQLAQGVITFNEQIKELDQLIEDRFRRHPSAEVIVSMPGIGVLLGAEFIAATGKMSRFATADQLASFAGVTPQPRDSGRVSGNLHRPQRYSRPLQRVFYTSALLSIQSCPDSRRFYDRKRAEGKRHTQAVLALARRRVNVIWALLRDNRTYQPAPPLTLAA

SEQ ID NO: 299352 - protein, 358 aa, unidentified
MSNVKSSRLDFTGQPIYIGLDVHKKSWSVSIFSKYGEYKTFNQPPEADKLVHYLSHYFPGALYYAVYEAGYCGFWIHDQLSKKGIQCLVVNPADIPTKNKERRTKRDPIDCRKLARSLRNGEIEGIYVPCRSKLEDRTLIRTRQSMVRKQTRCKNQIKGMLLFYGVVIPEQREMGHWSRRFIQWIERIRMERASGDIALKAHLEELNHLRQLIASLNRAILHLARTEEYRPFVRLLKTVPGISTLTAMILLAELGEITRFPSLDELSCYVGLIPDTQESGEKEYVGAITQRRHAQLRWLLIEASWVAVRKDPALLMAFQEYCKRMRKTKAIVKIARKLLNRIRYVLKNQAEYVPCVIE

SEQ ID NO: 299353 - protein, 452 aa, unidentified
MEEPQEVQDEEYERVWERVAAIDVAKASGVVCTRVPDEARPGRRRTKVWTVTATLSAVTELADHLRCHQIEVVTLESTSDYWRIWWVVLEAAGLTVQLVNARSVKNVPGRAKTDKKDAVWLAKRTERGMLRPSFVPPYDIRRLREFTRLRAGLVHERTRYWARLEKLLERALIKISAVVSSLDTLSARAMIEALIAGQRNPRALADLAVGRLRPKRAALAEALEGRFEPHHGELARILLDQIDALTGQIDQLTARITELIAAIPAAQGVDADGATGPGAGIGPGAPVLPAVMRLDEITGCGVIAAQAIIAEIGLDMAVFGTPGRLVSWAKRCPQTRQSGTKTSTGKAGKGNPYLNGVLGEIAASAGRTDTFLGERYRRLARRRGKRKAIVAVARSILVIIFHLLADPEARFRDLGPGYYDTHIDRQRKIRNHIRQLEALGLDVTTVPRHDAA

SEQ ID NO: 299354 - protein, 359 aa, unidentified
MTTNGDLEDVARVIVGVDTHLDEHVAVAIDWLGARLGEYRLPTTLKGYEGLDRWAAGLGEAVAFGIEGTGSYGAGLARHLAGRGRTVIEVNRPDRSTRRRLGKSDPVDAEMAARAVLAGVAKDYPKSGLDNVEMIRMLKIVKDSAIKARTQAINQMKALIVTAPVELRYKLTGLTVRRLVACCGSFRPGRLATPAAATKHALRLLARRHSHLNSEIEGVDKELVRLTAEIAPALVHTFGIGPDTAATLLVTAGSNPERLRSEPAFAALCGVNPIPASSGKTDRHRLNRGGDRQANAALYRVVLVRLRYDERTKEYMRRRTSEGMTKPEIIRCLKRYVARQVFAILRETGRKNLALPAAA

SEQ ID NO: 299355 - protein, 408 aa, unidentified
MNPLFVGIDVSSKNNVAYLMKPDGSKHSSFSVQNNLGGAKLLSERIVSALGSMQLSDVVIGLEATSIYGDSLVYALREDGSLGRFQRKIHVLNPKQVRKFKEAYSDLPKNDWVDAFVIADHLRFGRINREVYMDDYRYKALQTLTRARFDVIQNLTREKQRFANYLFLKCSGMAQGKDIQNTSATTIALMERFETVDDLANADPNELTDFIAETGRGRFADPDGTAKAIQAAARASYRLPKTVNDTVNQAMAVSIASMRALEKQVKVLDKAIEQQFEIIPNTLISIPGIGKVYSAGIIAEIGDIHRFESQASVAKYAGLVWNRNQSGDFEAEHSRMIKSGNRYLRYYMLEAANSVRRCDSEFRRYYDLKFKEVNKYQHKRALALTARKLVRLVFRLLKDNRLYIPPEG

SEQ ID NO: 299356 - protein, 361 aa, unidentified
MQRVKVNEKTFEGQPIYVGIDDHKKSWKVSILGREYEHKTMSSEPDPVQLARYLKRNFPGADYKAVYEAGFSGFGSQRRLKELGVDCIVVHPADVPTSEKDRQQKTDKADSRKLAKMLRSGEFEGVDVPDEELEADRALIRQRYRLSKDLTRYKNRVKSLLFQFGIRIPDRFTASQSRTWAKNYMDWLTELPEADEGVRTVVGNYVGTGILIKKQLAAVTKQVRELAGKERYRGNYALLISIPGIGLVSGMALLVQLGDVGRFRSLDELCSYVGLVPRMHGSGDRMVTKKLTRRGRREIKVMLIEAAWVAVRQDPAMMARFNELKKGMNGNKAIVRIAKNLLSRIRHVLNNQTAYERGVIK

SEQ ID NO: 299357 - protein, 316 aa, unidentified
METHQPFIGIDVSSQRLDVDMLPAGQRSSDPNTEDGIASLVLRLKAVNPKIVLLEATGGYEVPVAYALYEAGLPVVIMNPKALRHFAKAIGKLAKTDKLDAQVLALYAQSIRPPVRPLKDQEQLELANLMTRRRQLQGMIVMEGNRRRTCTPKVRGNIDQSLAHLRQLLKDLDREIHDSIRRTPLWHENSEILQSFTGIGPKVSASLIAVIPELGTLPGTKASALAGLAPMNRDSGQYRGKRKIQGGRPAVRQALYMAALVASRHNPVIREFYQRLRLAGKPAKVALTACMRKILVILNAMLKNHTHWEDRLPVAA

SEQ ID NO: 299358 - protein, 497 aa, unidentified
MSMHYTVKQKIEQVKNKLLVAVDVGKKELCVKYMNSSRDVYNKKTYRFRNSSKGLQELLDCTKAMQGTTGYDEAVFGMEPTGHYWLNLATRLEIIGFTVVTVNQNHMKNIAEVVDGSQQKSDDKDPEGIGILVALGDWSPYYRPEGVYAEIRKAYRLLEKCTEDTTRYTNELHGYLDKHLPGYESCFGKDKGITSALCLAVLKKAVLPEDILDLGADGIMKIWKESGLHGMKCRAEKIISAVRCGQEYAVIDGAESARLELTCIIRKLELAIEMEDSAEKLVRKTVVLIPGAQRLLGIKGVSYRTVAGFFAIVGDMKKRFTNAKQLVKLAGLNIVIHSSGSHKGEAHISRRGCPELRTALYRVLTALLENTPAFKPIREHYMTRADNPLKPIKANIAMCNKLLRIFYAMVTHDEDFDGEKMLGDIRRMDSTKDSPAVAEAGKLANQLDLILNGVKGGGMTGEAVEMIRKICRAMKGLVASAERGSVKEAVPPDAAGA

SEQ ID NO: 299359 - protein, 315 aa, unidentified
MADPVTVGIDASKGHLDVAARPGGRFRVANDPGGLAELVARLRRLTPSLVVLEATGGYEADALAALLAAGIPAAVVNPRQVRQFAAGVGQHAKTDPIDAAVLAHFAAVVAPPPAAPADPERVVLAALLDRRRQLLGMRVAEGNRLRPGLPASIRAGIEAHLAWLDEQIAAIDREVAAAVRRSPAWREKDRLLRSIKGVGPVVSRTLLADLPELGSHPPGRLAALAGVAPFAADSGRRRGERHIRGGRREVRRALDMAALAVARVPGPLRDFARRLKARGKPSKVVLIAVARRLLVIANAVVRDGREWDAKRATAA

SEQ ID NO: 299360 - protein, 341 aa, unidentified
MSEVSTIGLDLAKNVFQAHGANASGAVVFRKKLRRDRVLKFLAAQPACTVAMEACASSHYWGREIAKLGHEIRLIAPDYVKPFVKRQKNDAADAEAICEATQRPTMRFVAVKGEEQQAAAVVFRARDLLVRQRTQIINAIRGHLAEFGMVVAKGPFHVAKLVAAIEDNHAGVPAMAQPILRLLADQLRSLDERVVVLDRELARRAREDEEAKRLTTIPGIGPITATALVALAPAAQAFKRGRDFAAWLGLTPLQRSTGGKQKLGETSRMGERTLRRLLIIGASATVRWAMRKGSTTQPWLARMLNRKPPMLVIVALANKMARIAWALMARGETYRAPAMAK

SEQ ID NO: 299361 - protein, 344 aa, unidentified
MNSTTIAVDVAKSVFEVAVSEYPGQVRERHRLSRGRFSRFLAEHPPATVVMEACGSAHHWAREAQSRGHRVILVPPHTARPYVLRNKTDRTDAKGLLEAFRNDALRPVPVKSETQQALAALHRLRSTWVATRTARLNTVRGILREFGVVIPTGAHHVVPHVRALLEDADAGVPGLLRVPLSEAIREIGELEDRIGAIERQLARTAEPALLIGRLRTIPGIGILTATARVAAVGDVHRFPSGRHFARYLGLTPREHSTRQRRHLGAISKQGDTYLRMLFIHGARSVLHHAKSKTAPATDRLRTWALQVERLRGHNKAAVALANKLARIAWAVWRSGNDFTAAAAV

SEQ ID NO: 299362 - protein, 355 aa, unidentified
MDNLRYIGLDVHRDTISAAVLDHDGKLIMQSVVPTRASAILDFLHGIRGTLHVTFEEGIHSAWLYDLLQPRVARVLVCDPRKNRLLKSGNKGDLIDARKLAELLRNDALSPVYHGELSSLEVQRRTRSYTMLTEDTTRIMSRVKAVFRGQAVPYHGKSIYRPDRRESYLAQLPTPGLRQRVELLYQELDAVHRLRLRAKREMLAECRKHPAMKWLQSVPFLGKVRTAVLIGRVQTPHRFRTKRQFWSYCGLALETHDSAQYHVLHGQVERKPRFVQVRGLNWNHNHDLKDVFKSAATMAAVREGVFRDYYCGLLAKGIRPEMARLTLARKIAAITLKIWKEGGMFNAEQVKPQAA

SEQ ID NO: 299363 - protein, 356 aa, unidentified
MKNSKLDFTGQTISVGIDTHKKNMVITPRCQGMQLKTISMDPEPEQLVRYLHKNYPNAKYESVYEAGFSGYWMDRKLREAGIKNIIVNPADVPIKQKEKRKKTDKIDSRKLARELSAGNLEGIYIPSEEHEAIRALSRLRKQITKDQTRQKCRIKSLLNFVGITLPENSELKHWSGKFIKYLSEIEFKHKAMKITLERLLESLINGRQILLGIVKNLREIVKEDTEMKKITEYLQSVPGIGFITAITLYTEIMEIKRFGKFDELSSYVGFSPATDSSGEKDKVIGLSKQQNRYLRNMLIESSWLAIRKDPALLQAYGNLVKRMSKQKAIIRIAKKLLSRIMYVWRNEKHYVCAVVS

SEQ ID NO: 299364 - protein, 345 aa, unidentified
MLIGCDYHPSWQQICWLDTATGETGEKKLEHASGEVERFYRQLPAPALIGMESTGNCQWFVELAATLGHDLWIGDAAKIRASDVRAQKHDRRDAELILKLLREGRFPRIWTPSGEEKDLRQLLIHRYKLVRIRAQVKTELQHLAMNQGITKKRRLWSKAGEKVLRELPLAPWASQRRKDLFRVREMLDGQIDLLDQAVVEIAEKNEKARLLMTQPGVGPITSLAFVLTMGDVSRFQRGKQVASYLGLIPREYSSGGHQRFGSISKQGNRFMRMLLVEAAQGAVRCDPGFRNEYVHRCHRKPKGVAKVAAARKLAIRLYWMLRTNSGYPEVVRVESSSRVPLVSAS

SEQ ID NO: 299365 - protein, 444 aa, unidentified
MTPCGPCGRPLLVVTGEGEEDEVLQEDPQAEEIIERVAALDIGKAELVCCLRVPHMGKPGRRLQEVETYSTMTRSLLGMADHLRCHGITRVVMEATSDYWKPVFYLLEAYGFETWLVNARDVRHLPGRPKTDKLDAVWLCKVAERQMLRPSFVPPAEIRRLRDVTRYRVDLVGARTAEKQRAEKLLEDAQIKLSVVAGDIFGVSGREMMRALIGGQTDPKTLAALARGRMRCKIAVLEEAFTGHFTGHHGFLLAKMLARVDALDADIAELDTAIDQMVAPFAEAVQRIDEIPGLGPVAAAVVIAEIGLEMSRFPTAGHLASWAGLAPGVKESAGKKLGRGTTGHGNRYLARVLGEAAVSVGRTDTFLGERYRRIARRRGKKKAIVAVARSILVIIWHLLSHPEARYTDLGSDFYDKRIDPERRKRTHVHQLEALGYKVTVEPAA

SEQ ID NO: 299366 - protein, 356 aa, unidentified
MSRDVKYIGMDVHKEATVIAVRNGNGDLVMESIVETKASSLLQFIHGLRGELHVTWEEGTWAAWLYDLLKPHVLQVLVCDPRRNALLKEGNKNDKVDARKLSDLLRTGMLRPVYHGENGLRTLRELGRSYQTISQDLQRVMNRIKALYRGWGIACSGTRVYAPRYREEWLQKIKQAGVHRRAELLYQQLDGLQELRRMVRPELLAESRRHKASKLLRQIPCIGPIRAARLLGLMQTPHRFRSKRQLWTYSGLGVETRDSAQYRFVDGQLCRAKKPQQIRGLNQNHNHEMKDIFKGAATRASCGIGPFREFYVGLLDKGMEPEMARLTLARKIAAIALTIWKKEERFDAEQLKSQAA

SEQ ID NO: 299367 - protein, 348 aa, unidentified
MGVYIGVDFHARQQTISYLTTEDGEIKKLVLLHEDPATVRAFYEQFAGQQVVVGFESSGYAAWFEELLEELGCEIWIGHATYIRQFAKRRQKNDRRDADLILELLMSGDFPRIHRYSMSTRQVLQQLRYRQRLVKMRTMIVNMLLFMAGSRGHSFRTQLQSKRGQARLSQLPLPEPLAQQRDELLSLLAQLDEKIKTVEGWLEQAAAADAAVQRLRTHPGIGLLTSICVRYTLEDVGRFATTRKVSAFAGFDPMEDRSDQRRRMGAISKQGSRWLRFFLVEAGQVAMRRDADLASVYQRVSRRGGHAKAKVAVGRRLLVRAFIMLRDEIDYAEFQRRGVAARSSRGSA

SEQ ID NO: 299368 - protein, 400 aa, unidentified
MRAVFGIDVSKTSSEVAILVNGEKVHGYTILNDAIGFNRLLGDLKTVHNPEIIFEATGVYSRRLQAFLEEYSYAYTRLNPLEAKKQLDSLRVRKTDKIDAEKLAKSQLVHNRKPTYVQEEVYQHLRDLSRFYQNMTEDLVRTKNRLHKVLQVTFPELETLLSTPTGEQYWNLVMAFPCKEFVLSLSQSNLCEIVRQSTSKRISEKRITYLTDKLIKLSKQSFCAVKKTSPMMEEVRYYAQELLRLSERRQVVLNDMVALAQPLPEYDILRSIPGIAETTATSIIGELGDIRRFQSSNQINAFIGIDLRHYESGNFLAKEHITKRGNPYARKILFKCIHNIASASHTNPCHIADFYEKRKRQSTIASTKPHTIASIHRLIRTMYYLITHNKLYDYSLTQNR

SEQ ID NO: 299369 - protein, 412 aa, unidentified
MEQIHDRIVGLDVHRDQVTACVRIPGPRGGARTEKGRFGTTTGGLNALAEWLSGHAVTLAAMEATGVYWKPVYYVLEDRFQVWLCNAHHVKNVPGRKTDMSDAEWLADVAAHGMVRPSFVPPPPVRELRELTRYRKTQVDARAAEIARVEKVLQDAGVKLTSVASKVLTQSGRAMIEALIAGERDPAALAGLAKGKLRPKIPQLTEALDGHFGAHHAIVAARILTHLDSLDDAIAVLDGQIAARVAGRYQSAAWLLADVPGLERRSIEVIIAETGADMSCFPSPAHLASWAGLCPGNHESAGKRRRVATTPGNQWLRRTLIESARAAARTRDSYFGAQYRQIARRRGPNKAAVAVAHSMLDVIWHMLTTGEVFTDLGADYFTNRQDKEHQTQRLVKQLEKLGYTVQLAAATA

SEQ ID NO: 299370 - protein, 422 aa, unidentified
MAKQIEDDLTVHIGIDWADSKHDVCIQPQGSETREFDVIAHRVEAIDEWVRGLRKRFGGTIAVALELSKGPIVSALQKYDFIEIYPIHPSTLAKYRETFKPSRAKDDPTDAELAVDLLLRHPERFKPLRPQSLEMRALATLVEHRRQLVGERTRITNRLRSSLKQYYPQALDWFDHIDTPMFCDFLARWPTLIQVKRARASTLRRFFAEHNMNRQQLLKSRLESIKHTVHLTTDDAIIVPYRIHALALVGQLRVILQSIGDYDEEIETLASKHPDYPLFTALPGAGPSYAPRLLVAFGEQRDRFKRAQDLQEYSGVAPVTERSGKKHWVHWRWQCSRFLRQTFVEWAGQTINKSYWAGQYYYQQREKGCTYQAAVRSLAFKWIRIVYRCWQEGKMYDEAVYLKALERRGSPLLARTAIQESA

SEQ ID NO: 299371 - protein, 357 aa, unidentified
MTKGITGTTGITIGLDVSDRFTEAYAIDANGEFVASWRMPTKAAALREQLSLYPGARVVLEVGCHSPWISRQLRGDGFEVVVANPRRVRLIAESDSKSDRLDAEQLARLGRIDPGLLAPIVHRGEQAQRDRVLLLTRDGLVRSRTLLINQARGFAKSLGARLPSSSSEGFAKRVREGVGENLFPGLDAILRMVEQLTQEIRSIDRQVERLCQDRYPVTELLRQPSGVGPLTALAFVLTLEDPNRFAKSRDVGPYLGLRPRRRDSGDRRPQLRITKAGDRLMRRLLVSAAHYILGPFGPDTDLRRFGLRVAERGGKAAKKRATVAVARKLAVLLHRLWVTGEAYQALGYDRGEDEQAA

SEQ ID NO: 299372 - protein, 355 aa, unidentified
MTALAEKVDGVIGVDTHRDTLSAAAVTAVGGLLGQLAVGADAVGYQRLVDFARVHVPGRRCFAVEGAGSYGAGLARLLAERGEWVVEIDRPRRPARRGGKTDALDAIRAAREALSQERPAVPRRRGDREALRVLLATRQGAVTARTCAINQLKALIVGAPEELWAELRGRSTSGQVAYCAALRDRPARSLEHRMTAKALRSTARRIRILAAEAAELQGEIGRLVQAVAPWLLELPGMGPISGGQVLVSWSHVGRLRSEGAFAAVAGASPIPASSGQVIRHRLNRGGDRRLNRALHTVALVRLRDDPETRVYAARRRAEGKSPREIRRCVKRAVARQLFKLLQRLDHAGVEVVQVA

SEQ ID NO: 299373 - protein, 401 aa, unidentified
MTLATRSETTIPARALYVALELSKNTWKLGFAVSRVGKTRIRDVKARDLDAFLREVEEARRHFRLAAGTPTLSCYEAGRDGFWIHRWLTAEGLANVIVDPASIEVSRRKRNAKTDRLDVQKLARLLARHHEGEDTLRVVRVPPLEAEAERLLPRQLRALKKKRTQWTNRIRAQLFMHGVDLDPRTGFRKQLFLRDLEKAQQWDGAPLPAGLVYMVKLDWEQFSLVERQIRDLEQRQRRALKKARESPAEVTSAQRKAALMTRLCGIGDVSSYVLTTEFFGWREFKNRKELGALAGLTGTPFQSGDSARDQGISKAGNARVRALMVELAWLWLRLQPESRTTLWFHAHVGKSGSRGKRKAIVAVARKLLVELWHFVEHGVVPKGARLKPVQAAQQSRRAVAA

SEQ ID NO: 299374 - protein, 388 aa, unidentified
MNVGADKSEPLTAVHTDLGAIFVSLELSRSSWLITSLSPGGGEKMSKHSVPGGDFPGLMERFAQLQEKARRRTGQSFRIIVVQEAGLDGFWIHRALQNEGIESHVVDAASIATSRRRRRAKTDKIDGETLVRALLAYKRGEPRVCAMVKAPTPGEEDRRHLCRERKALTAERVRHVNRIKGLLFSQGISGYQPLRRDRRQRLEELQTGDGRAFPQHLKALVNRELDRLELLLKQIKTVEAARDALLAVGQTAKPAPAAMLLDIRGIGPEFAAILWSEGLFRHFENRRQIAAYAGLAPTPWQSGAVDREQGVSKAGNPRLRTTLIQLAWLWLRNQPRSALSVWFHERVSRNGGRLRKTTIVALARKLLVALWKYVTAGVVIEGVTMKVA

SEQ ID NO: 299375 - protein, 334 aa, unidentified
MDKVTTVGIDLAKRVFALHGVDAAGRVVLRRTVRREQLMEAMAGLTPCVVGMEAGSGAHEWARRFQALGHTPRLMAAKFVSPYRRKGKNDDNDAEAICEAVGRPNMRFVPIKSAEQQALLTLHRVRQGFIAERTALINRIRGLLAEFGVVRAQRSPVVRRHSLAAAENLPVLARRAIEDLCAHLRTLDERIAGYDAQLRAQARTCEPAQRLMKIRGIGPLSALAIVATVGNARDFRSGRQFAAWLGLTPRQHSSGGKARLGHITKRGDAYLRTLLVLGARSVLQTAARHSDALSRWVLSVQGRRGYHRALVAIAAKNARIAWALLSRNQTLRIA

SEQ ID NO: 299376 - protein, 321 aa, unidentified
MNKSTIFVGIDISKDTFDIHDGVEGHFQFRNDLKGFALFAKRLKPGHWCVMEATGCYHQRLAIYLYEMGVHVTVVNPLVIKRFIQMKLNHVKTDRSDAMMICRYGQEQPLALWSPEASYIVDCKRLQSTIRLYFKQRTALKNMFHSLSYSGSAKGKLVRSLRRGIKHLDKEIGLLESEMEAVIRSNEQDLYSRLNTIPGIGRKTAMILIVSTNGFRSFQSAGQVSSFFGLAPNERSSGSSIRGKTRISKIGDPLLRNHLFLCSFTACVHNPQCKALYDRIVAKGKSKKLALIAVCNKLIKQAYGISKSGLDYDRNYVGRLS

SEQ ID NO: 299377 - protein, 346 aa, unidentified
MKIIGCDFHPSWQQVAWLDAETGETGECKLVNGDGEAERFYRGVAEPALVGVEACGNSQWFLELLQQLGHEVWVGDAAQIRASYVRQQKTDKRDAAHILKLLLEERFPRLWRPSAEQRDTRQLLIHRHKLVEMRTRVKNALQHLAMNRGMQKKRQLWSEAGQQAFGELAMPGWAGCRRQDLLEMLAYLDKKIAPLDRAAEELSQRDKMAQLLRTQPGVGPITALAFAATLGDASRFQRGKQVASYVGLIPREYSSGGKQRLGGISKQGNRFLRQLLVEAAQSAVRCDESMRRPYLHRCHSKPKGVAKVAAARRLAVRLYWMLRTNTGYPEIVRIESSPRVPRVGAS

SEQ ID NO: 299378 - protein, 418 aa, unidentified
MKKKQYKFIKVNGKTLIVGIDIGKSTHYGFFLTMSYESAKSFHFSNTREGFDLLISKIVSFTKVNDIENVVIAVESTGNYWLPLAYYIQHYTNYTLVQVNGKHTKRFKDVTDNSPNKTDHKDPKVIAQVVLIGSSLRVNLPRGIKANVRELTRSRKSLQADRKRVVNRIHAILSLYFPEFIDLFKDISCKTSTYLLKNHPNPANIIKLGPKALLKDLQKISRGRFNAKKVEELISAAFNTIGVKDGLEAYQNIVITYTIQIELFDVQISAIEKQIKKSLVSLEEYFILKSISGIGDITIATIISEIGEFSQFKTDKELLKFGGLNLVENSSGNHRGNRRISKVGNEHLRTSVYFLALRMVKKGGIYHEQYTMYVNKGMEKKKAIIAISRKLLRTIHSLIKNNQAFDYKYKTKYLKTAA

SEQ ID NO: 299379 - protein, 366 aa, unidentified
MKKISTMQAFSNEILKEQKLTIGVDLGDRWSFYCVLEEAGKIILEQKVATTPEAMKQTFGKVPGSLMALETGTHSPWVSRLLTELGHEVIVAHAQKVQLITKSNRKDDRHDARTLARLARIDPELLGPVRHRSAKAQIHLTVIRARAELVSARTALVNAARGLVKSFGQRLPKCGTYQVSEKLAEGLSTELRDVLVPLLREVESLSERIQEYDERMEKIAKEEYPEVSLLQQVKGVGTQISLTYVLTIEDPYRFPKSRQVGCFLGLRPGRRNSGESQPQKKISKEGDRYLRTMMVQGAHYILGPFGEDSDLRRWGLKLAERGGKNAKKRAVVAVARKLAVLLHRLWVSGEVYEPLRNSQKAMRAVA

SEQ ID NO: 299380 - protein, 351 aa, unidentified
MMIIGVDYHPSFQTIAFFLKENGECGEQELNHSDGQAERFYRDLKQRGISVRVGMEATGYSRWFERLLAELGFEVWMGDPAEIKAKRVKKQKYDREDARLLLRLMRENNFPQIWVPGPENRDLRQLLWHRHRLVQMRTRIMNQLQALAMNEGYRWKKKLFSEQGRAQLEKLALAPWASRRRQELLELLDRMNPTIEELTAAVDREARKRPEALRLMTHPGVGPLTALAYVLIIGIPARFQRGKQIGTYVGMIPSEDSSAGKQRLGHISKQGSSLLRFLLVEAAQAAARIQPDWRRRYMHLAMRRHKSIARVAMGRRLAVRLYWMWRNGCEYSPSLEFGSYVGQLGTGHGVK

SEQ ID NO: 299381 - protein, 445 aa, unidentified
MHYKRLLTWIDGSSSYLSVGLDVGADFTWMSIALPNGAFIGKPFKIVHSDPRSRDLAVTKIKEAQETYSLKSRCFLESTGIYHIPLLCFLRDKGFDCSVINPIITKNSTNINIRKLHNDIFDSKKAALVGLNVSLKTSIIPEDSIVDLRNLVRDYYYFKDLQSAVALKLTAELKVSFPAYAKVFSKVTTQSSLKLLSSYPLAGDMLEASKDDIVETIRSTARFGEAYALRKYDAVIAAAQDASVFGRALPSNAVRIRLYIDTYQEYQKHLDALLKALHETIEKLQDTLIYDQICLLQSLRGIGFLSAVVLIAEMGDFKLFPSPKKLYAYFGLDPAVKQSGKLNGDKVHMSKRGSSLARRVLHMVALNNVKVDKGSGTPVNPVIYDYYTRKCSGKKKPVAMGAVMHKICNIIFAMLRDNKPFEIITPEEHCQRFAAEYPDKIRKAA

SEQ ID NO: 299382 - protein, 411 aa, unidentified
MDILIERCCGLDVHKDTVVACVRTPGKGGRRSQETRTFGTMTTDVLALRDWLVAMAVTLCGMESTGVYWKPIYYVLEDATQCWLLNARHLRNVPGRKTDVGDAEWICQLLEHGLVRPSFVPPKPIRELRDLTRYRKAQIEERTREAQRLDKVLQDAGLKLSSVATDILGKSARDMLEALVRGTRDPEVLAELARGKLRKKIPELERALEGRFSRRHALIVSSILSKLDFLEELIEHLSTEIEVILAPFGAEVELLDTIPGIDRRNAECLIAEIGVDMARFGSSARLASWAGACPGNHESGGKSKSGRARKGSKWLAGYLAEAAETAGRSKGTYLGAQFQRLRGRIGHAKARKAVGHSILVATYHVLDGHVPYADLGADWFQKRRPDAHAHRLARQIEALGYHVSIEPAEAA

SEQ ID NO: 299383 - protein, 374 aa, unidentified
MRDHSEAFVAFDTSKSRNAVAIAEAGRAGEVRFFGEIENSAAATAKLVRKLAGKYARLTFCYEAGPTGYGLYRQIKSLGYECLVVAPSLIPRKPGDRVKTNRRDALSAVKLLRAGELTAVWVPDPRHEAMRDLTRARGAAVEDLRRKRQQVSAFLLRQGRHYSDGKPWTKAHMRWLASQKLEHPEQRIAFEEMLLAVRQAQERIERLEQAIRAAVPDWSLAAMVTALMAMRGIDLVSATALLAEIGDLSRFQTAPELMAYLGLVPSEDSTGDTVKHGPITKAGNRRARRILVECAWSYQHPPRVGKEKQEKVAAAPRAVREIAWKAQCRLNRRYRALIRRGKLKTVAVTAVARELAGFIWAIGREVTTADAAAR

SEQ ID NO: 299384 - protein, 418 aa, unidentified
MKSIKTEKIKTINEKTLIATLDIGKKVHYGYFRAPNNQDIKPFPVYNTGQSFNKFWKKLCKFKEKHMLDEVVIGFESTGPYAEPIANYLRKRSVKLVQVNPMHTKRIKELTGNSPNKTDKKDPRVIADVISLGHSLTVVVPEGAAAQLRRLTHARERAMERRTAMNNQLQDLIFVIFPELTSIIKPSTKTGMYLIKNYPDPENIVSIGIETLCNIVRKVSRGRFGIDRAEKLYNAAKASVGITEGKESILLETSHLVSNIETENRYIASLEEQMAVYLEQIPYSHSILSVKGIGNITVAGLIGEVGDFGKFKTIPEVMKLAGLDLFEVSSGKHKGRHHISKRGRALMRKLLFFAAINAVKSHGIMHARYQKMLNNGTPKIKALIAVSRKLLRIIFALARDNAKYDEDYNRKHEFKLAA

SEQ ID NO: 299385 - protein, 423 aa, unidentified
MSKQNVEIAAFVGLDWADQKHVVTLQVANSDERHRFNLDHTPEALQSWIQSLRDRFAGKPVAIAVEQTRGSLIYALMHVDCLHLYPVNPQTLSQFRKAFYPSGAKDDPLDADLLLEVLLKHRDRLRVWVPDDVLTRSIQLLTEGRRHLIDERTALTNQLTAALKMYFPQGLDWFGDLHTARACAFLGRWPSLQDLKRATPSSIRKFYKAQGYRGDDKLEQVIANIKQAQPLTQDGAVLLSSSMMVQALVTQIPVLTESIQRYDQQIASLFKQHDDSTLFGSFPGAGPALAPRLLAAFGSNRDRFECAAEMQQLSGIAPVTEKSGTSIWIHWRLACSKFLRQTFQEFAGRSILQSDWARAYYDQLRQRGKSHHAALRALAFKWIRIIFRCWKTRTPYDEALYCKTLQLRRSPLATQLPAAEKSC

SEQ ID NO: 299386 - protein, 325 aa, unidentified
MSRIQEKKPTKKTEGLAVMGVDVSKDQLDAYVLHSNEWHNVPNNRKGVELLLRICRKHQIELLVLEATGRYHWLAHQQLHAAGINTAVTNPARSRNFARSIGRLAKTDKIDAQMLARFGDATRPPTSVPPSPLNAQVTEMIVARRQIVDELTILKQQKSQTKLDHVRAQIEERVRLCRRHCKDLEEQTLALIATDAQMVEKYDILTSIPGIGPTTAATLICELDELGQANSRQIAALAGVAPVNRDSGQFRGQRKIGGGRKQVRDVVYMAAVVAIRWNKEMMRFYERLKNAGKPFKVAITAVMRKLLILANTLLRENRPWCEVRP

SEQ ID NO: 299387 - protein, 340 aa, unidentified
MDNVTTIGLDIAKSVFQVHGVDAVGAVVIRRKLTRGRVLGFFEKLPRCLVGIEACSSSHYWARELIARGHDVRLLPAQYVKPYLKRQKNDAADAEAICEAVTRPTMRFVPVKTPEQQSVMMLHRVRLMLNRQRTQVSNALRAHLSEFGVVAPIGRNGIEQLLVVINDDNDTRIPADARLCLRMLEAQLRVVKEQILENDRRVRASARETELGRRLMEIPGVGPLLASAFVATVADAHAFKSGRCLSAWIGLVPKQNSSGGKEKLGSISKAGNRYLRQMLVVGAMAVIRYAERNGTRRPWLVQLMARRTTKVAAVALANKTARMVWALMTSGERYREPIIA

SEQ ID NO: 299388 - protein, 315 aa, unidentified
MDERAGRIVGIDISKDRLDVHVLPEGEHFTLGRDEAGLKALTKRLAKQALQVVAMEATGGLEAPVAAELHAAGLPVRVGNPRQVRDVARGLGILAKTDAIDAAMIARFAEAAKLTGAPVPDAQAQHLGALVARRRQLIGMRTAERTRLQQTTDKRIRRSIERLLRSIEAELEGVDRDTDGAIKGSPLWCALAELLDEQPGLGNTTARVLVAELPELGRVSGKKITSLVGLAPYPRDSGVLRGKRAIWGGRASVRTALYMATLSAVRCDAVLKEFHQRLIARGKLPKVALVACMRKLLVHLNALVAKYYAKIEQTA

SEQ ID NO: 299389 - protein, 359 aa, unidentified
MLYLGIDQHRKQLTVNLRNENGDVVLKRQVSTEWERVMQFFEQLVEIACDQGGFVAIVEVCGFNDWLFDMLHDYGCRDVVVVQPERRSNKKTDRRDASQLSQLLWINRERLLEGKRVCGLRRVILPSREDAQTRQLTALRQRLGRLATRTKNKVQRILLKHNLQQECPTKGIRTKTARRWLKGLELDPIDRMEMDLLLEQWELWDKQYQVVEEEIARRFEKEETAQLLATIRGLNAYSGLAIASRIGDVTRFPRPGSLANYWGLTPGCRNSGDAKDRLGSITKAGSPIVRHFLGQAVVHLLRRDVEMKGWFQKIKRRRGAKIARVAVMRRLATIIWHMVTKKQPYRPGRMLRPTDDQAA

SEQ ID NO: 299390 - protein, 372 aa, unidentified
MDQVTTTFVAMDTHKQTISVAIAEGGRRGETRFLGEISSRPDAVAKMVGRLAKKHGKLAFCYEAGPCGYGLYRQIVALGHDCVVVAPSLVPTRPGDRVKTDRRDAVTQASLFRSGELTPVWVPDDAHEAMRDLCRARQAAMEALRCARQQVLSFLLRHGRVYSDGKHWTGKHRLWLAGQRFEPAARQIAFEELVQAMDEAQARRDRLAKQMQELLPSWSLAKVVAVIQALRGIAAISAITLVAEIGDFKRFADPRQLMAYLGLTPSERSSGAKTARGAITKAGNTRARRMLIEGAWTYRLPARVGAAILERNTLLPQAIKDIAWKAQVRLCARYRRLARAGKPTNVVCVAIARELAAFVWAIATNDAVAVVA

SEQ ID NO: 299391 - protein, 349 aa, unidentified
MDFYAGLDVSLEATNICVVDGDGQVVREAKLETDPDAIELFLAEWGIHLKRVGLEAFSYSAWLFTALSEKGLPVICIETRHAKAALNAMLNKTDRNDARGIAQMMRTGWFRAVHVKSEGAQTLRALLVGRKALLGKVLDMENMIRGLLRPFGLKVGEISVGRFDARVREIMAGKKELEAIVTPLLDARGAMRLQLAKLQRLALAAARSDSAVRRMMTVPGVGALVALTFRATVDDPARFRKSTNVGAHFGLTPRRYQSGQTDRIGSISKCGDELTRAMLYEAAIAILTRIPKNFKLRLWGLRLARKKGLKRAATAVARALAVLLHKIWSSGTTFRFGAGGKRGRVAAAM

SEQ ID NO: 299392 - protein, 353 aa, unidentified
METPIKQTAGIDCGMQELVVSFGLLVSNGNFIYRLTKSFVNNINGFKQLLQWINEISSKETTVLYVMEATGVYHEKLAYYLIANNCQVSIVLPNKVNAFAKTCTSKKQDDQQASKVLAEFGCVKQLDEWQPPHPLFAALKQLTREKHQLQQELTIIKNQLHAEQTKAITASASIKRMKARCRLIERQIAEIEKEIIDTLNQDAVVKEKVDKVCTIPGVGLQTAVTVIAETNGFNLIRNSRQLVSYAGLDVVQKQSGTSVRGKAHISKRGNPHLRQCLYFPSFSAAKYNKPMQNLYNRLVEKQAIKMKGYVAVQRKMLMLIYTLWKKNEVYNPSIKFLEQPVEAALTELDYIRS

SEQ ID NO: 299393 - protein, 385 aa, unidentified
MQVMIEGQSHFQPFGLPYWGFADLNKGVGSMTASYDYHIGVDYHKSYSHLVVQDSGGKTLRSGRVKNDRQSLGGFLERYRENSHAVVEATRNWMVMYDWLDDICDDVVLAHPLKVKAIADAKIKTDKIDATVLAHLLRADLVPEAWAPSDTARDLRIALRERMFYVRLRTMTKNRIVTVFDRYPEQTAQLKTLGDLFGKAGRVQLAQVNVSEIDRIQIDRGLAFIGDIDGRIKQSEATIRAMTKANANVRLLKTIPGIGEFFARLIDAEIDDISRFRNAKKLAAYAGLVPSTYSNGGKTFHGKLIKQGNKWLRRAFVEAVSPAIASDAQLRAQYEHLKFSGVNKARVAIARKLLTIAFQILRDQRAYEPRGESPTEGASAISRLS

SEQ ID NO: 299394 - protein, 399 aa, unidentified
MERTYSVCCGVDVGKSSHHFAAIIPATGELVFDGKVEQSESGIRDALLSVSLFGSPVVVVDQPGNMAALLFAVCDDMGIAKGFITPRAMSKAIEMYGGDIKTDAHDALVIAEVSSSLPKLVKPVGEKSALYLRLSALMSYDRELTLESTRATNRLHDLLLSVSPALEAHLEGKRVQSNFSLMVLSRYGGPAGLKKAGRGNVRRWLRSRKGMGEAALRRLDDLFEAIGRQSVTIAGSEYVEELIKQEASFLLTVLASRKKVAESRDELLSQMPEARLLMSLPELGAVTCATFLAEVGDISRFPNASKLASYAGLAPKVRQSGKTIHSVTKPRGGNRRLKRVLVLSAGKSVQFCEESRAYYERKRSEGHSYGSCMMALARRRLNVMYAMLRDGTAYEKQNG

SEQ ID NO: 299395 - protein, 408 aa, unidentified
MNAVGIDVSKGKSMVAALRPMGEVALLPQEFLHTEVGLEQMAYAIVALGEDTRVIMEATGRYHEPIAAALHEYGIYVCVLNPLFIKQSGGGSIRKVKTDKADAMKIAKYGLDNWVELREYTPMDTVRQQLKLCSRQYNLYMKTVVSLQNNLISLTDKTFPGVNELFSSPERADGHQKWVDFVMTFWHCDCICRVSEKAFTDRYQKWCKRKGYHFSTEKALDLYAGSCGHFTTLPKNDNTKLLITTAAQQLLAGKTTLAALRTEMTRLAKQLPEYDTVRAMYGVGETTAAQLMAEIGDVRRFPRRSSIVGFAGVDPAVDQSGKHSAKSVPTTKRGSPHLRKTLYQIVCTYLKRSPADEPVYQFLDKKRAEGKPYFVYMTAAQNRFLRIYYARVKECLEAFDERQDTVQN

SEQ ID NO: 299396 - protein, 363 aa, unidentified
MFTERTSVGLDVHARSVAAAAIDGVTGELVQAKLTPSYEHIRSWIQGLPGPVAATYEAGPTGFGLHRYLSATGIRCEVAAPSKLQKPSGDRVKTDAKDAIHLARLLRLDEVTAVAIPSADQEAARDLVRAREDCRGDLMRARHRLSKLLLRHGIVYYDGDAWTGKHDNWLRHEALPQLSDRATRLAFDSDYDTVLVTKARRDRLDDAICEMASDSEFTPLVRRLGCLRGVSTLTGFALAVEIGDWHRFTGNTIGSFVGLVPSEYSSGTSRVQGSITKTGNTHVRRLLVEAAWHHRSRYRVGKTMRDRWDLAPAAARARGDEGNRRLHQRWVRFIDRKKKPTIANVAIARELAGWCWSLAVLEE

SEQ ID NO: 299397 - protein, 424 aa, unidentified
MKVTYQTCCGVDVHKSFLVATIVKTTGGIEPSYQKKRFSTFNNSILEFKQWLLDNDCHDVCMESTGKYWVPVFNLLEDEINVVIANPKWVKAVKGNKDDTKDSKWIGDLFRLGLVKGSYIPCKIVRILREYTRYRYKLVSCRSSEKNRYQNALTVCNVALDSVVSDIFGKSSTSIIDYLLEQSGTSINHEEIASKLLRSLKSKEDAVIESVEGYQMTDAQKYRMRLVRAHMDYITAEINDVDKMIENMISSNPDFENAVQFLCTIPGVKRDSAITIISEIGTDMSQFSSSKRLCCWAGLTPGSNESAGKKKSVRITRAGVYLKPALVQCAHAAVKSDKSPYYKKKYESLVKRRGKKRAIIAIARMILTAIYQMLSTGEQWNPSDLYKIDMPEALVEKQKAKAIKQAKKLLQREGLLPPDEPVAS

SEQ ID NO: 299398 - protein, 419 aa, unidentified
MNYVGFDWASRAHDVTVLDEAGGVLDRWAFPHSETGWVTTLDRLARHGSAAEVPVIIERTCGLIVDRLLAAGHPVVPVHPTAFYAARPRWGASGAKSDPGDSYKLADYLRTDGHRLRRLTPTDPGLHELQALVRLRDDQVRARTAATNQLTAILDTYWPGPKQLFMSLASQIALAFLTDYPTPTSAAHLGEARMAAFCRRHAYRGGKSPAELLSRLRAAPVAPVGLPPATLAAMVTAQVTVLKTLQTVISDVERLIAVRVVAHPRSNLFENLPGVGMINLAQLLAEVGPILDRVDSAEQAATECGAAPVTRSSGQTRGVYFRWAANTRARKAITSFAHNARMQDDWAAALYADARARGKRNPHATRIVARAWLRVIWACWTSGQRYNPDRHHSSRFLHRCHPAGAQARSRWSPPPEERS

SEQ ID NO: 299399 - protein, 454 aa, unidentified
MTRHPVGSSAIRAPVQGRAGVAVVEAFEAFEEVKKVDKPFRLWAGVDWGSEKHAVCVIDADEKIVLHRSVEHTGEDIQKLADQLIELAGGDPDAIAVGLELPRGAILETLIERQVAVFSLNPKQLDRFRDRYTVAGAKDDRRDAFVLAASLRTDAPRFRRVLLGEPELVRLRELSRMHEDLTKDVNALGNRLREQLHRYFPQVLALGSVYSDRWLWDLLEMAPTPQQARSLRPSDVFAILTRYRIRRTDAFKVIDVLNQTPLRVAPGVTDACAEHIRMLLPRLRLVASQREQCAQRLKTVLEELSRPLDASEAGKTEHRDARILLSLPGVGVLVGATMLAEAAQLLQERDRGSLRAQCGIAPVTRQSGKSMRVSMRRACNPRLRQAVYHWARVSIRYEGRSGEHFRALRAKGHSLGRALRGVADRLLTMLLSMLETRSLYDASRRAPPPQIQPA

SEQ ID NO: 299400 - protein, 312 aa, unidentified
MADMVRLAGIDVSKDKLDVHVTPSGESRTVSYDRRGLAGLRRWLVGLGVALVAVEASGGYEREVSEVLEEAGLIVHRLNPLRVRRFAQLKGRLAKTDSLDARTIAEFARAHPQEHQLRRDPRRERLAEHLLVRRHTQDAILDCINQLEHLRDSRLRRLVTARKASMERTLAKLDRCLVELIAEHDDLAELSERLRSVPAVGPVLAATLIALLPELGSLTRRQVASLVGVAPFDRSSGRKIGAKSIQAGRVFIRNTLYMAALTAAQHNPAIAAFAQRLAGKPGKVRLVACMRKLIVTLNAVVRDGTQWQPRTA

SEQ ID NO: 299401 - protein, 414 aa, unidentified
MENSYRVAGIDVHKKMLAVVITDAAVIGEFRFERRKFGTGADELRSLGNWLTEQGVKEAVMESTAQYWKPVWQGLEDSFRLHLAQAHSNKAPKGRKRDFADAERLVRRHIAGELILSFVPDQEQRLWRTMTRTRQQLVRDRVRLQNQLEGFLEEMRIKLSSHVSDLLGLSARRMLQAMADGETDPAKLATLATSGLRATSGELRDALSAATTLRQMQRQILRLFLERLTLLEAQIDTLEKSAAEGLRQHQDSVRRLSEVPGLGADSAQQIIAEVGPQAATFPSPEQLSSWVGCCPGREESAEVSTSDRSPKGNRHMRRILTQAANAAVKAKGSVFELLYRRLVRRMGHAKAIWAVAHRICRITWKILHQGVIYEERGQRTNPQAVRQRTNRLVRDLRRLGYQVQLTPLNQVATA

SEQ ID NO: 299402 - protein, 343 aa, unidentified
MSEISTIGLDLAKNVFQVHAVDPLGGVVLRRQLRRGAVEKFFAQLPPCTVGMEACGSAHHWARVIGRYGHQVRLMPPAYVKPYVKRNKNDGRDAEAICEAVGRPTMRFVPVKSVEQQAPLAVHGTRALLVRQRTMAANALRAALSEFGIVAAQGLKGLRELMARLEAPSVEIPEMMRGALLVLARHWQTLDADERALERQIAKAARADYEARRLMEVPGVGPIIASTVLAKVPDAKVFRSGRDFAAWIGLTGRDYGTGGKHRPGRISKQGDRMLRALFISGASAHLRQQKARGVGDPWLRELLARRPYKVAMVAFAAKTARVIWAMLVKGEVYRDRASASAAA

SEQ ID NO: 299403 - protein, 376 aa, unidentified
MAATAQGTEYRIGGTLFVSMELSSRVWKVTSTSEVGGKVREKNVPAGDLAGVMEEFCKAKKKHGLREDAEVVSCYEAGRDGFWIHRELTLLGVTNLVVDPSSIEVDRRARRRKTDRIDGRKLLAHLLRWCGGERCWSVVAVPSIEEEDARQLHRELEALKRERTRHRNRISSLLVVHGIRAEITDDFAERLSEMQLRDGRALPEHLCERLVRESERLHVVRAQIAELEAERRALIRTSSDPAIEMVRKLMGLSGIGENAAWLWVMEFFAWRHFRNRREIGSLAGLTPTPHASGESRRELGIDKAGNPRVRAMAIEIAWCWVRYQPDSELTRWWVRFANNGRSRRIGIVAVARKLLVAMWRYLEFDCVPQGARLKAA

SEQ ID NO: 299404 - protein, 401 aa, unidentified
MNTTTMLYVGIDISKDKSDICIKDVKGNDLIQRFKITNNKADLGHLYETIERIKSKTAGNSDVVFGMEATGIYSLPLYSALKRDGYKVKLYNPIQTNGFRKMNIRKTKTDPIDSAIIADMLRFSEPPEVNPIKDLNLYQLRELVRIRDRLIDKQTVCKVQLVRNIDTVWPDYSSVMKSATGVTSIAILKKYSVPSKVKAESFEKFYEFVKKKSRSKISRTTSEELYNHAGNVLTIPELDSIISVEIKTLITELELYDEQIQSIEKRIDQMMKLIDSKIMSIPGIGDTLGPMILGEIGDADRFSTAKKLIAFAGLDPVVSQSGRFENKSGSISKRGSPLLRKGLFLAANVARQNDDNLKRFYDKKISEGKHHFSALNAVAAKLLRIVYWVLKNNKEYQKQVN

SEQ ID NO: 299405 - protein, 354 aa, unidentified
MPDTTTGEVVNLTLMHEGDKVREFYSKLPRPVLVGIEATGPMQWFLKLMEELRLECRVGHPAQIRAAEPRKQKHDRRDADLILKLLAENRFPAIWLPNQELLDLRALLLHRHQWVRMRVRIQNALQAIALTNGLRRGPSLWSYDGQAKIAFLPLMPHAAHRRNRLQAMYKTMESEIESLNKQVAEQAGNRPGAQRLMTHPGVGPVTALATEVFLGDPQRFADSKTLASYVGIIPREYSSGEHQRLGGVTKQGSPLLRFLWGEAGAHAARRDPELKRFYRRKLVQKGLGKARVAVARKLGIRLWIMLRDEIDYQEFCRRGQMQQKTVRPVAGMPETGNGAKSHRPVDEATRLPGS

SEQ ID NO: 299406 - protein, 349 aa, unidentified
MRFYNRQHRFYCGIDLHARLLAICVLDQAGNIVLQTQIGADKQLLLETLAPFRPDVVIAVECLFAWYWVADLCAREGIPFVLGHALYMKAIHGGKTKDDDIDAEKISRLLRGGNIPIAYVYPKGLRETRDLLRRRNYLVHKRAELIAHIQITNAQYNLPPFGKKLVYAKNRAELKVAEHFPDAHVRKNIELDLALVDHLDEQLADVELYLQRTVKVEDPHSYYLLQTIPGVGKILALVLLYEIHQIARFADVGDFLSYARLVRCVHRSAGKQVGTGGKKIGNAHLKWAFSEAVCLLIRSCPAVKAWQARHEKKHGKKKTLGILAAKLGRTVYHLLRKNVAFDVRRFLGQ

SEQ ID NO: 299407 - protein, 394 aa, unidentified
MKNVLFAGIDVSKDSFDIAIINKNKKIVMQSKFEMNSKGFNDLSENIAKLQYDELLFVMESTGVYHLNLYLHLIDNNHKAAVVNPILIYNFARSISLRKTKTDKKDAETIADFALSNQQKIDFSNKEDNSIRNISRERDNLAQNVAKLKTEIKNVLHVLFPELTKHTNIFTKTMLKLLLKAPGCIPILNLKPQQITRFFNNTRGNKIQISAKELKTIAEESIGIKDVYLENVLICKIKRLLFITEQIKDMNNLLKMFVKENLQQDFEIITSINGIGDTTAEKFLIEIADINNFKSHKQLRAYIGTDPSIKQSGSSININGRISKRGNAYLRKTIWQMAVGVIRCCKQFQDYFNKKISEGKKYKQAVIAVANKLIKTLYAMLMNKTYFKVNIKPN

SEQ ID NO: 299408 - protein, 384 aa, unidentified
MNKHSMIFIGLDTHKEFHEVAYCEEQRGASAVHYGRIPSSKVSVKKLIRQFESKYPGATIHVVYEAGPCGYWIYRLITSLGHCCYVVAPSLIPKKPGERIKTDRRDALKLVRSLKSEDLTPIYVPEPEDEAVRDLSRARELAMKDLKEAKYQLKALLLRNNIRYEGTANWSKKHLRWLTELILPHPAQHIVLQEYLQTIEERIRRLERLDNELTHHVHQWRYYPVVKAIQAMRGVRLLVAVGVVAELGDLHRFDHPRKLMAYLGLVPSEHSSGGKRHLGAITKCGNGRARRLLIEGAHSYRYPANISTDIQLRQEGLPKDIVDIAWKAQLRLCKRYQRMNKKGKHYNLIITAIAREMAAYIWAIAKEVVLTPVNPKLRLSRVPA

SEQ ID NO: 299409 - protein, 420 aa, unidentified
MSKKMVADLQKFIHKGEMSMNAVGIDVSKGYSTVCVMRPFGEVVASPFEVTHTAPELNELVKTLKSLNCETKVIMECTGSYHLPIANALQAAGLFVSTLNPILINKFGNDTIRNRKTDPADSIKIANYGLSAWLKLPKYIPEEEIRQMLKTFSRQYNKYNKIKTMLTNNIISLLDQTFPCLKTLFTSQAREKDGHEKWLDFAAQFWHCECISTLSLKAFTERYSKWCKRSGYYAVKADEIHAAARTCAFTMPKNNTTKLLITHAVSQVNFVVESLATIARELTRLGSLLPEYPVVLEFFGVGKILGPQLIAEIGDVRRFRKKSSLVCFAGLEPEANQSGSYQGDEPISKKGSPHLRKALFQVMDCLLQNSPIDDPVYQLLDRKRAENKHYRSYMNAGAAKFLRIYYARVKEYLDSLETAA

SEQ ID NO: 299410 - protein, 418 aa, unidentified
MFKIFRKNCCGLDVHKTWIYACIGITDATGRTEYKQERFSAFTKGLRKLAEWLAKYECVFVCMESSGKYWIPVFNVLEKTCFVTLAHPKYTKPQKGNKTDRKDAKWICDLFMCDMIKPSFIPSPDIRNLRDLMRYRFKLTCMLTGEKNRALNCLTVSNLKLDDVFTDVFGKSSQSIINYILAHPGEHFDVTPFVHKGCKQPIEEIQAAVDGSISPEQATKLREVLRHIDEIKLHKQNIETEILRLAAPYQIVLDFIRTVPGFSSDPMTAIALLSEIGPDMSVFPTAKNLCSWAGCCPKNDQSGGKRKSNRISRAGVYIKPLLVQVANAVVKSDKYPEFKERYRRLKARRGHKKAIIAICRMFLTAIWNILSKCEPYSADGYLDHRPSKSMVISTYQALYLLKSRGYIIKDDLPFEPPG

SEQ ID NO: 299411 - protein, 316 aa, unidentified
MPNHREEGVNVGVDVGKFQLDVFIHERALALSVPNTPAGVRKLLGRLVRFKLARLVVEATGRREYDLVVAAAERGLPVVVAQPLTIRRYAAAKGILAKTDRLDARVLADYAATLRPDVRPIPIGPIREIKDLAARRRQLVTMSTMEKNRLDVMPRSLHADLRRHLKHLQAQVEKLDRAIDKLVAGVDAWWQKRELLVSTPGIGLQVANTLLADLPELGTLSNKQIAALVGVAPFNRDSGTLRGKRRIRGGRSSVRTALFMAAMSAIQHNPVLRAAYQRMVAAGKHKKVALTACMRKMVVTLNAMLRDDKPWTNVYA

SEQ ID NO: 299412 - protein, 290 aa, unidentified
MSKITMIGIDTAKQVFHLVGIDQHGKYELRQKRSRSKLLSSLAQREPCEVVLEACAASHHWARQIAAQGHRVHLIAPQHVKPYRRGQKNDYRDAEAIISAALSPGMHFVGVKGVEQQAEQALHRVRSRLLSHRNAAANGLRALLGEYGYAFAKGLKSLRRGAIDFIDRGEAAALGLSELIRDVLEELDGLEARMKRYEGQIRQRVRQDELSRSLSTELAGVGALSASALRVKVADVRDFNNGRNFAAYLGLAPGHRGTGGEVSIGKLPRGRDRYLRQLLIHGARSVVGGL

SEQ ID NO: 299413 - protein, 319 aa, unidentified
MSARGVFVGVDVAKDALDVAVRPSDERWSVANDEADVAALVARLRPLEPTLVVCEATGGFEHAVIAALAAAGLPVVVANPRQVRDFARATGQLAKTDRLDAGILALFAERVRPTPRPLPVAAAQLLDAVLTRRRQLLEMLTAEKNRLGFAPKPLHRGIRAHIRWLERQLDDVTKELAAQIEQSPVWRAKDDLLQSVPGVGPIVSYTLLGELPELGTLTHKRIAALVGVAPLARDSGTLRGKRLIWGGRASVRTALFMAALCGRRWNPTRKIFYERLKAAGKPTKVALIACARKLLVILNAMVRNNTPWMTPTARIQYSC

SEQ ID NO: 299414 - protein, 352 aa, unidentified
MESSLMKRTLSHYWCVGIDLRKDTLTVCIFCRCCGEVVYRKIPCKCRNQIVEFFAGLPKPHTVAIEAVGFYRWLWEMLEPIVEKLVLADATQARALAGRRLKTDREDAFNIAELLAAGRLPLSYAPPMEIQLLRDLTRHRNSFSRQHARVLCRVKSIMNANNRPGPVRLQSEGLIRYVKAQGSQLPERHVTMLWNCVDQLALTERQMAQAERTIKEVVEQEVFAEVYSILTSFPGVALVTAATIIGEVGDFTRFTYRKSIARFAGLNPTVYASGGKQKIGHIAKTGSPHLRWILQQAAWTAIRTDDQIKLTFLRIARRSGRKAAAVAVARKLLSWMWVAVKNGEPYRRPVAA

SEQ ID NO: 299415 - protein, 343 aa, unidentified
MPHYVGLDVSQKTTAICVVDEQGKRLWRGVCATDPGAISARVSQHAGVDAKVGIETGSMTPWLVHCLRSAGLDVQCLDARKVKAALQMQLNKTDENDAEGLAQIMRTGWYRAVHVKSLDAHRARALLGARAQLVGMTTRLSNMIRGVLKTFGLLPGAGRGLRFDRKVEALLESAPEIALVVRPLLATWRQLREQIAVFDKAVLQQVRADPICRLLMTVPGIGALSSLMYVSTVENPSRFSRSRAVGAHLGLTPRRYQSGETDRSGHISRCGDGLARTLMYEAAIVILHRVKRPLHLKDWAEAIERRSGSGKARVALARKLSVILHSVWRSGEPFRWSAPVMAA

SEQ ID NO: 299416 - protein, 337 aa, unidentified
MLTVGVDSAKATLEAATWQDGRAVRLGTFEQTPAGWTALQDAIAGLQTAPADTRPATDREPVAMVLEPTGGYELACALWARQQASWQVHRPNPARVRAWARSQGLRAKTDRQDALLLARFGASAQPALPVWQPLASEVSELEQLLHRRDEVADWLQRERRRYEQLGVRPDASMTVRASLERLLTTLDGELADLERAITDHTQRHAELRAGEERLRTVPGVGARIALPLLVTCERFHALTAGQGDAKGLVAYVGLDPQPHESGVSVWRPALISRQGARGLRARLYLGALGALRGDNSVHAFYQRLVDRGKPKKESGFGCGCTQAAGLGVGGVYLGPDV

SEQ ID NO: 299417 - protein, 353 aa, unidentified
MSTLDYIGFDVHKKTVNFCAKAGDGRILDEGQIAARRVDLNAWAMARSRPWIGAMEATLFTGWIYDLLRPQAQALKVAHPTMLRAITASKKKNDRVDARKIADLLRCNLLPECYMAPSQTRERRRILRYRNLVVREATRMKNRISGLLMETGTPYNKGKLHGKAYFAELLGNLQETPASVRDLLGLSRGQLDLFESIQARLVKELVGDPELADRVERLRSIDGVGAILALTWVLEIGEVKRFGSIRQAQSYCGLTSAQHHSAGIERRGPISKQRNKHLQTMLIEGAKLAPRFNEHLAAVHTRELGRGNRNRATLAVARKMVAYLMAVDKSGQPFQVSSCEARPVVGQGSERAT

SEQ ID NO: 299418 - protein, 343 aa, unidentified
MGEVSTIGLDIAKSVFQIHGVDADGAVVIRARVSRSKVLQFFTDLSPCLVGIEACPTAHHWSRQLQSLGHTVKLMPPSYVKAYLKRAKNDANDAAAICEAVTRPSMRFVATKSKEQQAALMLHRSRQLLVRQRTMLSNAIRGQLAEFGIVASTGRLGFNRLLEMVDGPEELGIPKVAWVSLMALAEQHQRLQVEIGKLEQCIQAWHRSSELSRRLEEIPGVGPIVATALVGTITDPHAFASGRHMAAWIGLVPQQNSTGGKDRLGGITKQGNRYLRWLLVAGAMAVIRYVQKHGTAKRPWLARLIERKPTKVAAVALANKIARIAWVIMARGERYRAPALLAA

SEQ ID NO: 299419 - protein, 379 aa, unidentified
MTTLGMPAAFPAVLAVEAAAEPRVVVLGVDTHKDVHVAAVLDHLGRLLNSGEFPATAVGYGHLLDWARQCGTVLRAGVECTGSYGAGLARYLATQQVAVVEVNQPDRSTRRRRGKTDAVDAEAAARAALSGIARALPKSGDGHVEALRMLRLAKKSAVKARTQALNQLKAVLVNSPSALREELEPLSTSLLLRRCADLADTGEGNPAADTAVFTLRLLARRVLQLRQEATELGRRMTIAIRSTAPSLLEQLGIGPDSAAALLITAGDNPERLGSEASFAALCGVSPVEKSSGKSQRRRLNRGGDRQANAALHRIVVTRMRQDERTRLYLERRTAQGKGKREVMRCLKRYAAREVYHLIRADMITRHQQHDLSATLMTAA

SEQ ID NO: 299420 - protein, 458 aa, unidentified
MTENLKKVNAKNVVTMPLINPNAAGIDIGDTLLAVAVPAGRDNVCVKEFGAFTCDLQSISSWLKQCNIETVAMESTGVYWKPLFSVLVQDGFEVFLVNAKHTKNVTGRKTDESDAMWIQKLHSCGLLSSCFLPDEQTETLRTLVRFRRSLTQDSTTYILRMQKSLELMNIKVHTVISDIIGKTGTAIIEAIIAGERKAENFMPFIDGRIKADRETLIKSLQGNWRKEHLATLRMSYEMYKTLQQKIIECEKEIEETLQFYLAASNEGIIEPIEKNKIEISENKKKVKKKNKNHPIFNTRAYIEKIHGVDVVEIYGLSEISALEILGETGTDLSKWATEDRFVSWLNLCPNNKISGGKLISSSRLKKKPNLASQAFRSAANSLARSDHWLGDYFRRMKAKGGNKYAIVAAARKLAIIYYRMVRYKEDFNPVDLKEYKRKYKAAKISYLERKLEQLRRAS

SEQ ID NO: 299421 - protein, 333 aa, unidentified
MYYSGIDLHSDNCFITTLDDTGAVIKRQRVENNNDRVLDYFHSLPGTHQAVVESTTGWYWLNDLLGDNGIELVLAHAKYLKAISYAKVKTDKVDSQTLAILLRQGLIPQAHKISRELRGLRDTMRIRLRLVQQRTACLLRLYSIHAKFNGSIPDPYRFQLAVLEHTRDTFSEQILALEKSLHPVLIPNEDIQHLLYIPGIGKLSAFTIYLEIDGIERFDSDKHFVSYCRLVPAADNSNRSVHHRSSKDGNKYLKIAFSDAAVHAIQFYPEYKRFFQKLARRSGEATARTVVAKELAKIVYYVLKNKTTYKGLKEQPISRQKSQQWPRLSSPDA

SEQ ID NO: 299422 - protein, 407 aa, unidentified
MLRNHTKMEYYLGIDIGKYHHQAILCDLDAKPIAASLRFQTTIDGFGELFSYLKKYLSGGDYATVHAGFEATGIYWLTVYEQLRKQKIQVSVLNPMQVKAYRNEGIRGAKNDRLDAHLIVKVLRFGDYRDSDIPPEDLFALRQLTRLRADLVDMTSGIKLKVIGILDQVFPEYSDIFPDIFGNGSKALLQKALVPEVIAAIPTDKLTLLLRKASRGRYGIKQAEGVKKAAEQTIGITLGIDAFSLSLEILMKQVIHLEKQVEKLEAEIKKRTTMRAETLTSIPGIGTVQEATILAEIGDFERFRDDKNGAEKLVALAGIDPKVKESGKYKGQAKMSKRGSPYLRRTIRQSAFIASLGRGKDPMFSKIYEKKIAEGKRFEVALSHVENKMLHVIYSLMKSKKEYKPNI

SEQ ID NO: 299423 - protein, 415 aa, unidentified
MSSPEKEFLRYLAIDAHKYYVVIGGVNARCDVVLHPRRVQLDELDDWLRANLNSTDKVVIEATTNTWTLYDQVARYAGEVVVAHPPHVKLISSAIVKTDKRDVRVLSKLLALNLIPEVWVPPVAVRELRELVSHRLRLVRTRTRTTNRLHSMLQRHNLTAPPGDPFAAKNRAWWESLDVSPTEKLRVRQDLATLDHLNTQITEVERELARLSTVAPWAEQIPFLIQLPGIGLITAMVILAAVGDISRFEHAKNLTGYAGLGTYVHDSGQTHRHGSISKRGRADLRQAMVEAAWVAVRTHPHWKAEYERLAKRMPANKAIVAVARKLLVVVWHVLHDHEADRNAQPDKVAAKLLVWSGKLGPEYRGSLKPRQFVRLKLMHLGLGADLMHFRFGGKPCSLPPASEVPGLERMPASSA

SEQ ID NO: 299424 - protein, 358 aa, unidentified
MNATMIGLDIAKSVFQVHGEDRAGTVVLQKRLRRSKVEGFFAALPPARIGIETCGSAHYWGRTLRALGHDVRLIPAAYVKPFVRRNKTDARDAAAICAALGRPDMRFVAIKSVEQQAARGLERGRDLMVRQRTQLTNCVRSQLAELGIVAAQGCRGFDALAALVAVGSEQVPPLMLDVLRMLVAQIERLGTAIDALEQRIVHAVRAHPAMRRLATIPGIGPLTAHAIATAIGDGKQFASARDFAAWCGLTRRVDQSADKRRQRGISRQGDKGLRKLLALGASTIMRHVKRRPERATQWQRGILARRPVKVAVLAQAARNARIAWAMLQSGETYRKPANQAVDHSAAAARLAAVAAPAD

SEQ ID NO: 299425 - protein, 353 aa, unidentified
MISICQTKDPGIIIGVDTHKDEHVAVAVDKLGVRIGQRNLPTTDSGYAGLEQWARSLGEIDSFGVEGTGSYGAGLARFLRGQKYRVIEVNRPDRAIRRRLGKSDPTDAEMAARAVLSGVARDRPKSGVDKVEMIRMLKSTKDSAMKARTQAINQMKALVVTAPVELRAKLRDMTASKLVACCVKWHHGYLETTTSAAKYTLCSLARRHVQLTKKIEALNADLARLTAEFAPMLMESPGIGPDTAAALLITSGNNPERLKSEAAFAALCGVSPIPASSGKTNRHRLNRGGDRQANAAIHRIVIVRIRYDDRSKAYLQRRMEEGKSKTEIIRCLKRYVAREVFGILHEIGLRHTF

SEQ ID NO: 299426 - protein, 375 aa, unidentified
MSDLSEAFVGLDTSKLRNSVAIAEGGRNGEVRFVGEIDNTPAAIGKLVKKLAAKYDRVTFCYEAGPTGYGIYRQITAVGHECIVAAPSLIPKKPGDRVKTNRRDAVGLAKLLRAGELTAVWVPDRRHEAMRELTRARDSAMMDLRRKRQQISAFLLRHGMHYPAEKKTWTKAHVDWLARQKFELAEHRIVFEEMMLAVRETQDRLRRLEDAIRVAVPEWSLAKAVTAMMAMRGMDLVAAATFLAEMGDLSRFQSPRELMAYLGLVPSEQSTGDSIKRGPITKTGNRRARRMLVECSWSYRHPPRVGRDKLEKVAAASPAVREIAWKAQNRLHNRYRLLIRKGKLKTVANTAVAREFTGFLWAVHREITSAGVVSR

SEQ ID NO: 299427 - protein, 358 aa, unidentified
MGDGSKEPQRITAGLDLGDKYSHLCLLNTRSGEIIEESRLRSTSEAFRRRFDSERPMRIAIEAGTHSPWVSRLLEECGHEVLVANARKIRLIYGQGRKNDQLDAQNLARLARLDPKLLAPLKHRGETSQAHLAIVRSREALIEARAKLINHLRGTVKSFGSRLPRCSSPTFHKKVGAHVPEPLKPALEPLLKTIASMTERIQEYDRKLEVLAEEYYPETKLLKRVHGIGTLTALTFVLTLEDPSRFGTSRAVGAYLGLVPGKDQSGERDPQKRISKQGNGLLRRLLVGSAQRILGPFGEDCDLRRHGLKICERGGKDAKKRAAVAVARKLSVLLHRLWVSGEVYEPLYNAKRFEGQAA

SEQ ID NO: 299428 - protein, 339 aa, unidentified
MNNPNTVGVDLAKNTFHLCIQNNKGNILKKVMLSRSKFKHFLATEQSSRVVFESCATSHYWFRVASSYGHTVQLIHPTFVKAFVKTNKNDFNDAEAICEAASRPSMRYVSAKSIAQQDIQLLHRIRQRQVQQRTAISNQIRGQLLEYGLTIPSGISQVKICLSSYLEEPDNELTPLTRVLFDELREELIALNHRISESDKKIKQMAAAHPVCERLMKIPGVGPITATALISTVGRATNFKNGRELSAWLGLVPKQYSTGGKSKLLGISKRGDSYVRTLLVQGAISAMTRCKNKTDNQILWAQKLRAKKGLQKASVALANKMARIIWSVMANDHDYVVMN

SEQ ID NO: 299429 - protein, 319 aa, unidentified
MDAIFDSFVGIDVAKDSLDVCLLIEGRRFTTTNDRTGFRRLLDELPMAGSCLVVVEATGAYQRELVAELVAAGQQVAVVNPRQVRDFARGLGILAKTDRIDGEVIARFGQHVQPRPVEKIPEIQEELQQLVVRRRQLIELRTAESNRLESARSKSVIKSVRSMIEQLQKKVRQIEKEIAGLVKSDEQLQCQTALMESVPGVGAVTAATLLAELPELGRLNRQEIAALVGLAPFSRDSGKFHGRRAIWGGRRAVRSVLYMAALSARRFNPVIREFAQRLEAAGKPFRVVLTACMRKLLVILNTIVKNHSAWNRQIPSPAS

SEQ ID NO: 299430 - protein, 344 aa, unidentified
MSKTTTIGIDLAKTVFAVVALGPTGRELWRKTFSRTKLLPFLARQDKAQIALEACGSAHYWARQLRAVGHAVALLPPQHVKGYLRGQKNDYNDARAIAEAQYHGALRPVPIKSVEQQDDQALLGIRRGLSRDRTRLANQLRGQLAEYGLVAPQGVASLRKALPVILDDRTNGLTERYRQWLKRQYERLLALDVELAWYEEQLEAWVGQDEVCQRLCEMPGIGVVNACALKSWLGNGHQFGCGRDASAALGLIPRQYGTGGKVVLSRITKRGDSSLRASVVHGARAVVSRSAGKTDRLSRWIESIKARRGFNKAVVALANKLVRIAWVIVARGERYRASETWVAA

SEQ ID NO: 299431 - protein, 288 aa, unidentified
MKEAITSFVGLDVHKDSIAIAVAEAGRQAPRFIGTVVPSLPSLRHALRGIGSPSRTLVVYEAGPCGYGLARRLNTEGYTCEVVAPAHIARSPINQRIKTDRRDALLLARESRAGNLVPVVMPDERDEAVRDLSRTREDVLAARLRAHQQMKALLLRHGRTCPGRIAWSPAHERTLSAIRLTYPAQEIAFVEYRNAIKDAHERLERITEALRVHSQQWRMRPLMQALMCLRGIDFIAAVTFVAEIGDPRRFAHPTALMAYLGLVPSEFSSGRSRHQGSITKAGNTPAES

SEQ ID NO: 299432 - protein, 341 aa, unidentified
MQHIAIDLGSKESQICIRTEQGEILHEGKVQTSSLDRYLKRQPQSRIILESCAEAFRIADFALGCEHQVRVVPATLVRSLGVGSRRIKTDRRDAQVLSEVSCRIDLPSVHIPTDVARQRRSMCGTREILVASRTSLICCVRGWARTQLLKVRSGESETFTKRVLDAAATTPDGIPEYIERLLTSINSLHEQIAAADKELEQLTEQEPICQLLMSVPGVGPVTSMRFVAAIDDVSRFANAHAVQAYLGLTPGENSSSTRQQRTGITKAGPAPVRRTLMQAAWNIRRLRPMDPISQWAMEIEKRRGKFVATVAVARKLAGILFALWRDGARYEPNHQLRKAAK

SEQ ID NO: 299433 - protein, 396 aa, unidentified
MNKRVHYLGLDVHKETIAVAIAPGGDSEVRLYGIIGGTLDALDKLIKKLQLPGVELRFVYEAGPCGYVICRHLKKKGLHCEVVAPSLIPRKASDRVKTDRRDAQQLARLYRAGELTAIYVPDEEDEAVRDLVRARNAAVIDQRKARQRLKGFLLRLGFRYTGKSSWNDAHQRYLARLTMPRPQQQIVFQEYIEAINVESQRLERLTRAMENALPGWKWEPVVRALMSLRGVQIIVAMTLVAEAGDLSRFDDPRQLMAYFGLVPSEHTSSDKRWLGGITKCGNGACRRVLTEAAWQYRLAPKVSPQLRVRQEQQPKVIRDISWKAQQRLHQRYKVLSAHRKKSGVVVTALARELTGFVWAIACQLGAPHKLKERKPIQPAATSGRDYKLNPQKKFKK

SEQ ID NO: 299434 - protein, 434 aa, unidentified
MIPMGTQVWHNSDYDLHQEVIGMSQMLVGIDVSLRSHHVHFMRADGAALADFSVSNDRTGADTLIKRVLETAEKNQCAHIQIGMEATDQYSWHVAHYLQDQLKGYEPGYRCQIYVLNARKVARFKKGYDTLPKNDKIDAWVIADHLRFGRLPSEMKEAHHYAALQRLTRTRFHMMREIGRNKTYFLNQLFLKFSGMRQDNPFSNTFGTTSLAVIEELDPETVAEMSLEDLTAFLQERGRNRFANPEEVAAYLQKLGRSSFRLNKTMEDPVNLSLSVTLSVIQHMESQVKRLDKEIAKLMKGIPQTLTSVKGIGDVFAAGLIAEIGDISRFKDHHALAKYAGLSWNQHQSGEYESENTSRMRTGNKYLRYYLIQAAESIRKHDSEYKAFYLKKYNEVPNHKHKRALVMTARKLVRLVHSLLRTNQLYTPPERRRD

SEQ ID NO: 299435 - protein, 367 aa, unidentified
MRTKLKRKEQGLMKTKVNDFSGMNIYAGIDVHKKSWSVTTLVDEQEHRTFNQPPSAETLYKYLSKHFKGAHYQSAYEAGFCGYGHHRQLLELGIDNIVINPADVPTTGKDKAGKNDKVDSRKIAKGLRNGSLTGIHIFDESDQDLRSFARMRHNMQKDLRKAKQRIKVFLNFNTITIPAHLDDDNWSKAYEAWLEDEVPFPTENARTAFGFMLSNYHYQKQQVRQISKELRAYFRKYHKQDYFLLRTIPGIGPLSAIALISELGDINRFTNINKLSSYVGLLPLTNNSGEIERVGGMSYRCNNYLRTILVEASWQAIRKDPAMLLYYKKHAAKGNGKRAIVKVAAKLLNRIRYVLKNKQEYVLGVVA

SEQ ID NO: 299436 - protein, 401 aa, unidentified
MSFENKRSCIAIDVSKGTSHFQGFYSAGVPASEATSFEHTKSGFARVTELFNFLKEQNDQKPFIIFEHTGTYSRPIEVYCKTNNFSYMAIPPLLSAKMRKSDIRPTKTDKIDCATIANVYYLKRLRVTKSNSKVYSDLKTLCSYYNFKVQLMVQMKVKYREHLDLVYPRIDTLFGVYTNTFLDLITRYPNPHKLQKKSKKELTEFFIKRDYCGLPKAQRLAILVKEYFKDVEIPVTENDVLITIFSNHLKELRFIMNEVDDLLEQIITLGMKTKEYPYLMSIPGIQKNTAARIAAEIQGIERFESASKLCAYAGIDPTVHSSGNYLGEHLSITKKGNHRLRCLLYLVVAGTSKSKADNNPVRDFVQKKKSDGLAPKAAIIAGCTKLTRIIFAVCSKEEFFV

SEQ ID NO: 299437 - protein, 378 aa, unidentified
MKRIIKIGMDVHTTNYTLCIFEPSFEHEGTVHYITQVKPEVKNIIDVIDKLKEKLKNDDLDITCGYEAGCLGYSLYHELKDKGVKCIILAPTTMKVEKGGKKIKNDYRDARQIAECLSYGGYSAVYVPTKLDNAVKEFIRMRDDLNQNLKSIKQQIIALLTRNGKHYGDGSYWTGKHIKWINSVHFEEKLLNETLAEYMIEYHHLLDRIVCLDARIEEISTKEIYVEKVNKLKCFIGIRAHTALSLIVETSDFSRFSKGNVYAAYLGLIPGDDSSGEDSNKLGITKAGNRHLRKLLIESAQCFARGQTGHISVKLKQRQALCSSDIVAYANKANERLRRRYYKMIGKGKKYNIVKTAIARELACFIWGMMTDNIQLSH

SEQ ID NO: 299438 - protein, 357 aa, unidentified
MKKHTTIAVDIAKSVFEIAVSDRPGHVSERQRLTRARMLAFFRERPPAVVVLEACGSAHPLGRELGEMGHEVRLLPPKHVRPYVLRDKTDRTDARALLEANRNEEIKPVPVKTVGQQALSAVHRLRSGWLRTRTARLNTLRGILRELGVTIPVGARHVESRVLEVLGAGRVSQPLAMLLTSSLGEIRQLEQSIAEADRQLKNLAREMDSVVRLQTIPGIGLLTATALVASVGEPSRFRSGRRLASFLGLVPREHSSGQTRFLGRITKRGDPYLRTLLTHGARSALLAAARRRNKGGALDRLGQWGLELSQRRGHNRATIAMANKLARLAWAIWSRHDVYRPVLQPPVPMITDMASTH

SEQ ID NO: 299439 - protein, 348 aa, unidentified
MTTFTRSVTGGVDTHLDVHVAAALDEKGTLLGVESFETTRSGYKKLLTWFEGFGPVALVGVEGTSSYGAGLTRHLHAEGIAVVEVDRPNRQRRRRKGKSDPEDAIAAARAAFSGDACGAAKTQDGNVEAIRVIRVARVSARRARTQALNQMRSLISTAPDPIRDELRGLNVYHLVSRASAYRPGARQGVVSLTKWTLRSLARRAIELEEEISGYDAILKDLVHETAPELVGTLGIGTDSAAALLVAAGDNPHRLRSEAAFAHLCGVSPIDASSGKQERHRLNRSGDRQANSALWHIALTRSVYDPRTTEYLDRRMKEGLTKKEAYRCLKRYIARQLYRTLQAPTPNRP

SEQ ID NO: 299440 - protein, 343 aa, unidentified
MGWALEEVVENQVFVGIDVSKERLDAALRPRDESFKVANNPRGIATLIKRLKKWRVSRIVLEASGGYEIAAAYDLAAAGLPVAVVNPRQVRDFARATGRLAKTDAIDAQVLAHFAEIIQPQTRPLPDVQTRELMALVARRRQVVDMLTAETNRHGRAIDAVNRAIAAHVRWLRKQLADLDAALERAIRNSPLWSEKARLLRSVAAVGSVTVITLLSHLPELGTLNRRQIAALVGVAPFNHDSGKLRGTCAIWGGRAQVRAVLYMCTPGAIRRNPQLQAFYARLIAAGKKPKVALTACIRKLLIMLNAVLRQRIPWNPELATLPSPFSAARGGAVIGAGSIATA

SEQ ID NO: 299441 - protein, 359 aa, unidentified
MDKFILVGCDLHDKNMVLKLALNREVVHSRTFANDSVGRASMVQELRKHAHIAGEARIVVAYEASSLGFFLRDFLEAQAIVCHVFAPSKIARSPKQRRCKTDAKDAEALLEILRGHYLAGNKLPAIWIPDELTRDHRELVRARLDAQDKCSAVKTQIRTFIKRQKDLKDQAPRGGWTLPLRAWLKTLAECGQPLGLCARQALASLLRQNESLEREIVLLDAQLAALAEHERYRPSVTQLKKLKGVGVLSALVFLVEMGSLTRFANRRKLGAFIGLVPDSDESGEDDDHKGHITHQGPARVRYVLCQAVWNRVRHDPQERLFYQRLVAKNPKRKKIAVVASMRRLAIKMWHTCLAAQSAA

SEQ ID NO: 299442 - protein, 429 aa, unidentified
MNYTQNEKIEQVTDTTMVVGVDIGSQTHYARAFDNRGRELTKRVFSFQNDIEGFNSFNLWAETLKKENGKTDVLIGCEPTGHYWFAFAKYVKDHRKTLVMVNPFSVKKIKELDDNSPKKTDSKDPKTIAKLVVDGRYSIPYMPEGIYAEIRDLVYSRDRIMKQHNISANRIQRWLAIHFPEYLGLYTKFDTTSGLAVLERAPLPKDIIALGIDGIRKIWHDKKIRGRGVTEDRAKTLVEAAHNSVGLDGGIGSKSELYMLLEEYRLWSSQLEAINKVLEEVILKVRNVEKLLAIKGVGSITIAGFIAEVGDIRRFSSPKQIQKYAGLELVENSSGKHKGRSRISKRGRRRLREILYQVMILLLARNEEFRKIYDYYVTRVQNPLKRRQAMVAVSCKLIRVFYAVLTKGVDYDRIKMMWDIHHESDVIAA

SEQ ID NO: 299443 - protein, 338 aa, unidentified
MFYIRIDIAKHNHEVSIIDDNGKALGKSFSISNSQKGVDKFNTYLDSFNITSENCVIGMESTGHYWINLFSFLVNLKFNVFVINPIQSDAFRKMYIRKTKNDSKDSYIIAQIMRFGEYSSSNISDENIFALRQLSRYRTSLVDECSSWKRKIISILDQVFPEYSNLFSDTFGVTSKELLSKYPLPENMLELSTEELTNLLTKASKGKLGNEKAQEIKEFAKNSIGVSFAKQTFSFQIKQIINQISFIESQLKELDNEISNMLKELNSEITTITGIGDVLGACILSEIGDISRFEKASQLVAFAGLDVAVKQSGEFTGTEMKKKLNYLILMSYAHRFIV

SEQ ID NO: 299444 - protein, 361 aa, unidentified
MVQRIAVGLDVHARSVIGHGIDQVTGEVFTKTMGCDPAGILGWVAGLPGPATVAYEAGPTGYGLARAFAAAGMDCVVAAPSKLLPAPGSRVKTDRRDAKHLAGLVAAGLVTPVRVPGVAEEAARDLVRARDQARGDLMRARHRLSKLLLRYGHVWRGKKAWTGPHRLWLEGIRLDDPVAQIVLDNDWMVVQQATTRRDLLDARIKALIPGSCWEPVVRALCCLRGVSELTAFGLAVEIGDWDRFTAPSLGSYLGLVPSERSSGGSRWQGGVTKTGNKYARRLLVEAAWHHRSAYRPAGSADLRRRWADATPGQVARADQANRRLHQQWVRFDARKKNPAVANAAVARQLAGFCWALVRSAA

SEQ ID NO: 299445 - protein, 408 aa, unidentified
MKTLHRRCAGLDVHSDSVVACARLTVRTKASHEVRRFSTATRDLLELADWLAAQGITHVAMEATGIYWKPIWHILEGRFELVLANAAHIRNVPGRKSDVNDAVWISDLLAHGLIRANFVPPAQIQDVRDLTRTRTQLAREVAQHIQRIQKTLENANIKLTSVISNIIGTSGRRILKAMIAGETNPIKLAELGSTRLKRPRAELTAALDGRVTAHHRFLIAHHLSLIGELERHIAAFDARIEKLLRPLRDAVAQLITIPGVSKVSAQVILAEIGADMTPFPTSGHLLSWAGLVPRLDESAGKRRSTRVRKGAPWLKPVLVQCGWGAARTKGTYYQAQFFRLKARRGPKKAAIAVAASLLTAAYHMLKNGTFHQDLGADFLVKRDKARIVTKLASRIKDLGYDVSFTPAA

SEQ ID NO: 299446 - protein, 388 aa, unidentified
MEARTVNNLPPAAPHDDAVRCLLAIELSKKSWIVAVNTPLSDKISRYTLEACDWKGLLDLCERMRARVAREMKKPVEIISCYEAGYDGFWLHRLLEAHGIRNYVIDPASLQVDRRARRAKTDGVDVERMLRSLLAYLRGEPKVWSVVRVPSVAEEDDRRLHRERGRLINERVQHVNRIKGLLAIHGIYDYQPLRGDRVQRLEQLHAADGQTLPPRLKAEILRELQRLELAIRMIKAIEAERDAIASAKTGHTSAKKIQHLAKIKSIGPEFATALVGEVFYRSFDNRKQLASYVGLTPAHFQSGAMSRDQGISKAGNAKARTVMIELAWLWLRHQPDSPLSVWFRERVGKLKGRIRRITIVAVARKLLIALWRYLENGMVPEGAILKVK

SEQ ID NO: 299447 - protein, 307 aa, unidentified
MTAVGIDVGKASLDMAVDGQQEVVRFSNNRSGIAKLVKRLQAMASPRIVVEATGGYEDPLLEACCDAALGVYRVNPRQARNFARATGDVAKTDAIDARLLALMARLFAGRLRRYVAAPPWQRELRDWLRRRGQLVTAVQAHKQQAAMAPAMVRALAARTIAAVKRELKAVDAAIHALIKQHATPAMRSRKGLGPVFQASMLSLLPELGELNRRQIARLVGIAPMNRDSGQGQGKRRIRGGRAPVRVALYMATLSAVRWDPLMKAHYQHLRSRGKLGKVALVACMRKLLGIVNAKRRDELRDQGLIAI

SEQ ID NO: 299448 - protein, 443 aa, unidentified
MSTSSTQPQNEPEYVALVAIDWADKKHVWSLEVTATNRRECGSIAHTPEAVEAWVTSLHSRFGERPIGIAVEQSRGALLYMLTKYAQLHLYPIHPRTAAQFRAALFPSGAKDDPQDADLLLDLLIHHRSRLHRLEPDTEQTRTLQMLVEERRRMVNEKTRQSNRLTDKLKLYFPQVLNWFNDVDSELVGAFLERWPTLDALQRARPSTLHEFFRQHNCRSEQRIQERVEQSRKAIPATHDQAVIRSAVATVSVLVRLIQTLRDGIAALDEEIRQLAITHPDFSIFDSLPGAGKVMVPRLIAAMGSCRERFSSAQEIQSYVGIAPVLQRSGKTQCTHFRWACPKFLRQTFHEWAGHSIAWSSWAKTHYQRLRARGKAHHAAVRALAFKWIRILFRCWKDRKPYDAALYENTLRRREPSAPGSASHPQLVWKNCAGFFKLTQLPS

SEQ ID NO: 299449 - protein, 340 aa, unidentified
MKANSKFFIGIDVSKPFFDVSLMPVFEHKKQAIESAQFKNTDDGLKSFGRWLKSLKVTMDENTLVVIENTGIYHRLIWSFCNKKGLPLHIGNAAHIKWSFGIARGKNDKIDSVRLCKYACKEADTLKASPALNPVLMQLKDLMSSRTRLLSQVNSNKQYIREAKTSNDPKVQDAIEQAHLAAINGLTLSIKAIEALINGIIAENPALKNNYDLLITIPGIGHLTAIYLICCTTNFIAKITGKQLACYAGVVPFEHSSGISIKGRSRVSQMANKDLKKMLHLSALTVVKNYPEFRSYYDRKKAEGKHSMSILNAIRNKIALRVVAVVNNQKPYESSQLVAA

SEQ ID NO: 299450 - protein, 424 aa, unidentified
MKYAPIQVLPGIPAGGVCAGIDWATTEHVACVVDMAGRVTGRFSASHDRAGIALLIRRLRAAGVTEIAIERGGGVLVQALRDAGLTVVVISPRQVRHLRLRYGSSGAKDDHFDAYVLADTLRTDRAPLRPLEPDTPATIALRSAVRARRDLAAQRRAACNRLRAHLELAFPGVIGLFRRLDSPISLAFLAQFPSQDAADGLGERQLTAWLKTIPNRGKTAPASALAARLRAAARGVTGPEGTAQAAVTAALAATITALAAQISGLEDQIGRQLAAHPDAHIFTSLPRTGTLRAARLLAETGDCRARYPDPGSLAALAGITPVTRQSGKHQAHSFRWAVNRELRDAYCDFADGSRHASPWAAAIYTAARDRGKDHPHATRILARAWSYIIWRCWQERTPYDPAKHTALQRILDQQATTTAPEHTR

SEQ ID NO: 299451 - protein, 292 aa, unidentified
MEQGFVGIDVAKDRLDVHLRPSGEAFAVSRDGEGLAALVERLAAAAPTLIVLEATGGFETLVAAALAAARLPLAVVNPRQIRDFARATGKLAKTDALDAAAIAHFAEAVRPQPRPLPDEQAQALGELVSRRRQVIEMMVAERNRRRQLRQRRLIKGVDRLLAALQKELSELEDELDTAIRGTPAWRDSEDLLKSVPGIGDVTARTLLAELPELGTLDRHKIAALVGIAPLNRDSGTMRGRRTIWGGRASVRASLYMAALAATRHNPSIASFYARLLVIVNAILRDRRPWQNA

SEQ ID NO: 299452 - protein, 343 aa, unidentified
MQSISTIGLDVAKSVFQVHGVDAAGQVVLRRQLRRRYVLAFFQKLPPCLVGIEACASSHHWSRELQALGHTVRLMPPAYVKPYVKRQKNDVTDAEAICEAVTRPNMRFVPTKTVEQQSCLMLHRARHLFIRQQTAVINSIRAYLAEFGIVAPVGRRGVEQLLDVVADTADRRLPEVARECLAALSSQLRALKAQILQFDRRIIAWHRSNATSKRLDALPGVGPALATALVASIADPGAFRSGRDFSAWVGLVPKQNSSGGKDKLGSISKQGDRYLRSLFTAGALAVIRYAKIHGTGHRPWLTGLLARRPTKVAAIALANKLARMAWAMMARNERYQEPAALAA

SEQ ID NO: 299453 - protein, 318 aa, unidentified
MNTNTLQNINVGVDTGKSQLDIYIRPLDIYFTVPNNEKGIKEAIRTITKHRPRRVVIEATGRLEMPFIFACDKAKLPYVIANPLHVKRFAGAIGRRAKNDRLDAALIAHFGEAIQPKLTQLKSENIRLMSDLVTRRNQLLSMQTMEKNRQQILPQSLASSIKPILTALKNQIAKVEEKISKLIDTCPEYQAKNEILQSMPGIGKIASASIISNVPELGFITNKQASSLIGLAPITRESGRLKGKRMIQGGRAQVRTVLYMAMMSAIQCNPVFKATYERLLAAGKPKKVAIVACMRKMVVILNSMLRDGVMWDKDSAKN

SEQ ID NO: 299454 - protein, 354 aa, unidentified
MLIIGCDYHPGFQQIAFVYTETGEFHEQRLRHREEAEKFYRDLATRGLKVRVGMEASGQARWFERLLAELEVELWIGDAAEIRAKRVRKQKTDRQDAQHILKLMLKDDFPQIWVPSWENRDVRQLLWHRHRMVQMRTRIMNQLQAVALNEGLRCKKRLWRERGRQQLEAFRLAPWASRRRRDLLELLDRLNPTIVELTAAIEQEAEKYPAAQRLMTHPGVGALTALAFVLIIGKAERFQCGRQIASYLGLVPAEDSSGERRRLGHISKQGSALLRFFLVEAAQVTVRSDPEWRSKFFHLALRRGRKIAKVAMARRLAVRLYWMWHQGWDYEQWKKFSPHAGQPGTGVGVQLNTV

SEQ ID NO: 299455 - protein, 400 aa, unidentified
MLSIGIDVSKGKSTVCGMKPGGEIVYAPFEVQHTREGMSELVSLLRSSGEEVRAVLESTGSYHCPVVAALLENGIFVSVVNSLRMKRFCSQSIRKVKTDRIDAMQIALYGLAYWQELQPARLPEDTYRELQLLARQYYQMTSLLIKAKVDFNAICDQVLPGMQELMSDHAGRHKLSDFVLRYHHTAHILKMGETRFRKDYCKWAEKKGYRNCERMAALIFATAQNGIPVLPNAPSTQIVITEAIRVLHTVEASRDAILTQMQALAKTLPEYSLVREMPCIGDTLAPRLIAEIGDVRRFHSKRALIAYAGIDAPPYQSGKFCANNRHISKRGNRYLRKTGYEVMQSYVMHKPANDPIFTFIEKKRSEGKSGKLAMVAGLNKFLRVYYGKVTELYRSLPAIE

SEQ ID NO: 299456 - protein, 387 aa, unidentified
MTVLTVTNLPAATHGETVRCLFAIELSRMSWVIAFNTPLSEKISHRTLTGCKWKRLLELIEEVRARISRETGRAVEVISCYEAGYDGFWLHRQLSAHGIRNYVIDPASLQVDRRARRVKTDRIDTERLLRSLMAYLRGEPKVWSVVRVPSVAEEDARRLHRERDRLVSERVQHVNRIKGLCALQGIYDYNPLRPQAMAGLEQLRTTQGGALPPRLKSEIKRELQRLELVVEMIATLEAERNAIVEDEASTHVNAKKIQNLYKLKAIGPEFAAVLVGEIFHRDFNNRRQLASYVGFAPSPFQSGNVAHDQGISKAGNRKGRTTGIELAWLWLRYQPDSDLSVWFRTRVGTTKGRIRRIAIVALARKLLVALWRYLETGVVPRGAVLKG

SEQ ID NO: 299457 - protein, 357 aa, unidentified
MKKISTMQAFSNEILKEQKLTIGVDLGDRWSFYCVLDEAGKIILEQRVSTTPEAMKQTFGKIPRSLIALETGTHSPWVNRLLTELGHEGIVAHAQKVQLITKSNRKDDRHDARTLARLARIDPELLGPVRHRSAKAQIHLTVIRARAELVSARTALVNAARGLVKSFGERLPKCGTQQVSEKLAEGLNAELRDVLAPLLREVQSLNERIQEYDQRMEKIAKEVCPEVSLLKQVKGVGTQIALTYVLTIEDPYRFPKSRAVGCFLGLRPGRRNSGESEPQKKISKEGDRYLRTMMVQGAHYILGPFGEDSDLRRWGLKLAERGGKNAKKTSGGGRGSKAGGTAPSVVGKRRGVRTTTQ

SEQ ID NO: 299458 - protein, 319 aa, unidentified
MSTTIAPCIGIDVAKATLEIGIDMTGEIYSVANDPQALPALVARLETLAPERIVVEATGGYETLLVAACIAANLPIVVVNPRQARNFAKAIGKLAKTDRVDALVLAHFARAVRPEQRLHKSEAAQAVSALVARRRQLTEMLVAEENRRQSPLFAEMADEFKEHIEWLQKRIAELDRDLQNQIHRTQHWREQDDLLQSAKGVGPILSVTLLTQLPELGRLNRREIALLVGVAPISHDSGKRRGERHIAGGRAAVRSALYMGTLAALRFNPVIKEFYQRLLAKGKLKKVAITACMRKLLTILNAMVRDNEAWHSPAKRLSA

SEQ ID NO: 299459 - protein, 341 aa, unidentified
MDPQGRIAHQARYDHDVAGLAGLTAQLGRHGPVTGIAIERGEGLPVEMLQDQGHWLFCVSPKMSARARERYRVAPGKSDAFDAFVLADSLRHEHRHWRPLAVPSPLLAELRALTRDRERLVWNQRDTENQLRAVVLAYHPAVLGLFSTAGKALAMLLFIDQLELLNGQVRAITRRIGELLAGHPDAAVFLSVPGMGQITAATMLAEMGEDRARFPTPDTLLAETGTAPVTRASGRSRTVRFRYAANKRMRHAIDWWAFVSVREIDWARDAYDQARARGQQHNRALRGIGARWVRILWRCWTDSTPYDPARHLKGSTARRTATRKLPATPGRELRHHARRQH

SEQ ID NO: 299460 - protein, 421 aa, unidentified
MRIVYPICCGVDVHKTFFVATLITTEGVEARYTKRRFSTFNNQILAFKEWLLENNCRDVCMESTGKYWVPVYNLLEDSINVTIANPKWVRAVKGCKDDAKDSRWIGNLFRLGLVPGSFIPRKDIRILREYTRYRFKLMSCKSSEKNRYQNVFTVCNVALDAVVSDMFGKSASSITDYIVNSETFDPDHCTSLLKKSLKKKASEVVESIDGFQMTQSQKKRANMVKDHYDYLANQIDIIDAAIDELARPIDSFINLLCSAPGIRRTSAIIVLSEIGDDMSQFNSSKKLCSWAGLVPGNNESAGKKKSVRIMRAGVYLKPTLVQIAHAAVKSNTSSYYRLKYERISKRRGKKRAIIAIARMILTAIYHMLSTGELWNPVDLNQVDMLPELQEKAIQKSLRRAANLLAAHGVITLDSIDIPNSA

SEQ ID NO: 299461 - protein, 356 aa, unidentified
MSHKPNGPLAVIGIDIGKNSFHLVGQDKHGVIVLRQKWSRGQVEARLANVSPCRIGMEACVGAHHLSRKLQALGHDARLMPAKYVRPYSKGQKNDFRDAEAIAEAVQRPTMKFVATKTVDQLDLQALHRVRQRLVGQRTAIINQIRAFLLERGIAVRQGLRFLRAELPTILAKRSDVLSARMLRIVEDLCGDWHRLDERIEGVSSEIVTLAEQDVACKRLMSVPGIGPVISSAMVAAIGTGDVFSKGRDFGAWLGLVPKQISTGDRTILGKISKRGNRYLRALFVQAAWVVLVKIGPKHWQRYGLETWIAAARKRLHHNVLAIALANKLARIAWAVLHKGRAFECVKTDAMGSRPA

SEQ ID NO: 299462 - protein, 315 aa, unidentified
MTAPTERFVGIDVSKDRLDAHVRPDDTARHFANTPEGLDALLDWLRPLGVALVVVEASGGYERAVLAALSLGGLPVSLVNPKRVREFAKAIGRLAKTDAIDAAVLAHFAQTLRPSVWSMPDPDAQVLQALLARRAQLVGMRTAEKNRLAGLTVARVRRSVQNVIRALDREIRRADKDLGDAIRACPGWAAKDDLLRSIPGIGPTVSRTLLLGMPELGTLTREQAAALAGVAPINRESGQYRGKRMIAGGRAVVRSMLYLAGHAARRGNATLRAFADRLKAGGKAPKVIRVALARKLVILANAVLRDNTAWTLKTA

SEQ ID NO: 299463 - protein, 344 aa, unidentified
MTIVEEKPAITGGVDTHSEVHVAAALDPVGGLLGTRQFPATAAGYAGLLGWLEKFGDVALVGVEGTGSYGAGLARYLAKRGVRVVEVDRADRQDRHRNGKSDPLDAVSAARAALSGRASGAPKGRDGAVEAIRALMVAKRSARHERTQAINQARALILTGPDELRARFAGLRAAALAEAVAALRPRPGDAADYSLRVALRELGRRVEFLDDQTGRLDDLIVPLVTARAPGLLSLYGVGPDTAALLLIAAGDQPERLRSEAAWAHMCAVAPIPASSGKTRRHRLNRGGNREANHALWRIVITRMSAHPATRAYVQRRTAEGLSKKEIIRCLKRYVAREVYPYLRG

SEQ ID NO: 299464 - protein, 371 aa, unidentified
MEESSKTLYVGLDVHKESIAVAYAPEERGTEVVSLGAIGTRQCDIDKLIRKLQSKGAPLVFVYEAGPCGYWLYRYLRRKDLRCHVVAPSLIPRKPGDRVKTDCRDAALLARLMRSGDLTSIYVPTLEDEAIRDLSRGREDAMRDLKATKYRLKAFLLRQDIRYEGRATWTAAHLRWLSEVVCPTPAQQIVFQEYVRAVTEQQERVQRLETELHEHVKTWRLFPVVEAIQALRGVELTGAVILIAELGDLTRFDTPRQLMSYLGLTPSEYSSGERRRQGGITKAGNTHARRALVEGAWAYRYPAKVSRHLQLRLEKLPAEIQAISWKAQLRLCKRYRQLTARGKHANQVVVAIAREMAAFAWAIARTVPLSP

SEQ ID NO: 299465 - protein, 336 aa, unidentified
MSKHYVGIDVHKKLCVYTELDAGGNIVRQGSFGNNLQEVSDFSSYLTPRTHLVLEPVLNYLWLLDEFEAYAGSVHVATPHKVRVIAESKCKTDKYDSRMLAELLRTNFLPESWIPPPGLRLLRGAVRQRYHLVGTMVSFKNRIRYLLMEQGVKLRVSDISSLRAQGQISRLCLPEVTLISIRQCQDAIAGLKVSIKELDDRLEAVIDGIEMISLLSTIPGIGRIWSVTIYAEVGDIRRFRSRKAFASYTGLIPSIRASGESVHYGGITRHGSKPLRHALVEAGIHAARRSPSLRRLYDRVLYRGNVQKARVAVARKLSVIIYAMLKNGEVFRVEHI

SEQ ID NO: 299466 - protein, 388 aa, unidentified
MPAAETPVAYLGIDVGKSSHSACALDAGGGVAFRAELANRPDDIDRVLERAGSGALVVVDQKRNIGALVLARAHAHGNPSAYLPGYAEKQARGMFPGIAKTDAIDAEVIARTALGVPRALRPAPEEPEGTASLRILSSQREFASSARTRAKNRLRATLLEADPALEGAVDPSSRWQVSMLAEFGGAAGCSAAGWRRFSSAARRAGAPAAGARRLWEALLASSRSGRRLPAGEDVAVRILAREIASLDADIEELDSLVADSLAGDEVYECLLTVPGIGPKTAAALVTSIDISAFRGHDELASYCGVAPSDRRSGSSIRSTSPQHGGNRQLKNLLIFSCNSLIGTDNRFGRYYGECRARGMRHGKALKAVARKRLKVIYAIMRDAVPYAA

SEQ ID NO: 299467 - protein, 340 aa, unidentified
MGEVTTIGLDLAKHVFQVHGVDAEGATVLRKQLRRAQVLAFFSRLPPCLVGLEACATAHYWARELRALGHEVRLMPAQYVKAYVKRNKHDAADAEAICEAVGRPTMRFVPVKTADQQAAVLLHRGRERLVRQRTGLVNALRGHLAEFGVIAPQGLRNVGKLIAIVRDQTDARVPDLARQVLQVLAAQIEQLEAAVAAIEKQLMAWHKSNPVSQRLASVPGIGPIIATAIAATVVEPSGFRSGREFAAWLGLVPRQNSTGGKHRLGGISKRGNQYLRRLLINGASANLLRSKATNADPWVIGLRRRRPPLVVAVALANKTARIAWAVMHRHENYQRVAAAA

SEQ ID NO: 299468 - protein, 341 aa, unidentified
MQWTVAIGVDTHKDTHVAVALDRLGRRLGQCEIATTKAGYLELVHFGQAFGRPVFALEGAGSYGAGLARVLVAAGFTVYEVERPRRRERRRAKNDLIDAARAAARLLSGEGLGLLRGGGQAREDLRALLLERRSAVRAQSAARNQLHALLVTAPEPLRARLRPLEGERLVSACLRLRASGKETDVLAPVLRRLAGRVRSLARELAEVEQALQAIVSALVPEIVAEHGAGPLTTAQLVVSSGQPARMKSEASFAALAGTSPVECSSGPQRRHRLNRGGDRQLNWALHVIARTRIRCHAETGAYYERLLARGKSKPEAMRCVKRQLARHFYRLLQANPALENA

SEQ ID NO: 299469 - protein, 408 aa, unidentified
MKISYYLGLDVAKHKLRAAFAGADGRICFEADLAANAAGRNQFLAQLRARVPAPGQLLVVLEATGVLHLNWSAALTQAGYAVIVVNPLIARRFYPVENALRDSKTDPIDARGLCALGALHGEKLLAKYRFQLEPERLALQRLQTVRQALRNSLTNLKKTYLSLLDLSFPELGQLLEVDGTGIRALLLKAPTPSAIARQRLTTLQKDWKLRPKAARLKALAANSLADPQLAAASAPALQAILQSLAAMETQLRALDKQIEAHAKEGPTGASKALLETIPGFGPTLAAKVLAYLPDQILHSGGRRQAAARLQAFMGNEPRLQESGQWKGQTKMSKRGVEPLRTAFFQAAFNASQSDPELRTYYLRKRAQSKCHHLALTHLMRILTRRLVAVLRSQQPYRPMEVLPLTNAA

SEQ ID NO: 299470 - protein, 337 aa, unidentified
MIIIGCDFHPSFQQIAMLDTETGATKEHKLMHTSGEAESFYRKLASPAVVGIETVGNDQWFVQLLQKLGHEVRVGDAAQIRASYVRKQKTDRRDAKHILQLLVEGRFPRIWIPDAGMRDHRQLLMHRHKLVQIRTRVKNELQHLMLNQGMQKKQKLWSTEGRAALASLPLEPWTDRRRKDLLNLLAMLDAQLESLDDAVTRLAKEYPGVPLLMSQPGVGAVTALAFVLTLGDVHRFPRGKQVASYLGLVPREHSSGGKQRMGGISKQGNRLLRFLLVEAANIAVRFDPALRKEYLHRCHQKHFTVAKVATARKLAVRMYWMLRTQTPYPQVLSSRVA

SEQ ID NO: 299471 - protein, 325 aa, unidentified
MYFAGLDAHLKYVTVAVLDRLGALVLETTVPTREPERLLAGLAPFRPLEVVVETCPFWPWLYDLLVPAGIRFHLAHAKRLRAIATAPQKNDRVDARLLARMLLSGLIPEAYPRPGDQRELLRLLRHRTTLVRSRTRLAGRIHSQLHQQRLLLPREQLLRQATRGWLRETAWPRLTAEQQAIVTTHLELIDHLTPLIQALERRIATAAGANPTAALLATIPGIGPYRSLLLAAELLPLTRFSRVEHLASYAGLAPVTRSSGGHTRHGSIPQGANRWVRGALVQCSLRARKQPGAADRDRRPRPQAVDCAVALSRDGVVPEGAVLKA

SEQ ID NO: 299472 - protein, 481 aa, unidentified
MGRDPVREIIHITLWPDLQPTGEGMDQQLGKSNGLSLERIEPNAAGIDVGATEIFVAVPPDRDQQPVRSFKTFTDDLRQMAAWLVQCGITTVAMESTGVYWIPPHEVLEEAGIRVCLVNSKHVKHVPGRKSDVSDCQWLQYLHSVGLLRASFRPESEIRAIRALSRHRSSLIEIASVHVQHMHKALTQMNLQIHHVLSDITGLSGMAIIEAIVAGERSPVRLAALCNQRVRSDQDTVIKSLVGNYRSEHLFTLKQSLTAYKHYQELIADCDREIERLMRLLNGKIDPPPSSPATPPDPRFQKRSKNQFRFDMGSELNRVFGVDLTTIPGISALTAHILLAEIGPDLRHFANVAAFASWLALCPANTKSGGKVLSSKTRQTNNRASHALRIAAQTLARSKSHLGNFYRRMRARLGGPQAITATAHKLARIIYHLLTTGQHYDETVFVKEDKKQAQRQEKRLRKQAKTLGFQLVLITATVSCS

SEQ ID NO: 299473 - protein, 348 aa, unidentified
MVVIGVDSHKRTHTVVAVDGTGRKLAEKTVVATSAGHLELVRWAGRFPDRSWALEDCRHLSRRLSTDLLVAGESVVRVPPKLMAGARRSSREPGKSDPIDALAVARAALREDLPAATLDGSEREVRLLVDHREDLVAERTRAQNRLRWHLHELDPGSEPGARSLDRTVVLASLERDLADAPGTVGRIARELVIRIRELTRTINELEREIARLVADLAPSLLALVGCGPLTAAKLIGETAGIGRFRSKAAFARHNGSAPLPVWSGNTVRHRLSRTGNRQLNVGLHRIAITQLQREGPGKTYLEHRRAQGDTKPEAIRALRRRISDEVFRRMRHDDAARAATRAPLAAAA

SEQ ID NO: 299474 - protein, 314 aa, unidentified
MTASQIFIGIDVSKHFLDVAQWPEDRTFQVAQEEAAIAVLVGTLRALNPSRIVLEATGGLEAPVTAALAAAGLPVAVVNPRQARDFAKATGQLAKTDTIDARLLARLGQSLAPRLTALKDEETRQLEALLARRRQIVEMLTMEKNRLHSAAKPVRRDIAAHIAWLAKRLNDIDGELKTAIAGCEALRAKDRIIQSAPGAGRVLATTLIANLPELGALNRREISALVGVAPLNCDSGTMQGARRVWGGRAAVRTVLYMATLSAIRFNPDIRAFHARLVASGKKPKVAITACMRKFLTILNAMVRSNTPWQARVVG

SEQ ID NO: 299475 - protein, 410 aa, unidentified
MKVAGIDVHKKVLMVVVVDASTPEEKPARRRFVTMPSELHRLLTWLREQGVEEAVMESTAQYWRSVWLELEPHMRLHLAQAFSKRAPGGRKHDFKDAERLVRRLIADELILSFVPSGEQRIWRSLTRMKLQLTRDRVRLQNQIECLLEEMRIKLSIVVSNLLGASGLRILHALANGETDPKRLAQLGGERWQCTEEQLVDALTGRAQPVHGAMLALQLERLQLIDQQMERLNSMIAAAMKPQQDAVMRLAEVPGLGVDSAQQIIAEVGAQAGTFASAAELTSWVGTCPGKQESAEQNHSRRSAKGNKYMRRVLNQAAHAAAAKKGSHFQIVFRRLLPRLGYQSAIWAVAHRLCRVVWKILHEGVRFIEKGAEVHPREKKKRAQMLARALRKLGYEVTITPLNQLVPKPAV

SEQ ID NO: 299476 - protein, 431 aa, unidentified
MSDTNQLFISVGIDVGADISWMSIALPNQLFVGKPFKITHSDLSSLDRCVKTIKEAEEMYSLESRIFLESTGIYHYPLFCYLRDKGFMVSVINPIITKNSTNINIRKVHNDKFDSKKIALIGLNPKLKTSVIPSNLVLDLRNLMREYYSLTDNRSAYVNKLQGQLRMVFPQYLGIFSKVTVDTSLTLLDQFGSPEAFLAADKQAVVTTIKQTARFGLKYAESKTEAIMEAANAALSFGHSVPSNFRLIRLYISFIRKYDDEMASVFAAMNELVTANEDELFVRHIHLLESIKGAGFLTAVTIMCEIGDFSVFKSPKQLFAYFGLDPDVKQSGKFTGTKAKMSKRGSALARRAIHTIALISVGKSKSGAFHNPVLAEYYQLKCKSKPKLVALGAVAHKVCNIVFAVLRDEKEFTIITPKEHNESYKGQVAVA

SEQ ID NO: 299477 - protein, 407 aa, unidentified
MQVLYPRCAGLDVHKDSVVASVRLAQGAKVTRELRKFGTTTHDLLALLDWLESHAVTHVAMESTGVYWKPVWHVLEGHCTLILANAQEIRNVPGRKSDVNDASWIADLLAHGLIRASFVPPAPIQELRDLTRTRKQLVRERGHHVQRLQKILEDANLKLASVMSDILGQSGRAVLEALVAGETNPERLAELTHRLKATSDELRDALNGRVTPHHRFLLQLHLTQIDACDRAIGALEARATEGLAPFRRAAARLCTIPGVREVTAQVIVAEIGADLTPFPTAGHLLSWAGLCRRLDESAGKRRSERVRRGNRWLKTSLIQAAWAVVKDRDSYLHAQFHRLKSRRGAKKAIVAVAASMLTAAYHMLRHDLDWRDLGADHFDRRHHERLARRLVHRLTQLGYHVDIQKAA

SEQ ID NO: 299478 - protein, 386 aa, unidentified
MQVARVVIGVDPAKRSHAIEVIDEREKTLASGVFTNDNAGYRQMRRATHGFLNRVWAVEGAGGVGRQLAQRLIADGETVIDVPPKLSTRVRAMSTGHGRKTDPTDARAVAIVGLRNTDLTQVVVDDETVALRLLSERRRDLVRARTQTVNRLHQVLMELIPGGAAQKLTAAKAKALLATVRPRDVAGKARRQLAADYIDDVVTLDRKLKAIEKRIGEAVTATGTSLTEIVGVGPITAALILGEVGNVARFPNNDHFASYTGTAPLDASSGEVVRHRLSRAGNRRLNHALHIAAMVHKRYDTRGRDYYARKLAAGKGSKGALRCLKRRLSDAVFRRLLDDQTAKVREGQLGATLQSSATDLIPMASTSEQPLPGRAPDLTTVAAAVS

SEQ ID NO: 299479 - protein, 353 aa, unidentified
MEHFIGCDAHKKFSIFASIDEKGEYGPTFRVRHDLEVFRKFLKELPAGSKIALETSGCYYWMVDEMERAEHIPLLAHALTAKRRMEGRHKTNERDARGLAMLLRNGTLPVVWIPPAELRDQREMLRWRMCLSRMRTRVKNRIHGVLQRYNVDIAVSDLFGDAGRVELLARLHELPPYSRHSLLDQLQMVDTVETQISECEQVLEEMLYPSADRDLLDSLPCVGKILSAVMALEIGDVQRFGGPDRLVSYAGLVPVARESADWKRKDRCPRDCNMYLKWAYVEAANLISIHRGHWPERHVAQLYERVKQSTKMHGKATMAVARHLAEASYWMLRKQAVYQEPNSKRKVLSSTHG

SEQ ID NO: 299480 - protein, 331 aa, unidentified
MKINETVGIDISKKTLDVHIHSKKLSGVFENSKKGFVQMRKWFLTNIDIPKDEVLFVFEHTGIYSEEISDFLSKQGLFYKIVPGLEIKKSLGMVRGKSDRKDAAKIALYGFRLRDEIIPCQIPNRTLRSLKKLLSLRDRLVKQRAGYKASVKEQKRILEHKGDKILIETQLKMIAYLSKQISGIEQELLLIISENGKLSQIFSLVTGIKGVGRQTALYLIAYSEGFTKFKNYRKLASYCGIAPFPNQSGTSIRGRTKVSHLANKKLKSLLDLCAKSAITSNGEMKSYYNRRIDTGKNKMSTINIVRNKLLARIFAVVKRQTPYVDTMKYAA

SEQ ID NO: 299481 - protein, 321 aa, unidentified
MAMLSFCGIDVAKDSLDVVVLPEQQCLLVRNDAAGWAELVKQLRGLSIAAVGLEASGGFERGVMRALLAANMAVHRINPFKLRQFAKASGILAKSDRLDARVIASFIAIMPTRRAQRHSLAIERLTEMLTVRRQLSDEKIAAQNAAAMLEDAMLLRLSRRRIGRLKADIDMLDTNLIEIVRADAALVHRYRLLTSMPGVGPVLACTLIALLPELGSMSRKQVAALVGVAPYTFESGKLKGKRCIWGGRAPVRDVLYMAAMSASNWNPVLKAFHNRLKAAGKLHKVVIVAVMRKMITMLNAMVRDDVVWADHLYGRHIVPTA

SEQ ID NO: 299482 - protein, 331 aa, unidentified
MHIVSVGIDLGKTTFHLVALGERNKVLMRKKFSRSQLLAYTAKLPSSLIGLEACAGAHFVGGVLREQGHQVRLMPAQFVKPYRKSNKNDFIDADAIADAVTKENMRFAQIKTQEQLDIQAMHRVRDRLVQRRTALINEIRGFLLERGITFAARPIELRKNLPMVLEDAEQNLSPRLRWLLERLWHECEQLDIDIETMTDEIERISNENALCRRLRKIPGFGPLVASATVAAIGNGAAFRRGRDFAAWVGVVPRQYSTGGKQKLFGISKRGNVYLRRMLIHGARAVLLRVKYNTAGFGQWVHRLAQRAPRNRVVVEQTGSHRLGCAVQRQRI

SEQ ID NO: 299483 - protein, 318 aa, unidentified
MGLYMINNFLGIDVSKDRFDVFLSFISKKGKRETRKRSFKNDDHGFQGLLSFLQKHNVEQVKACMEATGCYSEALAEFLHNTGHFVSVVNPYCIKSYARSKLTRQKNDQTDAEIIADCCQRQEPTRWTPPSPELKKLKHLYRCSVALKDELILVNNHLEKKERLPKEVANAWEDLAMNIAQKIETIKNSVRELLKQHKELLENFQLLLTIPGIGEESAVAILAEVPDIEVFRNARQLAAYAGVIPRNITSGSSVYAKPRLSKSGSQPLRKALFFPAIVAKNHNPIIMSFCQRLKEKGKHNMAIVGSAMRKLLHIVLVF

SEQ ID NO: 299484 - protein, 367 aa, unidentified
MATYCGVDFHARQQFIKWCDTADGEIHEEQLLHLQPEKVREFYAQFKGEVIVGFEAGGYSSWFETMLQQIGHQVWIGNPTEIRHRARSRQKSDRRDAELLLDLLLKDEFPRIHRLTPESLEVLRQLRYRHRLVQMRTRIYNALQAISLSAGVSLKAKLRTSKGRERLCQLALTPAFAGQREEWLSLLSELDRRIEQVEQELEPVAAADPRVRLVRTHPGVGLLTGLALVHTLCPVSRFANSRKVTAYVGLEPREYSSGERQRFGSISKAGSRLLRFLLVEAGHKAIARDEQLKKLYHRLLHRRERAKAKVAVARHLLVRSFILLRDEIDYAEFLRRGVAVRSARGGHRPSMPDSLIERPASEQQQPA

SEQ ID NO: 299485 - protein, 410 aa, unidentified
MNTLYVGIDVSSKNNVIYLMKPDGSKHSNFKVANSLNGSKELVKRIISALNSLELTSLSIGLEATSVYGDNLVYFLREDGSIATYDKQIHVLNPKQVKKFKDSYNDLPKNDYIDSFVIADCLRFGRINKEAYLDDYRYKALQNLTRARYFAVQNLTKEKQRFLNYLFMKYSSMTQEKVFSCKYGTTAFAVYEEFDSAEQLAEMDLHDLTEFIKAKGKNRFPDPDAVAKAIQKAARGSYRLPKTINDSVNQVLSISISSMRALESQIKELDKAIEEQVKLIPNTLQSIPGIGPVYSAGIIAEVGDINRFKNQASMAKYAGLAWSQYQSGDFEAEHTHLIQSGNRFLKYYLCEGAWSHVCCDTEYKRFYDIKYKEVNRNQHKRALALTARKFARLVYSMLKTNQLYKAPVSK

SEQ ID NO: 299486 - protein, 319 aa, unidentified
MTQDDLVVVGIDVAKDKIDACIRTVTERKTCPTTAAGRRSLIAWFRKHQVGKAVMEASGGYERVWAKALRQAGLEVRIVDPKRVRHFAESAGRLAKNDKIDAEMISWFAETFGEAPSQVDNPAHEEMKALVKGRQGLLDVRARLEMQKEHEAPALVQKARARLLKKLADEIAALETAIAATIKTTPDFAKRAEIIQSVPGFAEGTAMALLGGLPELGQVSDEVAAALMGVAPYDDDSGKRRGERCIKGGRRWVRNALYMPCVGAATLNNPVFKAFYERLIAKGKPPKVAIVACMRKLIIILNTMIARGETWDPKKYRVA

SEQ ID NO: 299487 - protein, 403 aa, unidentified
MSVFVGLDWGGESHAVCVVDGSGKVLDRFTVAHDVGGLAELVARLRRRAPPDRTPIAIERPSGLLVDSLAEAGFLVTPIHPNVVKACRPRYRAVAAKSDPGDAYILADVLRTDGHRLAPLSPQSDAIKALRALVRGRDDLVATKVALANQLRALLESFWPGPIACFADIASPIALAFLDRYPTPDSAARLGEKRMASFLAQHQYCGRRPAAEVLARLRSAACGSAAEAEAEAKGEMVRALARSLESIVAQITRLTSRIEHAVAELPEGRIVMSFPRAGKVCAAQITAELGDVRARFQSEHHLAAEAGVAPVTYQSGRSRGVGWRWACNKRLRAAVTCFADNSRHASPWAALVYRRARERGCRHAHAIRILARAWLRILWRAWQDGTTYDPDKHPAARALIASG

SEQ ID NO: 299488 - protein, 291 aa, unidentified
MEPPLKDGVIMRQHRISIFKKRRRSMKDIKILGVDIAKDVFQLCGIDEWGKVIYTRRVKRAQYVSTVASLKVGCVVMEACGGANHWYRTFMGMGISTQLISPQHVKPYVKSNKNDRNDAQAIAEAASRASMRFVRGKTVEQQDVQVLLKIRDRLVKSRTALINEIRGLLQEYGLTMARGAKRFYEELPLILASEAVGLTPRMKRVLNCLYTELLNRDEAIGDYEEELKAVAKANEDCQRVQSIPGVGYLTALSVYASVGDIHQFHRSRQLSAFIGLVPRQHSSGNKSVVGD

SEQ ID NO: 299489 - protein, 442 aa, unidentified
MQREKRSVKKALQDLKMEIRGSQNTLIIAVDIGKIRNCACFVSSSGRVLRRRFFFTNTIDGFNQLMRQSKSYQRKEELPHTLFGMEPSGYYWIHLYEHLINCGKRTVTVSPLAVNRNRETINVSKDKSDPKDAYNIADLMKQGKFYLPIYRDKRIRELKRFTKIYCRLIAQRASLRCRLRGAVGYIFPELEHYFTDILAKSMIIILKKCPFPYQIKKMGKSRFISLLAKKNPRLPKKRTAEIYELARLSVGITGEEESAFFEIKFLLNELEALDRSLVEINARVQNIVSDRDDYRLLITIRGVGPVTASSTIAEIGDITNFSSGKQLIKLSGLDLYGSESGISIHSLRHISKRGRRTLRTVLYQAAINCIRCNAHLKACYLKLLANQPNKKKVKPKAIVAIACKLLRIIYRMLTDKKSFDSTYDQRLREKASLKMVKSSLLV

SEQ ID NO: 299490 - protein, 341 aa, unidentified
MEEYIGLDVSMKETAVSIRRDGKRVWRGKCPSDPKLIADLIRKRAPSVKRVVFETGPLSVWFYHALCAEGLPAICIDARHAKAALDMAPNKTDANDADGLAHLAEVGFFREVRVKGFDSMLTRTLVAARTRLVRICTELSNQIRGLMKTFGLVVPAGKGSTFEKNVRSLLVGQDGLAAILLPMLEAWRGLRIRAMELGRQLVAGARQNQPCRILMSIPGVGAITATSFATAIEDPANFKSSRSVGAWLGLTTRRYQSGEVDYDGHISRRGDRQVRGLLFEAATVILTRSSAESSLRRWGLKLRERVGFKRAAVAVARKLAVIMHAMLKTGTFFDRSAGAAA

SEQ ID NO: 299491 - protein, 387 aa, unidentified
MNCVGIDVSKGKSMIAVMRPFGEVVVSPFEVRHTANELSELAGLLKSLDGETRVVMESTGNYHAPVAWLLHDAGLYVSVVNAMLVHDYGNNSLRRAKTDKKDAVKLANYGLDHWLTLPRYIPEEDTRLMLKICYRQYQQLDTTFPDANRLFTSPPRADGSEKWVDFVATFWHCECVCGRSEKAFTTQYQKWCRKHGYNFSEDKALDIYASACRHFGVIPKTDTAKLLVEQAISQLQTTSSALAALKQEMQSLAASLPEYPVVMGMFGVGPTLGPQLLAEIGDVRRFHSKKALVAFAGIDAPPYQSGQIDVRSRSISKRGSASLRRTLFLVMSVILQCAPIDEPVYQFMDKKRSEGKPYRVYMMASANKFLRIYYASVKAYLESLEHD

SEQ ID NO: 299492 - protein, 340 aa, unidentified
MDHYAGIDVSLEYSSVCIVDATGKIVREAKVLSEPAALIAWFGSLGLNVVRIGLEAGPLSQWLYAGMRGAALAVELLETRHVRNALEIMPVKTDRKDARGIAELMRLGWHRPVHCKSMAAQETRAMLTARDLVQSKLHDVEMSLRGTLRGFGLKVGRTTPRRFEARILELVAGHPGLEVIAKALLAARAVLLHEFNAFQKRVRAMARSDTRARLLMSVPSVGPIVALTVASAIDDPARFKSSKSVGAHFGMTPKKYQSGETDITGRISKIGDKGVRTASYQAAHVMLTRPLKGCSALKSWAMKLAKRVGMKKAKVALARKLVVIMHRMLADGTTFADARA

SEQ ID NO: 299493 - protein, 338 aa, unidentified
METYAGIDLHSSNNFVGVINDKDKILYGKRHKNRLDDVLKALDPFKDSLKGIVVESTFNWYWLVDGLQEHGYRLHLANPSAIQQYEGLKHTDDPWDSFWLAHMYRLGILPEGYIYPKEHRAVRDLLRRRLLFVRHSTAHILSLQSMISRNLGFKMSNNEIKKLKPVDIESLFDCSNLVFMANNSLAAIEFLKKIIKDIEKKVKSQVKMRKEFEMLLTTPGIGNILGLTIMLEVGDIARFVKVSDYSSYCRCVGSTRLSNGKKKGENNKKNGNKYLAWAYVEAAQFARRYCVKAQSFYQSKEAKTKPVVAIKALSNKLSRATYYIMRDQVAFDEDKLFS

SEQ ID NO: 299494 - protein, 315 aa, unidentified
MTEDNTRVAGVDISKAFLDLAFHPCGEVVRVTNDAAGLRELLCRVRKAKATKVVFEPTGRFHFALEAALDRAGIPGVKVNPRRARQFAEAAGGLAKTDRADARALARMGAALDLAPTPLASPARLRLRALLAARSGLIADRTATINRLAGEADGLCRRLAGQRLLLLKRQIAALDQEVDAVIAADPDLADACRRLSTIPGVGPQCAAMLIAEMPELGTMAGRQAASLAGLAPVARDSGARQGRRIIRGGRATLRRTLYMPALVASRWNPALRAVYERLIAAGKPAKVALTALMRKLIILANAMLRDGRDWATDAP

SEQ ID NO: 299495 - protein, 410 aa, unidentified
MRIIALDVHRSFAQTAILENGKLRDAGKIDLEYSRLLRFARKLKPDDEIVIEATGNTSAIVRVLLPFVGRVVIANPILVRAIAWAKVKTDKIDAAVLAKLHASGFLPEVWMPDEETEARRRVVAERTQLVSQMTRLKNRIQSVLHANLIPPYKGVLFSQRGRAWLEAQPLAEDQRRVIVRHAGELDRLGAELAEVDKSLAQAALEEPRVKRLMTITGVNSIVAMSVLAAIGDIHRFSSPEKLVSYFGLNPRVRQSGDKPAYHGRITKQGRAHARSMLVEAAWVISGAPGPLRAFFIRIRDKRGKHVAAVATARKLAVIIWHILSKDEDYTWNRPALLQWKLRKLELKAGHPSRRGGRQKGSAAAYSNKSVRDSERETIANAEDEYRRFVATWKQQSPKGRSGATKEVRRS

SEQ ID NO: 299496 - protein, 420 aa, unidentified
MKAKKKKKLDLIGDDTLIVGIDVGKKKHHARFINVRGYEIGKVFSFSNNRDGMEKIIAKIEKAKKQNSLTKAIIGLEPSGHYWKAAAHYLSSSGYKLALVNPYHIKKTKEIDDNCQTKTDTKDCLLIAKLVRDGDFFDPNLANGVYAELRRMYRLRLKVKKALAREKTRLKILLDEYFPEYEDLFCDILGVTSEYILRKYFLPKFVAKENILSLTGKIKMLSKGRIGAGKVLKLIEYAKDSIGITIGLDAALLEKTYILKEAKNLKSKLAYMNRKLKYYLDKIEYSKYILSIPGVGIVTAAGFLGEIGDISKYTSAKEIIKLAGLNLVEISSGMKRGKKKISKRGNSILRCILYQCAIVAISRNSEIKRYFSYQTETKNKMKMVVAVQCKLARIMFALLKYKKYYNPDKVLKSVVAEAVA

SEQ ID NO: 299497 - protein, 365 aa, unidentified
MISVPHEATVLGLDVHKLTISAAVLEPNSDSPVVDKIATDPESVRRLVGRFAEPRRLVACYEAGPTGYELARQLRTLGVCCEVIAPSLIPVAPGDKVKTDRRDARRLALLLRAGQLTAVRVPAPAEEAVRDLCRARADMVLDRTRARHRLGKFLLRHGRVWREGSNWTAKHESWIAIQAFDEPALQVTLAHYRATLRAQEAAVDAVEADLSGLLHAEPFADAVRRLAAYRGVTELGALHLAAEVGDWRRFPAAAMFAGFCGLVPSERSSGERTFRGGIIHAGNTHLRTQLVEAAWSYQHQARVGAVLARRQEGLDPKVVARAWSAQLRLCGRFRRLDARKTNRKTVVTAIARKLAGFCWAEMNAA

SEQ ID NO: 299498 - protein, 362 aa, unidentified
MARLALQREDVIVGVDTHKDAHVAVALDGLGSWLGQQTVAASPDGYAALVAWATQLGAVSRFGVEGTGSYGSGLARFLRRHSHVVLEVSRPPRKGERRRSGKSDAIDAEHAAREVLAGTARATPKLADGAIEAIRLLKIARDTAVKAHSQAMITLKATLVTASDALRAELEPLSAFRLIQACAALPSAGAIADPAVAMQHVLRSLAQRWLALHEEIKVHSAHLKHLTKAAAPELVAAFGIGPDIAAELLVTAGENTDRIRSEAALAKLCGVCPIPASSGKTSGRHRLNRGGNRQANAALYRAVVVRMRWHPATMAYVERRTTEGLSKKEIIRCLKRYVVREIYRLLPAPSSSTGFTSDDRTT

SEQ ID NO: 299499 - protein, 344 aa, unidentified
MSGYAGRQFVGIDLHRRRSVIVRMTEAGEPLEAVRILNDVESLDRVIARAGVAPEVVLEATYGWYWAVDALQAAGANVHLAHPLGVKAFEYRRVKNDVRDAADLADLLRMGRLPEAWIAPPATRELRELVRHRAKLVALRSGCKAEVHAVLAKCGIQVLMSDLFGLEGTRLLDRLDLPAPYAARIGSLRRIMDGLDFEIEVFENLTRGRLRTDPGYAAVQQIPGIGPILGAVFVAEIGDVGRFDTAAQLACWAGLTPKHHESDTHVRRGRITKQGSRLVRWAAVESIKRIGAHTRVGALRERVAARRGGNIAAVAAARQQVEYVFYALRDGHVRALQHHSQEAA

SEQ ID NO: 299500 - protein, 406 aa, unidentified
MLVYLGIDWSEQKHDLSFQNELGAEILHLRIPHSENGFLALNQSVANLGASPAECVVGLETAHNLLIDFLWAHGYTQIYVLPPNLVKSNQGRHRQSGAKDDRCDAALIAELVRTDRSHLYPWRPGSLLLQQMRAKVSYLYFLTRDIVQHTNRLRSILLRYYPAATQVFSALDTKICLDFIQAFPTPQQAAQLDFETFSAFARSHHYPQPKRLLLNYARLQQPQPIPAAETVQAFQDEAVQLCQLVKMLVQRKEETLQELDRLYQQHPDHVIFASLPGLGARLAPAILVKFGEDRQRFPQPELVQALAGTCPITVQSGKSKYVRFRQSCDHEFRHYVQQWAWHSLQHSSWAEAYYLRVRPNCRSDSHVLRCLGNRWLAIAWKLWVSETPYDETYHLRQHALRLRPRA

SEQ ID NO: 299501 - protein, 347 aa, unidentified
MSITMIGLDTAKAVFQVHAVDAAGQVVTRRKLRRNELIAFFEKQAACTVVMEACGAAHHWARVLTGLGHDVKLIAPEAVRPFVKKGKKNDAADAAAICEAASRPGVRFVPIKSLEQQGVLALHSARSLLVKQQTMLANAIRGLATEFGLTVPLGMSKLGELMALVDADEAVPAKARQALTTLFDQCRALEESTETFEAEIVAHARHDDIARRLATIPGIGPITASLIAATVADIGVFKSARHFAAWLGLVPRQHSTGGKIRLGRITKTGNREIRRLLVLGATSMVYRAPQWNSAAGVWTRAILERRPVRLVTVALANKMARIAWALMTRSEVYHAKGRVAIAAEAVA

SEQ ID NO: 299502 - protein, 351 aa, unidentified
MIIGVDPHKGSHTATALNPATNTAAASLRIDASLAGYRQLLRWGKAFPERQWAIENAHGLGQHLAQWLIARGETVVDVRTTATARVRELSRGGRRKNDVLDASAAASVAAAHGDASLVAPEDETTVFALLEEHRTNLAAHRVRLVNQLHALLRDLVPGGARPALTAQAATALLRGLRPVSTAERCRKDLARELVREIRAVDARLVQIAERMAEALRARSTRLLQVQGIGPVLAVRLIGRTGHASRFPSAAAFASYAGVAPVEVSSGDRVRHRLSRSGDRQLNCALHLVAVTQVRMPLSIGRSYYDRKIAEGKTHKEAMRCLKRRISSHVWRLMLLDERRGEEPTSGRSPIA

SEQ ID NO: 299503 - protein, 404 aa, unidentified
MNNLAGIDVSKGKSMVSVLRPFGEVVALPFTVYHTPSELGQLANYLKSLDGETRVVMEHTGRYYEPVAQALHDAGVFVCAVNPKLIKDYGNNSLRKVKTDKADSKKIARYGLDNWAELREYSSMDAIRYQLKTMNRQYGLFSKNKTALKNNLISLLDQTYPDANALFDSPVRDDGSEKWVDFVASFWHVDCVRGMSLSAFTERYQKFCKHHGYNFSAKRAEEIHSAAKELCVMVPKDPVTKFLIQQAVDQINTCSKSVEAIRIEMNQLASQLPEYPVVMTMYGVGERLGPQLIAEIGDVTRFSHKGSLAAYAGVDPGANQSGAKEAKSNRASKCGSPALRKTLFNVMDCLIKKQPMDDPVYLFLDKKRAEGKPYFVYMTAGANKFLRIYYGRVMEHLTTLPPAE

SEQ ID NO: 299504 - protein, 315 aa, unidentified
MAMRVTLEKPIIGVDVAKNELVIYHDQYDRLEAIPNTKVAITQWLKALASSCAIAIEATNVYHVLFADAAHEAGCDVYMVDGYQLSHYRKGVNIRAKTDAQDARLLARYLKNELDELRPWIPASPLYRQLLSLFRRRAALVQARTGLVQSWTNEPFLRTAFANQVNSMKRFEALVEKKIRDVLQEAGLMRQVNRCMKVEGIGFLTAARLVTSFQRGEFSGANAFIAFLGLDLRVSKSGQSDGPRRLTKRGDPEARRLQHNAAMSGSRTPAWKPFYEEQRKRGFSTTQALVMLSRKLARVVFALLKNQSEYQTKVA

SEQ ID NO: 299505 - protein, 408 aa, unidentified
MALYVGDDWAEDHHDVHLMDETGERLAARRLPEGVEGITALHELVAGHASGPHEVVVGIETDRGPWVMALVAAGYRVYAINPRSASRYRDRHHVGGAKSDAGDAKLLADLVRTDRHNHREVAGDSDEAAAVRILARAHQQLVWDRTRQTNRLRNALREYFPGALRAFPSLTHGDAVGVLATAPGPREAARLSTSQIRSALRRGGRKRNVEERAAELREAFRAEQLEVPATVSQAFAATTRATVGQIAEINRQIAELEAELAASFEEHPDAAIYLSMPGLGPVLGARVLGEFGDDPERYESAKSRRNYAGTSPLTVASGRKRTVKARFVRNRRLGDATMLWAMCSLRASPGCRDFYDRRRAAGDLHYQALRALANRLVGYLHGCLRSQTPYDEALAWSHRSPLQDLAAA

SEQ ID NO: 299506 - protein, 391 aa, unidentified
MIYVGIDVAKDKHDCYICDSDGVELYPPFIISNNQEGFEKLMNCICNASEDFSKVKVGLEATGHYSYNILGYLLSKGLLISLINPLHTNLFRKSLSLRQTKTDKVDARTICMMLSSGMALTPYSDTSYHMEELKSLTRYRFDKVRERAQLKQSLSRLVTILFPELEKLVPTLHMKSVYTLLLEFPGAKHVAEAHMTHLKHLLSKSSKGRYDKDFAETVRNAARNSIGSDMPAKSLELKHTIALIHVLTDEIDEVEASIREIMDTIDAPILGIPGINYRMGAMILAELGDLSRFSSPDKILAYAGMSPSTYQSGQLTSSYAHMEKRGSRYLRYALFNATQYVCMWDPTYKAYLEKKRSEGKHYFVAISHAAKKLVRLIYHLQTTGEAYCPTA

SEQ ID NO: 299507 - protein, 307 aa, unidentified
MHFLGAGVDVSKAFLDVAVHGEKTVKRFPNDGAGFAQMAVWLRPWNLQQVVLEATGGYEQAALDGLYAAGLPMVRINPRQVRDFAKATGQLAKTDRLDARVLAHMASVLPLIAYRPLDAKASQLKQFHQRRGHLVRMISAEKQRRRQITEPTLRAMLDENIRRLEVDRDQLDAAIGDQIADTLQRRVLGSIKGVGQGLLTAVICDMPELGYLSRKSAAKLYGMAPLSRDSGTFKGHRTTWGGRAAPRAAMYMATLSAVRYEPSLRAFYQGLLARGKLKKVALVAAMRKLLTILNARMREAIAAHPIG

SEQ ID NO: 299508 - protein, 366 aa, unidentified
MEKYKFVGLDVHKATIAVAVGEANGGEVRYVGEIANTPEAVVKLVRQLKKDGAIPSFCYEAGPCGYVLYRQLKSLGLECLVVAPSLIPTKAGDRVKTDRRDSLKLARLYRAGELTAVWVPDGAQEALRDLTRAREDMKHAEKQIKQRMLAFLLRHGKSYGGETNWTKMHFRWFETVKFEHPVQQIVFQEYVDTVKAMVKRVEGFDRQIGTSAAESVFWPVIQALMALRGISLLAATIIVAEIGDLRRFDSAPQLMAYLGVVPSEYSSGATKTRGAITKTGNGHVRRILVEAAWTYRHPARKTEYLQRRAKHAPDNIQQIAWDAQKRLCGRYRLLEAKGKLKQKTCTAIARELAGFIWAIGQALPQQ

SEQ ID NO: 299509 - protein, 349 aa, unidentified
MSIIGCDLHTRYQQIALLEGEGGERVVRRLEHENGESRRFYAGLPVPSLIGIEATGYTQWFERMLAEQGHELWVGDPAEIRARAVRRQKTDTRDAEHLLDLLLTKRFPRIWVPSVEERDLRQLLKHRDKLVHLQTSIRNQLHFLALSQGLCRKKKLWSAQGRVELEGLSLGEWASLRRQELLELLDRLDPRVEELNAAVKAAAEQRADCRELMKIKGIGPVTSLAYVLTLGPVSRFATSRALVSYLGLNPREDSSGGRQRLGHISKQGNSMLRWLLVEAGHGAAQFDPELRRKYQRLKFRRGGAVARVALARHLAVRLYWTLRQAGNDHTAGSHAGQPATAHGGPSPSC

SEQ ID NO: 299510 - protein, 401 aa, unidentified
MVSDFMKGRYNLMKIFVGIDIAKLNHFAAAISSDGEILIEPFKFTNDADGFQLLVSKLESFDKNSIIIGLESTAHYGDNLVRYLVAEFYQVCVLNPIKTCQMRKNNVRKTKTDKVDTFVIAKTLMMQDDLRFITFFDLDMMDLKALGRFRQKTIKQRTRLKIQLTTYVDQVFPEIQYFFKSGLHQNAVYALLKEAPSPKEIASMHMTHLANLLKVNSHGHFTKEQAKELRVLAQKSVGANDSAISIQITQTIQQIELLDSQLEKIEAEMTDIMKFNDSVIMTIPGIGYINGGMILGEIGDIHRFSNPNKLLAFAGLDPSVYQSGNFQAKTTRMSKRGSRVLRYALVNAAWNVVRNNATFKAYYDAKRSEGRSHYNALGHCAGKLVRVIWKMLTDEVEFNLE

SEQ ID NO: 299511 - protein, 341 aa, unidentified
MTFYCGIDLHSKKSHVCIIDKNGKKVKEENLNNDLTLILQFLKPFGKNVQIAIESTINWYWIVDGLQEEGYDVKLAHTLGLHMITGAKVKTDRRDAFKLAKLLRMGEIPEAYIYPKEKRPLRDLLRRRAGLVQERAACYSSLRVQFIRYNLNTMSLTELKQFSPVDINIMPIPQELKDYCVMILQRVDLLSSQIDELDTYLKRVTLEDPKFKILLTLPGVLYVLGLTIYYEIGDISRFNSVRQFASYCRLVPGISQSSDKVKRGKGSNQGNHYLKFAFTQAANIAVRYYPKLRKFRDKHANRRKGNAATMVANCILAHKIAIATFYMLKDGVPFDEVKLFG

SEQ ID NO: 299512 - protein, 344 aa, unidentified
MEHLAIDLGSRKSQICLRRADQTVLDERKVETDHLEAYFRRLAPSRVILETSAESFRIADQARAAGHEVRVVPATLVRTLGVGSRRTKNDRKDAQVLSEVSCRIDLPSVHIPSSESRERKTICGMREAQVSARTQLINCVRGWLRTQRLRVKAGADGFADRVRLQQTLQCKTEAPDYVESMLCTIEQLDEQIQAAEKRLAKLAKADGTCRLLMTVPGVGPVTAIRFTAAIDDISRFPNAHAVQSYLGLVPGEYQSSETQHRLSITKAGSKRLRWALVQAAWSARNFRPDDPMVAWSIEVEKRRGKAIAVVALARKLAGILFAIWRDGTSYDKQRGAAIPGALPM

SEQ ID NO: 299513 - protein, 428 aa, unidentified
MDELNGNRLKEFRQLRQEIRHSEEYLVVGIDIAKDRHHAFFGTPTGKTLLRRLVFNNDYEGFRKLLDQSEALRVQHGLKKVVYGMEPTANYHKPLGEYLIGLGRAVVLVSGVTVARNRESLDGRWDKHDVKDSANVADLISQGKCLYYEHPSAELRGVRGLLSLKRRLKKQEQGYRVRIRNHLIAEYYPEMDRDYDRLGAEGLSVVRWCLPASEMAQLDMGPFIERVTTRRITTEKRRRLEAVWEKAGESIGCEGVPGLEHEAKVMVEGLREVRGMLKETEDRIEELCKRFPEYHYLLTIPGFGPDVSAKVLGAIGDPERFQNEKQVLKMGGLDLSADRSGKESDNAIPEISKRGKADLRFALYQAAFIASTKNRDIMVYYTNKIRGREREKGIQIKMRVKLAAKLLVIAWALMKKKEVFNPAYLNAE

SEQ ID NO: 299514 - protein, 350 aa, unidentified
MIIIGVDFHPEFQQIAWVDKDTGEFQEKRLAHREEAEKFYRDLAAAAQQVRVGMEASGHARWFERLLAELNFELWIGDAAKIRTKRVRKQKTDRQDARLILQLLLEDRFPQIWVPNWENRDLRQLLWHRHRMVQARTRIMNQLQAVALNEGLRCKKKLWRAQGREQLESFRLAPWASRRRRDLLDLLDRLNPTIAELSQAIEQEVEKCPEAQRLMTYPGVGALTALAFVLIIGDAERFQCGKQVASYLGLVPLEESSGNRRRLGHITKQGSSMMRFLLVEAAQVTARSLPQWRSKYLHLMMRRGRKTAKVALARRLAVHLYWMMRQGWDYPQWIKFGSHVGQPGNRHGVQ

SEQ ID NO: 299515 - protein, 371 aa, unidentified
MNSIFYVGMDVHKENFTLCCYNVEIDQLLYRQIVDPDYKMILKYLEQVRKRTPEAIEFILGYEAGCLGYTLYHQLTKCGLNCIILAPTTMGLMNTNHIKTDKRDAGNIARCLAFNTYSPVHIPTIEDESIKEYIRMRDAQKKTLKITKQQILALVLRQGYRFEEGKSNWTKKHVTWLKSLKLGGILKESLIEYLITFDYLVDKIERLDKRIEEFAKGERYIEKVNKLRCLNGIKTHTALSTIVEIGDFIRFPKAESMAAYLGLVPGENSSGGKQNRGSITKAGNVHVRRLLVESAQSFTRGKIGYKSRDLKLRQNGNAPQVIAYADKANERLRRKFYRMTLQNNTKRNVATTAIARELACFIWGLMTDNIA

SEQ ID NO: 299516 - protein, 378 aa, unidentified
MTCGGASSAQVCYATPVVKTVELEEVPMQIVGALDVHRRQITFKTLELASGESARGRISPAAREPLRQWLERFAGQQGEFVLEGTTGWRFVVEEIERAGHVARLADPAETAARRGRKRRAKTDDADCELQLRLLLAGELPEAWIPPVQILELRTRVRLRKTLIDQRTAWLQRLQAQLFHQGVPPGLKPRTAAGRDALARVELSPAGREAVELCLRMLDQLDRELEPIDGTLLAFARRQPGCRALTRQLYGVGAVTATAILAELGDARRFRSSDDAVRHSGLDVTVWQSDRKRAAGHLSHQGPSLLRWALFEAAQCAARRSSPDNAYYRNVAKRIDHNRACLSVARKLCRRAHHILRELGDDALAPTDPATPKLVDAAA

SEQ ID NO: 299517 - protein, 449 aa, unidentified
MERPQEVEDEEHERVWERVAAVDVAKASGVACTRVPGDEPGGRRRMHVWTVAATLGAVTELGDHLRCEGIEVVTLESTSEYWRIWHAVLEACGLKVQLVSARSVKNVPGRAKTDKKDAVWLAKLTGRGLLQPSFVPPYDIRRLREFTRLRAGLVHDRTRQWARLEKLLERALIKVSSVASSLDTQSVRAMLEALIAGERNPGILADLAIGRMRAKRKELAEALSGRFEDHHAELARMILDQIDALTRQVDAISARVSELIAQIPAAQGVDADGTTGPAAGRGPGAAVLPAAARLDEITGCGIIAAQAIIAEIGLDMTVFGTPGRLVSWAKRCPQTRQSGKKVTAGSAGKGNPWLNSVLGEIAAAASRTDTFLGERYRRLARRRGKRKALAAIARSVLVIIFHLLADPAARFRDLGPDHYDNRVSRDRKIANHVRQLQALGLNVAIEEAA

SEQ ID NO: 299518 - protein, 353 aa, unidentified
MTDTTSIAWLGLDAHSRNCVLAQLDDQGTELNCWRFPTQPQQLLKHVQAIPATVKRLMLEESNLARWIGQLLKPQVQQLIVCDARRNRLISQDSHKHDRRDAFALARLLRLNEFKPVWQPADDQRVLFKRAAQAYENAVLRQTRLKLQIKSLFQHWGLFPAGASVFAKAGRATWLKQLPYDPLRSQALLLYELLDQALAGQAQARRLMCQAGRLFPEIQRLRTAPGVGLVGAHLFAAYVQDPHRFAKFSRLSKYCRLAIRDRTSDNKPLGFKQLDRQGNGVLKAISYRAFLQAAKRRSGPLWDFYQASLRLTGSTTHARLNTQRKILLVLWTLWLKGEEFDPNQFSRSQPMNV

SEQ ID NO: 299519 - protein, 410 aa, unidentified
MDTLHVRCAGLDVHKDTVVACVRVVEEGKSRARTEVLTFGTTTSELCRLGEWLQEEGVTVAVLESTGVYWKPVWHVLSEYVDLVLGNAKHLKGVPGRKSDVADAVWLADLLAHGLVRASFVPPEPIVELRDLTRTRKQLVRDQTRHVQRIQKTLEDANIKLSSFISDIMGKSGRAMILALIDGQTDPAKLANLGDLRLKATQEQLMEALRGRVTPHHRILLKLHLDQYDAIARAIADLDVQIDQDLLPFREAADRLEQVPGLSKVSVAVIVSEIGHNMERFPSAGHLVSWAGLCPQMDESAGKRRTTRIRKGAPWLKTTLVQCAWAAIRKKDSYYKAQYHRICARRGPKKAIIAVAASMLTAIYHILRDQVPFVDLTASHFAKRDEDKLVKSLTRRLTGLGYAVEVKKAA

SEQ ID NO: 299520 - protein, 353 aa, unidentified
MIYAGIDLHSDNMVIVAINSNNKIAREAKLSSSRRALADFFTGFNQPVQAVVECTSFWYWLSDWCREHDITLKLAHAKMVKAISYAKVKTDKVDAKTLAELLRADLIPEAHQAAPQRRALRELTRGRLRMIQWRSKLQSTLWNLAAKYNVRISGSQWRELGALKDELQPKLPTQAGLQARMLTEQISQLQVHIHQLEQTIDQQSTFGQAAERLMEVPGIGKVGAWTILAEVGDIDRFPSSKQFVSYCRLVPGSKDSGGKRCHKSGNKDGNKYLRMAFGQAGVSAYTHYKVVGKFYRKVKRRSGKPIARTVVAKELAKIVWHMLSKDEEYKGFKGQSTRISAPSYWPQPISPFA

SEQ ID NO: 299521 - protein, 427 aa, unidentified
MPYKIAGIDVHKRMLHVVISDVEVDGEYEFTRRVFGSQPEALRSMSTWLVEQEAEEVVMESTAQYWRPVWEALERYWKPDCQKRCGAHTSSGTLHLAQAQSNRGRRGRKKDFLDAERLVKRLVANELVLSFVPDAEQRLWRTVMHTKYQARRNRVQQQNRLEALLEEAHIKISSLVSDLLGVSARRMLKAIAEGQTDPAAVVALADERLQATPEQLRDALGVCRELNPLYRRLIKMALEEVASIDKRIEQLDQEMADLLRRHEDQVQRLAEVPGLGADSAQQIIAEVGDTAATFPSEKHLSSWVGACPGSDESAEVNNSGRSPHGNRHMRRILNQAANSAVKHKGSIFEILYRRYVPRLGHKHTIAIIAHKLCHLIWKILHRGMRYEERGPEVNKKSKQARAQKMIRELRRLGYRVEPTTPQPATAT

SEQ ID NO: 299522 - protein, 333 aa, unidentified
MKILKQSIGIDVSKSDFKVCLGVIDEQLETKNVYEQVYANDKKGINKFIKDMVSKTDLRIPVCFVMEATGVYHQQLAYALAAQQFCVVILLPNKAKSFSKSINIRAKSDVIDAKLLCQMGLERKLSPWQPPESLFATLKVLTREREALVLQRSKLKNQLHAYQTAFVKAEKTIARLKEHILYLTRQIRDAQTDRKALVKQSQPVAARINKITKVKGLSFLSVATILAETDGFNIILNQKQLVGYSGLDVQINQSGEKMTKGCITKKGNAHLRKALYMPALSACRTNPAMKLFYAQLNERQKAKKQGVIAVQRKLLLLTYSLWKTGQDYLEKCA

SEQ ID NO: 299523 - protein, 351 aa, unidentified
MKRNYIGMDVHQTSTAIVVVDDEGKVLQRTVVKTDGKTLRGLVSALPGRKELTFEEGSMSEWLFGMLEPVVDRLVVCNPTANKTEFRGNKNDLLDAERLAELLRIGHLKPVYHEAHPLREIQSCLRTYHQVTGDLVRAKNRLKVLFRSRGIAVGREVYDREGGDLAAQGLSDPSDRERYQYLMDQVEFFTRQKELLTDDLVKKAKRYKDYRILQTIPGIGPIHAAELMGVVLTPHRFRTKRQFWRYCGLAVVKRTSSDWVQGVRGLERRNFEQTLGLNHDRHPVMKGVFMQAALVVTRSSPFKELYDSFIARGHSPALARVYIARKLSTITLTIWKQGGKFRPEMITSNPS

SEQ ID NO: 299524 - protein, 366 aa, unidentified
MEPTTIAIDLAKRVFQIHYVEPDTGTIRSKVLKRAQLVPFFANRPASRVVMEACGSAHHWARVLARLGHDVRLIAAQFVRPFVKSNKNDAADAAAIWEAAQRPGMRFVAVKTEDQQATLALHRIRQQLVRIRVMQINQLRGLLYEFGVVLPQGRRASVEAAKVALASLADQLPAMLTDSLQDQLSRLRALDEQIARLERRILDWRRNDDACRRISEIPGVGVLTATAAVSVIGQAKTFRSGREFAAYLGLVPRQNGSGGKVKLGGISKRGDVYLRTLLIHGARSVISAAKHLPERLRALLARRPTNVVAVALANKMARTIWALLAYGRTYQSNRHSDGPQAHALTIHGCTGKLNDGKTGWTVQGQA

SEQ ID NO: 299525 - protein, 422 aa, unidentified
MLQEDEQNEEIIARVAALDIGKAELVCCVRIPHEGRPGRRLQEVATYSTMTRSLLRMADRLAELEVTRVVMEATSDYWKPVYYLLEAHGFETWLVNARDVKHLPGRPKTDKLDAVWLCKVAERQMIRPSFVPPPEIRRLRDLTRYRCDLVEARTAEKQRVEKLLEDAQIKLSVVASDIFGVSGRQMMAALIAGQRDPKVLAQLARGRMRPKISQLEEAFTGYFTDHHSYLLAKMLARIDALNADIAELEDHIEEMVAPFATAVERLDEIPGLGPVAACAALAEVGLDMTRFPTAGHLVSWAKFAPGVKESAGKKKGRGSTGHGNRYLAKVIGEAAVAAGKTDTFLGERYRRIARRRGAKKAIVAVGRSILVIIWHLLSDPEARYHDLGSDFYDKRINPERKKRAHIHQLEALGYKVTLDPAA

SEQ ID NO: 299526 - protein, 343 aa, unidentified
MQVVRIGLDLAKYVFEVHGVDGQGNVVIRKTLRRGSVSTFFANLPPCLVGMEASNGAHYWARVLTELGHKVRLISPQFVAPYVKSNKNDRNDAEAICEAVSRPTMRFVPPKSPEQLAIQALHRIRQRLVQSRTRLVNQIRGILAEQGIVIARDIWRLRRALAEITGHATDDLNKLVRVLILETQAELMELDRRIASCDRRIRELYRTSELCQRLGEIEGIGPVTATALVAAVGDRSCFKNGRQFAAWLGLVPKQRSSGGRHRLFGISKRGDRYLRTLMIHGARAALGKAGGKQDPRSRWLASLRQRRHANVAAVALANKNARIVWAMLAGNVSYEPKRSVQAA

SEQ ID NO: 299527 - protein, 383 aa, unidentified
MRAVCGLDVHKDTVYLCILCDDGEIFEKVYGVLTKELQLMCSDMRRRGVTEVTMESTAMYWIPIWRVLEPHFRLKLVNPYFIKQLPGRKSDVKDAQWIAECTQKDLIRGSFVPPERIQQLRQYDRRIFDLDVEIVRKLSKLDAVMQRCNIRLSNYVSNTDTKSYKDVVDDLCNGVTAPEELIKHIHGRIVNKHGRETILESLTGVVSDAEKDTMRQLRAEIALAQENKQECHQKMVKICQTYYPKEFKRLMTIPGIKERAATSLIAEIGVDMTKFQTAAHLASWSGLKPRNDVSNGKFKSRSITHGNVYLRKTIIECAWGASRTKDCFFSRFSYHQTVVRKKNKMKVLVAVARKLLIAVWHVLNDEKDYVDFNPDCKSPATNG

SEQ ID NO: 299528 - protein, 366 aa, unidentified
MPKDNQVLFVGVDAHQETLSIAVLVGDSQEPLQPVTIPNRPPIIRRHFRRLLEQGTVIATYEAGSLGFVLYRQLMDMGVQCVVAAPSHLPKIPGDHRKTDRLDAQRLASFLRAGQIVQVRPPTPQIEALRTLTHTREAMREDVVRARHRILKLCLVRGMVFRDGMNWTAKHLAWLRKLELPIADDRQTLDFLVDELEQRVGALARLDLRMEERALQPDVDEAVRSLRAFRGVKTLTALSVVAEIADPRRFKNAKQVASYCGLIPSEHSSGARVHRGHITRSGNSRLRRLLIEATQHFARPYPETSAVHRRRPAAPPKAQRIAARADTRLKARYRKLAARKHTNLAKTAVARELIGFLWAALHLDMN

SEQ ID NO: 299529 - protein, 348 aa, unidentified
MDEAYDGRQIVGMDLHRRRSVLVRMTEAGQQLEAIRISNDLECLRAVIARAGEAPEVVLEATYGWYWAADTLSGLGAQVHLAHPLGVAMFGLRRVKNDFRDAADLADLLRMGRLPEAWIAPPQVRETRELVRHRAKLVGLRSSLKCQIHAVLAGAGVHVPMTDLFGLEGQQLLADLHHDHGRLSAAERARVLSARRVIESLDGEIDRFGALTRARIGADPGFRAVQAIPGVGPVLGAVFVAEIGDVTRFRRAGQLTSWAGLTPRHHESDTTVHRGRITKQGSTLVRWAAIEAVQILPKTSRCGAIRHRVGQRRGTNIGKVAAARELLECVFYALRDGHVRRLEPTPAP

SEQ ID NO: 299530 - protein, 351 aa, unidentified
MMREKKLAPVKYFIGIDVSKATFNYCVKSGSGKVVNGKAANNSESIREFFSGLKQIPGFKTGFAVFGMETTGIYGNILIGTLSKLKAKIVVEPALRIKNSLGLIKGKNDKLDAARIARYLVKNLSELRLWVPRRKIIDQLSSLSTLRERMVKVRTIIQTPLDEDNGFIDQAVSEENLRLCSPSVSKVVQLIKEVDERIKQIWSSDEQTCRMMKIMLSVVGIGEVTALEMLIQTNEFKSISTARTFASYCGIAPFEHDSGTSVKKPARVSKMANNRVKSLLHNGVRTCLANDHEIKAYYKRRVVVDKKKKSSAINAIKFKLICRVFACIRGNRLYDRHYVPKKAIREISTEK

SEQ ID NO: 299531 - protein, 336 aa, unidentified
MVQIYGIDLGMSSFDVSFLSESGSVRHLSGVKNTVHGISKFLLSLPSSAVLCAEHTGVYGDLLLRLCTLNRTCLCFVPGYQIKHSLGLQRGKSDPLDACRIREYAERFYDLLRPCFYPGEEMSELQELYRTRSLLVESRKRLDTLNIGDNCKSSVSLAADHARRAVLAELNTQISGLDHEIEALIQNSSEFSRNYQILTSIVGVGPVTSCELIIKTENFRKLDTAKKCAAYAGIAPYPKESGKMKCGHKISPMGDKQLKTLLFLCACSAKEHNKEIRLYFLKKHKVEKKHFFVAMNNIANKLLRLIYSLIHKQQTYDRDYIQRDPRCVVISDTNKC

SEQ ID NO: 299532 - protein, 348 aa, unidentified
MNYYTGIDVSLERSSVCVVDASGKILREGKVASEPEALIAWFGSLGLPIERIGLEAGPLSQWLCAAMREAGLAVELLETRHVRDAFKAMSVKTDRNDARGIAQLMRFGWFRPVHCKSIEAQEARAVLSGRKLLQSKLLDVENSLRGILRGFGLKVGKTTARTFAGRVNQLVAGHPALEVVAQALLAAHAVLLREFNDLDKRVARMARSYPPAKLLMTTPAVGPVVSLTYAFAIDDPKRFKSSKAAGPHFGLTPKKYQSGQTDITGRITKVGDASVREALYQAAHIMLTKPIKNCSALKSWAMRIAKRAGMRKAKVALARKLAVILHRMLADGQPFNPAARATTMTAAA

SEQ ID NO: 299533 - protein, 474 aa, unidentified
MIKSVGIDFHQGKHVVRCLDERAQLCDSFSFQTTPEGLDTFEEHIFRDGSNPVIVFEPAGLTWFMMAICIRARHPDCRLVRAKGQKVAALRRYLRGSSKSDRLDALTLAKMVFIDPEQMDEVYLPPAKIHALQRLARQRKRLESDIAARKTRIGAIVESYVPGVRKAFSNPWSAQARAFLRCQLNPLSVAHDGEKALHSFLVRARHRNKTDKEESHRVFLVCKSAADLYQLSSRAEAVDDEFFSVFQEEIERELRLMEMEEAESEAIAKRMEELYRELHPSDNLRSIPGVGRVTAPMFLATVGDPARFHNQSAFVNWTGVVPRTRQSSEVEAKGLRMTKAGPAIMKWALFQAGDIGRRFDPQLASLYYREMVHHGKNHKQAMGAVMSHLAARIIKVLQDDRPYELRDNEGRAVRPTEAKKLILLNYQVPENIRRERRRRNPVKRGYLKSQGTALLRTNEAAVAPQPVKVTIPEN

SEQ ID NO: 299534 - protein, 342 aa, unidentified
MEQFVGRDVSQAETAICVVDAAGAVQWQGKCASTPEAISATLKQKAPQAVRIALETGPLSAWHWRALSKLGLPVVCIDARHAKAALAMQVNKTDANDAFGLAQIVRTGWYREVRIKSEQSHRTRGLLAARSKLVDMRKDVSNQLRGLLKVFGHVIKPAGGQSFETQARTLAEGDPVLSTTSEVLLATRHSLAEQIARLDQLLLTQARQDPTCRRLMSVPGVGAITAVAFTATIDDPTRFRHSSSVGAYLGLTPRRYQSGTIDVAGHISKTGDCLLRSYLFEAATTLLTRVQRWSTLKAWGMRLAKRIGQKKARVALARKLAVVLHRMWADGTEFRWTAEAAV

SEQ ID NO: 299535 - protein, 359 aa, unidentified
MSIVAHTYPFVIGADTHSRNHALAILAPTGEVIDEQIFPTTKTGLARAVDWACRRTGGDLDALWVIEGIGTYGAQLAQAVVDAGYSPAEAPRMNARARRGTGKSDPLDARRIAAAALPLNTTQLRRPREQDGTRAAIRVLIGARDHMSTERTATINALIALVRTIDLGIDARNGLAASRITIIAAWRTRTEPLAMTTARAEAVRLARRIDALDKELHTNRNTLTTLISDTPAAGLLELPGIGPVTAAVVLAAWSHPGRIRSEAAFANLAGVSPIPASSGNTVRHRLNYGGDRRLNRALHMAIVTRIRMDPTTRAYIEKRTAQGRTSKEIRRCLKRYLARQLYRHLATAYKMPNPALDNT

SEQ ID NO: 299536 - protein, 337 aa, unidentified
MKKKLFIGIDVSKKTIDVSLLTSEQFKELPHKQFDNSVNGYKAMMKWINSMYKLSKDEMLFCMEHTGIYSLNLCCYLNENDIAFWLENPLQIKRSLGIKRGKNDKLDSKDIANYAYTHKHNAKLYQMPGKTLLTLKNLLSYRERLMKGKVCFQVSSNELKLCNKEIRVSICSESDAIVKSLNKKIEKVEEQIKELVRSDKNLNHLYQLVTSVKGIGLIIATYMLVHTSDFTAFNTARQFACYCGIAPFEYTSGISIKGKTKVSHLANKKIKSLFTMGALNAIKYDSELKEYYERKVKEGKNKMSVINIIKNKMVGRVFAVVKRGTPYVELKGYKKVA

SEQ ID NO: 299537 - protein, 273 aa, unidentified
MSYAGLDLSRKRLDVHVLDEEGTTVEVMAVRPDADALRTLAAHVLRYGQEVTAVIESMSGARFVHDQLEFRGWDVAIGDAVKVKGLAPLAAKTDKIDAWVLAELGRRDLVPEIWLPTPDVRAERERARFRLHLVRHRTALKNRIHATLLTFGHPVPVADLFGVKGRELLARMDVPEPWNSSLATSLSMVDDLDERIAACAKDLRALGADHPSIPLLLTVPGVGHILAYTIASEIGDIRRFASPKKLVGYTGLCPKVYQSGDRDVHGPLAKNGL

SEQ ID NO: 299538 - protein, 346 aa, unidentified
MEQISRIGMDTSKRFFQLHGVNTAETVVLRKKLRRKEMVTFFEKLAPTVVGIEACGASHHWARLLQSFGHTVKLIPAQLVKPYVKRGKNDMADAEALCEAMSRPTMRFVPIKTAEQQAALMLVGLRDRLIRNRTQLCNAIRGYAAEFGFTAAKGVANLRPLLERIQADEGVPDLARELFAAQAEEYAQLEEQIAEISGKLMAWHKADECSRRLAKIPGIGPIGAALLMMKTPAPELFRSGRQFAAWIGLTPRDHSTAGKVKLGVITRAGDEALRAVLVSGATAVIRHAVGCKGRASPWLIDLLKRKPPKLAAVALANKLARIAWKLMVTGENYAATSTRIASAAAV

SEQ ID NO: 299539 - protein, 343 aa, unidentified
MVHYVGLDVSLKQTSICVVNHLGSIVREGVVDSEPEAIAAFVRLNAPGAVRIGLETGPTATWLWTELKQLGLPVICIDARHAKAVLKMQINKSDRNDAAGIARIMQTGWFKEVRVKDLDSHSVRALLASRALLVKIKRDLENQIRGRLKNVGLVIGRAKFNVFAVRAEELIEDRPELIAVVRPLLKARKAIEQQTDDLDRQVLKLARHDAQVRKFMTVPSVGPITALCFKATIDDPTRFKRSRSVGAYVGLTTRRYASGEIDWTGRISKCGDAMLRSYLFEAAGVLLTRVPKWSALKAWGMRLAKRNGLRKAKVAVARKLAVILHRMWIDGTEFNWSKKEVAA

SEQ ID NO: 299540 - protein, 344 aa, unidentified
MGSMHFIGLDIHKKTISYCIKDRHGRVLGEGMVAATRQDLDAWMKSLPQPWTVAMEATMFTSWIYDYLLPHAAAVKVAHPLMLRAIAAAKKKNDRIDAAKIADCLRCDFLPEAYMVPAAIRQRRRTLRYRKLLIRQNVQLKNKIAQMLMESGVSYNKQKLHQQGYFHQVLPTNREIDPSLWPLLKLSREMIEHTHKTEQALLRSLERDPLLIDRVKRLMTIPAVGPVMALTWVLELGDIHRFRSIKQVISYCGLCSAEKSSAGHSLRMPISKQRNKHLQTVLIEAAHISLRHHPEMVELYDRERTRGNCNQAILAVARKMAGYLLAIDRGERAFVRREKQSVAA

SEQ ID NO: 299541 - protein, 415 aa, unidentified
MRVHRNCCGLDVHKKIIAACLIKEDGEGNSIQEKRLFGSMTRELQELAQWLCAAQVTAVAMEATGVYWMPVWNVLERYGMQLLLINPEHYKAVRGKKTDLKDGRRIAELLQDGRLEGSYVPAVAIRVLRDLTRYRTKLVQYQSSLSNRIQRLLEQCNIKLAAVASDVLGVSAMAMLRALAEGETDAVRMADMAKKQLRKKIPQLQLALEGCVLPHHRWLLRELIEDLDHVGTKITRIEETIEQQMRPFQSAVDRWVTIPGIKHRLAWTLVAEVGPTVEAFSSAADIVSWAGVCPGNNQTGGKRKSGTTRAGNPWLRRALCEAAWAASKTKGTYLQAQFRRLAALRGPKRALIAVANSILTAGYYMLQRATTYQDLGPDYFDKRNTVRATHRLVKRLEALGHRVILEPRFIADPSS

SEQ ID NO: 299542 - protein, 335 aa, unidentified
MKVFYLGVDVSKKKLDLCLRSNGKDILYDVIPNDLSSIKSWLTRTFEKFFLSEDSLVVCAEHTGQYTYPLVCATKSIGVYLCLEDAAKIKYCHGIPRGKNDKIDACRIAMYAERYNDCLQPYTASELIIQKLKNLSTERSMLVADRAKYQSQLKDQVDYMEHSIYIAKCNRVEGIINTFTDYIAQIDLEIKELINQAPVIAHQMDLLMSVDGVGERVALKMIMETDAFTSFTDPRKFCCHAGVVPFVYVSGSSQRSKNRVSNRADKSIKHLLHMAALSVSQVKNSPLKKYYDRKVEEGKNKMSVLNAVRAKLVTIMFAVIRTDAFFSRNYQNSLA

SEQ ID NO: 299543 - protein, 346 aa, unidentified
MTIVDPARAVTGGVDSHLDMNVAAALDPIGGLRGVAEFPATRTGLGQLLGWLESFGAVARVGIEGTSSYGATLARSLRSSGIAVLEVDRPNRQSRRRTGKSDPADAIEAARAALSGRAQGAGKSKDGNVEAIRALVVAKRSARATRIKTMNQIRHLGFTAPEELRERLRGVSRQDLAATAAGLRPRSSKDQVSFATKTALCLLGRRVLALDAEKEQLDDLLAKLVAKTAPERLSIYGVGIDTAATLLVTAGDNPERIRSEAAWAHLCGVAPIPASSGKVTRWRLDRGGDRHANSALWVIVITRMSADKRTRNYVERRLAEGKTKSDIIRILKRYVAREVYHYLPRP

SEQ ID NO: 299544 - protein, 388 aa, unidentified
MEARTVNALPPAAADHAAVRCLLAIELSKKSWVVAINTPLADKISRHTLPGCDWTGLLELIQRVRTRVARELGRPVEMISCYEAGYDGFWLHRLLEGQGVHSLVVDPASVQVDRRARRAKTDRIDAERLLRSLMAYLRGEPKVWSVVRVPSVAEEDDRRLHRERDRLIAERIQHVNRIKGLCAIHGIYDYQPMRPDRTRRLEQLRTGDGRALPPRLKAEIARELQRMELVLRMLKEIDAERNAIASARMSTHTNAKKIQDFVKLKAVGPEIATVLTGEVFYRPFNNRRELASYVGLTPSHFQSGSTCRDQGISKAGNPKARTTMIELAWLWLRHQPDSAFSVWFRERVGNLKGRIRRITIVAMARKLLIALWRYLETGVLPTGAVLKV

SEQ ID NO: 299545 - protein, 435 aa, unidentified
MEEVTDEPLYRDRVCGIDIGKAGLVATIRVPSDKDPARRAAETRSFGTTKKEVLALADWLRCWQVPAVVMEATGDYWKGPFYRLEAEGFECVLADARQVKNLPGRPKRDPSDSRWLAACFERGAVTACFVATPEFRIIRLHTRYRRDLIDERTREKNRTEKLLESAALKLSSVVSDLHGVTGRDIMEHLIAGERNPKVLAQLARARARRKISQLEEALEGAEFFTDEHAVLLKTMLGRIDQINAEIDRLSEVIERLLAPYEEQLHQAESMPGWARRAAQDAVAETGVDMTRFRTGGHLSSWAGRSPLDHQSGKRNGQSKSKKGNRYLGGLLGETAVAAGRTQTREGARYRRLARKRGKAKACVAVGNTQLKVYHKLLSNPGMRYEDLGPDYYERRRDVRRQIAHHVGKLGDLGFEVTLCRIPEPDPDGTAPIQTA

SEQ ID NO: 299546 - protein, 348 aa, unidentified
MEEIIRIGLDTSKSVFQLHGVNEAEEPVLRKKLRRSQVLAFFAALLPTKVGMEACGAAHYWARELRALGHDVVLLPPQYVKPYVKRSKSDAADAEAICEAMSRPSMRFVPVKSADQQALQMLAKLRAQFIGRRTQLANSMRGFAAEFGYVAPKGLARLGDLLADIRIDATMPNMAREMFETLVRDDARIDEEIAALDGKLLALHRSNEVSRRLAAIPGIGPIGATLLAIKVTDAHGFGCGRDFAAWLGLTPKNHSTAGKNRLGVITRAGDEMLRAVLVVGATAVIQHTRRTGKRAWPWLEALIARKPAKLAAVALANKLARIAWKLMVGGEVYRPIGTVVPVATSARP

SEQ ID NO: 299547 - protein, 413 aa, unidentified
MKEESILFPQLVERGCGLDVHKSTVVATVDGGGLSKETREFSTFTQSLMDLRTWLESLGVTHVAMESTGIYWKPVLNILESGGFSILIVNARHVKYVPGHKTDKKDSAWICKLLLAGLLKGSFVPPVHIRELRDLTRYHRKLTQLVAADKNRIIKILEDGNIKLSMVFSDVHGKSGSDIIDAIFNGERKPEELIKLCKGPIKASREDILQALEGHLTAHHLFMLKTLKQSINQTESIKLGVEARIQEQLKPYAEEVALLDEIPGVGIQSAGELIAEIGTDMSVFPDDKHISSWAGMCPGNNESAGKKKSGRTTHGNKHLRTVLCECSWAASRKKETFLASKYKKMVGRRGKKRTIVALGHNILVIAYHMLKNKTHFKELGEDFMDEKRRKNKIRYHQSILKELGVEIPEKACA

SEQ ID NO: 299548 - protein, 454 aa, unidentified
MQLWCGIDWAENHHDVSVVDETGTQLARMRIEDTVAGFSQLMSILTEQQRSSAEPITVAIETAKGLLPAALRAAGVPLVAINPLAVSRYRDRHSPSRAKSDAGDALVLANILRTDPHSHRPLPADSELAQSIQVLARAHQDAIWDRMQIASKLRSVLRQYYPSFLAAFPDLASREARAVLHLAPSPAQGQLVRKSALSAALRRAGRTRGIPAAVAVIHAALRREQLHQPPLVEAAMAEHATALLHALDAAVTAVARLEESLTTAFNQHPDAGIITSFPGLGTVLGARILGEIGDDRTRFATARGLKAFAGTAPITRASGTKTIVTRRVVRNKRLGQAAYLWALPMIAHSPAAHAHFTARREHGDSYSAAARNLTNRGIGMLHHCLQTRQHYDETRAFPGHPNQRVTPDRPLAGQAYQETGAHPHPAPGHNDQRPVTSIAPPASQACQKTEAQPA

SEQ ID NO: 299549 - protein, 342 aa, unidentified
MRNRTVIAADIAKNVFECVKFKNNRQIGKVKRYKRDQFTQLLMSSEKFELVMETCSGAQHWARLAKQHGHQAVLIPPKVVTAYRQGQKTDANDAMAIYEASRRHQLKVSVQKTVEQQGLSALESVRAHYQDRKKSLGNAIRGHLAEFGIVMPKGYKSLRSQIPLILEDAENGLPMSARQAIHAYWEDWQRAHQQVLALAKEKLKILNQIEGAKELLKIEGMGPVCTSGLICVLGDGSAFKRAKEAAAFIGTSPKQHSSGGKEIIIGISKTTGHKKLRAALIQGARSVILKLAAKDEPSSEKERWLAQLIERQGENRAAVALANKNVRTAWALLAHQRQYIAA

SEQ ID NO: 299550 - protein, 386 aa, unidentified
MNKSVDFDPCGIEVSARTLVVQRRRPGQSDAVREFSNTAAGHQALLRWLESAGRAVRVCLEATGLYGLDLALTLEAAGVALMVANPRAVRHFAQAMMKRSKTDRLDAAVLTEYAARLPFQPWRPPSPSALKLLAVARRLEDLTEMHAAEKNRLHAASVSAALPALLRRDVQRSLETLERAVERLTRAAQEFIVADPLLAERYQLLLSIPGIGATSALHVLAELMLLGPHLDVRQWVAYAGLDPRQYTSGSSVHEESPHQQGGQQTSAPRPLHARPGRLATRRAPGRLLPTPRRARQNQNAGPGRRHAQAPARHLRHLQTPPGLRRCPTLRPPISPGGHLHLKTKRESTRLSPPQSWGCLVLGRPPWRFRRVGLNKSWAQQQERRTQ

SEQ ID NO: 299551 - protein, 435 aa, unidentified
MSPPEIRDYSKEATFKGRRLDFSLGNKPRAWRLADASCRLIIVAGSAVLEYGNSSEAEVAKHKTYQGVEMKEKVEKTLYVGVDYHKNSFTAAYLDCLTGILNTKKYEAEELEKFKNHLTTFRKKGYSVKVAVETLTGVTFFTEEIRNCVDEITYVNTNKFKNILKGVNSAKNDRIDAETIAIYYEMGLLPTVYVPTRKEKELRIKMKERDSFVDMRKGVINRLHSLLLEYGIKTNKRELTTKKGMERIKEETKKKVPPSLRETIWRQIETIEYLTDKIRETEEDIKSFIGEDEELKGKVELLKSIPGVGDIVAIAFISAVCNEERFENGDKVAAYFGLVPRINSSGDEVRNGRITKKGDSRTRNKIIQATRALLNSKLDNSVKRFYEGLVKKGLEKKKALIAAARKLVKVMFAVLRERRQFMDFVENKCNLCVGG

SEQ ID NO: 299552 - protein, 388 aa, unidentified
MVEKEFFFTPPQSHYREDWSMSKSLRYVGLDVHKDSIMIAVAEDDRCPAVVYGEIPNDWETLRKTLRKLAKGYSLYCCYEAGPCGYGLYRKMRKAKINVVVIAPSLVPKQSGNRVKTDRRDARKLAHFLRSGDLTPIFVPDEEAEAIRDLERAREDAKNAQRVVRQQLGNFLLRHDRRWESSNWTREHLAWIGRQKFEHQAQQRVLTDYLKAVEDATLREAQLTQELAEVIKDTSLYPLIRALQAFRGIRLITAVTIAAELADLKRFGSARQLMAFLGLVPSEHSSGQSQQRGRITRTGNSHVRRVLVEAAWSYRYQPRMSKAIRQRNEGLAPGVQRLAWKAQKRLHNRLSHLEKKGKCPQKAITAVARELAGFVWALGQEPELLGQT

SEQ ID NO: 299553 - protein, 405 aa, unidentified
MDGATPTRVAGLDWASRLHVVCVLDPDGQVRARFQVPHTGKDLRGLTRRLAKLDVGPVAIERPDGPVVQALLDAGFQVVVIASRQVKHLRSRYGSAGNKDDRFDAYVLADTLRTDGWRLHPLRPDSPETAGLRAVSRARKQLVDHRVALANELRANLEVAFPGAASLFAEVDSPIALTFLGRFPSAERAAWLTQARLGGFLRRVGYCGRTTTAELYQRLLDAPDGLGGAEGEARAAVTSSLVATLHTVRAQIDELDGEIVERLAAHADGHIFTSLPRSGRVRAAALLAELGDCRQRFPDSPSLECLAGAAPSTRQSGKHKTVTFRFACDKKLRNAVMDFAGDSRQANPWAAHLYNQARARGHRHPHAVRILARAWLRVIWRCWQDGVAYDPTRHGAYQRLIAQGG

SEQ ID NO: 299554 - protein, 341 aa, unidentified
MNSSKNVVGIDIAKRGFQLHWIDMETGEIVSIQLKREKFLEHFANRQACLIGMEACGGAQHWARKLKAMGHQVKLLPGKAVKGFVTGNKNDRQDARAIWTAVQQPHVKAIAIKTEEQQAILALHRMRSQLVKFRTAQINGLRGLLTEYGEVMPQGKAGVRKGIAEALARLADRLPAMVIDTLREQWARIEKLDDEIATIERRIKQWLKQDDACKRIAEIPGVGPLTATAAVAIMGDAKAFKSGREFAAFAGLVPRQTGTGGRVKLLGISKRGDTYLRTLLIHGARSVLTHAKDPGPWMTELRRRRPLNVAVVALANKMARTIWAMLAHERTYQKEFVSQPV

SEQ ID NO: 299555 - protein, 364 aa, unidentified
MKRKVYVGMDVHKETIRIAYLTSNSKEILKEQQIKHNEVQIKKFIKKLKTEWNEIHCCYEAGVTGYPLYRYLKSLGVNCILVAPGKIPRQSTDKIKTDKRDAIKLARLMRSGELESIHVPSEEDEAVRDYLRSRDSLRLDLGRNRQRLMKFLLRKDIKYSTTKYWTVSHYKWLNNLHFNNEILQETFNDYYSRVRVQEENLKAMDKKIQEIAESEPYREKVGILRCFRGVDYLTAMFLLCEVNDFKRFKTAGSFMSFLGLVPGEYSSGSKRKQTGITKTGSPRLRRILTEAAWQHRFPGTGSKIITARRSGQPALVVALAEKASLRLHKKFRNLQLRGKTPQVMITAVSRELSGFLWAAMNLVA

SEQ ID NO: 299556 - protein, 391 aa, unidentified
MIYIGIDVAKDKHDCFITNSNGEVLFKVFTISNNLDGFTHLYQMIESVIEDISKVKVGLEATGHYSYNLLGFLLDKGLTTYVINPLHTNLYRKSLSLRQTKTDKVDARTIASMMMSDVNLKSYSDTFYHNEELKSLTRYRFNKVKERAKLKTSVSRLVCILFPELEKLVPTLHMASVYAMLSEFSGAKQVAKAHLTQLSNLLIKASKGRYGKDTAITFRETAGNSIGSNMPAKSLELKHTIKLIQELNSEIDEIENEIKIIMDKINSPILSIPGINYRMGAIIIAEIADFNRFDSPDKILAYAGFSPSTYQSGQLDVAYSHMEKRGSRYLRYALYNAAKYICHWDKTFALYLAKKRAEGKHYNVAISHAVKKLVRVIYHLEKSGQQYIKAV

SEQ ID NO: 299557 - protein, 408 aa, unidentified
MDIIRKVCGGLDVHKKSVLACIRRLGSEGKIDKEVRTFGTTTKELLVLADWCVSAGVEEIAMESTGVYWKPVWNILSAAGLKLMLVNPEHLKHFPQRKTDVKDCEWIAELLQFGLLRGSFVPSEDLRQLRDLTRQRAKLTQQKAAVANRIQKVLEDTNIKIASLLSDLLGVSGRRILKSLIEGQSDNSQLVLLVHPTVRAKKEDLTLALQGRVTEHHRFMLRELLDELEFLERKIENFEARIDQVSVPFEPAIQLIDEIPGIGRCIAIAIIAEIGANMKQYPTQRHLSSWAGICPGNNESAGKRKSGRTPMGNCWLRRALAEAAWAASHTKGSYFSVLFRRICRRRGKKRAIVATGHAILVAIYHMLKNNCAYKDLGVDHFDKIKGDQMQLYYLRRLAQLGVKVQIVA

SEQ ID NO: 299558 - protein, 478 aa, unidentified
MARTRKKPVPAPAGEGVEVIDAPVQVIARAAAIDVAKGSGMVCTRLPSEIKAGRRTQRVQEVTATFAAVVALMDHLVNQGIQRLVLESTSDYWRIWYYLAEAAGLEVWLVNARDVKHLPGRSKSDKLDCVWLCKLNEWGMLRRSFVPPGQIRDLRALTRLRAHLVHDRTRHQNRIEKILEDALLKISSLISDLMGVSGRRMLAALVNGERSPKALAALGDYRLRATPAQLEAALTGRFRDIHAFEIGMLLELTDDLTAKITRLDQQITGLLEQIPGISGACTSCGVIGGGHAPACASDQAKVLSVIERLDEITGAGPDTAQVIVAELGTDMTQFPTPGHAAAWAKLTSRTIQSGATTKNGRTGKGNPYLRGALGAAVMTAANTDTFLGERYRRIARRRGKQKAIVAVARTICEIAYLIINDPGFRYTELGASYYARLDPKRQTSNKIRELEKLNPGMVVTLTPREPDPGTPATQTPAA

SEQ ID NO: 299559 - protein, 412 aa, unidentified
MARWWMGIDWAEGLHDVAVVDEDGQVVARARIRETPEGVKELLALLSGLSTSKRHSRRQVPIAIETSRILLVHALRQAGLQVVAINPMVVARYRGRVSPARRRKSDRGDAELLANIIRVDAHLHRPLPRPGLQAQVVTELSRAQRHAVREQHRQLGRLRSLVRLYYPAALSAFDGRSGLLRPEARALLAAAPTPRAGARLRHRQIADLLVAAGRTRLIDEQAARIGERLRTPQLRRAPEIEAAMGEAMLATLALTTQACAQVEQLTAQMTSAFEAHPHAPLYRSMPGVGPVIGARLLGEIGDDLDRFASARSLRAYAGAAPLTWASGSTRTVRARRFALNGLLRESGHHWAFASLTRSVGARAYYDRRREAGDGFAAALRRLAGRLLTCLYGCLRTGVCYREEIAFPSIAAA

SEQ ID NO: 299560 - protein, 317 aa, unidentified
MQEPIVCIGVDVSKAELVIALGAERRPCSVANDAASISNWLRDIPPHALIAMESTGRYHGLLAHLATQAGFKVYVLNARDVFFYARALGTRAKTDGVDAGVIARYLAEHHVRLHPWKAGSSLQVRLHELLTRRAQVVMHRSALRQVFTGVEMKGIETSRLHEAFDALLQSMDDQVQALIDTDARMASGCERLRTITGIGPQTSALLATLLSRFEFANADALVAYSGLDPRPNDSGTKRGRRRLSKKGPPLLRRQMFLAGFAASRSKALKPLYQSIRAKGFSTTEAFVILGRKLLRVAFAVWKGTTGFDPTRLVPRTA

SEQ ID NO: 299561 - protein, 389 aa, unidentified
MSQPFDASRSLTALEQDSTIIAAIEMAQSKWLVAAVVPGIKRQPLKKLDADEGSLLKLLHRWRKEADQAGHPIRRVVVAFEAGRDGFWLARWLRTRGVEAYVIHPNSIAVSREHRRAKTDRLDTELLLRALLGWLRGEKRHCSMVAIPTIEEEDAKRPNRERDSLVTEQTRIGNQIKAILTRFGIRRFRLKLRKAEQQLKELHTAEGSLLPENTRAELFRHLARLHMVREQIRAIEKARLQKLEANCDRKKSPYAMVHLIARVVGSGVETADMLVTEVFSRQFRDRKAVARYAGLTGSPDESGKRRREKGLARAGNARVRTGMIRLAWRALRFQDGSALAQWFQTRTADGRGNTRKTMIVALARKLLIALWRLVTTGEMSDGIVLRPAS

SEQ ID NO: 299562 - protein, 349 aa, unidentified
MTDRHLSYIGRIVYVGVDVHKETYTVTCVCNKQIVKTATVQADPAGLAASLLRWLPGATLYSAYEAGFSAFVLHRALTTAGITNIVVNPASVAVAANDKVKTDRRDAKKLAIDLADGRLRGIYVPTEEEELARLLPRTRAQIVEHRATIARQIKAKLHQFGLIAPASRRMISNRYLREIAAWSLPPELRVSLTLLAEQWRFATRQLIEIRRLLREQAAAQADLETVYRSVPGIGAVVARTLATELGDMTCFANERALFSYTGLTPSEYSSGPSVRRGHMSRQGSGRVRHVLIETAWRALPRDQVLQEIFDRIAATRGKKRAIVAIARRLTGRIRACFRHGTTYAVGTYA

SEQ ID NO: 299563 - protein, 353 aa, unidentified
MPSKADTAVARTIGIDTGKNTLHVIGLDEKGAIVLRERVSRTRIAARFVNVPPCLIGIEAGMASHHIARELVALGHEVKQVPPGYSKPFRQGHKNDFRDAHAVAEAVERPSTRCVPIKTDEQLDLQALHRVRSRLISNRTAVTNQIRGFLLEHGIPVRQGHHFLRRQLPQLLGTRTDVLSPRMIRVIGDLMSDWNYLDERIERVTDEIESLARADEGCQQLITVPGIGPIISSAMVAAIGTGAAFCKGRDFAAWLGLVPKQMSTGDRTILGRITRRGNRYLRTLFIQGARAILLRPTGWAKHSFGSWLAAAARRMHRNVLAVALANKLARIAWTVLAQARCYEARVEPRVEPA

SEQ ID NO: 299564 - protein, 351 aa, unidentified
MMIIGVDYHASFQAVAFLMEETGECGEQELNHSDGQAERFYRDLKQRGICVRVGLEASGYSRWFERLLAELGFEVWIGDPAEIKAKRVKKLKYNRYDARLLRRLMLENNFPQIWVPSPENRDLRQLLWHRHRLVQMRTRIMNQLQALAMNEGYRWKKKLFSEQGRAQLEKLTLAPWASRRRQELLELLDRMNPTIEELTAAVEREARKRPEVQRLMTHPGVGPLTALAYVLIIGTPERFHCGKQIGTYVGMIPSEDSSARKQRLGHISKQGNSLLRFLLVEAAQAAARSNPEWRRRYMHLAMRRHRSIAKVAMGRKLGVRLYWMWRNGYEYSQSLEFGSYAGKLGTGHGVK

SEQ ID NO: 299565 - protein, 374 aa, unidentified
MPHSSAFIGLDTHKKTIAVAIADDGRDGEVRYFGQIANDRVAVGKLVKTLVGKYDRLSFCYEAGPCGYGLQRQIAGLGHDCIVVAPSMVPRKKGDRIKNDRRDARSLARLHRAGEMTAIWVPDEAHEAIRDLVRARTATMESTRRYRQQLQGFLLRQGRIYTGKTNWTKSHLQWIREQKFEHPAHYVVIEENLSGIRGGQERLKRLEQQIVELLPSWSLASIVSSMQAMRGISLIAAVILASEIGDFNRFDHPGKLVAYLGLSPSEHSSGERVARGSITKAGSPRARRVLIEGAWAYRLPPRNRSTGPRLHGLSDAVQEIAWKAQLRICQRFRLLAKRGKHNNVIVTAVAREMVCFIWAIAREVSPPSLATIAA

SEQ ID NO: 299566 - protein, 371 aa, unidentified
MSHVTSIGLDVHARSVSAAAFNLYTGEVVERRFGPEAGPIAEWALSFESPRAVYESGPTGFALCRELRALGVDCVVGAVSKMQRPAADKRVKNDRRDAAFLARLLATNNVVVVPVPDAEVEAARDLSRALDDARENVQRARQRLSKFLLRRGYVFDERDSLGRRRCAWTAAWWSWVAKIKMPEPAAKAALDHYIEDVRHEESSKLKLEKLVAAEAARPRWAAVVAALRRIKGVDTVTAFCLAAEAGSFSRFRSAPAYAAWVGLVPSEHSSGEKVARGGITKTGNSATRRALVEAAWHFASCSPSPKPPKSGSEAVPADIERRCAKCTARLAARHRALREAGKRPCVANVAVARELACWVWEVGCRAEGTLR

SEQ ID NO: 299567 - protein, 312 aa, unidentified
MKIICGVDVSKTRLDACIEPGAIFASFDNDPAGIAELAAFCRQHQAGLVAMEATGGYERRAFSLLWEAAMPCAMTNPRSVRRYAEAMGVLEKTDRLDAHIIARFAHAKNLQPTPAPTPAQQRLKALVARLRQVTDDLTVQKQRRASLADNAEMLASINEVIALLKRQSRTLEGEIASMIDDDPLWAHLAEAWRSVKGVAGRTVARLMADLPEIGTYSNKAIAKLVGLAPLADDSGKRQGKRSIRGGRASVRSILFLVAAIAAKYDKTLAEFRDRLLAAGKEKMVVRIALAHKLLVRLNAKARDARAQYANAT

SEQ ID NO: 299568 - protein, 342 aa, unidentified
MGEVTIIGVDLAKNVFQVHGAAADGSVVFRKKLSRPQFARFMADHPPCVVAMEACASAHHWAREMARDGHEVRLIAPHYVKPFIKRQKNDAADAEAIVEAALRPTMRFVEPKTQEQQARAVAFRTREQLVKQRTEAVNALRSHLYEFGHVAPVGIGYVPRLEQVIADPDADIPDLAREICRVLLDQINQLTDRIDALKARIAALSNEAEMPRQLQTMPGVGPITALAVETFAPPMEQFRRGRDFAAWLGLVPRQHSTGGKQKLGKTSKMGQRDIRRLLVIGATAVIRWASRRGAPKGSWLARMLERKPVPVVAVALANKMARGIWAMLTRGESYRGPVLIGA

SEQ ID NO: 299569 - protein, 351 aa, unidentified
MLADEVSVVVGVDTHAETHALALVEARTQRTTRTLVVPASRAGYRRALRLARREAPAARVWALEGSGSYGAGLARFLSERGERVLEVERPARTQTGQKRRLKSDLLDAERAARQVLAGTAGATPRLAPQTQALRALMVAREGAVVACTQALNELRSLVVTAPAELRERLQGDPERQLLQACLRLRSGSSGSERAALALALRSLALRVRQLRHEAQTLEKELARRVGQLAPGLLAQPGVGPITAAALLIGWSHPGRLRSEACYARLAGVAPIPASSGKTIRHRLDRGGDRRLNRALHTIVLTRRRIDPTTRAYIQRRLSEGKTEREAVRCLKRYLARSLYRLLEHEVILDTA

SEQ ID NO: 299570 - protein, 414 aa, unidentified
MKSARNTLPTEPVNGITCGIDWARDDHALSIVDAKGREVTRKTIGHNVAGLRDLLSTLDSAGAREVAIERPDGPVVDTLLDAGITVVVISPNQVKNLRGRYGSAGNKDDRFDAFVLADTLRTDRARLHPLLPDTPATIALRQTCRARKDLVAHRVAVANQLRAHLRIVFSGAVGLFAAIDSPISLAFLARFGCQQRADWLSITRLTAWLANAGYSGRTDPRELHRRLTSAPRATNEVTGAEVTGAFVATLTALNAQITVLDDSIADQLAAHADAHIFTSLPRSGIFRAARLLCEIGDCRARYPTPEALACLAGVAPSTRQSGKITHVGFRWAADKQLRDAVCDFAGDSRRANPWAADLYNRARARGHDHPHAVRILARAWLYVIWHCWQDHTTYDPTQHRALQALLERPQPGAA

SEQ ID NO: 299571 - protein, 409 aa, unidentified
MEVVHERCCGLDVHKKTVVACLVTPGRGGQPTREVQTFSTMTRELLRLSDWLLASGCTHVAMESTGSYWKPVYNLLEGTFELLVVNAQHMKAVPGRKTDVKDAEWIADLLRHGLLRPSFIPSRPERELRELTRYRTSLLQERAAEVNRLQKVLEGANIKLASVATNVVGLSGRAMLAAMVAGEYEVAAVAGLARGKLRNKIGALKEALEGRLQPHQRFMLAAQLGHIDSLESLIEEVSGEVERRLAPLQAELERLSTIPGVSTRISQAMLSEMGVDMGRFASAAHLASWVAICPGHDESAGKSRSGRTRKGSPWLRSALVQAAKAAGRTQTYLGAQYRRLAARRGANRAAVAVAHSIIVIAYYMLKRGEDYRDLGGNYFDERQVEQVKRRLLRRLEALGYSVQLTPDAA

SEQ ID NO: 299572 - protein, 367 aa, unidentified
MKKVSTAATKPSRNFSQSNLTIGLDLGDRSSCYCVLDESGRIVMEQRVSTTAKALQAAFGVMPRSRIALETGMHSPWISRLLSALGHEVIVAHARNVRLIGESRRKDDRLDAQTLARLARIDPQLLCPVKHRSAKAQADLTVIRARAGLVRARTALVNTARGLAKSYGERLRGCNVRNMNPEKAEGLSPELQAALAPLLVALESLSEQIGEYNERIETLAQENYPQVALLKQIKGVGTLIALTFLLTLEDPHRFRKSRDVGCYLGLQPGRRNSGQSEPQMHISKEGDPYLRTLLVQGAQHILGPFGVDCDLRRWGPKLAERGGKSGKKRAIIATARKLAVLLHHLWVSGDVYEPLHNSGRLALPAAA

SEQ ID NO: 299573 - protein, 391 aa, unidentified
MIYVGIDVAKDKHDCFITNFDGEVLFKAFTIANNLDGFNDLYQKIVSVTEDITKVKVGLEATGHYSYNLLGYLIDKSLPTYVINPLHTNLYRKSLSLRQTKTDKVDARTIASILMSDVNLKSYSDISYHNEELKSLTRYRFDKVKERAKLKSSVSRLICILFPELEKLVPTLHMASVYALLYEFPGSKQVANAHLTRLTNLLSEASKGRYSKDTAITFRDAARTSIGSNMPAKSLELKHTIKLIKELDSEIDEIENEIKIIMDEINSPILSIPGINYRMGAMIIAEIGDFSRFDSPDKILAYAGFSPSTYQSGHLYGAYAHMEKRGSRYLRYALYNAAKYVCHWDPTFTAYLAKKRAEGKHYNVAISHAVKKLIRVIYHLEKTNQQYIKAS

SEQ ID NO: 299574 - protein, 411 aa, unidentified
MRVHHNVCCGIDVHKKSVTACLMWGPADKEPQFEIRRFGTMTRDLQMLAEWLKQAGCEAATMESTGSYWKPVWNVLEGQIAKLILANAQHVRALPGEKTDRKDGKRLAELTRHGQVRPSYVPPRAIPELRDLTRYRSKLLSAGSSERNRIQKVLEDANIKLGSVLSDLFGVSGQKMLQALIRQDTVDTAKVAQLAHWSLKPKMEAIQQALDGKLRDHHRFLIDASLQHMRFIEEQLMRLDEEIQRRLQPYQEQYALLQTIPGIKETGAARILSEIGPDMSPFPDGDHLSSWGGACPGNNESAGKKFQSKIRKGNPHLLAALTECAWAATKKKDCHFRNKYYRLKSRRGSQRAIIAIDHAMLKCIYVVLSQRQPYQEPKPTSLTEAQKQRKASSLCRQLRALGYDVTIQKAA

SEQ ID NO: 299575 - protein, 362 aa, unidentified
MTKSTTIIAFDQHAATTVAAILLPGHRTPALHSLTSESPTILRFVERVRRQGPVQCCYEAGPCGFELQRAFAAQQIPCDVIAPSLIPRRPGDRIKTDRRDAGQLAVLYRAGALTAIHIPTDQEEAARDLLRCREDIRADLLRARHRLSKFLLRHGRRFTATKRAWTKRHAAWLQAQRWPLAALEQTHRAYLRAVDEALGRLQAVDAELRDLLSIEPLRARVERLRCFRGIDDLTALTIAAELGDARRFPSAPRVMAFTGLVPSEHSSGTKQARGAITKTGNAHLRRVLVESAWQYRHHPFLGRALRLRQRGAPTAVIDQAWHAQQRLHRRYRRLAARGKPKQHIVTAIARELSGFLWAALTQ

SEQ ID NO: 299576 - protein, 422 aa, unidentified
MKKIAQFHQPDKPSSKHLVLAVDVSSRLLDLYSRYMQDGREFELSESFLNDLPTIHQKLDEYHKQARVLGYNGLSIVVEPSGCYEKKLTHASLQRGFDVWTVNPERMYKAGVVHHGDDGKSDPLDGKVLFMMAQMGKVSRLVPLPSQWQKLRQLGLWMEDCTLAAADARIHIGAIRRQLFADWRQSGDLTWGPTGLAIQQLYGFDPWKITKGSFDDYIAKMRAHHKGLHQRCLVSIWQQAQSSCQASLSPIQREAISGQLEYYWDTWNLHHSRKGNLAQKMIDVVEGLNPGHWIPPLMSGFTELTRAKILAETGPLEQFPHWRALLAYAGLKVRMRSSGKYRGQDKITKKGRVLLRKHLGQAAWVLARNDRVLGPYYHRKLSEGMPARKAKVACMRKLVKLLYGAAKSNQQFNPERVYRSAG

SEQ ID NO: 299577 - protein, 355 aa, unidentified
MTSVKYIGLDVHKESISICVRNSVGKVVMESVIETKASTILQFIDGLRGDLRVTFEEGTWAAWLYDLLKPRVSGVEVCNPRKNALLKDGSKSDRIDANKLSEQLYMNNIKSVYHGEHGLRTLKELARSYLTISKDLTRVMNRLKAVYRSWAIPCAGKEVYAPRHRAEWLGKISESGVRRRAEFYYQQLDALCLLRQEVRRDLLLEVKKHKAWKLLRQIPGIGPIRAAVLMAVMQTPHRFRTKRQLWNYCGLGLETHDSGEYRAVQGQLERSRKRATVRGLNKDYNHDLKDIFKGAAMRASTASGPLRDFYENLLAKGRKPTMARLTLARKIAAITLIVWKKEVRFDANYLKPQAA

SEQ ID NO: 299578 - protein, 325 aa, unidentified
MLGGIDVAKAELVVATRPGGERWTVSNDERGVRTLVERLRRDGVELIVLEATGGYELLCVAALAAVSLPVVVVNPRQVRDLAKATGQLAKTDRLDADILALFADRVRPEVRALPDAEAQELEALLALLALLARRRQLLEMLQAERNRLGQVFGRGKAPVKKSLKAHIAFLERELRMADTDLRDQVRQSPAWRERDDLLRSVPGGGPVLSLTLLAHLPELGRLSRRAIAKLVGVAPLSRDSGTLRGRRFVQGGRVSVRGVLYMGALVATKRNAVIRAFYQRLLTAGKPKKLALVACMRKRLTILNTMMRTGQRWCAEHVDRAPIHA

SEQ ID NO: 299579 - protein, 403 aa, unidentified
MSSYFAGLDWASRTHAMCVVDEQGGVVERAEIAHDATGLAELKRRLRRFGSPPLAIERPSGLLVDTLVEAGFTVVPIHPNAVKATRPRYRSHGAKSDASDAYLLADVLRTDGHRFKSLMPQSDQLLALRAWVRGRDDLVATRVQLANQLRSLLESFWPGAAAVFADIDSPIALAFVERYPTPESAKALGPKRMAAFCAQYAYSGRRSAEDLLARLHDAAPAVCAELQMQAKGELARCLARTLRSVVEQIRLLSSRIEHHVTSLDDGQILMSFPRAGRICAAQILAELGSVRERFATDAQLAAEAGVAPVTYESGKSKAVAFRWACNHRLRAALTCMADNSRHANTWAAHVYAKAKARGCDHPHAIRILARAWLRVIWRAWTDRKTYDPTQHRAAQLLLKTDGG

SEQ ID NO: 299580 - protein, 457 aa, unidentified
MPNSFSEAGLMKQKKPSKKGSIKLPKHLQHLNQHAAGIDVGSRSHFVAVPEGTDEQPVREFSTFTDDLERLAKWLRSCGVTAVAMESTGIYWIPVFELLERHGFEVRLVNARHVKNVPGRKSDVLDCQWLQQLHTYGLLRGAFRPTDQICTLRAYVRQRATLVRSSASHIQRMQKALAQMNLQLHNVVTDITGVTGMGIIKAIIAGERNPKVLAGLRDKRCKNTEETIARSLHGNYRAEHLFSLQQAVELYEFYLQKIADCDQQILAQLKSFDSSDGGDSDSKPPRSIEEALQQMSGVDLSSINGISTNTALKIIAEIGTDMNRWKTVKHFTSWLGLCPGSKISGGKVLSSATKPVANRAAAALRMAALTLFNSKSALGAYLRRQRSRLGAPKAITATAHKLARLVYSMLKHGTDFVDAGQEQYEERYRSRVVQNLKRRAQEMGFTLIAIQEETQTI

SEQ ID NO: 299581 - protein, 362 aa, unidentified
MDVHKASFTLSCFSVTTQETFATVKISPDAKAIKKYLDGVSLSRSEECEFVCGYEAGCLGYTLYHQLTAMNIRCVIMAPTTIMRNGKRVKTDRIDAENLARCLAYGGYKSVYIPTAQDEAVRDYLRMRDDHKLMLKKIKQQINAFCLKHNKIYPGNKSKWTQAHVKWLNALEFDGYLQDAFNEYMITYRELADKVERLESQIEQLAELEEYRDKVKKLICIKGIKTHTALSLIVETGDFSRFQSAERYASYIGLVPGEHSSSEDQNRLGITKAGNRHMRMLLIEAAQCYSRGVPAKKSKNLKSRQKGASPEVIAYADKASIRLRRKYIRMELVNKKKANVAKTAVARELACFIWGMMTDNIA

SEQ ID NO: 299582 - protein, 344 aa, unidentified
MEISTIGLDLAKNVFQIHCVDAKGKAVIRKALRRSQMLPFFEKLQPCLVGIEACGTSHYWARELLKFGHEVRLMPPAYVKPYVKRGKTDAADAEAICEAVTRPTMRFVPVKSEDQQAVLSMHRTRDLFVKQRTQLINMMRGLLAEFGIDIPQGVNRALEKARAIVDGEAPDVPIDAVRIVQRLSQQALDIHAQVREIERDLIEWQRQSDVATRLMTIPGIGPIGATALAASVNDPSEFRSGRQFAAWLGLTPLQKSSGGKERLGHISKMGDRYLRKLLVVGMTAVVRNAKRKPEAVDPNVLALLARKPARVVTVALANKTARIVWAIMARGEVYRERHVPALAA

SEQ ID NO: 299583 - protein, 357 aa, unidentified
MTTTQKQSCMFVGIDVHKDTHTAVGISPFGEKLFEITVGNYKNDFETLNLKVKEHSGVLSPYIGLEDVRGYGERLAGYLYERYPVYHVPSILVDRLRQNATHPEKSDSLDALGVAKVMIQSIDTLLPYTISQESQKAKQLKEISIDREDLVLERTRLKNQVHTLLYRIYNTEYEQKFKDPFSLKALRFWRNAKPTCDPFLLKTMKRKVRRILDIHVEVTDLEKDIKILLDTGGYTIQTASGCGLVLASTIIGEIGDINRFTSPGALSKYAGCSPRERSSGKKTRHVKSRSGNRRLNCAFHRMALSQISRSGNEKARTYFKRKVSEGKSKSQALVCLRRQMVNIIWMMLKHKTVYRTA

SEQ ID NO: 299584 - protein, 338 aa, unidentified
MKVSMIGLDLAKNVFQVHGVDAEGVAVRRKRLRRGQMERFFAMLAPAIVGLEACGGAHHWARLLRALGHEVRLMAPAYVKPYVKRNKTDGRDAEAICEAMQRPSMRFVAVKSPAQQAVLAVHRIRELLVRQRTMAANALRAAFAEFGVVAPQGVKGVRELMAQLPAPAAIPEPAHAALASLARHWQALDADITALEREIVGTTRVDPAARRLMAIPGIGPIVASAVLATVPDAKAFRSGRGFAAWLGLTPRQNNSAARRRSGGISKQGQRSLRTLLILGASAHLRHEWVRPRDPWLAGLLARRPVKVAAVARAAKTARIVWALLAKDQDYRALGAQAA

SEQ ID NO: 299585 - protein, 346 aa, unidentified
MLHTGLDLSRKRLDYCVLDDAGRQLAVGAVPPTADGLATLAARLAPHGEPVRAAIESMTGARFVHDVLEAAGWDVEVADALKARGLAPLACKTDRIDAHVLAELSRRDLLPALWLPSPAVRADRERARFRLHLVRQRSRLKHRIHAALLAHGVACPVSDLFGGRGRALLTAGGLPEPWQSHVTIALALIDDLTRRITDLERDLRHRGATHRYVPLLLTVPGVAWVLGYTIAAEIGDIARFSAPAKLVSYTGLCPRVYQSGGRDRRGTLSKLGPRYLRWALLEAAVHAGHHPVYRDRYQRTKRRCGRQRGAKVAQVDIARRLAAAIWYMLTRGQPFAPAGAPQPLAA

SEQ ID NO: 299586 - protein, 465 aa, unidentified
MGAGKMNRKQRKELGRRLQSANPGLEVVHPRAAGIDVGNGAHYVAVRPEQDAEPVRRFECFTADLHRMADWLEACEVKTVAMQSTGVYWIPLYEILEQRGFEVYLVNARHTKNLPGRKSDVQESQWLLKLHTHGLLNNSFQPTAEIRVVRTYWRQRGEHVRGASTCIQRIQKVLTQMNVQLANVISDLSGLTGQAIVRAILAGERDPRKLAELSHPRIRAGREQIAKSLEGNWRSELLFVLKQEMEMYDTFQHKIAECDRELEATLKQFGVPERASTEQPKIPNAKKTKRIQRNAPGFNLTSELHRISGVDLSRIDGVNAIVAQTIISEVGLDMTRWKTEAHFASWLGLCPDNRISGDRVLARGTRHVINRAATALRMAATTLIKSQSYLGAQYRRLRTKLGAPKAITAMAHRLARLVFRMLKYGQEYVDKGTQYYEQKHREQQLHLLKKKAATLGFQVVETGVA

SEQ ID NO: 299587 - protein, 339 aa, unidentified
MTLYAAIDLHSNNSVLVILDENDKVVHERRHPNDLSVILEQLAPYRERIQAIAVESTYNWYWLVDGLMETGYTVKLVNTVAVKTYDGLKYTGDEHDARHLAHLLRLGLLPTGHIYPKEERAVRDLLRKRAQLVRNRTMHILSIQNLVIRNSGKGMAAKAIRKLDTQAIGRVCGGNDTLALAMQSSLAVLRCLDEQIIGLERAVLARARLKPEFEKLLTINGVGDIIGMTIMYEAGSMERFAEVGQFASYARCVGSSRWSNGKKKGEGNRKNGNKYLAWAFIEAANHVVRHNERISRFYQRKKARTNGIVARKAVAHKLARACYHMIKDQVPFDETRAFA

SEQ ID NO: 299588 - protein, 346 aa, unidentified
MMIIGCDFHPSWQQVSWLDTETGETGERKMVHASGDAKTFYQQLAAPALIGVEATGNSQWFIELVQDLGHEIWIGDAAQIRASYVRKQKTDKRDAAHILKLVVEGRFPRLWTPDREQRDLRQLVLHRHKLVEIRSRVKNELQHLSLNKGMQRKQKLWSQAGQKLLRELPLKPWAACRREDLLGLLAMLNQQIGKLDQAVQQAADQHPQAKLLMTQPGVGPNTALAYVLTIGDVSRFPRGKQVASYLGLIPREESSGGRQKLGAISKQGNRLVRSLLVEAAQIAVRFDPGFRKQYLHCCHQKPKGVAKVAAARKLAVRLYWMLRTQTAYPEIVRIESSPRVPLVGAS

SEQ ID NO: 299589 - protein, 358 aa, unidentified
MTRCIPTDAATITLGVDTHKDAHVAVALDGLGRRQGTLSIPTTPEGYKKLVDWASGFGPLEHAGVEGTGSFGAGLARFLKSRGIKVFEVIRPKRTQQYRSGKSDPIDAESAARSVLAHTAIGEPKGADGEVEMIRTLRITRRSAVKARAQAANQIQALLLTAPEGLKSELCGLSTARVVEKAWRLRPGATPSDVEEATKFALRSMARRYQHLSEEIGKLDEQLNRVVSQVAPELVAVEGIGTDTAASLLIAVGDNPERLKSEAAFAHLCGAAPIPASSGKTVRHRLNRHGNRDANRALYVIAVCRMSRDERTRTYVAKRTAEGKTKKEIIRCLKRYIAREIYRILASPSSHATSISGP

SEQ ID NO: 299590 - protein, 400 aa, unidentified
MLSIGIDVSKGKSTVCGMKPGGEIVYTPFEVQHTREGMSELVSLLRSSGEEVRAVLESTGSYHCPVVAALLENGIFVSVVNSLRMKRFCSQSIRKVKTDRIDAMQIALYGLAYWQELQPTRLPEDTYRELQLLARQYYQMTSMLIKAKVDFNAICDQVLPGMQELMNDHAGRHKLSDFVLRYRHTTHILEMGETRFRKDYCKWAEKKGYRNCERMAALIFATAQNGIPVLPNAPSTQIVITEAIRVLHTVEASRDAILTQMQALAKTLPEYSLVREMPCIGDTLAPRLIAEIGDVRRFHSKRALIAYAGIDAPPYQSGKFCANNRHISKRGNRYLRKTGYEVMQSYVMHKPANDPIFTFIEKKRGEGKSGKLAMVAGLNKFLRVYYGKVTELYRSSPAIE

SEQ ID NO: 299591 - protein, 318 aa, unidentified
MNTKINQSINVGVDTGKTQLDIHIRPLDLFFSVENNDKGIKKALKTIKSHSPERIVIEATGRLEMPFVLACAEAQLPIVRANPVHIKRFAGAIGRRAKNDRLDAELIAHYGETIKPALTVIKPKNIRLMSDLVIRRNQLLSMQTMEKNRIQILPASLHPTIKPMLTTIKNQITKLEEKLVKLIEDSPEYQAKNTILQSVPGIGNIAAASIISNVPELGYITNKQAASLIGVAPITRESGRYKGKRVIQGGRAQVRTVLYMAMMSAMQCNPVFKATYARLVAAGKPKKVAIIACVRKMVVTLNSMLRDGAMWDENTAKN

SEQ ID NO: 299592 - protein, 411 aa, unidentified
MKKHSKIAENESATKRPAKAQVSTKQTKKVSQEIRKFAARLNGLPQERKPISPVAMGPASEVRWSVGIDLGDRKSNYCFLDGSGPIAAEGTIATTQEELGALFSAIGKCRIAVEVGTHSAWVSALLESHGHEVIVANPRKMESIHKNRRKNDKADARTLARLVRADPELLYPIRHRGVETRSDLVLLRARNALVAVRTKLINCVRGQVKSIGGRLPTCSAESFHKAAAEGLPDCVRSALLPLVVQIGELTARVRKYDAEVRRMNRQKYPETGALQQVGGVGPVTSLTYVLTLEKPERFARSRDVGPYVGLVPRQDESGEISKQLRITKTGDKMLRSLLVGSAQYILGPFGEDCDLRRFGLKLAARGGKNAKRRAVVAVARKVAVLLHRLWLTGEEYEPLRNPVCQAPGAEA

SEQ ID NO: 299593 - protein, 359 aa, unidentified
MQRNKISFKGQKIYIGIDVHAKTWEVCVLTESGYRERHPQQASAKTLFDFLKKHFPDGEYHAVYESGFSGFATYYALKEYGIDCVVTHAADVPTTQYEEVMKTDKVDAAKLARSLRAGDIRPIYIRERENIDDRAVIRIRKTIQKQLSGYKSRVKHLLHCNGVEIPDRFASPGTHWSRAFIEWLKEDVVLLSSSRLSLDLLVKQVETIRQTLLDATKSIRRLAQTDRYRNNYELLMSIPGIGVSVAMCILTEIYDVKRFRNENQFASYLGLIPTCHNSGGRTSSGEKTFRGNRHLGPMVIEAAWIAVYRDYGLGMAYARYKQSMKPQEAIVKIARKMSNIIFSLLKNGRKYEPYRWDKE

SEQ ID NO: 299594 - protein, 452 aa, unidentified
MRLLNGKQGLRRSQFAKELKGADLEKVLIIPIDASKVVQKAMILNYFGDVVQTPFAFMVNQTGMKSLIQKVEEAKQVCQAERIFVGIEATGHYYEDIVRILTTEGFSVHIINPASTHEERKQHLTYTKTDDIDLYLIAEALVGNKATNAKISDGKYRQLQNLTRARRSEINKRSRIKTEIRTHHDHIWREYQGYSVLENGKIKTTKIFSDFWGKSSLYILTHYPHASQILELGEMGLKRISKEHNLKIRNTSIKKLLFAANESVSKPVEDLSSELFLLKQKLKDYEWHSQNIQTYEKEIERILVNTNGLLLLTVPGVGLVTAAEIYCEMGDLTHYTSANQLIKKAGTNPVIKQSGKGEGYHGRISKQGNANLRRAVYSAGKSLSVHNEALKPFYTRLKEKGKKSGSIYIAMGNKFLKIAFAMLKNQKPFEWNNSTFNYKQELFKKLSLPIAA

SEQ ID NO: 299595 - protein, 321 aa, unidentified
METATAYVGIDVAKAKLDIAVYSSDQPWTFANSDAGISRAVSCLRELKPALIVLEATGGIEVPLVAALAVAGLPVVVANPRQVRDFARATGRLAKTDTLDARTLAHFAAAIRPPLRPLPDAHTQEMAAILTRRRQLVEMLTAEGNRLGAARSKAVRRRISAHITWLEKELANVDDDLDSSIRKSPVWREKDNLLQSVPGVGPVLSTTLLAHLPELGNLNRRQIAALVGVAPFNRDSGNFRGKRAVWGGRSAIRAALYMATLVATRYNPVIRAFYHRLCAAGKPKKVALTACMRKLLTILNAMLKHRTPWHYAGTQTFGPCS

SEQ ID NO: 299596 - protein, 412 aa, unidentified
MIGVDPHKASHTAVAISAAEEQLGELRVRACVAQTERLLAWAAAWPQRTWAVEGAGGTGHLLAQQLLSAGERVLDVQPKLGARVRLLAAGDVNKNDPNDARSVAVAALRSAGVRQVRPDDHAAVLKVWSKRYRDLGRTRTQAACRLHAVLGELIPGGVPKAVTTARAGRVLKALRPEGAVETARCELAADLLEDLRRIDASLRETRRKLAAVVAAAGTSLTGLFGVGPVIAAAVIGDVRDVSRFPGRDHFAAYSGTAPIEVSSGRRKVHRLSRRGNRRLNHAIHMAAITQIRNKHSEGRAYYDKKLAEGKTPKEALRSLKRQVSNAIFACLQADARRAAARAEGPGGQQGNDSVASAAGSHPRHRLFGQATPGPGHHTTTTAGDPASRPAIARGRASRSPDAATMPTRFRKG

SEQ ID NO: 299597 - protein, 321 aa, unidentified
MEARTVDDDAVRCSFAIEMSKKSWIVAVNTPLADKISRYRLQPCDWRGLLELMARIRRRVAKELNRRVEIVSCYEAGYDGFWLHRLLEAHGVRNYVIDSASVQVDRRARRNKTDGIDAGQMLRSLMAHLRGEPKVLSVVRVPSIAEEDDRRLHRERHRLINERIQHVNRIKGLCALHGIYHYEPMRPLRMRALEHLRTPDGRRLPPRVKAGIIRELQRLELVLKMLDTVEAERDAIASDKNTLAHRNAKKIQDLVKLKCLGPEFASVLVGEVFYRSFANRRQLGSYVGLTPSHFQSGPMCRDQGISKAGNAKARSTMIELA

SEQ ID NO: 299598 - protein, 378 aa, unidentified
MATTRSVLRHELTAKSGDLYLSLDLGDKRWHISIGDGRCGLSHYSVGAGQTDELADCIAKARARLHLSRKAIVHSCYEAGRDGWWLHRWLTEVGVDSIVVDPASIEVNRRARRAKTDRLDADKLLAMLVRHHSGERVWSVLREPSPKDEDARRTHRELQRLTHERVAHTNRIGSLLVLHNLRPNVVIGGRYWSVWWERHRAQVPSSLAAELEREVMRLQLVKQQVRAIEATRSQELLEGKQPLVAQLTRLRAIGAKGAWVLVKEVFGWRNFANRRELAGSLGLVPTPYASGDSQIEQGISKAGNRRVRGLLVELAWGWLRLQPGSALTNWFNRRFASGGKRLRRIGIVALARRLAIALWRYLKNGEIPAGAQLKPAGA

SEQ ID NO: 299599 - protein, 341 aa, unidentified
MNYVGVDLHKKVITICVMDANRKILRRAQLAACEPHRIVAFFEELGEYKVVLEATTSHRWFVELVEPTAEEAVLANPSKLRVIAESTKKTDKLDAQILAEFLARDMIPRSYMPTPRQRQHRALVRHRNNLRTRETSVKCRIRHVLADYNADRKDLFSSQCGREYVKTVKLDEVDRFRLEDLWSEWESIQERKTKTAAMIRAFAKKAPQAEKEARKLVKTAPGVGVVTAEVVLAELGDVRRFKNAKAVCAYAGLVPVVRQTGGKKSKDGHITKQGSGLLRWALVEAAWRLKNSSPLWESKYERIRNRGGKKRAIVAVARKLLCVLYAMLRDSRPYDLMAAAA

SEQ ID NO: 299600 - protein, 351 aa, unidentified
MKYYTGLDVSMKTTSICIINQDKSIFYEETVPTDPVAISNAIKSTGLKVEKIAIESGSISHWLIQELRKRDLPVVCIDSRKMSTVLSIKINKTDKNDARLIAEALSCGYYSEVQQKSQEDVETRILINSRRTLKDISTKLKNTIRGHLKAFGILLGAVKSKKFIALVEAHLKDKTDIVQYGLRQLLETFSNIHQKLAEIERKLEELAKEDEDIKLLKTIPGVGLLTAFSFKIYLGNPNRFRSSRSVGAYFGMTPTQYSSGETQKQGRVSKRGASEVRFLLNEAASVMLYRTRTWCRPKAWGLKIKKKKGHKKATMALGRKLCTIMHRMLITRKEFEYGEPREKDQVMKKAG

SEQ ID NO: 299601 - protein, 379 aa, unidentified
MSSESASAAARPIIYLGMDVHKESITIAVLPAGAKVPTRLDRLPNDLAKLKKWIDRVAREGEIRACYEASGAGYVLHRALQEWGYLCDVIAPSLIPQRPGVQRKHDMRDATDLARLYRAGELVAVRIPSETDERVRDVVRCRETFQREILKSRHYILKFLARRGFVFRDGTNWCTPHLQWLQHLTTDGSPLAAHDRLVFREYHALLMYKLQRRHELDRQIEQLALLPALAPMVARLQCFRGISLHSAMVLATEIVDWRRFERPAQLACYLGLVSREDSSGDRMRLGSITKAGNAHCRHVLVQAAWSYRHRPQTSVDLKRRQAGQPPAVITHAWKAQQRLHQRYNHLSYRKRPQIAVVAVARELVGFLWAVMHDLESTAA

SEQ ID NO: 299602 - protein, 453 aa, unidentified
MSKVNTRREYFESIKNSIKEAQDYLLIGVDVAKEKCDACFMLSSGRLLNKHFKFENTKEGFDSLREKITQYKEALSPKATVVGVETTGNFMIPLMHYLEEHKIYVVMVASLVTKRNRDTLDLSWNKNDVKDAWNIVDCIKQGKILYFNYPNVPYGDMRRLMTLYSRLSQERGKYKVRLQNNVLCITFPEFHQVFDEVSELVPMTILTRYPLPADIAKISEEKFIIDIVKHTDPTIKKSKLSRIHKLACESIGSKDESESLRYETRFTIQRINEITQVQEDMLKKVQSLTKDCEDYELLQTIPGVGPILAAIMITSIGDINNYRSSKQILKLAGLDLAQLQSGQFNGDIRISRRGKPSLRSAAYQAAMVAARNDSNLRMKYLNLLQKKEVLKGDKRKIIIAIACKILRIAYAIMKTKRPYNDDLHGLNKENNDSLNFSDKMEAVVDETSRVYLR

SEQ ID NO: 299603 - protein, 346 aa, unidentified
MLYAGLDLSRKRLDVHILDEDGRTVEVTAVSPDAAGLRRLAAHVLHFGHEVYGAIESMTGARFVHDTLERYGWDVAIADAAKVKGIAPLAAKTDRIDARVLAELARRELVPEIWLPDPTVRAERERARFRLHLVHHRTALKNRIHATLMTFGHPVPVADLFGVGGRELLARLALPEPWSGTLATSLRMVDELGAEIDACEADLRRLGADHPSIPLLLTVPGIGPILAYTIASEIGDIGRFSSPKKLTGYTGLCPLVRQSGNRDVRGPLAKNGPKYLRWALIEAATHAARDAHYRDRYERTKRRLGRQRGAKVARIDIARKLAEAIWHVLTKNEPFAPAGPTMLLVA

SEQ ID NO: 299604 - protein, 397 aa, unidentified
MIAVGIDISKAKSTVAVIDSDGTVLASPFTMAHTQPEMEAFVTYLKGLGEPTTILMEYTGHYHYPVLKKLQDERFPVCIVNPYQMKKYGDVEIHKAKTDKKDALRIAAYALEKSYKLVPYSSMEQKYEDLKFLSRQYSQRITYVAKLKVQLIALLDQTMPGITRILPLNSRNPEKCALLLFIKRFKSFDEIHRIGKARFLASYDVLAKKASERSASSKGLSIYELAVDSITTRGEDPYIWLSQNQCVDLLSTTQNAADEIISQMRNIAETIPEYKVLRAMRGVGDRLGPIILAEIGDIRRFHSGKALNSYAGNDAPPYQSGQFESRNRHISKRGSSALRKACYEVMQALKLTKPQDDPVYLFMLKKEQEGKPFNVAKMAGVNKFLRIYYARAMELYK

SEQ ID NO: 299605 - protein, 406 aa, unidentified
MVTCAIDLGKFNSVCCFFDPATQKHQFETIATKRSHIENLLNTRGDIDLIVMEACGPSGWINDICEEKGVKTLVCSTNEEAWNWKATKRKTDRDDALKLAEMSLLRRLVPVHVPKPRVRQQRAFIKYRKSVDQDINRLKNSIRSIFANQGIEIDTGERAWNTGRVHINSFRKPIEECGRDELWRGQLDMQLSRLDDLVVKLESLETKLDEFAAEHPDIVRLMTIPGVGRKTAEALVAAIDNPHRFKNARHLSSYLGLTPKQHQSGEIDRNGRISKRGSKLLRTMLLQCAWSSLRYNRWSKKTYDRITGGSKTRRKKAGIALARKIGVIAWAMMRDQTNWDASKLLSDEETKQDDGKLKVKRKPPKPPGPVYSEESSRAAHRRKHLSTKPKRQTRTGNRRTQTSQLN

SEQ ID NO: 299606 - protein, 314 aa, unidentified
MANAVGIGIDVSKDKVDVASTDGWSATYVQTPEGLKELAQAVQARKPHRVVLEASGGYERGPLVALYAAGCPVVLLEPARARAFARSQRKRAKTDPIDARVLGQMALVGVEEDPLWEPLEANLAALRDLVLRRQAVLRIIDEETKRRANAPAAVLASITRVLEVVVSERRLLEKEIDALIASVVELKEKAEILEGVRGVGRTTAAVLLIAVPELGRLSRGSVASLVGLAPMNNESGTWTGKRRIQGGRVLARRALYMAALVATRHNPHIKAFYARLRAAGKPGKVALVACMRKLLIYLNNLLREHGTMRVTAAA

SEQ ID NO: 299607 - protein, 400 aa, unidentified
MRVVFGIDVSKASSEVAILVNGDKVHGYTIPNDSIGFNRLLGDLKTVQNPEIVFEATGVYSRRLQAFLEDNSYAYTRLNPLAAKKQLDSLRVRKTDKIDAEKLAQSQFVLNRQPTYVQEEVYQELRDLSRFYQNLTEDIVRAKNRLHKVLQVTFPELESLLSSPTGEQYWNLVIAFPCKEMVLELSSDDLSTVIRNSTSKRISDKRVTYLTEKLTDLAHKSYCAVKKTSPMLEEVRYYAQELLRLSERRQVVLDEMVSLAQPLPEYEILLSIPGIAETTVTSLIGELGDIRRFQSANQINAFIGIDLRHYESGNFLAKEHITKRGNPYARKILFKCIHNIASASHTNPCHIADFYEKRKRQSQTTSTKPHTIASIHRLIRTMYYLITHNKIYDYNLATSQ

SEQ ID NO: 299608 - protein, 319 aa, unidentified
MRTYTYIGVDVSKAMLDVDLQGKYMQFDNNKEGIEKLFNNDKELAIEIQDCLLVMEASGGYERQLVESCEQKTINYHVAHANKVRSYAKSKGLKAKTDQLDCGLLTDFGQVMRIQPDINLLSENANEIKRLLKRREELKSDKQREKNRLDTITSPGIRDSIESHIKWLDDEIKRLDKQLKDEQCKESVKENHVLLTSVPGIGDLTANYLLALLPELGSVGHKVISALVGVAPYNRDSGNFEGKRFIQGGRCKLRHALYMSALTATRCNEPLRNFYQRLRTAGKPAKVAIIAVMRKLLSMINSVMTRQTPWKDDLNATNR

SEQ ID NO: 299609 - protein, 414 aa, unidentified
MAEAMITWYVGVDWGSEKHQACILDAQGTIVGEREFSHSAAGLAELGGWILAIAVAASAVAVAIEVPHGPVVDSLIDRGFVVYAINPKQLDRLRDRFSIAGAKDDRRDAYVLADGLRTDRHLFRRVHVADPRFIELRAWSRLAEELQEERARLSNRLYHQLWRYYPQMLELTDDFAATWFLELWERVPIPAKAAGLRKSAIERLLRKHRIRRVDAETVLQTLRQSAIKVADGVAEAASAHIRSLVARLHVVNRELRHAYRKLDELCAAIGEAGPTATERVGLRDVTILKSLPGIGRINLATLLAEASGPLSRRDYQALRTLSGVAPVTKRSGKSHIVVMRYAAHVRLRNAVYHWARVATQHDHKSRTRYAALRKRGHSHGRAIRGVADRLLGLACVLLQRQILFDPNFDQATAA

SEQ ID NO: 299610 - protein, 316 aa, unidentified
MAMHVQPINIGVDVAKQKLDLYRDDNGTHETLPNNRKAIQHWLKQLPKHAEIAIEATSTYHMDLVEMAYAKGFRVYVVDGYQLSHYRKSTGGRAKTDRSDASLLARYLRKERDELRVWEPPRGPYREIQVLLTRRAKLVKANTMLNQSLSGVKGLQAGLTGLKRQFERLDQLIQKRLRTLLRETDLMNDVLRCQALEGVGFLTATALVMANLRGDFKDGDAFIAFLGLDVRVRDSGNLVGRRKLTKKGSSEIRRLLHNAAMAARRSQTWSGYFESYVARGLSKTQALIILARKLARVAFALIKKQTEYRPEIAMKA

SEQ ID NO: 299611 - protein, 351 aa, unidentified
MPNKSNSIVATMGIDIGKNAFHVVGLDRRGAIVLRQRWSRSQVEARLANMPACLIGMEACVGAHHLSRRLQAQGHDARLMPAKYVRPYSKGQKNDFRDAEAIAEAVGRPTMKFAATKTADQLDLQALHRVRERLVSQRTGIINQIRAFLLERGIAVRQGLRFLRSELPTILSARSDVLSPPMMRVIEDLNGDWRRLDERIEALSEEIEAVAHQDFACERLMTVPGTGPIISSAMVAAIGNGAVFAKGRDFGAWLGLVPKQISTGDRTILGPISRRGNRALFVQAAWVVLIRIKDWERYGLKAWIDAAKKRLHHNVLAIALANKLARIAWAVLNKERPFECTKSPAAASQPA

SEQ ID NO: 299612 - protein, 344 aa, unidentified
MNTITGVDLAKAEIQVCVCKHNQVQSNKDMTPNEFSIWLANSKPMMIVFEACSTSNYWKQVALSHGHDARLISAKLVSTVRQNQKTDKNDALAVAQAAQLTDVTFINGKTHQQQELQTLTRLRELAVKQKVASQNQLKAILLEFNIRISPQKGGLNGVVQDLLEDAENGFSDLFREAIHTAWQTLLANIQLVKQYDNLIDKAANEHPDCKKLQGIEGVGPMNAINLYLSLGCSDIGVFKKGRDASACIGLTPIQHSSGGKTKLGSVGKHIKNGKIRSCLVNGAMSAINHTVKRKARTTKEQWIQSLVARRGKKCAAVALANKTVRTAFAMLQNNTEYKAELLPA

SEQ ID NO: 299613 - protein, 409 aa, unidentified
MNKVDIAPFEVFCGIDVGKSLNHIVALDRYDDKPLINRKVPQEEAEIRAALEEAGDFGLALVIVDQFGAFGRLVVGVAKSMDIPVAHMSPRRFRQVAETYGEDKFDEKDAFILADASRTTPRNIEFVGNRAESMAEIKVLSSRRDDIVEERTRCYSRLHDFIHQVSPPLEELFSKRKLHNDLEIRLIARYGGPIGFRQAGRARASTWAAELKYHCIDGPKKVEQVFDVLDRQTVMLPGAAVIEEQIRSIASRIIELLAEEKRLNLMIEQRAKMIPEVDLLQSIPGVGPVYAALIAVEISDIGRFRDSNHLASYAGVAPRKEESGTSVHKRRKRKGGNRRLKNALMQSSQRSVQCDPVARAYYERKRAEGKKHLQALRALARHRVTVIFAMLNEGTFYDPPVEVDENGRG

SEQ ID NO: 299614 - protein, 374 aa, unidentified
MNKFSKYVGLDTHKDTIAVAVSDAYGGSPRYYGQIANTPEALTKLVKKLSSGGEVISFCYEAGPCGYGIYRQITGLGHDCAVVAPSLIPSRPGDRVKTDRRDSESLSRFHRAGELTPVWVPDQEQEAIRDLTRAREDMKAMERQARQRLNAFLLRHGKSYESGKSKWTQAHFRWLERVKFTAPIQQIVFEEYVGAIKQAQQRVAGLEEEMLKAMATWSLAPVVNALMALRGVKLITAMTVMAELGDISRFDSPRQLMAYLGLVPSEYSSGKTKRRGGITKTGNGHVRRVLTESAWCYRFQARKTAHLQRRAEKTSAEVQAIAWKAQKRLCGRYQHLLDKGKLKVQVCTAIARELAGFIWAIACEVMGRRAVIVL

SEQ ID NO: 299615 - protein, 377 aa, unidentified
MKGTRFVGLDVHAATIAVAVAEPDGEVRSVGTIPNDPEAVRRVMKKLGGAEHLRACYEAGPCGYVLYWQLAELGVACHVVAPTLVPVKAGDRVKTDRRDAERLARSLRSGDLTPVWVPDAAHEALRDLVRAREAAKKDQLRARHRLQKFLLRHGRRPPAGTKAWTESYRRWIAALRFEQPAQEATRLDYLAEVDHARERIARLERALDEAVETAPAPMRAVIEALQALRGIAKVAAVTIVAEVGKLSRFARARQLMGYSGAVASEHSSGPRVRRGGITKTGNAHLRRIVVEAAWSYRHRPRVGKALRQRQARQSEPVTAIAWKAQHRLYSRYCRLLGRGKSKQQVVTAVARELLGFIWAIGVAVEREQSQRLSSQVA

SEQ ID NO: 299616 - protein, 320 aa, unidentified
MSDSLDIGVDVDSKEFVPAVADRKAGDRVANTRAGIATWLKTLPQRCRIGMEATGRYYELLARMAGQAGHVVYVIDPRLIKNYARATGSRGKTDAMDAQAIARYVKKESDRLREYVPRTDEQQQMHDLLRKRRALVETRARLEQSFGVSKSDPGELSDLFCALAGTLSELESELQRLGRDGEHGALYKRLLTIPGIGPAVASHLIYYMTRWPLANANAWIACTGLDPRPNESGGRTGRRRLSKQGAPMLRQMLYMAAMGLKRCRRGQPLYDELSKRGHPSTAVFNILARKLARIAWGVFKSGRDFDPAMLKVGQACFQQA

SEQ ID NO: 299617 - protein, 344 aa, unidentified
MDHFGGLDVSVKETSICIVDDTGRIVREVKVGSEPEALLKVLGNPAYRFKRIGLEAGPLSQWLFSALSEAGLPVVCVETRHMRAALKAQINKTDRNDARGIAQMMRAGLYRPVHVKTLRSQKLRMLLTHRKLLQSKAIAIDNDLRGTLRNFGLKVGLVGTVKFEARIRELVEDLPDLVALIDPLLIVRRTLREQVVILHRRLLAIVRDDEVCRRLMTIPGVGPVVSLTYRATVDVPARFRKSKSVGAVFGLTSSRYQSGEVDWSGKISRCGDEMMRTMLYEAAQSMLHSKKWSWLKAWAMQIARRRGMKKAIVALARRLAVIMHRIWVDGTEFRWTREQAAAAA

SEQ ID NO: 299618 - protein, 346 aa, unidentified
MEHYAGIDVSLECSSVCIVDATGKIVREGKVASEPEALIAWLGSSRTDFVRIGLEAGPLSQWLYPAMQQAGLAVELLETRHVHKAFETMLVKSDRNDARGIAQLMRLGWFKPVHCKSLAAQEMRALLTARKLVQSKLHDVQNSLRGILRGFGLKVGETTPARFSGRITGLVTGHPNLEVIAKALLAVHAVLLREFNGFEKRLRRTARADTRARLLMSVPGIGTIVALTYTSAIDDPARFTSSKKVGAHFGLTPKKYQSGETDYTGRISKIGDASVRAALFEAAHIMLTKPLKGCTQLKSWAMRIARRAGMRKAKVALARKLAVIMHRMLADGQSFDPMATAKVAAA

SEQ ID NO: 299619 - protein, 391 aa, unidentified
MTKPKTKTVNDFSRCLDPLDMDATVIAVIEMSQSSWLVAGIVPGVERQPLKKLAISEHGLLNLLNRWRAEAEKQGHRITRIAVAFEAGHDGFWLARWLAAQGVEAHVIHASSVAVTREHRRAKTDRLDTGLLKRGFLGWLRGERGHCKTVAVPTLAEEDAKRPSRDRETLVGEASRIITRVKAAFVRLGIRGFNPKLKAAAMRLETLRTPEDEPIPPNTLAALKRDLERHQIVKKQIREIEQTRLDVLKQAPKKGPHAMVRLLARVIGVGVETADMLVQEVLSRTMRDRRAVGRYAGLTGSPDESGAKRRDKGLARSGNARVRHGMIQLAWRFLLFQKDSALAQWYRQRTADAPSMRKTLIVALARKLLIALWRLARDGVVPEGVRLRPAA

SEQ ID NO: 299620 - protein, 338 aa, unidentified
MREYCGIDLHSTNCWVTVLDEAFKVVRERKVPNDLATVLAILEPHRDALEGVAVESTFNWYWLVDGLQDAGYRVHLTNTWAAQQYEGLKYTDDRHDARWLAHLLALGILPEGYIYPKEERPLRDLLRRRAFLVRKKTSMVLSMHGAFECRTGMRVKTNDLKKWSAEDVEAILEDPTISLGITCLLQPMKVLDEQIKVIEKVVLKRAKLREEFGPLQTVWGVGKVLALTIMYEVGQIARFATVGDFASYCRCVKTERFSNGKRKGSGNRKNGNPYLSWAFSEVAHYAARFYPEAQAYFQRKRAATNGIIANRALAHKLARASFYVMRDQVPFDPDKLFA

SEQ ID NO: 299621 - protein, 391 aa, unidentified
MVCVGIDVAKDKHDCCILDSDGTVRADCFTIPNNMDGFKQLLQTIRDCTKKSDKIKVGLEATGHYSYNILGFLLDNGLPTYVINPLHTNLYRKSLSLRKTKTDRVDARTIATMLLSDVDLKSYTDIAYHNEDLKSLTRYRFDKVQERAKLKQSVSRLATILFPELEQLVSSIHGTSIYALLGEYPGAKQISEVHLTKLTNLLTTASKGRYGKEKAIQIREAARTSIGSVMPAKSLELKHTIKLIQELASEINEIEDSIQKIIDELNPPILSIPGMGVNSAAVILAEIGDFSNFSSPDKILAYAGCSPSTYQSGKLTNCYAHMEKRGSRYLRHALYNATKYVCYWNPVFAEYLAKKRAERKHYNVALSHAMKKLVRLIYALQKSGKAYLASA

SEQ ID NO: 299622 - protein, 466 aa, unidentified
MKGFLGIDVSKGYADFVLLNQEGKKLEDTLQLDDTRKGHNLLTNWLEELPIKHSISELYCGLESTGGLENNWYAALKSPFKERLSVYSIRLNPSVVANASKAELNTNVTDSESARNIASYLRRYADKINYGQDDNVYSAFRSLHTHIQLLLKQKTQIINELKVVLYSSFPELQRYCKNGIPNWVLTMLRQYPTAEKLARAKPQKLEKIPSITNEKAIKLIESAKASIGSRQSKTHEFIISNMAEEILEKDRRIKALKKHLAENCTGPETKLLETIKGIASYSAASIMVQIEDINRFKAPKELASYFGLHPVLKESGDKKIVSRMSKRGRPAMRATLYMCAQSAVLHDVHLKEIYARHRAKGKAHRQAIGVVMHKMLRIIWGVLHSAKPYDCAIDKQNQIKNEKPIEDQTYKEVERKRRLQTFDQDAPISRMAHKKRKVHATSQSGETSKIRDLEPEPLDTNILNCL

SEQ ID NO: 299623 - protein, 338 aa, unidentified
MELYAGIDLHSNNNVLVVLDESDRVIYQKRLHNVLADILAALASCGGTIKGVAVESTYNWYWLVDGLQAVGYTVHLVNTAAVKQYDGLKYSGDFSDARHLAHLLRLGILPEGYIYPREERAVRDLLRKRSQLVRTRTTQILSIQNLLARNLAIQASGNLIKGWQDANIDALELMSEQKLALKSNLALMHCVDEQITLLEKAILTKGKLKSEYKSLRTVSGIGEVLALTIALETGELSRFAEPGNFASYARTVNSRRESNGKKKGEGNTKCGNKFLAWAFVEAAHFAVRYDPAIARFYQKKCAKSLSVVAIKAVAHKLARACYHVMKKGEAFDVKRAFG

SEQ ID NO: 299624 - protein, 351 aa, unidentified
MNARSDAACFVGVDLHKDTLVACTIAAKDREVSYRKIACVAREKVREFLADLPRPSVVAIESVGFYRWLWTEAEPIVDQVVLADARGCRALAGRRIKTDREDAFNVAELLMTGRLPTAWAPPNHIQRLRDLTRHRNGLSRDHAKTLHRVKSIMNRLNRPGPARMDAAGLQRYLLASVERIEADDLMMLWQHQRRLVEVEQDRSAIERRIIDVMRAEEFRRLREILESIPGVGLITAATAIAEIGDFSRFPDAKAIGRYAGLTPTGYSSADKHRLGRICKTGSPDLRWVLQQAAWTAIRCEPAFKKVASKISKGSKTRKKAAAVAVARKLLVLMWTLVRKDEPYKAREPIAA

SEQ ID NO: 299625 - protein, 357 aa, unidentified
MIAMKYYTSTTKFNCGIDLHARQMYVCVMDRDGKKLVHTNIRNNDFEFFLKLVAPYRQDLTVCAECMFGWYWLADACQAAQIHFVLAHALYLKAIHGGKNKNDRIDSEKLAHLLRTNLIPPAYVYPADKRPLRALLRQRILYVWRRSELLSRIQSHQLAYNRPTCRQNHYNRDAWTEQLLASEPDPVRQLALQNDLALIGHYDAQLASLEKALLKLTKQTASRDFNLLQTTPGIGDYLGLTLLHEIGDIARFPTVKDFLSYCRLVKGTVASAGKLKGLRGAKLGNPYLRWAFGEAAVIAKRDPAIIGPLAQRLEARLGNKFKANTVLAIKLARAVYFMLKHKTAFDPDRLVAVLSKN

SEQ ID NO: 299626 - protein, 372 aa, unidentified
MAQSTALFVGLDVHKDSIAVAHAAGGSAEPPVFVGAIGPRQADLDQLLRRLQGKTSALTFVYEAGPSGYGLYRYLTAKGLPCQVVAPSLIPKKPGDRVKTDRRDALELARLLRSGDLTAVYVPAVEDEALRDLCRARDAARVTGKDAKLRLKAFLLRLGRHYVGRATWNDAHRRYLAKVVCPTPAQQIVFQESVRAVDEQVDRIQRLDAELLERAPAWRLYPVVQALQALRGVQFLVALTVVAELGDLTRFDNPRQLAAFVGLIPSEYSSGGSRRQGGITKAGNGRARRALIEAAWAYRHPAKVSAHIQSRIDRLPKPIQDLGWKAQVRLCKRFRRLVARGKHPNVAVTAVARELIAFMWAIAKEVPVPVPA

SEQ ID NO: 299627 - protein, 360 aa, unidentified
MNKDKYVAMDVDSANIVAGVYDHQGKTVMQCCIRNEGKAIQEFLRLLPGTVHVTFEEGTQAAWLYELMRPLVAEVIVCNPRENKLLKAGNKSDRIDVAKLGKLLRLGELRPVYQGPSAGQGLKQLVHSYEELVDDVRRVKNRLKAVYRGRGINTKGETVYGPKQRKEWLGKLPSQELRTRAAALYEELDCVRRLRAEAAKVMCRAARKHEGYKSISSTPGLGAIRTAQVLATAITPHRFRGKRQFWPYCGLAVVTRSSSDYEWVEGGARRKRKPLQTRGLNQNHNRTMKAVFKGAAVSALQQHPEVQEYYQRLCTRGMRPEMAQLTVARKLAAIVLILWKKGEGYDPKRLNQAAPGTDQQ

SEQ ID NO: 299628 - protein, 494 aa, unidentified
MLVIPLRKSVCPFGGDLCFGWLGSLRLYLYKPLGCVSAFWKWMPAGKDKYMKYQKVLTMLESIPYLSVGLDVGADFTWMSIMLPNGSLTGKPFKILHSDPASRDLAVTKIKEAQEMYSLESRCFLESTGIYHIPLLYFLRDKGFDCSVINPIITKNSTNMNIRKLHNDKFDSKKAAKVGLDASLKTSIVPDDSVIDLRNLVRDYYYFKDLQSAVVLKLNAELKVSFPAYLKVFSKITTQCSLKLLEAYPLAADMLAAKDEIVETIKSTARFGEKYALSKYDAIYAAAEDAAVFGRALKSNAVRIRLYISIYKEYQKHLDDLLVALHESVDKLQGTSVYGRIDLLQSLRGVGFLSAVVLIAEMGNFDLFSSPKKLYAYFGLDPAVKQSGKFNGDKVHMSKRGSSLARRILHMVSLNNLKVDKGTKAPVNPVIYDYYTDKCKSKKKNVAVGAVMHKICNIIFAILRDNKPFEIITQQEHCKRYAAKHPDKAGMNAA

SEQ ID NO: 299629 - protein, 343 aa, unidentified
MEHYAGIDVSLETASVCVVDASGRIVREAKVASEPEALITWFGKLGVEVSRIGLEAGPLSQWLYAGMREVGLAVELLETRHVRDAFKAMPVKTDRNDARGIAQLMRLGWFRPVHCKSLPAQEVRAVLTARKLVQGKHHDIEMSLRGILRGFGLKVGPTTTRSFEGRVRQLVEGHPTLLAVADALLLARATLGEQLGKLQKRLVSLARDDTRARLLMSTPGVGVLVALTYVAAIDDPARFRSSKAAGAHFGLTPKKYQSGETDITGRISKIGDASVRTALYEAANVILTRPVKGSSLKSWAMRVAKRAGMRKAKVALARKLAVVLHRMLADGTPFMAEKAAAAI

SEQ ID NO: 299630 - protein, 340 aa, unidentified
MKHYAGIDVSLEASSVCVMDGTGKIVREGKVASEPVALIGWFSALGLSLTRIGLEAGPLSQWLYAAMRDAGLAVELLETRHVHNAFKTMPVKTDRKDARGIAELMRLGWFRPVHCKSMEAQETRAMLTARKLVQKGLQEVESSLRGILRGFGLKVGKTTPVRFEARIKELVAGHPSLEAVATSMLAVRAALRRELNGFERRLRAMARSDARAQLLMSTPGVGTIVSLTYACAIDDPARFKSSKIVGAHFGLTPTKYQSGETDRSGRVSKIGDASVRAALYEAAHVILTRPVKGCTALKSWAMRIAKRAGMKKAKVALARKLAVIMHRMLANGTPFTTQKA

SEQ ID NO: 299631 - protein, 337 aa, unidentified
MKYSGIDLHSNNSVVTVTDEEDRVVAEKRLPNDLAKIIGFLSPWREELAAVVVESTYNWYWLVDGLQEAGFEVKLANTGAIRKYDGLKHSGDEADARQLAHLLRLGILPTGTILPPEHRATRDLARKRMQLVRSRTSHILAIENIMARQRAVKITSNQVKRLTADAVDQMALPADVALAIQSNLAVITTLSAQIELLERRLQERLGERTEYALLTSVPGIGRILAAIILLETGSIDRFSAVGNFASYARCVDSQRMSNGKKKGEGNTKNGNKYLAWAFVEAANFALRCCAEAKRFYERKKARTNTAVATKALAHKLARACFHMLKERKPFDVRRCFA

SEQ ID NO: 299632 - protein, 324 aa, unidentified
MIDGVLGIDVSKNALDVSMSGCNKIRARSFVNSAHGWRHLLDWLVTQKIQRVHACLESTGRFGLGIACALHEAGHVVSIVNPAQIRDFARTKLGRNKTDGVDASHIREYCELFKPQPWAPPSNAHRTLGELQTIRAGIIAGLTQWKNRRNSGMVDAVAQSLADVTISHFASQLEAVDEAIAQTIDDDSDLRRQRDLLLSISGVGETLAGVVLAELPGPNVLRSSSEVVAYAGLNPRLYQSGTSINRITSISKIGNAVLRTALYMPAMSAMRYNPAIVALVTRLKAQGRLKPKQIVVAAMRKLLVLCFGVLKTGKPFDPAIAMGC

SEQ ID NO: 299633 - protein, 413 aa, unidentified
MDRVVQRCCGLDVHKASVTACVRVHGAAGELHQEIQEFAATTRGLLQLRDWLASFEVTLVGMEATGVYWKPVYYLLEEEFECWLLNARHLKNVPGRKTDVKDAAWICQLVEHGLVRPSFVPPKEIRELRNLTRYRKTQIEERSREIQRLEKVLQDAGIKLSSVATRVLGVSGRAMLDALVEGTTDPEVLAELARGRLRAKLPALREALEGRFSVHHALMVGRILAHIDYLDESISELSAEVERVIAPFSQEVELLDTIPGVDRRTAEILIAEIGVDMSRFPTHGHLASWAGMCPGNDESAGKRRSGKTRKGSKWLRSGLTEAAHAAARSKGTYLSAHYARLRGRRGPQKDAVAVGHSILVIAYHILERSEPYLELGEDYFNRRRSEEAYRKRLVRQLERLGHRVVLESLPQPA

SEQ ID NO: 299634 - protein, 329 aa, unidentified
MEKKHVIGVDVSKETLDLVFSDNEKHLKISNDEKGFKKLMWELKKTKIPMDKFLFVMEFTGHYSYPFEHFLSKKEITFAKVPAMEIKFSNGVVRGKNDKIDARQIASFGVRCPDKLRISVTDKKLNYLKGLLSLRDRLVKQRAGFKASIAEQKRFFELRDSDILLKTQAKMINQLDKEIEKVETVIKQTINEQQSMKENYQIITSVKSVGFVLGAYMLVWTKNFTCFNDARKFACYSGIAPFDHSSGKSLKKRPRVSQLANKKAKTLLSLAARIAIQHDQELKSYYQRRIESGKNKTSTLNIVSNKLVYRIFAVVKRRSEFQSNYSFAA

SEQ ID NO: 299635 - protein, 404 aa, unidentified
MFDTIEVGVFLGLDVGKSTHHGHGLTPAGKKVFDKQLPNSEPKLRAVFDKLAAKFGTVLVIVDQPASIGALPLAVARDAGCKVAYLPGLAMRRIADLYPGEAKTDARDAAVIADAARTLPHTLRSLELTDEITAELTVLVGFDQDLAAEATRTSNRIRGLLTQFHPSLERVLGPRLDHQAVTWLLERYGSPAALRKAGRRRLVELIRPKAPRMATRLIDDVFDALDEQTVIVPGTGTLDIVVPSLVRSLAAVHEQRRALEAQISALLEAHPLSQVLTSMPGVGVRTAAVLLTTVGDGTSFPTAAHLASYAGLAPTTKSSGTSIHGEHAPRGGNRQLKRAMFLSAFACMNADPASRTYYDKQRARGKTHTQALLRLARQRISVLFAMLRDGTFYESRTPTVTLAA

SEQ ID NO: 299636 - protein, 341 aa, unidentified
MKNKSFIGIDISKNVIDVSIFCEGTPIKDFPHDVFNNSRKGFGEMYTWLKKNHVVLSNCLFGMEFTGSYSMELAKFLNARNYQFCMLSTHVVKHYPMGPKDKSDKIDSAKIADFLYRYNGTECVKPYNMPDKTMQRLKALMNERKFLVEQRTCFMNRRQLCITKEDAQLYDGYIKKFSRDIENIELEEQKLLATDDSLLSTYKNLLTIPGIGFVNAINVIVITRNFTAFETARQYASYVGVAPHFRTSGTSVKWRPRPSARCDGQAKADLSMAATVVVQYDAELQSFYNRKLGGKQDSDTKRKALNAVKFKLVLRMFAIGKQNRKWEPLDSKSSNEKLAIS

SEQ ID NO: 299637 - protein, 353 aa, unidentified
MDNGIRYVGLDVHRDSISVAVRTQAGKLVKEAVIPTQEAALLGWLRELRGPLHVVLEEGTWAAWLYELLSGRVAKVVVCDPRKITRHGNKSDRFDARELADLLRCNRISAVFHGETGLRSLRELARTYVVLTKEQTRTMNRIKALYRSYAIPCAGQSCYGPKQRTTWLAKLPHPALRERAKVYYQQLDSLRSLRQEVRQCLLAQGKKHKAYGNLRGIPFIGPMWTVLLIAFIQIPERFRTKRQFWAYCGFALETHSSGDHRWVDGQRQRSKKAPLVRGLNSNHHHILKWIFKSAAARACAQAGPFQDFHSGLVLHMRPEMARLTVARKMAAIVLILWKKGERFDAQRLKPQAA

SEQ ID NO: 299638 - protein, 349 aa, unidentified
MIARSDVACFVGVDLHKDTLTACVVRRTDREVTYKKIVCKCRDQVREFFSSLPRPSVVAIETVGFYRWLWTELEPLVDQLVLCDARGARALAGRRIKTDREDALNVALLLADGRLPLAWAPPEQVQLLRNWTRHRNGLTRQHAKVLHHVKSTLNRLNFAGPVRLDAAALQRYLLASVERFCADDLTMLWQHQRRLVEIEQDRAQSERRIVELMRAAEFAGLRGILESVPGVGLVTSATVIAEIGDFSRFVDSKAIGRFAGLAPTVYASGNSNRLGHISKTGSPDLRWALQQAAWTAIRCDAGFKKTWLRIAKTAGKKAAAVAIARKLLVLMWTLQRKDEPYKSRDPVAA

SEQ ID NO: 299639 - protein, 475 aa, unidentified
MNLKGTKKKNQVSNANIFEQQELLKKIEVVRENLTASTWHELETKGKFDKNAKLSFICDDMLILGCDVGSETHYLRAIDTRGRELSKSAFSFSNNVDGFSKAKEWAVKIAAEYDKKQIVLGLEPTGHYWFCLATWMISNGISVVQVNPYAVKQTKELEDNSQLKDDAKDPKLIANLVKDGNFGMPYLPEQLYADLRRLSMFRDQLNEDRIRSINRLHRELKIYFPEYKEALGKTEGTFSLELLKQAPFPDDLAALKEDGIRQIWHNAKLRGRGYSRAGEILEYAKASVGIREGKETGKLVVQWFVQKILELDEELALIETQINQKCLEIPHTDKVLEICGIGENTLSGMVAEMGDISRFDDVKEIQKLSGLGLVASSSGKHKGETRISHRGRKRLRYWLFQAAKSAVAHAEEFKKLHVYYTTREQNPLKKMQSLIAIACKLLRIIFTILKKGIKYDPRKMLKDIRRESRQESLAA

SEQ ID NO: 299640 - protein, 428 aa, unidentified
MKSPVVTGIDVSKNFSEVAILTPDNNIFSRMRVNHHLVDDYHKLLNLLKKAEKEFSVKPAIVLEATGHYFKLLFHFLANNGYDVTVINPIQTDSIKNISVRKVKNDKVDARKIAMVYRLDDVSTSAIPDEEIEMLRSYCRQYETLVTQRTSCKNRLIAIVDQIMLNYSEVFSDISCPTSLAILEKYPTPKSMINAERTEVIKLLASTASRDLKWASGKYDLLLAKAKAFDELSLSTKGNVMMLSIYIKMIKTFDSLIDQMVKGLEQLIESLRPEIKENIRLLCTIPGFGLITAAIVFSEIGDVKLFSSPDKLVAYCGLDPSVMQSGEFEGSKNKISKRGSPHLRRALYLVGINSIASKNGKVKNQVLREFYLQKCLKKRKPVAQIAVTRKVATYVYAVLRDRKDFVARSPEEHANLIQQKNQKSFKVA

SEQ ID NO: 299641 - protein, 315 aa, unidentified
MYLGIDVSKATLDCCLISDGLFFERKFKNSQAGFQDLKDWLKENGATERLHCCCEATGKYYEAAAEYLSKYYRMSVENPRKIKGFGTAVLQRTKTDRQDAKTIAQYCKALEPRPWQKPTEAQTKLRELTRYQHRLKRQKAAEQTKLQTAPAYLLPLIQSTITHLQQQIKAVQNQLNQFHKDNPDYKTQKERLKTITGIGEAAANSLLSVLIQKERFKSAAQFVAYLGLDPKENQSGTSLKGRPRISKLGNTHLRTTLFIPAMHAYRSRNFAKYVSRLQKNGKRPKVIIVALMRKLAVIAFTLLKNGQDFQVERYK

SEQ ID NO: 299642 - protein, 348 aa, unidentified
MQVTTLGIDLAKNVFCLHGCDANGKPGLRKQLSRRQLLSFVANLPRCLVAMEACASAHYWAREIEKLGHQVRLIAPRFVRPFVKANKNDASDAEAICEAASRPSMRFVAVKSTAQQDVQAVHRVRQQLIKTRTALVNQARGLLAEYGIVVAQGVSRLRRALPAILEDRDNGLSGVMRELLAEIGERLRFIDDRLRKYDLTIHRLFRQDERCQRVAAVEGVGPLSATALVAAVGNATDFKSGRELAAYLGLVPRHRASGGRTVLLGISKRGDRYLRTLLVHGARSALYRIERHRGARAIWAARLKLRRGANVAAVALANKNARVLWALLSRGQSYRPAPFPARVPQAGG

SEQ ID NO: 299643 - protein, 348 aa, unidentified
MDHIGIDVHKRDSQIYILAEGGEIIEQRIRTEPERFAAVLGARPRARMLIEASTDSEWVARCLEALGHEVIVADPNFAPMYATRSRKVKTDRRDARALAEACLLGAYRPAHRLSDPQRHVRGRLGVRDALVHTRTRYISVIRALLRQHGYGVPSGSAERFVDRVRGLPLPGRLRSVVAPLLAVLRPLNQQLAYSDATIEHLAVQDPRVPRLRSVPGVGPVTAAAFLAAVDDAQRFHHAHQLEAYLGLVPREYSSGETQRRGPITKAGHSRPRWLLIQAARSILRCRPPAAEALWTWALRIATRRGKHVAVVALARRLAGILYALLRDGTVYAPRPPAALPDSVAALHA

SEQ ID NO: 299644 - protein, 309 aa, unidentified
MKEQVVYLGVDIAKSYLDAAMGNEKCRFSNDAIGHRELIKWVKQLKAPVQVICESSGGYERAFVQAFARARLKISLVQANRVRQFARAAGILAKTDRIDAEVLCAFGKVMRPQRITAAKLEQEHLRELESQRRHLTHLLVMELNRGARVSDASVQRLNRSLVNQIKKQIEQLDLLIKRHIDQSDALSAKAAKLTSISGVGARTAALLLAQLPELGELNRREIAALVGVAPFNRDSGRMRGKRAIYGGRKRVRHGLYMAALVAARHNPILRAFYLRLRAAGKPAKLALTATMRKLLIALNSALKTDLSYA

SEQ ID NO: 299645 - protein, 391 aa, unidentified
MFYIGVDIAKKNHEASIIDSDGKIVSESFSFSNSIRGLEKFQKFISSFSIDSNNCIIGMEATGHYWLSLYSFLIDLGFSCVVINPIQSDAFRKMYIRQTKNDSVDSFVIAQILRFGEFSVSHFSDEDTFALRNLSRFRFALVDEASDWKRKLVCILDQVFPEYSSLFSNIYGVASKELLSKYPLPEDMISIPADELAKMLSKCSKGRFGIDKAKEIQEKASNSFGVKFALKSFSFQIKQIIAQISFLEDQIADIEDEISSMINSLCPVITSITGIGDVLGAAIFSEIGDVSRFERANQLVAYAGLDVAVKQSGNFNATDTKISKRGSPYLRRAIWLAASVAAFKDPALSVYYQKLRQRGKAHGTAIGAVARKLTNIIFAVLRDNKAYIPNI

SEQ ID NO: 299646 - protein, 434 aa, unidentified
MRKEITMSENSTTHPEPEFVAFVGIDWADQKHAWCSQRAGATQREHGEVEHTPEMVDVWVSQLAQRFGPGPIAVAVEQRKGALVYMLSKYECLHLFPVPSTMSASMRKSLYPSGSKDDPRDAELLLDLLLQHRNKLRRLMPDDEVTRRIQNLVEERRNLVDEKTTQLNRLTGYLKVYFPQMLEWFEKLDTKLVCDLLERWPSLEELQKVPPAELRKFFGQHRGRHQELTERRLEGIGQAMPAIRDRAVLEAKRAMVQVSAQLLRILLEGIANLDSKIEEAASAHPDFFIFESLPGAGSALAPRLLAAFGSQRDRYGSAEEVQTHSGIAPVMEKSGKKKWVHFRWACPKFLRQSFHEWAGHSISQSTWARAYYQQQRGRGKDHHAAVRALAFKWIRILFRCWQDRVAYDENKYLAALARRGSPLSSVLTVTAATL

SEQ ID NO: 299647 - protein, 343 aa, unidentified
MQSISTIGLDIAKSVFQVHGVDAAGQVVIRRQLKRRFMLSFFEKLPPCLLGIEACASSHYWSRELQALGHTVRLMPPAYVKPYVKRQKNDTTDAEAICEAVTRPNMRFVPTKTVEQQSCLMLHRARHLFIRQQTAVINSIRAYLAEFGIVAPVGRRGVEQLLEVVADTADHRLPEAARACLAALGSQLRTLKAQILEFDRRIIAWHRSSATSKRLDAIPGVGPALATALVASVADAKAFRSGRDFSAWVGLVPKQNSSGGKDKLGSISKQGDRYLRSLFTAGALAVIRYAKIHGTGHRPWLTALLARRPTKVAAIALANKLARMAWAMMARNERYKEPAALTA

SEQ ID NO: 299648 - protein, 462 aa, unidentified
MPERNDRETGESNRRQLQGLAVIRRNVAGVDLGSERHWVCAPTQDGSGREIASFGATTPELLRLAEWLKARQVESVAMESTGVYWIAPHEVLEAQGLQVLLVDTRQLARVPGRDKKTDPSDCEWIQRLHSCGLLRGSFRPEEAVCMLRTLVRDKANLVAESGDWLRRMQKSLDQMNVRVHRAVSDIDGVTGMAILRAIAAGERDAQKLAQLRDRRCNKTQQEIAEQLSGHWREDHLFSLQQALKMYDAVQERIAAYEQEILRQLEEMEEPGQGGETAPPLTNANKAKAIKRRGQEAKRQALYRMSGVDITQIDAIGVETVEVVLSEYGPDLSRFPTEKEFVAHVTLAPRVPRSGGKPLKKKKRNSASTRVAAALRMAALSLRHSQTALGAYYRKLAQRLGGDVAVFATARKLATLIYRLLRWGQPYMDEGIEAYEKRYRQQRVKSLTAKAKDLGYQLTPLNA

SEQ ID NO: 299649 - protein, 413 aa, unidentified
MEKVYDKCCGIDVHKKLIVACFKCGKKQEVREFGATTRELLNLADWLGSGGCEMVAMESTASYWKPLYNILESSGLNAMVVNARHMKAVPGRKTDVRDAEWIADLLQHGLLQASYIPDKDQRELRELVRYRKSLVGERTRELNRLQKMLEGANIKLSGTVSDINGKSARSILEYILTGESFDDAKYDEMYGNKIIAHNLKATKEQIIDDLNGVMSPLQRKMMRTLLKHLDELNSHIHELDDDIDSFMKPEEKQASAAIQDVTGIGNTSAQAVISVIGTDMGRFPDDAHIASWAGLCPGDNESAGKRKSGKTRKGNALLRETLVNCAHAAVKNKKSYFYAQFMRISAHRGKKRAYVAVAHSMLVAIYHILKDGVVFKDLGADYYNQFNKERKIKAYLKKLKALGWEDSAAGQPA

SEQ ID NO: 299650 - protein, 346 aa, unidentified
MAIMRVGVDLAKQVFQLHGVDERGKGVLKRKLKRSEMVEFFQQLPPCMVAMEACGSAHHWARVLSAMGHSVKLIAPQFVKPYVRGNKNDANDAAAICEAASRPDMRFVPPKSAAQQDIQALHRVREQVAGQRVAKANQIRGLLAEYGIVVGLRIAVLRQQLPLILEDGENGLSGDFRQLLGELHEELVTLEDRLATLDERLERQARENPLMRRLMQLRGIGPVIASAIVGAIGDGREFKSGRGAAAWVGLVPAHRGTGGTVRLQGISKRGDSYLRRLLIHGARAVVAQAHRHHDRLSLWVMALKARRHANVAAVALANKTMRMAWALLSRKCDYDPDHGLAAAEQG

SEQ ID NO: 299651 - protein, 311 aa, unidentified
MYYIGIDVSKKDLSVFDGKDLNFINKEGLKSFKKYLKKKYHLSEIAIIFEPTGIYSQYLKEFCAENSIKAYIINPKQSHNFARALGIRPKNDKIDARTLYKFHKLIETKDIKVPKIDQQAKTLSGYLVSYEFALKQRVALSNHLESLRDKRLITLMKKDLKRAKKLEDKLFHDILEYVSKNQNLKEDYQRLLTISGVGDKTAIALLTLFKTYQGTNRAQITALAGLDPVKRKSGTSVKYKVKISKNGKGIYRKIFYLPTVCATVHNQKIRVFYQRLLANHKIKKLAIIASMRKMLLIAHAMYRDKTEYVAI

SEQ ID NO: 299652 - protein, 383 aa, unidentified
MRAVCGLDVHKDTIYLCILCETGEIFEHVYGVLTCELKTMCREMKRRGVTEVTMESTATYWIPIWRVLEPHFRLKLVNPYFIKQLPGRKSDVKDAQWIAECTLKDLVRGSFVPPERIQQLRQYDRRIFDLDAEIVRKLAKLDGIMQRCNIRLSNYVSNTDTKSYKNVVDKLCEGVTDPEELIKEIHGRIINKHGRETILASLTGVVSEAEKDTMRQLRQELTLAEEHKQECQNKMVTICKTYYPKEFKRLMTIPGIKERAATSLIAEIGVDMTKFQTAAHLASWSGLKPRNDVSNGKYKSRRITHGNVYLRKTIIECAWGASRTKDCFFSRFSYHQTVVRKKSKMKVLVAVARKLLIAVWHVLHDETDYVDFNPDCKAPATNG

SEQ ID NO: 299653 - protein, 340 aa, unidentified
MSLVLQSLLPFPDSCQGMSPHQQGRGTKMTEHCYGGIDVSKDRLDVMVLPDRKSFSVDNNAAGYSELVKRLRGLSIAAIGIEPTGGYERAVIRALLAADLSVRRINPNKLRQFGRARGVLAKNDRLDARLIAEYVAIMPTRVVQRDPATEQLAEVVTMRRQLCDEHVAVENQTAHLEDAMLRRLNKRRLARLAADILLLDRRMAQIVASNANLTRRYELLTSMQGVGPTLAFTLVALLPELGQMSRKQIAALVGLAPYDFDSGRLKGHRCIYGGRLPVRNVLYMAALSACRYNPALKVFHHRLAATNKKPKVIIVAVMRKMITTLNAMLRDNVAWQPKSA

SEQ ID NO: 299654 - protein, 478 aa, unidentified
MQDRRLVGIDLGITSAHTVRVLAGDGGLVCRRKAVPTVESLGEVEQAALAGAAAGTRLEVVVEPTGPAWLPIAVFFAARGHTVYRVSSAKAHDLRRFLRRHAKSNGIDADTLARLPLVDPAGLHPLQLPDAARAALDRRVRACDRLTRQAADHKRRIKGLVRQLLPASPLVGELGQADLAVLERWADPQALVAVGRARLQQVLASASAGQQGAQRAEQWLAAARAALELYGDHPAIAWQDLAAEVTSEVRLLRATQAELAAHAREREACYRRVDPAALARSLPGLATIGGPALVATMGKASRFATAGKFRCFTGLAPKASETGQTDRKGQPISKAGNRLLRTTLVRAADHARRQDPQLARIYWTQMVQRGKDHLGAVCVVAAHLAERAWTVMDRATPYVICDTDATPVTPAQAKQIIAERWTVPEEVRRRRRHKKGKAPQQVLQGHVHGAQGATRRPSPSSATLGQPPSRVKPTQPQP

SEQ ID NO: 299655 - protein, 323 aa, unidentified
MNKDIKYFGLDISHLVFDVTDSDGDYHQFKNNVSGFKKFIKLLNSYSHCVMEATGYYHYQLAYYLLENSIAVSVENPLAVKRFIQMKLSKIKTDKSDSKLICEYAKQVELKLWLGNSKQQIECLQMTRLLSVYTKQITMLKNKLHGESVLGEPSKAVVRSLKRSLKQLAKEIKNLEDKLLVLVKQAHQDLLTRLETIPGIGRKTAIMLAVLTGGFERFSSASELCSYAGLTPVIRQSGSSVKGRPRISKIGNQKLRNLLFMCSFNACKYNKSCRDLYERIVAKGKSKKLALIAVCNKLLKQVFAIAKSGLIYYEAHRSTLVEN

SEQ ID NO: 299656 - protein, 397 aa, unidentified
MIAIGIDVSKSKSTIAILNGDGTIRVKPFDVHHVADELQALVDYIKRISEPPTILMEPTSHYHYPLLKAFQEADLPVCLINPYQMKKYGDTELRKAKTDKRDSLRIAQYALEKSYSLVPYTPADQKYDDLRFLSRQYGQRISTLTVAKVQLLSLLDETMPGITTILPLKSRDPDNCVLLRFIKRFKSFDVIRKMGKTRFLDSYQVLVKKTNDRFAGAKGLAIYELAFNSITTRGENPLSAMTQDQCVDLVSTSQKAADEINLQMRIIAETIPEYKVLRSMAGVGDRLGPIILGEIGDIRRFHSGKALNAYAGNDAPPYQSGQFESRNRHISKRGNPALRKACFEVMQALKLTKPQDDPVYLFMLKKEQEGKPYNVAKMAAVNKFLRIYYARAMELYK

SEQ ID NO: 299657 - protein, 386 aa, unidentified
MQKLNDLSRSLTALEPDGTLIAVIEMSLSSWLVAGIVPGVERQPLKKLAVDESALLKLLHRWREEAEKAGRRIERIAVAFEAGRDGFWLARWLKARDIEAYVIHASSVAVSREHRRAKTDRLDTELLKRSFLGWLRGERDHCKMVEIPTMKDEDAKRPNREHDSLIGERSRIVNRMKAALVRLGIRGFNPKLKRATTRLDGLRTPEGEPIPPNALAELRRDMERRRLVNNQIRQIERERLERIEQAPCDGPHVMVRLLARVMGVGIETADMLVHEVLSRNMRDRRAVARYAGLTGSPDESGRKRREKGLARSGNVRVRRGMIQLAWRFLLHQKNSALTKWFRSRTENARGTRKPMIVALARKLLIALWRLVREGIVPDGVVLRAAQ

SEQ ID NO: 299658 - protein, 343 aa, unidentified
MQAISTIGLDIAKSVFQVHGVDDAGEVVIRRQLKRRYVLAFFQKLPPCLVGIEACASSHHWSRELKALGHTVRLMPPAYVKPYVKRQKNDAADAEAICEAVRRPTMRFVETKTPEQQSCLMLHRTRHLVIRQLNAITNALRAHLAEFGIVAPVGRRGVEELLNVIADAKDTRVPEVARACLAALGEQLCVLKAHVLKFDRLITAWHRSNETSMRLDALPGVGPALATALVASVPDPKAFRSGRNFSAWVGLVPKQNSSGGKQRLGNISKQGDRYLRSLFTAGALAVIRYAKIHGTGHRPWLTALLARRSTKVAAVALANKIARMAWAMMVRGERYREPVALAA

SEQ ID NO: 299659 - protein, 418 aa, unidentified
MKVVYPTCCGVDVHKTFLVATLITSPGITPHYSKKRFSTFNNSILQFKQWLIDNNCFDVCMESTGKYWVPVYNLLEDTIRITVANPKWVKAVKGNKDDKKDSKWIGDLFRLGLVPGSYIPEKPIRILREYTRYRFKLVSCRSSEKNRFQNAFTVCNVALDAVVSDMFGKSATSITDYLISSDTFYPEYCTYLLRKSLKKKADTVVESIEGYQMTQAQKERMIMVRSHLDYVTKSIAELDEKLDKLVEPYESALNLLCTIPGVNRGSAITIISEIGTDMSQFANSKRLCCWAGLTPGNNESAGKKKSVRITRAGVYLKPALVQVAHAAVKSDKAPYYKIKYERIYKRRGKKRAIIAIARMILTAIYNMFVTGEVWNPSDLYKIDMPQEMVDKQKEKAIKQAVKLLVSNGVIKAADISVA

SEQ ID NO: 299660 - protein, 352 aa, unidentified
MTVTIVETRAQARAITGGVDTHADVHVAAALDPVGGLLGVQEFPATPAGYACLLGWLGGFGTVCLVGVEGTGSYGAGLARHITAAGVRVVEVDRSDRQDRRRAGKSDPLDAVSAARAAQSGRAAGTPKGQDGQVEAIRALMVAKRTARSERIQTINQARALIVTGPDDIRIRFGQHVTDALVAELAALRPRPGSMIRYHTLLSLRELGRRVAFLDGQLQRLDALIVPLVTARAPGLLGLYGVGHDTAARLLIAAGDHPERLRSEAAWAHLCATAPIPASSGKVTRHRLNPGGDRQANHALYRIVVTRMSSHPATRAYVARRSKEGLSKKEIIRCLKRYVAREIYPHLRPGPG

SEQ ID NO: 299661 - protein, 315 aa, unidentified
MNQELLVVGIDISKNFLDVFVSGSVTLQRYANDAPGRAQLAIDMLALVPHLIVAEATGGLERLLIAELAAQKLPLVLVNPRQVRDFAKASGQLAKTDALDARVLAAFGIAIRPAIRPLPDEQALELADLVGRRRQLVDMMVAEKLRLQQAVGKSLRRDIKLHIQWLEKRLRASDTGLNDAIQKSEIWRAKDDLLAEVKGIGPVCRITLLALLPELGLLNRKQIAALVGVAPFNRDSGYYRGTRRVWGGRSEVRKVLYMATLSAIRSHNEVVYSFYRRLKEQGKPGKVAVVACMRKLLTILNAMLRDQAHFRPQVT

SEQ ID NO: 299662 - protein, 356 aa, unidentified
MSRDTKYIGMDVHKEAIVIAVLNDSGKLVMESIVETQASSILQFIYGLRGELHVTWEEGTWAAWLYDLLEPYVHEVLVCNPRRNALLKEGSKSDKVDARKLADLLRTGMLRPVYHGENGLRTLRELARSYQTISKDLNRVMNRLKALYRGWGIACSGTQVYAARYREEWLHKIPHAGVHRRAEVLYQQLDGLQALRRTLRPELLAESRKHKAAKLLRQIPCIGPIRAARLLALMQTPHRFRSKRQLWTYSGLGIETHESAQYRYVRGQLQRSKKPQQIRGLNQNHNHEMKEIFKGAATRASCGVGPLRDFYVALLDKGMRPEMARLTLARKIAAIALTLWKKEERFDAEQLKPQAA

SEQ ID NO: 299663 - protein, 370 aa, unidentified
MLNTTTFVGLDVHARSIKAVALDAMTGEVRSATFAYDAAAVAEWVRSLDPAAKCVYESGVTGFDLQKRLAALGVDCVVGAVSKMIKPSADRKRKNDRNDAEFLARMLSVGNVVEVWVPDDECEAARDLVRALDDAREDLKRCKQRLSKFLMRHGYAFSETTPTGRRKGNWTAAHWAWIKSISFPEKADGDALAYYVDAVRQAMEDKARLERLVEAEASKPRWKRRVDSVRCLKGIDVTSAADLVFEAGEFSRFKSARSFAAWLGLTPSEHSSGESVRQGGITKAGNKHLRRVLVESAWHYLGCSPHSKDLAKGQVPDPAARRHAAKGVRRLVERRRAMLERGVHKNKANVATARELACWCWAVGRMIENG

SEQ ID NO: 299664 - protein, 411 aa, unidentified
MQVIYERCCGLDVHKRTITACRLRWLGGGWEKEIRQFGTMTKDLLALLDWLVKEGCTQVAMESTGVYWKPVYNILEGQVELLVVNAQHLKAVPGRKTDVRDAEWIAELLAHGLLRGSFVPPPRVRELRELTRYRSSVVRDRARTVNRLQKVLEAANIKLASVVSDIDGVSARLMLEGLVAGQRDTEQLASLAKGRLKEKHAQLVEALACRLQPHQSFLIAEHLAQIDYLEGAIERLSGQIEEKLRPFEQQIGWLDTIPGINRRTAEVLWAETGGDMGRFASARHLASWAGMCPGNNESAGKRRSGRTRKGSPWLRHCLVEAAHGAAHTKNKYLRSQYHRIAARRGKKKALLAVGHSILVIAYHLLTRKQAYVDLGANYFDERDRQAVTKRCVNRLQKLGYQITLEKLQMAA

SEQ ID NO: 299665 - protein, 399 aa, unidentified
MFIGIDWATDAHEVCAVDASGTIRHRATISHSQDGLDRLVGYLGRWAATGELLVGIERPEGRLVDRILEAGYPIVLIPTFAMKDFRRRYGIGGAKSDRGDCYVLADVTRTDGHRLRRLEPLSPQTRALRAVVRTRDDLVDQRRALANQLRATLEAYWPGAAAIFADVDSEICLAFLERYPTPASAARLTQARLASFLTKAGYSGRRPAAQLLARLTAAPAGVLGVEAEARADAVRAMVRVMRALLGSIKDLDRSVVAHLGEHPDAEVFTSLPRSGQINAAQMLAEWGDCRQAYPQADSVAMLAGLCPVTHASGRHRDVSFRWACNKRLRQAMTTFANNSRRTSPWAAEVYRQAIARGCDHPHAVRILARAWTRVIWRCWQDRTSYDPARHRAARRLKAA

SEQ ID NO: 299666 - protein, 339 aa, unidentified
MQIHSVGIDLGKTTFHLVALGAAGKVLVRKKFTQKQLLTFTANMQTSLIGLEACSGAHFLGRALRKQGHDVRLIAAQFVKPFVKSNKNDFVDAEAIAEAVERKNMRFVPIKTDDQLDLQAIHRVRDRLISRRTAVINQLRAFLLERGMVFAQRPAKLKAAMADILENAEADLTPQMRNLIDMLWGEWKLVEHQIEELNDELERISASDAGCTRIRQIPGIGPVVATAIVAAIGNGAAFRKGREFAAWLGIVPRQYSTGGKAKLLGISKRGNVYLRKILIHGARAAVLRIKRDRAPIGAWLDALDARAPKNVVVVAMANKLARIAWAVLSSGNDYRPVAA

SEQ ID NO: 299667 - protein, 346 aa, unidentified
MTGLTIGIDIAKRVFQVHAIDNATGEVTSRKLARRDFLAHFEKLPPSLIGMETCGSAHHWARELSAMGHEVRMMNPMYVKPYVKRGKNDVVDAEAICEALTRPTMRFVAVKTVEQQSVLAVHRTRALLIRQRTMLVNALRGHLAEFGIVAPLGIERVPELIDRVMGREGDGVGITPLVRSVVALYAEQIEKIREQIRKLERELRIWHRTSEASRRVASVPGVGTVTATAIVAAMPDPSTFESGRAFAAWLGLTPRLSSSGGKERNGRITKAGDRHLRVLLVLGATSVLRRVRSGQPTPLYGWVKKLLDRKPPRLATVALANKMARIAWAVMARKTNYQPKLAAAVA

SEQ ID NO: 299668 - protein, 412 aa, unidentified
MEVLHPRCAGIDVSKKDAKVCVRIQGSTRRKTSSTVTTWGSMSNQILALKDHLLAAKVTMVVMESTSDYWRPFYYLLEDDFEVMLVNARDVRSLPGRKTDVSDAAWLADLAAHGLVRASFVPPEPIRRLRDLTRTRTHITRERTREIQRLEKLLESARIKLSVVASDITGVSGRLMLQALIDSQGTADPAVMADLAKRRMRSKIPVLTEALNGHFTEHHAFMTRLFLDRIDAHTKDIELLSQRIDELMTPFLPARALLESIPGFSQVLAEIFIAETGGDMTQFPTAAHLASWAGVSPGSNESAGRVKSTKTRPGNRYLKGALGIAALNQARSKRTYFSAKFRHLAPTRGPMKAIVAVERAMLVAAWHMLTNGDSYRDPGADYYTRRDPARTKARAVKQLEALGYTVTIQQAG

SEQ ID NO: 299669 - protein, 345 aa, unidentified
MALYVGLDVSLRMTSICVVEADGSSVWEGKAESEPVPLVKVLSPWRDKIALVGIEACPLSEWLYGALVESGFQIVCIETRHAQRFLSSRPNKTDRSDARGIAEMMRLGHYRSVHVKSRASQLLRTTLIARKKFVDHMLAIEDTIRGLMKVHGLKLGAVHRSRFAARVETLLADADDLRMAIGPLLEARNMMRKHKALMDRQLSQMARKDHVCRRLMTVSGVGPLVSLSFKATIDDPNRFKDSKAVAAHLGLTPRVYQSGEIDRSGNISKCGDKLMRHALYEAANSHMRISKKWSTLRAWGVKLAKRIGSRKACVAVARKLAIIMHRMWVEDTDFRFGKPPVTQPT

SEQ ID NO: 299670 - protein, 401 aa, unidentified
MKEFNAEAVRIETASALETVRAAQADRQYPAYIGLDVHKQTIVVAVARAGRDAPESREEIANKPKTVAKLVERLNREFGGEVLLFCYEAGPCGYGLYRQLLALGQDCQVVAPSLIPKKPGERIKTDRRDARKLAQALRSGDLTAVWVPDEEQEAMRDLTRARDDLKAQERKARQQLNAYVLRHGHAWPSNKTRWTQTHYNWLESLKFAHDWQQVVLQEYIDAAKAGSQRVADITAQMERVLPQWSLSPVVDSLVALRGIDKLAAMVLLAELGDISRFDSPRQLMAFLGLVPSEHTSGGRRRQGAITKTGNSHARRMLVESAWSYRFPARQTAHLKRKAASASDEAKVIAWRAQKRLCGRYRTLLQAGKNTKQTTVAIARELAGFIWDIACHEMPKVQRAVR

SEQ ID NO: 299671 - protein, 468 aa, unidentified
MKRKSRRAKCQKVSPFDGELKLIEPDAAAIDVGSRSHWVAVNPQRDSNAVREFGTFTTDLSRLADWLAQCEVKSVVMEATGVYWVALYELLESRGFKVYVVDAHTVRHLPGRSKSDVKDCQWLRRLHSYGLLRGSFRPPAQIRQLRNYLRSRTKIVEAAAQQQLRMQKALTLMNIQLHHVISDISGLTGLSIVRAIVGGERDPKPLARLRDPRIRASKETIQKSLEGNWQEELLFDLKIALDSYDHFQGQIAAYDEQIRRELKEVQSKVDVLNEPLPAARPKACRKRPGMSQQEQLDLREELYRISGVDLTRIDGISLQTAQKVFFEIGTDVSAWPNEEAFSCWLGLSPNHRISGGKVLKRSSRKVVNPLSIALRLAARTLRNSHSALGANFRRLIAKIGMPKAITAMARKLAVLIYRMLKYGTQYVDKGMAHYEAKYRETKLQYLRSQAAKLGMVLIPNQGALTAAP

SEQ ID NO: 299672 - protein, 385 aa, unidentified
MKNTIVQDEGATSLEVAVNRIRASGSIIKIGLDVHARLYVAVAQYDHLLPKPARRLAPSQFVPWVEQLLGAGHTVHVVYEACGFGFGLYRQLKKAGAHCYVIAPRKLDEQCTRVKTDPRDATTLCQRLSRYLDGNTRELAVIRVPGEEEEQARHVSRQREQLVHLRQKLEAQGRSLLISHSLPSPAHWWKNQTWSRLSKLLPAWICIRLEVHRPALLALQQQISLLSAEMEAAAPGDVPAGVGKLTTVIITREICSWERFSNRRAISCYTGLCPGERTSGSKRVPGSVTKRGNPRLRAALVECAWRMVRFQRNYPPVKKRLAILAKGARTTGAQRKKAIVAVARHLAVDLWRIHTGRCSAAQLGLSSADTLPVRGEQKGGANLPG

SEQ ID NO: 299673 - protein, 465 aa, unidentified
MTPHKDFFLDPRPPVPTLPPPSVLSEALQVCNPHAAGIDIGEAEHWVAVPPGCDPQPVRRFGTFTADLDALADWLIDCGVTTVAMASTGVYWIPLFELLEARGLQVLLIDPRQAKRAPGRPKTDRLDCQWLQRLHAYGLLAGAFRPADQVCVLRGYLRHRHMLLTYAAHHIQPMHKALQQMNLKLTHVVSDLTGVTGMAIIKAILAGERNPVTLAKLRNPHCQHDEDTLAKALQGNWRAEHLFALRQAVELYEVYHQQMAQCDQQIKTHLETFGDKSAGQPLPPKARRHKKINAPRFDARTPLSRMAGVDLTTIEGIEEGTALVILSEIGTDMTRWPSVKHFCSWLGLCPQHKISGGKVLSRRVRPGAHRVTVALRLAARSLHHSQSALGAFFRRMKARLGTPKAITATAHKLARLVSSLLQHGSAYVQQGLDAYEAHYHERKVKAMAKQAKALGYTLVSLAAQG

SEQ ID NO: 299674 - protein, 355 aa, unidentified
MESTKYVGLDVHQEATTIAVMNSAGKLIMESIVETKAITIRQFIQGLHGDLHVTFEEGTWAAWLYDLLKPYVTKVIVCDPRKNILLKVGNKSDRIDPKKLAELLRNGALSEVYHGENGVRTLKELARSYLTISKDLGRVMNRVKALYRSWAIPCAGTQVYALCHRSEWLSKITEAGVRRRAEHYYQQLDALQSLRREVRKDLLLESRKHNATKLLRQIPCIGPIRAAQLVALMQTPHRFRTKRQLWTYSGLGLETRDSAQYCYVEGQLQRSKKPQQLRGLNSNHNHDLKNIFKGAATTASVSAGPFHDFYQALLTKGMRPTMARLTLARKIAAITLIVWKKGVRFDPQHLKQQAA

SEQ ID NO: 299675 - protein, 350 aa, unidentified
MLIIGCDYHPGFQQIAYIDTDTGELSERRLAHREEAEQFYRELKQQDLAVRVGMESSGHSRWFERLLQELGFELWIGDPAEIRTKRVRKQKTDRQDAQLLLRLLMEERFPRIWVPDAENRDLRQLLWHRHRLVQMRTRVMNQLHVVPLNEGLRRKKALWRPAGRKELESIALAPWASRRRQDLLDLLDQLTPKIQELTRALEEEVEKRPVTRLLMTHPGVGPLTALAYELVIGTPQRFHCGKQLASYVGLVPEEKSSGDRRRLGHISKQGNVLLRFLLVEAAQVTVRSQPEWRSKFFHLAMRRGRKIAKVAMARKLAVHLYWMWRQGCDYGQTQKLGSHAGEPGNPDGEQ

SEQ ID NO: 299676 - protein, 373 aa, unidentified
MPRYSTAFGMDVHLRSTTVCALDAETGEAVTRRFRGNPWGEVAEWMSGFPGPSLAAYESGYLGFAPQRELSGLGVDCVVAAVSKVPRSAADLSSKNDRSDAARMAKAILSHDVTPVWVPSPEIEGLRDLAAAHDAATARLAAAKQRLLAFLARRGYAYGGTTPAGNPRKYWTYGFLRWLDGIHPDDDGGIRALAALRNEVEAADETREALLAEYRAAVAAGPLSAEVEALQSIKGCGFALAAAFASEVGDFSRFRSGRQVTAYFGLAPKQRSSADSVRLGGISGAGNALVRRLAVEGSWRYAQAGHQPKLMPKGSGVPLEIRMHGRKGSERLLRRREEMLERGMPQAKANAATAAELVRWLWALGTMCREAGE

SEQ ID NO: 299677 - protein, 346 aa, unidentified
MEYYVGIDVSLELSSVCVVDGRGKIVKEAKVASEPEALVCFFNELGFPVDRIGFEAGPLSQWLHAGLTQAGFETVLLETRHVKAALSAMTVKTDRKDACGLAQLLRMGWFQPVHAKSIGSQEIRALLVARKQLLGRLLDVELSIRGILRGFGLKVGQVTRKTFEARIRELVTGHTTLERIAEAMLSARATLQAQYAKLHKAVLAIVGEDAVCRRLITVPGVGPVVAVTFKSAVDDPSRIAKSKAVGALFGLTPKKYQSGEKDVTGAITRTGDEMVRTALYEAANVLLSRITRFSKLKRWGMDVAKRRGSKRAKVALARKIGVILHRMWIDGTTYRWAEAKPIAAQA

SEQ ID NO: 299678 - protein, 296 aa, unidentified
MKRIKFVGLDVHAETISIAVAEQGGEIRSQGVISNREESIRKLVKKLGPVEELRFCYEAGPTGYALYWQLTRMGAKCEVVAPTLVPVKAGDRVKTDRRDALKLARNYRAGELTAVWVPDAAHEALRDLVRAREAAKQDELRARHRLSKFLLRHGRRPPMGVKAWSMKYLEWVKREVHFEQMAQEATLLDYLHEVEHGAARIARLESAITEAVKSAPPQMRAVIEALQALRGIAHVSAVTVVAELGELSRFTRARQLMAYGGSVPSEDSSGERSRRGNITKTGNAHLRRVVVEAAWA

SEQ ID NO: 299679 - protein, 375 aa, unidentified
MNNNNTLYVGLDVHKESITVAYAINSEPVELMGKIGTSPTDIQNLCKRLRSKSSQVSIVYEAGPCGYGLYRRLVKSGFDCMVCAPSLIPKKPGERVKTDRRDAIRLVRSLRAGDLSAVYVPGIEDEAFRDLARAWASARDDLRHARQRLKSFLLVHGVHYVGRADWGPAHRRWLSKYSFESPWRQLAFDEHRRTIEDRLAQCERLESALKKAVTEWRLYPVVEALQAMRGIQFITAVGLISELGDLTRFEHPRQLMSWFGITPSEYSSGGSRHQGSITKAGNSYARKLLVEAAWSYRHPARISPAIQKRQENLPRPVIDRAWDAQLRLCKRYRKLQAKGKNVNITIVAVARELAGFIWDMGRIAMSVAQQPQCHK

SEQ ID NO: 299680 - protein, 357 aa, unidentified
MLSSNVKYIGLDVHKEAIAIAVLNGAGKLVMESIVESKASTLLEFLDGLRGQLHVTLEEGTWAAWLYDVLKPHVQEIVVCNPRRNALLKEGSKSDRVDARKLAELLRTRMVRAVYHGEHGLRTLRELARSYLTVSKDQKRVMSRLKALYRSWGIPCAGRQVYAPRHREQWLSKIAHAGVRRRAELLYQQLDGLLVLRHTVRGELLAESRKHQAVKILRQVPAIGPLRAALLLALMQTPHRFRSKRQLWTYSGLGVETHDSAQHRYVDGQLQRSKKPQQIRGLNQNHNHEMKEIFKSTALSASRLAGPLQGFYAGLLAKGMKPDMARLTLARKIAAITLTLWKKGGSFDAEHLKSQAA

SEQ ID NO: 299681 - protein, 343 aa, unidentified
MEKISTIGLDIAKNVFQVHAIDETGKIVVQRRLKRLQVLSFFEKHPPCLIGLEACATSHYWAREIEKLGHEVRLMPPRYVKPYVKRNKNDMADAEAICEAVTRPTMRFVAIKTAQQQSVLMLHKTRQLLIRQQTMLINAIRAHLAEFGIVAGIGRRGVEKLEAVIEAGEDDRVPPTALKCLMVLRDQLAVVKRHILDVDRRIMNAHRSNELSRRLAGIPGVGPLIATALTTSVPDPHIFRSGRDLAAWIGLVPKQNSTGGKQRLGHISKAGNRYLRTMLVVGALSVIRRAKQLGYTRRPWLARLLERRSTKVAAVALANKIARIAWAMMAHGTYYQEPAAQAA

SEQ ID NO: 299682 - protein, 359 aa, unidentified
MTTTYYIGADVHSNSTELVIEKRNKIVARYSVPTTIPAISNVLDSLQGKKYIAIEEGPMAGWLYRNLNKKVDKFIASDPRRNKLICSDGDSDDRIDATKLASLLRGNYLRAVYHSDDDQRSELKHWVALYHDRVRDAVRHINKIRARCRMHGLQIPRLVLRDSSRRSHWLSNIKHHALAKQLNMLWIGYDATAKQTRVAKQQLIALSKKYPIVHFWKELPGIGLIRATTLFAFMDTPWRFKQKNKLWKYCGVGLQRSASGTDKKGRPKPARLQLPWAVNRTLKNAALGAALSAINQKSNAFKDYYERMVQDGVITSNARHAVARKLLTVMWGMWKSNSQFNENLLCIELSRTTASALSR

SEQ ID NO: 299683 - protein, 404 aa, unidentified
MDDRTAGIDLASEEHRLVIVEADGRRLEQRRFAHSEQDVAGLVRRLVELDVARVALERPNGLVVDRLLEAGVAVVAVHPNQLAASRDRYRSGGGKSDGFDAYVLAELARTDMHRLRLLEPDGDETRALRALTRAREDLVEHRVALANQLRAQLEAFWPGAARIFADVDSPIALAFLERYPSPSDARTLGEKRLAAFLARNSYCGRRNASELLERLRSAPQARAREHEAEARRQVVLALAAALKPLVAQIRLLTSEIRGLLTDHPDGQIFRSLFRDPKSIVTAAELLAEIGDRRDRHPASSSLEAIAGQAPVAVESGKKKVACFRWACNKTLRSAVSVLADSSRKHNPWAREIYQRARARGHDHPHAIRILGRAWLRVIWRMWQDQTPYDPTRHGNLQRLLAAQG

SEQ ID NO: 299684 - protein, 355 aa, unidentified
MNVLNEQSIVVGVDVHKYNHTAVAMNAWGEEKSSLEFSNNDLDAYTNWLNRLGTKENIIVGLEDVNSYGIHLVRKLRDEFFHIRYVPAILTERERRQSTTRQKSDEVDAKRVGKVLLTKYEATLPAKESIANDRELNTARSLDLLLMERRDLVKHKTIIKNQLHGLIHQYYTENYRTICPRSFTKKAIKWFLNDLKDKKTILSTSISRRLERLLLVENQIYMISKEIAIIANRSKEALSLTAIHGCGIVTASAIIAEVITIKRFESKHNFSMYAGVAPTPHSSGRKQKMHTNPFGNRQLNKALHAIALSQIAIKGDPTGKEYYQRKLKEGKTKLWALRCLKHQIAKRVFQTLKYS

SEQ ID NO: 299685 - protein, 348 aa, unidentified
MVRFVGIDISKAKCRAAIMDPGGVILEEFTFTNNHEGIEGLASMLTLDDRVVMESTGSVWTNLYNHLDEKHIPVALANPLKTKAIASAKIKSDKVDARILAHLLRSNLIAESYVPPQPLREIRALVRHRVAIVKIRTMVKNEIHALIDKHGLEHEFSDLFGKHGLEWLRSLQLPPLDRLILDNHLTHLESLNQQTERVDEEIHSKAVEDPDVRLLLSMTGIDVYSALLIRSEIGSVERFPDYKKLVSWAGLAPSLHQSGSIEYHGSITKQGSRMLRWIIVEAARVAVNHDARMRSFYERVKHRRGDQKAIIAVANKMLKIIWFMLTRREPYESRNERRYQQKLNSIAA

SEQ ID NO: 299686 - protein, 321 aa, unidentified
MTYYIGCDAHKHYSLFAVLDDEGQLRQQIRVNHAPSAIKDYLSQFPEGTPVALETVGNWYWIVDEIEEAGCIPKMAHAAKAKVMMGNVNKTDKLDARGLATLERLGTLPVVWLPPGDLRDERDLPRTRMAISKIRTALKNRIHSTLAKYNLSLDTSSDIFVPKWKGQLLHAFKALPPETRRCMEQELELLDHVKDHIKRLEERILERVEFTKTIQLVKTLPGVGKILSIVIEREMGCVDRFPSSENFASYAGTTPKVKASGGKFRYGKMRKQSNNYLKWAFIEAANVVVRHRNHPKWRDKHVSRLYERIRRRKGHRSSSLT

SEQ ID NO: 299687 - protein, 475 aa, unidentified
MANLGGRAQKGVPMKKQEAEGSTSKRRQLQGLPLIRTDVAGIDIGSERHWVCAPTIDGQGREIASFGATTAELIRLAEWLQARHVKSVAMESTGVYWIAPHEVLEAKGLEMRLVDTRQLARVPGRDKKTDPTDCEWIQRLHSCGLLRGCFRPPEAICKLRTLVRDKGVLVAESGDWLRRMQKSLDQMNVRVHRAVSDINGTTGLAIIRAIASGERDVQKLAELRDPRCHKSVEEIAEQLRGHWREDHVFSLCQALKMYDAIAERITAYEKEIQGKLEAMEQPGQSGQTAPPLSSGNKAKKIKSRGQEDKRQALFRMSGVDVTQIDAVGVETVEVVISEYGCDLSRFPSEDEFASHATLAPHVPKSGGHPIKKKKRRNSASTRVAGALRMAAQSLRQSNTALGAYFRRLAQRKGADIATFATARKISKLIYRLLRWGQPYIDEGASAYEKRHKEQTFKNMASKAKRMGYRLVPADV

SEQ ID NO: 299688 - protein, 343 aa, unidentified
MSEVSTIGLDIAKSVFQVHGVDVDGAVVIRKRISRAKLLEFFATLPACLVGIEACPTAHYWGRRLQALGHTVKLMPPSYVKAYLKRSKNDANDAAAICEAVTRPSMRFVATKSEQQQSGLMLHRSRQLLVCQRTMLSNAIRGHMAELGIISAKGRNGTAELLRIIADEQDDRIPAAARFSLGILARQYAAVRAEIVAIEKRIHAWHRSSEESRRLEEIPGIGPIVATALVAEVGDWKVFSSGRSLAAWIGLVPRQHSTGGKERLGRISKQGNRHLRWLLVAGAMAVIRYARQHGTKRPWLARLMDRRPIKVAAVALANKIARMAWAMMVRGERFKEPKLLPAA

SEQ ID NO: 299689 - protein, 485 aa, unidentified
MGDRRLVGVDLGIASAHTVRVLDGQGNVVAKRRAWPTVESLSDIERAALAGAVEGTRLEVVMEPTGPAWLPIAVFFTSRGHVVHRVSSAKSHDLRKFLSRHTKTNGIDADTLARIPLFDPAGVQPLVLATEERAGLDRRVRATDRLTRAGADHKRRIKDLTRQVMPMTPLTGAISRSDLAVLERYADPNALVRLGAKRLAKIIAKASANKHGTDRAVEWIAAATSALELYRDHPAVAFVAIAEEIATEVRLLRAVEAERARHAAAREDRYLVVDPDQLARSIPGFSTIGGPSLVACMGDPARFAKGKQFRSFTGLTPKASETGNTDRKGQPMSKAGSSLLRTTLIRAADIGRRHDPQLARIYYIQMVERGKTHLGALCVVAANLAERAWTVMNRNSPYIVCDVDGTPVTNEQAKAIIADCWTVPAEVRARRRSAKATPKGKAPQAISTRQPTPYANGADTRDDLPRSTSSTPRPHQIKTLAESPA

SEQ ID NO: 299690 - protein, 414 aa, unidentified
MTTDIKVAVGLDLHKKFILGTILCQTGQMIQERFERTKEGLFSLKKWILGHHADVVACESTSDYWVQVYDLLNGIVPVIVGNAHDIKVLSHKKTDKIDSEMIARLALHGMIQSSRVFTRSHREFRKLMRLRHMLVQKRTDIKNQIHHILDSELLQLSSVLSDLFGASGMILLQGMVNGIPLDDLIPMLPPRIQKRGDELRSVLSTTLSPDALFRLSLCLRLIRVLDEQILTITESAKVYAHENKGREMEILMSIPGIGEIGALTLLAEIGDITDFSSADKLASWVGVVPRVAQSADKLHTGSITKRGSVHVRWILTEIAQAASRCRLNSLRVFFERKKKMLGPGKAIIALARKIITIVWHLLSNNELYSDPQYLPKRSSHFISVKIPQSLTLDELITILVEANVYLKKKDPDHL

SEQ ID NO: 299691 - protein, 350 aa, unidentified
MSIIGCDLHTRYQVVAWVDESTGEIRVRRLEHEGEDVGKFYAQFPRGTVVGLEATFPALWFERLLGELGQELWVGDAAHIRASEVRLQKTDPRDAEHILDLLLSHCFPRIWVPSVEERDLRQLLVHRLKLVRARTAVKNQLQALAISQGVCRKRKLWSAKGRAELERLELLPWAARRRRELLEWLDRWDEQVRELDRAVEEAGRARPDVLLLRTHPGVGLVVALAFVLTVGPIARFLSSRKLVSYLGLNPREHSSGGRQRLGAISKQGNTMMRWLLVEAAQTAARLDPQLHRTYQRLKNRRSSGVAKVAIARRLAIRLYWMLRTRHNYAQLVHTSGSPSSAVVPPAGSNV

SEQ ID NO: 299692 - protein, 461 aa, unidentified
MSNGSRRLSRGDRRRNDRLAGLRAVITRDTAVLAFDLAADKQVSALTDQDSRVLARRTVSAKAWHLREVVEWGLAQARAAGFSSVVVACEPTGHRWRVLDQIAAGLGVRLVCVQPLLVHRARESEDFTHNKSDETDAMIIARLVTELRCYLPERAEPDWARLRHLGARRAGLVTDATAARQQVTDLLECAWPAALQAAGKPMKSKSWLAAMTVLLDRVGATGDLAVIRRWGWSRFAAAVRRELARNGTTRWYSKIVKAVFDAAADPARAGAGVLDQRAGALERTRFALADLAHARAETAAVEARMVEVLDELGLTALVTSIRGLSAVGAAAILAETGDPARFSSARALVKHAGLCPRDNASGNYQGKTGISGRGRPQLRLAAWRAVWPAVRNNPVLAARYAHLTGRTENKLTNTQARVAVAGSLLRQLHAVITTGAAWDPAIASGLKPQSPASARRTAPAA

SEQ ID NO: 299693 - protein, 430 aa, unidentified
MEPAYDPRRCDEPVPASGQLGPRLNRPSHVVATVRVPGTGRRRWDQQTRTFRSTLAGLAALGEWLSEFGVTLVGMEATGVYWKTVFQALEDRFECWLLNAQHLRNVPGRKTDVKDSEWICQLVQHGLVRPSFVPPPEIRRLRDLTRLRKAQINERARSIQRLEKVLQDAGIKLSSVASHTYSKSARAMLEALLCGVTDPAQLAELAKARMRLKIPQLREALASRFQIEHHGVMVAQLLAHIDTLDAAIQNLGERIELALAPHADVVELLCTIPGVHTHAAQVLIAECGLDMTRFPTVRHFASWAGACPGHHESAGRRRSGRTRPGPRWLTDQLTECARAAVRTKGTYLAAHYAQLRGRRGEPKAIGAIRHDLLVAYYHVVRDQVPFRELGPDWQRKRSSPEHRARRLQRQLEALGYKVNLEQVEQTKQAA

SEQ ID NO: 299694 - protein, 383 aa, unidentified
MNVALTLHSRRSALAQGSTLFIGLAVHKESIAVAYVAEEREAEVVFLGTIGTRQGDIDKLIRKLQAKGKRLHLVYEAGPCGYWLYRYLTKKNLKCWVVAPSQIPKKAGDRVKTDRRDAVQLARLLRSGDLTPGYVPGVEDEAIRDLVRAREEALKDGKAAKARRKAFLLRQDSRSAGRANWGPAHLRWLAEVVCPTPAQQIVFQEYVRAVSEHTERLPRLEAELQTQGQSWRWAPGVAAIQALRGVQFTVAVTLIAELGDLSRFDNPRQLMSYLGLTPSEHTSGERRRQGAITKTGNSHARRALIEGAWAYRYPATVSRHLQLRWEKVPTVIQDISWKAQVRLCKRYRRLVARGKNVNQVVVAIAREMAAFVWAIAREVEVTH

SEQ ID NO: 299695 - protein, 387 aa, unidentified
MFKTVERPEAPAAIRMDIGAIFVSLELSRKTWLLTSVSPGAGEKMSQRAEPAGDLPRLLQCLAELQRRALARTGKTYSIIVIQEAGLDGFWIHRALESEGIESHVVDAASIAGPRRRRRAKTDRIDGKTLLRTLMAFRRGEPKVCAMAKPPSPEEEDRRRLGRERKTLIAERVEHVNRIKGLLFTQGALDYQPLRRDRRARLEALRTGAGAALPLRLKSLISRELDRLELLLAQIKAVEAERDALLAEPSRQAPVARMLLALKGVGPEFAAGLWLEGLFRSFGNRRQLAAYAGLAPTPWRSGSIEQEQGASKAGNPRLRATLIELAWLWRRHQPRSALTLGFEDRLKANGGRVKKALIVALARKLLVALWKYVTTGLVIEGAVMKTA

SEQ ID NO: 299696 - protein, 411 aa, unidentified
MTSSSSQPTRFIALDVHKHYIMAGAIDGQQQVVLRPRKLTLDQYERWYREQIKPTDVVVIEATGSAWHLYDQLTACGATVVVANPLLVKWIGAAPVKTDTHDTLKLAHLLATGLLPTVWVPPEPVRALRMLVAQRQRLIRQRTRARNRLQSVLQRHNWLPPAGALFGPEQRSWWEALPLTAPEQLLVSQDLRMLDQVAPLLAEVDALLYQQSTSEPWCDQAPYLLQLSGVGTITAMTLLAGIGDISRFEHPNQLVGYAGLGVRIHDSGQSHHTGGITKQGRRELRTVMVEAAWSAVAHNAHWQAKFSRYCQRHAPAKAIVAIARQLLVSIWYLWHNRLVDRYNDAPTIASKFWAWAEQGGKAMRHGLSCSHFVRLQLDCLGIGHDLTELHFGTHLYRLPPPGTIAALPAVS

SEQ ID NO: 299697 - protein, 356 aa, unidentified
MRGKHQGREIAVRGKEVFVGIDVHKESWQVTVRTEGEEVFHGRIASDYRVLRRILGRFAGSIIKVAYEAGPCGFGLHDQLTGDGIEGIVVPPSLIPIESGNKVKTDKRDSRKLAKLLESNMLKRVHVLTPEDRADRELLRTRRQILEHRSDVARQIKSKLLFYGIRPPFSTQAGWSKAFIQWIKDMSFGSEVLKVSFQSLIELYEYLTCQVIAVSRKVVELSRSEKYRKRVQLLRSVPGIGMLIAMEILVEIQDMARFKRAEELASYIGLTPSEFSTGEHVRQGRITRCGNKRVRTCLVEASWVLIRKDFGLRKKYDRLKQWRGGKRAIIAIARHLIIRIRRILLNQEPYVVGAAA

SEQ ID NO: 299698 - protein, 359 aa, unidentified
METKLSKLDFKDHQIYVGLDVHKKNWSVSIMVDDILHKRYSQDANPLTLVKYLTKHFPKGNYHSVYEAGFCGFWIHRELQSLGINSQVVSPADIPTSDKERKQKDDKRDSYKLVKALKNHAMEPIHVPEEKVVQDRMLVRTRNALAKDLKRSKNRIKSMLHFNGIFIPQCFETRSGYWSNKFIKWIETVNLQEESGTTSLRVHLEQAKYNRSQVLEITKQIKQLSKTEPYAAKVNLLTSMPGIGLLTAMKILTELDHIDRFKSNDKLCSYVGFIPSTRSSGDTERIGKITPRGHPVLREAFIESAWTAIRVDPALMLKYKELCKRMKSNQAITRIAKKLVIRMAYVLKNNESYVIGKMK

SEQ ID NO: 299699 - protein, 429 aa, unidentified
MRTESTPGARGPVFCGVDTHADSHWLCVLDWRGRRVLSRRFPADAAGYEALAGAIAAAGEPACVAMEGTSSYGAGLTRHLASLVMPVREALSPARMQRRRPGQGKCDESDAERAARAAMSGSRLGTPKSQDGWVDGVRCMLAARSGAVKARTSAINTARSLLTTAPEGLRSRFRGMAGPRLMEELPSVRAEGALGAALGALADLWAAARDAALDMERAIEASLEENCPALLAMYGCGPVSAAKLAVAAGDNPGRLRSEASFAAICGACPVPASSGKTVRHRLNRGGDRQANSALHEIARQRVMRDPETAEYAERARGRGKSDREVMRCLKRYVAREAYRALMRPHEIRRPEDASGLVAARRAARVSQVRAASILGTSEKYISMLERGQRELKPIRRAYEAWVEAGLPLDWDRQAFEAERKMDSKKHLAK

SEQ ID NO: 299700 - protein, 356 aa, unidentified
MSYDVKYIGMDVHKEAIVIAVQNESGKLVMESVIETKASSILQFLHGIRGELHVTWEEGTWAAWLYDLLQPHVQHIVVCNPRRNALLKEGNKSDKVDAGKLADLLRTGMLRPVYHGENGLRTLRELGRSYQTISKDLTRVMNRLKALYRGWGIPCAGTQVYAVRAREEWLNKLPQAGLRRRAELLYLQLDGLQALRRDVRPEFLAESRKHKAAKLLRQIPCIGPIRAARLIGLMQTPHRFRSKRQLWTYSGLGIETHDSAQYRFVSGQLQRSKKPQQLRGLNRNHNHEMKEIFKSAATRASCGRGPFHDFYTGLLAKGMKPEMARLTLARKIAAITLTLWKKEERFDVKQLKTQAA

SEQ ID NO: 299701 - protein, 371 aa, unidentified
MKERNNAFALFLCDADGFHDLFQKISSLTNDFSNVKVGLEATGHYNYNLLGFLIDKGLPTFVINPLHTNLFRKSLSLRQTKTDKVDAHTIALMMMSGVNLQSYSDTSYHNEELKSLTRYRFDKVQERAKLKTSISRLVNILFPELEKLVPSLHMVSIYALLAEFPSSAQIASCHLTRLTNLLANASKGHYNKEKAIEIRNAAKHSIGSNMPAKSLELKHTIRLIQELTSEIDEIECSIKSIMDEIRSPILSIPGINYRMGAMIIAEIGDFNRFSSPDKILAYAGLSPSTYQSGQLDGCYSHMEKRGSRYLRYALFNATKFVCIWDNQFSAYLAKKRSEGKHYNVAISHAAKKLVRVIYQLEKSGQLYHRAA

SEQ ID NO: 299702 - protein, 318 aa, unidentified
MLIHYIDIAKRNFVIAVSSLSKTKTETNNPKGIAHTIEYLKKHKVALVVTESTGGLEIPAAKAIRRAGIAVIIANPRQTHQFAQSQPLTKTDAKDAKMPAFFAQMTAQKEDSQTMPYQPPTEAEEVLEALVNRRNQPADMRTAEKNRLHQVHETQVGSVKQLIAHFDRLIDELDKQIDNHTHTHFDGKDQVAEQIKGIGSITTATLMAMLPELGRLSHKRIASLAGIAPHPREGEETKFKSRCFGGRSAVRKALYMATVAATRFEPLIRDFHQRPLSKGKPYKVAVTACMRKLLTISNTRMRDYFAENDTAENGIRTA

SEQ ID NO: 299703 - protein, 482 aa, unidentified
MAQRKKTTFQRLKEDRLNRKQRRELARKLSAEDPGLEIVHRNVAGIDVGHESHFVALPPGRDPQPVQEFGSWTADLQRMADWLKARGIEEVVMQSTGVYWIPLFDVLEARGLRVCLVNARDTKNLPGRKTDVQESQWLLKLHTYGLLRNSFRPPDQIRALRSLWRLRDRHVKEAARTVQHMQKSLTTMNVQLSNTISDITGVTGQAILRAILRGERDANRLAQLRDPRIQATPEEVARSLEGNWREDMLFELRPAVDAYDFVQKQIQECDKRLQTLLGNLPARAVTEVPVEDQNATAPHKKSRKKKPNKQKNAPRFDLEAELKRICGVNLLSIEGISVMTAQTVVSELGTDFSHWKDEDHFASWLNLCPVRPVSGGKVLKQGTRKKVKNRVASALRTAAHTLQFSDSYLGARFRTFRARRGDPKAIKAMARYLACLIYRMFTRGQEWVDRGAKAFEDQRARRELAALERKAAARGLKLVSIA

SEQ ID NO: 299704 - protein, 344 aa, unidentified
MDHVAIDLGGRESQICVRAADGRILEETRVPTTGLKKYLGGKTASVVIIETCAEAFRVADDAEELGHQVKVVPASLARSLGVGSRGVKNDVRDARNLSEASCRMSTLPSVHVPAPETRERKAVCGMRDGLVGARTQLVNTVRGWIRGQGVGATKRGAVETYPKRVRDHYQSRRQSPVPDFVERQLKAVEALNELIDQADEQLKALAESDPTCRLLMSMPGVGPVTAVRFSSAIDNPHRFQSAHALESYLGLTPGEDSSSDRKRLTSITKAGSTAVRWTLVQAAWVARRYRRNDPMVQWELALESRRGRPIAIVALARKMAGILWAMWKTGKKYDPNRGASVQPR

SEQ ID NO: 299705 - protein, 404 aa, unidentified
MEKRSMFVGLDVHKESIDSSLAEDGRDGEVRHYGKIAGDLEALAKVVKALRAPDRRLRFVYEAGPCGFGIQRYLTTHGEDCVVVNPSSMPKRSGDRIKTDRRDGEALARLHRAGELTAIYIPTADDEALRDLVRAREDAVGLTTQAKHRVKAFLLRQGRRYPGRAGWTRPCRRWIADLSFPLAPQHIALQAYRDTIDESERRVERLPDQLRQLTPAWRWAPVVDALQALRGVSFVTAVGLVAEIGDIRRFTHPRQLMAYLGLVPSEHSSGPSVRRGGITKAGNPHARRLLAEAAWAYQGAPRVGRRMLDRQEALPKSVCDIAWKAQLRLTSRFRKLVVRGKAKPKVATAVARELTGFIWAIAREVPAPSASHPRRSGPSGRRHRGQVENPRSRYGHQHHRHVRA

SEQ ID NO: 299706 - protein, 340 aa, unidentified
MSIYVGMDVHRKRSQVALLDEGGAQLANRNLPNDPAELTALLGRLEPGTPVAFEAAYGWGWLADLLDELGLEPHLVHPNRCKAIASARLKDDKVDARTLAHLLRTDLLPEAWIAPQAVRDQRALLRHRVALVQVATSLRNRVHAVLADRGIRVEQRLWSLAGRAWLANLALPPVARAIVDDCLALIDTIDPIVARLERDLRARAKPDPRVTALQVLPGVGQLTAMTLVAEIGDVTRFATARKLCAWAGLTPQVRNSDRTVRHGHITKQGSSAVRWVLTEAAQRAKTQPPFTRFYAQCVHRRGKQIATVAVARKLLARSFHILNQVHATTSREGQPAGCAR

SEQ ID NO: 299707 - protein, 342 aa, unidentified
MAIVYVGLDLGSSNFQQVAVNHDGVSKVNRDFTTSEANLVKAFSDLKGEIHVHLEAGELAPWAASIIAPLVERVVCSHPQSNAWIAKDADKCDRVDAYKLAELLRLNRFKEVHYAPDQRRRNFKQLVQHYDELTAQQARLKTKLKARLRMQGVIVTGERLFSAQGRKEVLAKVESRDLRTAITQLYSVLDQSVAAQEQARRLMLRAAQAFPEIRIFRTAPGIGPIGACRFSAYIHTPQRFSTTRKLWKYCRLSVSHRSSNGKPLRRPRLDRSGCGRLKDVSRKAFDVAIRSRHDNGFKRAYLRALETTHNQTHARLTVQRKIVSTLRAMWLTMTPYGDELSR

SEQ ID NO: 299708 - protein, 349 aa, unidentified
MRTALLALLAQLQSKATNRVSRPAPIIAIHEAGLDGFSVHRLLTANGVESHVVDPASIAVPRRKRRAKTDRIDGETLLRTLLAWRRGEPRVCSMVVPPSPEDDERRRLSRERQTLVVERTEHINRIKGLLSAQGITGYEPLRRDWRERLEELQTPDGRALPPQLKAAIMRERERMTLVARQITEVEATRDALLRSGREATAPMEPQDAAAPALMASAADLLMRLKGIGPEFAAVLSLEGFYRHFDNRRQLAAYAGLAPSPWQSGRITHEQGISATGNPRLRTAMIELAWLWQRHQPDSTQSRWFQERVGAERGRRRRIAIVAMARKLLVALWRFVIQGVMPEGAVLKAA

SEQ ID NO: 299709 - protein, 443 aa, unidentified
MTNAMTDQSSAIPEPEWGAFLAIDWADKKHAWSLCVPGAPRREHGEIEHSPEAIHIWITELTTRFAGRPIAVCIEQSRGALLFALSKYGNLFLYPIHPAAANDFRKAVYPSGSKSDSVDAEVLLDFLLTHRNRLRLWRPDTEQTRELQFLVEDRRRMVDEKTRCLNRLTQRLKMYFPQVLCWFGSVDSVLVWRFLEQWPHLEALRKARRSTLKTLLQRDGRYSPPEIEGFWPTIRDAIPATHDAAVIASSILFVKTIVQQLQLLHETIREYDKRIGRLTETHPDFAIVSSFPGVGKALAPRLIAALGTQRERFRNANELQSYSGIAPVQESSGKQHWTHVRRACPKFVRQTFQEWAQHSVARCEWAHAYYDQHRARGKQHQAIVRSLAFKWIRILYRCWQNHTPYQEAAHSARLARRSSASVKDVEIVWKKTAGFSKLAALNP

SEQ ID NO: 299710 - protein, 339 aa, unidentified
MGEVSTIGLDLAKSVFQVHGVDRHGAVVVRRSLRRPQVLDWFAKLPPCLVGIEACATAHYWARELRRLGHDVRLIPPAYAKAYVRRNKNDPADAAAICEAVGRPSMRFVAIKTERQQAAAGMHKVREMLVKQRTMLTNQIRGLMAEFGIVAAKGTRHFGELVAQLAIPDDQRVPAPLRQALLGMAEILRTVAKKIEGIEQEIVAAGGDDATYRHLITAPGYGPILSSAMAAMVVDPAAFRRGGDFAASLGLVPRQDGTGGRVKLGPISKRGNGYLRRLLVNGAMAVLSSRRAQQDPWLAKLLASKPRMLVAVALANKMARIGWALMMRQEDFRARPAAA

SEQ ID NO: 299711 - protein, 349 aa, unidentified
MRFYNQQHQFYCGIDLHARLLAVCILDQQGAVVCQTTIPADKQRLLDTLAPFRTDVVVCVECLFAWYWVADLCSEHHIPFVLGHALYMKAIHGGKTKDDDIDADKIGRLLRGGNIPTAYVYPKGMRETRDLLRRRNYLVHKRAELIAHVQITNAQYNLPPFTKKLIYARNRAELNVAERFPDGPVRKSMQLNLALVDALDEQLADVELYLERTVKVEDPQSYHLLRTIPGVGKILALVLLYEIHQIQRFADVGDFLSYARLVRCVHKSAGKTLGHGGKKIGNAHLKWAFSEAVCLLIRCCPEVKAWQQRREKKHGKKKTLGILAAKLGRAVYLLLRRRQAFDLQRFLGP

SEQ ID NO: 299712 - protein, 345 aa, unidentified
MKKAVVGIDISMDDFHVCFKYETESGVVKIKGSRSFRSTTKEFEEFLLWSRKKGKDSSLRFVMEATGVYHENLAHFLYENGEAVTIVLANKMKSYIKSFNIKTKTDKADANAIAQFGIERALVDWQPMSPEYKALRDLCRELLSIKKDKQRATSQLHAFEKSHKKHKEIIDLKLQQIAFYTENITLIEKLIHSSVSKDKELKEKIRKVTTIPGLGFITAVILACETNGFVLFDNIRQVVSYAGLDVTFNQSGKYNGKTRISKKGNSRIRQALYMPGLSACRFNPQIKELYERICLKNPDIKRKGIVAGMRKLLILAYTLWKNDEEYNPDYQWNSGQNEPEASFSI

SEQ ID NO: 299713 - protein, 338 aa, unidentified
MSLYAAIDLHSTNSVLAVLDEHDQPVRQRRLPNELPAILKELEPFRDEVSGIVVESTYNWYWLVDGLKAHGYQVHLANTAAVPQYAGLKYSGDESDARHLAHLLRLGILPEGYSYPREDRSVRDLLRRRFQLVRMAVGVMLSVQSAWARHTGKTISSNSVRQLSGDVIEQMFPDVSVRFAVLTHLQVWRSIEDQIHQVERWVVASRTRCKEQGALRTVPGIGLILGMTIALETGDIARFASVGDYASYCRMVKSERISNGKKKGQGNRKCGNRYLSWAWIEAANFSLRFSPTIRRWYDRKCSKRHKVIAIKAVAHKLARAGYYLMRDGGTFDEKRAFG

SEQ ID NO: 299714 - protein, 422 aa, unidentified
MLEETNDTEELIARVAALDIGKAELVCCVRVPSPDAQGKRLQEVRTYSTMTRSLLVLAERLGALGVTRVVMEATSDYWKSPFYLLEAHGLEVWLVNARDVKHLPGRPKTDRLDAVWLAKVAERQMLRPSFVPPPEIRRLRDLTRYRADLVGVRTAEKQRVEKLLEDAQIKLSVVASDIFGVSGRAMLAALVAGERDPKVLARLARTRLRAKLGQLEEAFTGHFSDHHAFLLARMLGRIDQAGADIAELEAKIEEAIAPFAAAADRLDEITGVGRAAAQVIIAEVGTDMGRFPTAGHLASWAKFAPGVKQSAGKPKGKATTGHGNSYLARVLGEAAVAAGRTNTFLGERYRRLAKRRGAKKAIVAVGRSILVIIWHLLADPTARFHDLGAGFYDTRVNAERRKRNHVRQLEALGYRVTLEPAA

SEQ ID NO: 299715 - protein, 356 aa, unidentified
MGEVTLIGVDTPKPVFTLHGVDGSGGCVLRRELRRGQVEGFFAGLAPLEVALEACGGSHHWGRRLSALGQRVRLIPPQYVKPYVKRGQENDRRDAAAIAEAAQRPEMSVVAVKSAEAQAGLMLLKVRELLVKQRTQAVNALRGPAAGFGLVAAQGTGKVAALLVAVASDPGVPDAAKALLALLARQIEHLDEQVKALDDQLLALHKGNDLSRLLAGVPGIGPLTAVGPALTVDPAQFRSGRHSAAYLGLTPQQNSTGGKTRLGGISKPGNTRLRTLLVVGASAVIRHAKPGRRQAESPTGAWLLGLLARKPKKLAAVALANKMARIVWASRLRRAGAMMSRGEAYRHRPAPVPVPA

SEQ ID NO: 299716 - protein, 359 aa, unidentified
MRIIGCDLHARQQTLAMLETATGEVVKTTLKHEGNSVREFYSSLPRPVRVGIEATGSMQWFVNLLEELGIECLVGHPAEIRASEPRKQKHDRRDADLLLSLLVEERFPAIWLPTKELLDLRALLRHRHQWVSLRVKIQNALQAIALANGLRRGSSLWTQAGQHAIASLPLSPHAAYRRDELQAMYVKFETEIEKLNQRVEQQARERFGARLLMTHPGVGPITALASEVFLGDPSRFAGSKELASYVGLIPGEHSSGKRQRLGGLSKQGNPLLRFLWSEAAIHAVRRDPKLKQFYRRKLIQKGLGKARAAVARKLGIRMWIMLRDQIEYNEFCRRGQRQQKSGDACAGMPGPRYGAKVAG

SEQ ID NO: 299717 - protein, 318 aa, unidentified
MLNESFVGIDVSKDWLDVGWEPAQQTERLVHDEVAMVGLCERLAQERPCLIVLEATGGLETHLTSALAAAGLPVAVVNPRQVRDYARACGRLAKTDRIDALVLAAFARAIRPQVRAPRDDETLELGALLARRRQLIDMRVQEKLRLERASPVQRDSIKEHIAWLTERIARLDTDLTHRLRSSSLWRDQEDLLKAIPGVGTITRVTLIALLPELGKLNRREIAALVGLAPFNRDSGQHRGERVIWGGRAQVRRVLYMASVAAIRSNPVIRAFYQRLRAQGKPGKVALVVCMRKLLTIMNAMLKHNTPWNPNALDLEHSC

SEQ ID NO: 299718 - protein, 317 aa, unidentified
MEPGECFVGIDVSKATLDVATRPAATPWTEAHTEAGITALVARLQSLKPTLIVLEATGGLELPLAGALGAAQLSVAVVNPRQVRDFAKATGQLAKTDRLDAAILAQFGHAVRPTPRVLPDALTQELSALVARRRQLVEMLVAEKNRYSAAPPRVHAEIRRHIRWLETALARLDDTLAGTIQRSPLWRANDQLLQNTPGIGPTMARTLLAELPELGTLNRKQVAALVGVAPLNRDSGTLRGKRTVWGGRAQVRAPLFMCTLVAVRHNPVLKVFYQRLRAAGKAPKVALTACMRKLLTILNAMLKHRTPWRTTDGPQSA

SEQ ID NO: 299719 - protein, 449 aa, unidentified
MSRPQVIEDEQHERVHDRVAAIDVAKDSGMVCTRTPHPSRPGARRSTVWTVKARMNAVRALGRQLRQDGIEIVTLESTSDYWRIWFFILEACGLAVQLVNAAQARNLPGRPKTDKLDAQWLARLTEMGLLRASFVPPKAIRDLRDYTRARTRLVRERTRCWQRLEKLLEGALVKVSSVASKLTTVSAQDMIKAMIAGQRDPKVLAGLARTRMRAKHDDLVAALDGMFDDHHGELAGMLLDQIAFLDGRIAQLAARAAELTAAMPDAWGVDSDGTTGPDAGATPDAAVLNAVARLAEIPGISPDLARAIIAETGLDMSRFPTAGHLVSWAGLCPSARQSGPRTRAGKKGQGNGYLRGSLGQAALGAARTATFLGERYHRIARRRGKARAQVAVARSILVIIWHLLSDRAARYTDLGASYYQTRTDTDRKLRNHIRQIQALGFEVTLTKTP

SEQ ID NO: 299720 - protein, 344 aa, unidentified
MTKISTIGLDLAKNVFQLHGVDALGAVVLKKQVRRAALERFFAQLPPCLVGMEACGSAHHWARVISRHGHEVRLMPPAYVKPYVKRNKNDGRDAEGICEAVTRPTMRFVAIKSIEQQATLAVHGTRALLVRQRTMAANALRAALSELGIVAAQGYKGLRELMVRLEEPSEDIPENMRAALLLLARHWQALDADERVLERQIAKAARCDGDAKRLMDVPSVGPIIASTVLAKVPDAKLFRSSRDFAAWIGLTGKDHGTGGKHRPGRISKQGDRMLRAMLISGASSHLRQQIARGVRDPWLRDLLARRPYKVVMVALAAKTARIIWAMLAKGEAYRDRASAPAAAC

SEQ ID NO: 299721 - protein, 387 aa, unidentified
MQKPHDNSKASPAAFMQDNTLIAVIELGLSNWLVAGLIPGVSREPLKKLEPNPEDLLKLLHGWRDEAIKAGRPITRIAVAYETGRDSFWLARWLRERGIDAHVIHATSVAVSREHRRAKTDRLDTAMLKRGFLGWLRGERGHCTVAIVPTIEEEDAKRPHREREGLVHEQTRVVNRMKSALIQFGVRNFNPKLRKARVKLETVRTPEGKSLPPNTIAALRRDMERLKIIKEQIKAIEQTRLQQFEQKPEALANRMVYLLVRIYGLGWETADLLVHELLSRTLRDRKAVARYAGLTGSPDESGSKRREKGLSRSGNARVRKIMIQLAWRMVKFQPDSALVQWFKQRTENAKGSRKPMIVALARKLIIALWRYANDGVIPEGFRLHSAA

SEQ ID NO: 299722 - protein, 431 aa, unidentified
MNTQQFEVIRPKCAGLDVHKKSVVAAVCTSDPVTLTASYKTKVFNTTNSDIAALRDWLLAQDCRDVCMESTGKYWIPIFNILEPHMHVVLTHPKYVKAIKGKKTDKRDAKWIANLFRFDIVKASFIPPADIRALRELSRYRLKLSYMRTAEKNRYQNSMTISRIRIDCVLTDPFCLSATRIMDYLLSDEPFDEETCRSLIDRRVKASKDEVMDAVHGYHILEEQKFKMTHAKAHMDFINRTIGEIETELFVRSRQYDSQVRRIATVPGITELSGLFILSEIGADMSVFESDRHLCSWAGLAPANNESAGKKKSTRCSKAGQYLKPLLIQCALAAVRSRKEPYFAIKYQRLAKRRGKKKAIIAIARMMLTSIYHILSKGESFHPNDYEATINPPKQKPVILTIENTLQFLREQGADPESLKLIQQQCAAQVG

SEQ ID NO: 299723 - protein, 435 aa, unidentified
MSLMDWGLIHRKGHMTSLATGEFAAYMGLDWANAKHDICLQAASSHQREMTVLEHRPEVIEAWATALLQRFAGGPIAIALELNKGPIVEALRKYDGLVLFPINPMMLARYREAFTPSRAKDDPTDAELQLDLLLRHRDKLKPLVPQSGEMRALSQLVEHRRRLVGDRIRLTNRLTSTLKAYFPHVLEWCPNKDTRLFCDFLSQWPTLKAAQLARRRTLERFFLQHQVRGEQRIRERLDAIKNAVPLTTDEGVVMPHALMAQSLVTQLRVVLEAIERFDQAIAERAQHHPDFALFDALPGAGAILASRLLVAFGEQRERYGSAEEIQKYAGIAPVMERSGKQSWVHWRCQCPKFLRQTFVEWAAVSIRYSFWARVYYEQQRHKGASHQAAVRALAFKWIRIVFRCWQRGTPYNESTYLAALQRQGSPLLSNLTKTS

SEQ ID NO: 299724 - protein, 416 aa, unidentified
MKKNSKSPMKKEQQAKRAKVQRPVQREVKAVLAELVEKLQGKLAVKATSASPAEAGPRAELSPNLDRLTVGVDLGDQWSHFCILGFEGERLSEGQLQTREAEVAEFFQAIPPARVVMEVGTHSAWMQEIITGEGHEVVVANPRLMEGSKRRKRKNDRIDAKKLARLGRVDPESLHPIRHRSREVRQDLVVLRAREALVAARTELINATRGLVKSMGTRLPKCSSLSFGEKVKGVIPEKVREALLPLVQLADALSDSIQSYDQKIEELGSEKYGQTKLLRQVKGVGPITALAYVLTLENPEHFAKSREVGPYLGLVPKQEDSGESQPQLGISKTGDTMVRKLLVGSAHYILGPFGPDTDLRRYGLRLCERGGKNAKKRAAVAVARKLAVLLHRLWVSGEVYEPLGYASSRGIVQQAA

SEQ ID NO: 299725 - protein, 276 aa, unidentified
MQNGRTFKEFIGIDVSKDKLDTFDTRTGEIIQVKNSVEEIYAFIKTLPFSEELLVVVDLTGGYEDVCVKSFYKAGFHVHRAEGRRVKAFLRAMNQKAKTDVIDAIALAKYGEKMQENLILYVPPQDGIKAHVERLCDLKNLLQMEKNRYQAPAQKDSTLDSIGRHIDFLEHEISEFENEVRRIIATDEVMIKQQEVITSVVGVGKKSSMMLLAYLPELGRINRRKIAALAGLAPFARDSGKISGYRTTKGRGGRPQVKKALFMCALVAIKLILYFL

SEQ ID NO: 299726 - protein, 402 aa, unidentified
MSKCIAARAGMKTAVAWETTGGWSRYAAFIGLDVHKETIACAVSLPGRDEPHYRGEIAHEPKVLKRWLERLNDEFGGALLLFCYEAGPCGYGLYRQLTEAGHECQVVAPSLIPKKPGERIKTDRRDALKLSRLLRGGDLTAVWVPDSEQEAMRDLTRARDDMKSQERKARQQLNAFVLRHGHHWPRGKTRWTSVHYNWLESIQFDQPYLQIVLQEYIGAAKAATQRVADLTDQLMRALPGWSLAPVVDSLVALRGIDKLAATVLLAELGDISRFESPKQLMAYLGLVPSEHSTGSRRRQGAITLTGNGHARRMLVECAWSYRFPARQTMHLKRKAQTASSVAKTIAWRAQKRLCGRYRQLTQAGKNVKLVCVAIARELVGFIWDIVRQTMPQVAPQAGVVAG

SEQ ID NO: 299727 - protein, 423 aa, unidentified
MKEDMDTVVTADWFVGIDWALDAHEVCLLDRAGHVHDRRTVAHTPAALQALVETLEAHAAGEPARVAIAIEVPRGAVVELLVERGFAVHAINPKQLDRFRDRFTAAGAKDDRRDARVLADSLRTDPQAYRAIQLDDPRVIQLREWARLDDDLAGELTRLTNQLRDLIYRIMPSVLQLSPAADESWLWALLRDAPTPAAQQRLSERRLARLLRDHRIRRMTAAQVREVLQQPPLFTAPGVIEAVAAHLELLLPRVELVARQRRQAEQQLQRWLTALDDEPAVGNQREHSDVAIVRSMPGIGTRVAARMLAEASQPLVHRAYHVVRSHMGLAPVTKESGRRRAVVMRYACNRRLRDAAYHWGRVAIQRDPRTHAYYATLRARGHGHARALRSVTDRLLRILMKLLERRQLFDPAYAAAIPGPAGA

SEQ ID NO: 299728 - protein, 370 aa, unidentified
MNRNTGMYAGQVIGWMGGLQVVGMDIAKSVFQLHTVDMHTGELQDKRLTRDKVLTFFSNRQPCVVAMEACGGAHHWGRKLQQMGHQVRLVHAKAVRPFVLGNKTDTTDARAIWLAVQQSGMRFVAVKTTEQQATLVLHRQRQLLVKMRTMQLNALRGMLYEFGAVFPKRRDALLGEVQQALEKLQDVLPQPVRESLSEQVQRIRSFSQDIADIEGRLKQQLVADEQIQRLLSIPGVGLLTATAAIATMGEASQFKSGREFCAWLGLVPRQEGTGGKVRLLGISKRGDSYLRTLLVHGARSLVCCGKTPSAWQSQLLERRHKNVAIVAQAAKTARIIWAVTAKGQTYQGGYQSSRPGQAKPVVEERAMTQS

SEQ ID NO: 299729 - protein, 343 aa, unidentified
MDYFAGLDVSVNNTSVCIVDGAGKVVREVKVASEPDALLQVLRNPAYCFKRIGLEAGPLSQWLFSALGEANLPVICVETRHMRAVLKAQINKTDRNDARGIAQMMRVGLYRPVHVKTLRSQKLRMLLTHRKLLQSKAIAIENDLRGTLRNFGLKVGIAGWTKFEARIEELVEDVPDLAVLVESLLVVRRVLREQIAVLHRRLLTIVRDDEVCRRLMTIPGVGPVVALTYRATVDVPARFRKSKSVGAVFGLTCSRDQSGERARPGAISRCGDEMMRAMLYEAAQAMLLRSAKWSWLKAWAMQIARRRGMKRAIVALARRLAVIMHRMWIDGAEFRWTKEAAAA

SEQ ID NO: 299730 - protein, 348 aa, unidentified
MLHVGLDLSRRRVDYCVLGEGGERVEVGAAPADADGLGGLARLLELRHGPRPVRAVIESMNGARFVHDVLERCGWEVLVADAQRVKGLAPLACKTDRIDAWVLGELSRRDLVPAIWLPGFAQRQERERARWRMHLVKHRSSLKQRVHAQLMAFGHSCPVSDLFGARGRERLERLDLPDPWRENVLACVALIDDLDGQIDALERELKALGADHRYVPLLITVPGVSWVLGYTIASELGDITRFASPRKLCGYSGLCPRVYQSGDSDRRGPLTHNGPKYLRWALIVAATNAAKHPLYRQRYQATKQRVGRQRGAKVAQIQLARTLTEAIWHMLTRNQSFAPAGAAFPLAA

SEQ ID NO: 299731 - protein, 342 aa, unidentified
MDHFAGLDVSVKETSVCIVDDTGKIVREVKVASEPEALLVVLKSPAYRFKRIGLEAGPLSQWLFSALAEANLPVVCVETRHMRAALQAQINKTDRNDARGIAQMMRVGLYRPVHVKTLRSQKLRMLLTHRKLLQSKAIAIENDLRATLRNFGLKVGMVGKVRFEARIKELVENLPDLAVLVEPLLIVRRVLREQIAILHRRLLAVVRQDEVCRRLMTTPGVGPIVALTYRATVDVPARFRKSKSVGAVFGLTCSRYQSGEIDRSGRISRCGDEMMRVMLYEAAQSMMHSKKWSWLKAWAMQIARRRGMKKAIVALARRLAVILHRIWIDGTEFRWTREAAAA

SEQ ID NO: 299732 - protein, 437 aa, unidentified
MTSPCRFYLNKIQEVILLSFKIFRFNCCGLDVHKTWIYACIGITDSNGRTDYKQARFSSFSKGLKELCDWLAKYNCSEVCMESTGKYWIPVFNVLEKANNSVILAHPKYTKTQKGNKTDRKDAKWICDLFMCEMIKPSFIPPADIRHLRDLVRYRFKLTCMITGEKNRAQNCLTVSNLKLDDVFSDVFGKSSRSITEYMLAHPGEIFDVAPFVDSRCKTPMEEIQAAVDGAISPEQAIKLRQCLNHIDELEKHLEEIEREILRLSDKYQAALDLIRTVPAFDKNPMTAIQILSEIGGDMSVFPSAKHLVSWAGCCPRNDQSNKRIKSTRISRAGNYIKPILVQVANGLLRSKKHPEITGRYKRIKSHRGHKKAIIAICRMLLTAIWHILSDLKPYTAEGFLESRPVNKAKVLTTSQALNLLKQRGYTIKDDIVPAMN

SEQ ID NO: 299733 - protein, 436 aa, unidentified
MKSKGGDTVKNRMKFDHLSTLCVGLDIGSRSNFITALNFDSDRLINMRPVPNAASGVEAMESMILAVLEANPQFRYLLVALESTSFYGVHVANYLSTSDKLKPYGVKVFCLNPKTIANYRKSFTGLGKNDGIDSFIVADYVRAGRIDIEPWRGAQYLALQRLTRQRRHISEAIAREKNYVLNNVFLKFSEFALLSVEECPVSDKFSATAEAILTEYKTTEDIANAPLEELVDFISASGHGRFSDPDQVASLLQKAARNSYRLDKALYEPITTSIACSFNCIRAFEKEQKALDKAIAATVAGLNPTEYQILKSIPGIGPVYAAGILAEIGSVRCFNSNNALAKYSGIIWRDNQSGEFDSEDTPMMKAGNRYLRYYLIQAAGSVVRYCPEYTDYYNKKFAEVPKHQHKRALALTARKLIRLIFGLLDKNQLYSPAKSR

SEQ ID NO: 299734 - protein, 338 aa, unidentified
MKKNYQTFVGIDVSKSKLDYCIASNPSFVQNQFGIIENNEKSIRSFISNLQKKNLTNENVLFCLENTGVYSMPICYWLQTNNFDYWVVPALQIKRSAGIKRGKSDKVDSKDIAMYAVSHLHQLALSVLPEKDFLELRVLLAEREKLVKSIKIFVSTSENKGFLPKEILKAVLQQNKKTIVLLKQQLMKLEKLIEELILEDQLLNQQFKSLQTVPGIGKQTAANLIVYTHAFSTFKNWRKFACYCGIAPFPYESGTTLKGKTRVNDLANKKLKSLLNLAALSAKKYDIEMNNYFERKVGEGKNKMLVLNAIRCKVVSRAFAVIQRNSPFVDLNKFKAAS

SEQ ID NO: 299735 - protein, 359 aa, unidentified
MTSMTTEVGPVTGGIDTHGQTHHAAVIDGVGRHLDDREFPTTPAGYRALTAWLTGHGRLERVGVEGTGAYGAALARHLHAHAVVVVEVDRPDRRARRARGKSDPLDAYAAARAALSGAATGTPKLRDGRVEAIRALRVVSRGAVKARTQAMNQLRALLLTGPAELREQLRQLSPTVLVTTCARLRPDAADLANPEQAVKTALRRLAHRHRHLAEEIRDTDSELITLVRDTGPRLLALQGVGIEVAGQFLTTAGDNPERLRSEAAFAHLCGVAPIPASSGRTHRHRLNRGGDRAANNALHTIALCRLRYDPRTHAYAARRTKEGLSKTEIIRCLKRYLVREVFTALRPASHRLTGAATAT

SEQ ID NO: 299736 - protein, 417 aa, unidentified
MNSPPETTVIDRYIGVDIHKHYVMVGGQNRHQEWILRPRQVQVSRFRDWAEKNFRKSDAVVIEATGSVWDIYDIIAPHVGEILVANARSIRQIAEAKVKTDKKDIHRMLTQLISGTVPEVWVPPVPVRELRSLISFRWRLTKQITMSKNRLHSVVQRFNLDPPEGGLLTEKNSGWWEEQEFSDLTGFEVKHDLEIVETLEAQKEALDQKLAELSNSEPWASDMVFLMQIPGMGLILSMVVLSAIGDITRFSHAKELVGYAGLSAGVHISGETNRSKPITKEGRKELRWAMAEAAWRAKESDPYWKAQFKRLEKRMPKNKAIVSIARRMLVSIWHILTKRETYRHFDEEDIAYKMLIWAWAMDKRSRKGMTPQQFAKYGLLRLGIGQDMQRIVRGGAPRRIAPTEEILALKPELAPPR

SEQ ID NO: 299737 - protein, 342 aa, unidentified
MDHFAGLDVSVKATSVCVVDDTGKVVREVKVASEPQALLAVLKNPAYHFKRIGLEAGPLSQWLFSALAEAELPVVCVETRHMQAVLKAQINKTDRNDARGIAQMMRVGLYRPVHVKTLRSQKLRMLLTHRKLLQSKAIAVENDLRGTLRNFGLKVGVVGKVKFEARIKELVENLPDLAELVEPLLIVRRALREQIVILHRRLLAIVQDDEVCRRLMTTPGVGPVVALTYRATVDVPARFRKSKAVGAVFGLTCSKYQSGEIDRSGRISRCGDEMMRIMLYEAAQSMLRSKKWSWLKAWAMQIARRRGLKKAIVALARRLAVIMHRIWVDGTEFRWTREAVAA

SEQ ID NO: 299738 - protein, 390 aa, unidentified
MDVLYQSCAGIDVHQANIVVCILHGPLTSTRPKREMATFDTTTKGLRACHDFLSQFHVEAVGMESTGVYWRPVWHALCDDFKLILAQPAHMKAIPGQKTDKKDAHWIAKLTRIGLLPRSFVPDETIQELRELTRQRKHYVESRNRETNRIHKILQSGGIKLTTYIEDIMGLSGRNLLQLLVDGTPITPRIVHQSVYTSLKKKVPQLLEALDGYFSDHHRFMLKQSLEIYDFYQKQIELLEERMNVYLSQYENHVEILDSIPGIDVITASVIISEVGVDMSQFPTSGHLASWAGLCPGNNESAGKKRSTKIRHGNSYLKKCLCQAAFAIKKQKGSPLADRFYQIQSRRGSQKATIALAHQLLKIAYILLKEQITYPEFLAQKKTTRDELVA

SEQ ID NO: 299739 - protein, 342 aa, unidentified
MTIIGCDFHPGFQQIAMVDTETGEQTEKRLTPSEAVQFYRQLKGQVLVGMEGCGNTLWFERLLAELGHELWLGDAGKIRALEVRKQKTDRRDAELLLRLLEEGRFPRLWVPNLEQRDLRQLLLHRHKLVGMRRGVKNQLQHLALNQGVQRKAKLWSRAGRKLLQELPLSGWTARRREELLRLLDDLQQKVGELDKAVEAAAKKDAVAQLLQTHPGVGPVTALAFSLTLGQIERFAHSRQVVSYLGLNPSEHSSGGRQRLGHISKQGNPMLRSLLVEAGQSAARLEPEFKRAYQRLKHRKHSAVAKVMVARKLAVRLYWMWRTQQPYGATRMQGSPTGPVAER

SEQ ID NO: 299740 - protein, 355 aa, unidentified
MTSTKCIGMDVHKQSISIAVMSSVGKVVMECVIETKASTILQFIDGLRGDLRVTFEEGTWAAWLYDLLKPHVTEVVVCNPRKAALLKDGSKGDRIDAHKLAELLYMNKIKSVYHGEHGLRTLKELARSYLTITKDLTRVMNRLKALYRSWAIPCTGSEVYAPRYRAEWLGKISEAGVRRRAEHYYQQLDVLRILRQEVRRDLLVEAKKHKAWKLLRLIPGIGPIRAALLIALMQTPHRFRTKRQLWKYSGLGLETHDSAQYDVAEGRLQRSKKPATVRGLNKDHNHDLKDIFKGAATRVSGSHGPLRDFYENLLAKGRKPTMACLTLARKIAAITLIVWKKEVRFDANYLKPQAA

SEQ ID NO: 299741 - protein, 359 aa, unidentified
MDVIYERCCGLDVHKRTIAACLIVPAMGGASQREIRTFGTMTEDLLELTDWLAAAGCTHVAMESTGVYWKPIYNLLEATFTPLLVNARHIKSVPGRKTDVKDCEWIADLLRHGLLRGSFVPERPQRELRELGRYRTTLVQERSAEVSRLHKTLEGANIKLASVATDIMGKSGRQMLKALMEGSTDTSAMAQLAVGKLRAKIPQLEQALRGCFGAHQRFLIAQQLAHIDFLEETIEQLSAEFAKRMRPFGEAIERLETIPGVGRRTAEAILAEIGPEMSRFRTYRHLASWAGMCPGNDQSGANAEAGRPPRAIPGCGQLSSRRRMPPVVQRTLTCPPSTADSPPVGARRELLWPLAIPYW

SEQ ID NO: 299742 - protein, 447 aa, unidentified
MTKRKYKPKSLRVCHQDAAGIDIGADEHWVAVPPDRDEDPIRKFGTFTSDLQRLADWLRQCGVRTVAMESTGVYWVPIYELLEQCGLEVLLVNAAHARNVPGRKSDVIDCQWLQELHTFGLLRASFRPEAKITELRTYTRHRQTLIEGSAQQIQRMQKALDQMNVQVHHVLSDLTSKTGMAIVRDIVAGQHDPEVLARHRDTRCHASKEVIIEALRGHYKPEHLFSLGQALSLYDVFSQHIRACDDRIETVLTTLAKHFPDPGTPKQRAKFRPVGNQIAIDIRNPLQRILSGVDIQTIVGIGPLTALNILSETGYDMSRWPTEKHFTSWLNFAPGTHISGGRRLSSRRPPSKSRAGLILRQAASSLGRTQTALGAFYRRIAARRSKAIAIVATARKLACAYYRLLRYGGQYVERGAAAADHDYQQRRLDSLKRQAKTLGYNLQPVPT

SEQ ID NO: 299743 - protein, 344 aa, unidentified
MGEVITIGLDIAKSVFQIHGVDEVGAVVIRKRVSRAKMLEFFAELPRCLIGIEACPAAHHWARELQAVGHTVKLMPPSYVKAYLKRSKNDANDAAAICEAVTRPSMRFVAIKTKEQQAALILHRARQLLVRQRTMLSNAIRGHLAELGIVSAKGRNGTGELLEIITNDADSRIPLAARSILKVLAAQYKAIGTEIASIGKSILAWHRSCEPSRRLEEIPGIGPIVATALVAEIGDWKAFRSGRGLAAWIGLVPKQHTTGGKDKLGSITKQGNRYLRWLLVSGAMAVIRYAQKHGTKKRPWLGRLMERRPTKVAAVALANKMARIAWAIIARGERYREPELLLAA

SEQ ID NO: 299744 - protein, 343 aa, unidentified
MKVQTIGLDLAKNVFQVHGVSACGKVVFNRPLRRVQVLAFFEGIEPCLVGMETCCSSHHWARELRKLGHDVRLIPAMYVKPYVKRGKSEAVDAEAICEAVSRPTMRFAEVKTREQQGILALHRARDLIVRQRTQIINMLRGILADFGIVIAQGIERARRFADEALGGAVPDLPEVARDVVLNLCHQVAALHARVRWYEARMEMEARKDPRILLLRSIPGIGPITASAIVATAGNAAQFRSGREFAAWLGLTPLNKSSGGKERLGRISKMGDGYLRRLLVTGMTSRVRQVKSHPERSEPWIDALIIRKPFRVATVAMANKTARIIWAMRTRERFTGPPQPETAQ

SEQ ID NO: 299745 - protein, 427 aa, unidentified
MREEISRVEAFWQLKKEIRGSKDYLIVGIDVGKNKHSAFIGTTTGKTLRKGLRVENSESGFEHLLAHVQFYQGRDGFNRIVFGVEPTSVYHKPLAEFLIEHDFMVVYVTNEAITKNRALLDGRWDKHDDKDAANVADLISQGKCNYYDLPDIELRDVRSLLSLRRRLKRQEHGTRIRIRNNLVAQYFPELDKFWNQSQSESLAIVRWCLAPEKLRRLAFEEFFQMVTTRYRGNSQYQRLMKIWSMAPYSIGCKSGKALDLEAQILVEGLKRVQEQIREVDKAIENICASFADYKMLLSIPGFGPYISAVVLAAIGNPQRFRNVSQVKRLAGLDLSANRSGNTSRTAVPVLSKKGKAELRYAVYQAALIASTANTRFMFYYQKLLKGREREKGIRTKMRVKLAAKLLVIAWTLMKKKESFHPGYLKTE

SEQ ID NO: 299746 - protein, 451 aa, unidentified
MARKGKARKTDGAVLPVMRPHAAGIDIGATEIFVAVPVDRDAENVRSFPTFTRDLYALADWLKKCGIETVAMESTGVYWIPLFQILEDRGFEVCLVNARHVKNVPGRRTDVSDCQWLQFLHSVGLLRASYRPDQEVCAVRSLLRHRESLVQMGATHVNHMQKALDQMNLQLHHVISDITGLTGLAIIDAILSGEREAFTLARLRHERIKASEEVIAKSLVGDYRIEHLFTLRQSLIAYRSYQQLIDDCDREIRRSLDTFQPPQAPGDSDDQPESKKRTASAEAGLRTELKRVFGVDLTKIPGIRTGIAQMLFGEIGPDFTKFRSASAFASWMGLCPDNDISGGKVLWVGTRKVKCRAATSLRMAAQSLHHSKSGLGDFYRRMRAKLGAPKAITAAAHKLARIIFHLVTTRQEFDDTRFAADQLRYMRRQENKLRAKAHALGFQLIPLENAG

SEQ ID NO: 299747 - protein, 452 aa, unidentified
MDDKITLDVINKNAAGIDIGSRSHWVAVGQKGSQIKEFGVYNENLYQLADWLSEHGVKTVAMESTGNYWQNLHAVLISRDFEVTLCNGKFTKNIKGKKTDVKDCQWIQKLHSLGLLSSSFLPDQDTETLRTFTRHRHNLIKQAASATKKMQKYLRLMNIRLDVVVKDVVGLTGLKIIRAIVLGESDPKKLASLRHYNCKKSEEEIAKALHSNGRKDFLYALKDELDTYEFIQKKIRECDDQIASKLDEIIGKDPEKGEHYIDKKPYKRLNKNTPKNIDINLKSYQMFKGVDLMAIEGMSYNTVLALMSEIGYDGIKKFKTAKHFTSWLRLAPNNKVSGGKVLSSKIGKGSSRLKIALRNAANSIGNLKDSTPLRDFFHRINFRKGRVSAITATARKLAVIIWNMVVKGIAYNNPKGYLYLDQKRKLGLVKRMRKQIDKYGLTNKDLQLAEKQ

SEQ ID NO: 299748 - protein, 338 aa, unidentified
MIVIGVDVHKRSVTAVAIDDAGRMLDDKTVAVGSGELREWAAALSPERLWALEDCRKLTRWLERQLLAAGEELVRVPPKLMAPERRAGKGRGKSDAIDALAVARAALREPALSRPRPDEEPYRELKLLVDHRDAIVDERRRVHQRLRWHLHQLDPTFAVPLRMLARKSHLQRVSRWLARQDQELQVRLARDLVTSCGSLDRTIAELDKELEQRTAELAPALLELPGCGAITAAKLLAEIGPVDRFTTDAQLARHSGVAPLEASSGRIQRHRLDRGGNRQLNAALHRIAITQARIHPGARAYLERKRAEGKSWREAIRCLKRLLVRVVFQTLKTSPALT

SEQ ID NO: 299749 - protein, 409 aa, unidentified
MERQVERCGGLDVHKETVAACVRVGGRTGQAEQHVQTFGTTVGDLLVLRDWLAAHGVTHVAMESTGVYWKPVFYTLESDFTCLLVNAAHIKQVPGRKTDVKDCVWIAQLLEHGLLRGSFVPPAPIRDLRDLTRYRKAVIQDRTRVANRLHKALEEAGIKLAAVASDILGVSGRAMLAALVQGTTDPAVLADLARGRLRGKLPALRQALANRFRPHHAFVLGQLLTHLDYLDEAIATLSTEIERVMAPLAEPLRRLDTIPGINQRTAEVILAKIGPDMRVFPSARHLASWAVLCPGHHESGGKHKSGKTRKGNRWLRTALIEAAAGASRAKHSALQARFRRVLRHRGPKKAVVAVAHALLRMVYHVLADGTVYREAGADSYDRHHSQRVTRRALQALERQGYRVTLEPAA

SEQ ID NO: 299750 - protein, 405 aa, unidentified
MQTVYERCCGIDVHKKLIVACFRNGNKAEIRKFDTLTHSIKELGNWLLDNGCQMVAMESTSVYWKPIYNILELLDLDVILVNAHHMKIVPGRKTDVKDAEWIADLLQHGLLKASFVPGREQREHRDLVRYRKSLVEERSREINRLEKFLEGANIKLSSFVSDLTGVSSRKLIEQVLVGSVNQENIDDLIHCSMQSKRADLLDAMEGTFSPIQKQLIKAILSHIDDMTRRIKDLDDIINNQMKGYEDAIKKIDDLPGIGKRSAEVIVAEIGTDMSRFPSAAHLCSWTGLCPGNNESAGKRKSGKTNKGNKHLKSILIQCAKAAQKDKNSFFYAQYQRLVVRRGANRATVAVAHSMLIAIYHMLKDKVPFKNLGSDYYTKFNTAAKAKYYLRKLQELGAPVPVSPSI

SEQ ID NO: 299751 - protein, 362 aa, unidentified
MTTANRNRSDDASAQGLRLDRGEVVHVGVDVHKATYHVAVYSTARGVLATWVQPARADVLLGRLRPIRRHVAAVVHEAGPTGFGLARRLRGDGFPAQVIATSLLLAPVSPEAKTDRLDCRRLALHSAKGLLKPVRVPTEQEEADRQVLRLRERLVRKARTARQQIKGFLLQHGVDEPDGLGHWAARAVEALRRLELPPELRFCLDVLLDELDHARRQVARATERLKALARSDRHRASAAVLRSVPGVGLVTSMTFHLELPEPGRFGRGGQVARMAGLAPQVRQSGPTRREGGLMRSGNARLRTALVESAWRWVARDEAAAAVYRRLVSNTGSGKKAIVGMARRLGVLLWRLSTRGEVYRTAA

SEQ ID NO: 299752 - protein, 415 aa, unidentified
MKVVFPTCCGVDVHKTFVVATIITTPADSLQPHYQKKRFSTFNSDLNRFADWLLEHNCLDVCMESTGKYWVPVFNILEKRGIRVVIANPKWVKAVKGNKDDTKDSKWIGDLFRIGLVKSSFIPDRDIRILREFTRYRYKLVSMKSSEKNRFQNAFTVCNVALDSVVSDMFGKSATAITDYLTSDESFDPDHCVSLLQQTLKKKAEQVLESIEGFSIADEQKVRIKIVREHYNFIEKLIAKVDACVNEMVAKYEGEINLLCTIPGIDRNSAITIISEIGTDMRQFGSSKRLCCWAGLTPGNNESAGKKKSVRISRAGVYLKPALVQVAHAAVKDKNNPYYALKYERIAKRRGKKRAIIAIARIILTTIYSMFCTGEVWNPVDLFKIDMPEHLKEQPLQKAIKQAIRFLEKQGLSVA

SEQ ID NO: 299753 - protein, 342 aa, unidentified
MNIPTRIGMDTAKSVFQLHGVDENEVVVVRRQFRRAEMIRYFEKLPPTLVAIESCGSSHHWARLLQSFGHEVKLIPPQYVKPYVKRGKNDAADAEALCEAVTRPTMRFVPIKSQDRQAACMLMTVRERLVMVKSQLSNAFRSYAAEFGIVGPAGRQNVNALIKRVLEEDNLPELARELFCFQAGEYAAVEARLEEVDTKLMKWHRADELSRRIATIPGVGPIGSTMLSMKAPPAETFRSGRDFAAWLGLTPRDHSTGGRTRLGGITKAGDPSIRSTLIVGATALLRHVRNGHTKPSPWLAGIMQRKPPKLVAVALANKFARIAWRLMVSGGVYSREPAAMAA

SEQ ID NO: 299754 - protein, 344 aa, unidentified
MGEVTTIGLDVAKSVFQIHGVDAVGTVVVRKRISRAKVLEFFSILPSCLVGIEACPSGHHWSRELRALGHTVRLMPPSYVKAYLKRSKNDANDAAAICEAVTRPSMRFVPIKSEQQQSGLILHRSRQLLVRQRTMLSNAIRGHLAELGIISAKGRNGTSELFKIIADEKDGRIPAAARFSLDVLARQHAAIAAEIGAIEKRIHAWHRSSEESRRLEQIPGVGPIVATALVSEVGDWKEFASGRSLAAWIGLVPKQHSTGGKERLGRISKQGNRYLRWLLVAGAMAVIRYARQHGTRRLWLARIMERRPIKVAAVALANKIARMAWAMMVRAEPFKEPRLLPAAA

SEQ ID NO: 299755 - protein, 436 aa, unidentified
MRGCRCSMIMGFTKPIEHFNLQRKKVITMNTLYVGIDVSSKSNVVYLMLPNGDKHSNFSVANSHEGSTLLVKKIYSALTSHSLDTVLIGLEATSVYGDNLVYFLREDATLAPFNRKIHVLNPKQVKKFHDAYNDLPKNDYVDSFVIADCLRFGRINKEVYMGDYRYKALQNLTRARFFAVQNLVKEKQRFMNVLFKKYSTMTQEKVFSDTFSTTALAVYDEFESAEALANMDLHELTDFIIEKGKNRFPDPDAVAKAIQKAARSSYRLPKTVNDSVNQVLSISITSMKALESQIKEFDKAIKALMELLPNVLISIPGIGPVYSAGIMAEIGDINRFDNQAALAKYAGLAWKQHQSGGFESEVTRLIPSGNRFLKYYLCEAAFSLVRCDKEYSDFYHLKYKEVNRCQHKRALALTARKFVRLVFRLLKDNRLYCPAK

SEQ ID NO: 299756 - protein, 380 aa, unidentified
MNVTTVGVDLAKHVFAVCEGDGRGHGGRSSILKQGEFLKWLRTLPAGTVVAMEACSSAHSWGRTMQALGLEPRLIAAEFVRPYRKNQRVKNDSRDAEAVLTALHAPGMRFVTIKTEDQQQRLAWHRLREGWKAERTALFNRIRGLLTEFGIVVELGATKIRRKLAELEGDEAYPQNIRLMAQCVREQVGMLDQRLAECERQIARQSKNDPVVARLRSRPGIGLLSADAIVATVGDARQFKNGRQFAASLGITPRQHGSGGKTHLGAITRRGDSYLRCLFVQGARCVLQAALRLHKNKPDTLNRLQLWMVKLNDRVGYHKAAVAIANKHARQVWAMLTRGETYNADAYKDWEAAHANVCPGDIHRASNDDLSTAALAAASV

SEQ ID NO: 299757 - protein, 343 aa, unidentified
MKHYIGLDVSMKRTFICVINDEGKIIHEGSENTDPHLIADYLSKLRLEEMTVGFESGSLTPYLLSGFKERAIDAICMDARKLSPILALKVNKTDKNDARGIAEALRCGMYTRVHCKPEESINRAILLTSRRALVEQQTHLKNTVRGLLKSYGIRLGSISAKKFSAAVIKQIESCNEIVILSLKCLLDAFDKLVEETGKIDKKMLEIAYYDKEVQRFMTIPGVGPVTALTYKAEIFDATRFKESRSVGAYLGMTPTQYASGETKRQGKTSKCGSKELRFLLTEAGIVILTRSKKWSKLKAWGLKIMRKKGLKKAAVAVGRKLAVIMHRMMLEEKDFIYGEPKAA

SEQ ID NO: 299758 - protein, 372 aa, unidentified
MNYNTVYVGMDVHKESFTLCAYTIDAEKGSHFQRTEADYKNVLKYLEFLRTVYGNDANFICGYEASCLGYTLYHQLTEHDVNCVILAPTTMLEQRSKRRIKTDRRDAEIIGKCLAQHNYSPVHIPTATDEETKEFLRMRDDHKLALKKVKQQILAFCLRHNYRYDGNSHWTAAHIKWLKSLNPEALYKEILDEYLLTYTTLSDKVERLDKRIEELASKDEYRESVKKLCCFIGIKTHTALSVLVEVGDFQRFASAQNFASYLGLVPGEDSSGDGQTRLGITKAGNRHVRMLLTEASQCYARGQIGFKSKELKSRQAGNSPQVIAYADKANERLRRRYYKMVLGKSKKHNVAKTAIARELACFMWGMMTEHIA

SEQ ID NO: 299759 - protein, 310 aa, unidentified
MEQNFIGIDVAKDRLDVHVFASEEAFAVARNSEGLAALLERLGPLKPHLVVLEATGGFEQTVAAALVAAAIPLAVVNPRQIRDFARATGQLAKTDALDAKVIAHFAAKVQPEPRPVPDEQARALGELVARRRQVIEMTTAERNRRRQLTNRRLLKSVDRLLAVLQKELTELDRDIGEGIRGTPAWRERDDLLRSVPGVGNIVARTLIADLPELGRLDRKQIAALVGIAPLNRDSGKMRGKRTTWGGRAKVRCVLYMAALVASRRNPVLATFYQRLIAAGKAKKLALTAVMRKLLTILNAMVRDNRRWQNA

SEQ ID NO: 299760 - protein, 361 aa, unidentified
MTIMPDHSTHVIGGVDTHGDTHHAAVIDTLGRHLADREFPATGAGYRSLTSWMRSHGAVTAVGIEGTGAYGAELARTLIRSGLMVVEVDRPDRKTRRLRGKSDPIDAYAAASAVASGRATGTPKTRDGIVEAIRALRVPLRSAVKARTQAINQARQLLVTAPESIRAPLRDRSWRDLARACARLRPADLSDPVGATKAALRHLGRRILALCDEIEELNEALASLTVRAAPELLALHGVGPDVAGQLLATVGDNPVRLRSEAAFAHLCGVAPIPASSGRKDRHRLNRGGDRAANHALHTIVLCRMRWDERTREYVERRTQQGFRRRTSCAASSATSPARFTRSSPRHPAIPPSPSRWRLDSP

SEQ ID NO: 299761 - protein, 355 aa, unidentified
MTHKGLVSTGGGCVGGVDTHGSFHHAAVVDGVGRFVGDRRFPASARGYRDLLGWMRGLAGAGGLAAVGVEGTGAYGAELTRVLAAAGVRVVEVDRPDRKTRRLVGKSDPVDAYAAASAVLSGRASGVPKGRDGLVEAIRVLRIARRSAVKARTQVINQIRAILVTAPAPLRESLSGMRFNDLAGTLARSRPGLDLTEPQTATRVVLRRLARRHHTLDTEVRELDHDLTALVRQAAPELIDRRGVGTDTAGQLLVTAGDNPHRMRSEAAFAHLIGVAPLPASSGKTQRHRLNRGGDRHANNALYVITLSRMRHDPRTQNYVTRRTQEGLTKHEIIRCLKRHIAREIYRALTTPTPT

SEQ ID NO: 299762 - protein, 354 aa, unidentified
MKRTTKYVALDVHQATTLASVRTETGRVIARSILPTEAPAVVECFRGMRGTVHVAFEEGTQAQWLHDLLVPLVHRVVVCDRHGEKRRGNKGDQVDADGLSARLWRGELRAVYHGSPHRATLKELTRTYRNLVEDATRVMLRLKALFRARAIPTPGTRVYQVRDRATWLAKLPERGVRFRAETLYAELDVLRALRPKAKGAMLAEARRDPAWSVLRGIPFLGPVRVALLLATMQTPWRFRTKRHLWAYAGLAVVTHSSADHEMQHGRPVRRRRAPLTRGLNPNHNRVLKDVFKGAATAATARVGPLQAFYRGMLARGMREELARVTLTRKLAALTLRLWKKGERYDPTQLTQQAH

SEQ ID NO: 299763 - protein, 411 aa, unidentified
MLYVGIDWADDHHDICCTDDTATTLVQCQIAHNTEGFATLHAQIAKHQTNPAAVLVALETTRGLLVYDLLRQGYQVYAINPKAVNRYKDRHVLSAAKDDRLDALAMAHLLRTDRHRFKPLAPAPAHYRLLDRLCLDLRKLIDEKTRLSNQIASCLKEYYPQAVGLFRDVASPIALAFLQAFPDPDTVRQTDRSAFAAFFRAQHYTHPQRVDTLYERTHAPTPEADPVVVQAAKMRLAALVAQLAVVRTHQGTYEHTIQTILEEVPEAQPLATLPGIDKRLVPELVAALGPHRPEEPKRFAAASDLVKLSGCAPITRASGKRRTVLRRRACDKRLRRTFYDWAMASLSWSRWARAYYDHHKAQHQAHATILRGLGQKWAKIVYAVWSSGDAYDEARHIEQLKRHEVVWALSL

SEQ ID NO: 299764 - protein, 414 aa, unidentified
MDVIHPRCAGLDVSKRDAKVCVRIAGTGRGKATSTVTTWSSVTNQVLALRDHLVAEQVTAVVMEATGDYWKPFYYLLEDGPFEVLLVNARHVKNLPGRKTDVSDAAWLAELGAHGLVRGSFVPPEPIRQLRDLTRTRTTITRERAREIQRLEKLLEDAGIKLSSVATDISGVSGRAMLEALIDGQRDPAALADLAKRRLRSKIPALTEALTGRFGDHHAFLARLHLDLIDQHTTAIDELSARIEVVIEPFRGARDLIVTIPGISTGVADVIIAETGADMTRFPTAGHLASWAGTCPGSNESAGRVKSTHTRPGNPYLKGALGVAAMSAARSNGTYLSAKYRRLAARRGPLKAIVAVEHAMLIAIWNMLGTGAFYDDPGGDFYARLNPDKAKNRAIDQLRKMGYAVTLNPLAAAG

SEQ ID NO: 299765 - protein, 410 aa, unidentified
MTTTNDKTECKTLVAIDISKSRNDILIQRPGRKRYRMQITNDRADHDRFIQHVMEIGEPVHVCFEATGNYHRPIAWRLLSAGFSVHLISSVALARTREALHNGWDKNDPKDAQVMLYMLAAGQVQRYYDPLEHETNDWQELSKTHEAISKGKTEVLHRLMTHYMPLYFPEIDRFRHNSRSEWFFRFLYEFPTPYSITQLSKSEFIRAAWNVIDRKVNKTQVLSDIYETALTSIGLPVNLDSPAVSMYRLVIMQMRQLIQHRDEIERQANRQLSGHPDFERLQQIPGIGPIHALTVLAEAGDLRRFDHYRQFLKFCGFDLATHQSGQFRGQSKLSKYGNARLRRSFWMAGQVAIRQRENSFRDKYQRYIARDRDNRDLQRKALTAVAAKMARVAYSIIKHETDYRPFYGVR

SEQ ID NO: 299766 - protein, 313 aa, unidentified
MIIPFRYVGIDVSKQYLDIFDEDLGVPERIANATQAITQIAARWRCDVLVVFEATGVYDLELREALNQAGIRFARINPARARDFARASGQLAKTDPIDARMLAAFARAMQPVSEQAVNPARTALASLAKRRDQLVLMRAQEKNRRSEADDLAIADRISRLIEVLDGEISGIEADIKGLIKAEREIADDARLMRSMPGVGPVACMQLIAKMPELGRVGAKQIAALAGLAPFNVDSGAFRGKRKIAGGRKRVRDALYMAALNAVRRAEPFKTFYARLRQAGKPAKLALIAVARKLLTVLNAMMRDRKPYLKTEPT

SEQ ID NO: 299767 - protein, 318 aa, unidentified
MNNEVIYVGIDVSKENLDLAINPKKQVRRFYNTATGIGKIVDHITKTGSTLVVMEASGGFEIPVAAALGESGIPTAIVNPRQVRDFARSTGKLAKTDAIDAQILADFAATVHPEPRPLADHQAQELKDILARRRQLNEMITAEKNRLQRARGALRDHIRAHIAWMKKEMLDMGSALRHLIEESPMWREQDNLLQSVPGIGPVLSSTLVAELPELGNLNRKQIAALVGVAPYNRDSGKMRGKRSVWGGRASVRAALYMGALVATRFNPVIKRFYERLIGAGKAKKAAITACMRKLITILNTMIKHQTFWHYALEPAVLS

SEQ ID NO: 299768 - protein, 342 aa, unidentified
MQIHSIGIDLGKTTFHLVALGAAGKVLFKKKFTQKQLLVYTANLQFSLIGLEACSGAHFFGRALRKQGHDVRLMAAQFVKPFVKANKNDFVDAEAIAEAVERKNMRFVPIKTDDQLDLQAVHRVRDRLISRRTAVINQVRAFLLERGLVFAKTPAKLRNAMADILENADADLTPQMRNLVNMLWSEWKLIEQQIVALTDDLERIAASDAGCTRIRKIPGIGPIVATAIVAAIGNGAAFRKGRDFAAWLGVVPRQYSTGGQAKLLSISKRGNVYLRKVLIHGARTAVLRIKRDRAAPSWIDWTPELPRTSSWLRWPTSLLYCMGCIVQRTGLPAGTNQLGRMT

SEQ ID NO: 299769 - protein, 357 aa, unidentified
MLGMGDSAPRKGADAMTFVGCDLHTRMQQVAVLDTGTGEVSEHRLPHEGTAVEEFYAALPRPVTVGIESTGYAVWFHTLMQRLGHTLLVGDAAKIRAMVVRKTKTDRRDALHILDLLHHDRLPAIWVPDPATRDLRALLTHRMRLVRIRTMVKNGLQAIALNSRLACGSKLLRQAGVAQLQALALPPHTARRRDQSLELLAGLTTQIRELDDAITTAALGHPDAPRLITHPGVGALTALTTIVVLGPVSRFHDSKHVVSYVGLAPALHASADKYHLGRITKQGSPLLRFVLGQAAAHAARMDPDLKRTYGAIVHRRGRPKAKVAVARKLLVRLFIMLRDRIDYDEFRRRGRAALAAA

SEQ ID NO: 299770 - protein, 447 aa, unidentified
MQRRTVGIDLAISAVQVAQIFDDGVPVGKPLRFRLTANDLKQFVDAVVRDVPPGVPILAVMEPTGMAWFPVASWLEGAGVRAIRVKGQRVKALRQYLSEHAKTDLADAHVLGALPGFGSRSLDPVHIPSPQHHALQRLTKQRHRYQELICSSRRRILDLIRWACPELEPVLPDTTTRLTLALLADFFDPHRVLKTRRDTLARFIADNASGNHPHSGPFVDELVESLKETARGTIALHADRLDFQALQFEVRQEVEMVRLLSQNIAELEKRSELLYEQVHPSNALRSIPGIGVTLAPLLAGVIARTERFRNERQIRGFCGLFPKKNSSGGIERPGQRITKSGSDRIKRALYLAADIARKIDPDLAAVYWRLMVKKGHHHKQAICAVATRLVNRIYKIMKTGQRYILRAPDGREVSVAEAKQIVRDQFSVPEEIRRARRRQAEITPSPA

SEQ ID NO: 299771 - protein, 330 aa, unidentified
MQYLGIDISKNKFDCCIFLNNQKKKTKVFDNNHSGFIKLNEWLQKLEIEILELVAVMEATSIYHENLAYFLYSNNIKVCVANPARVRKFAAGISVLTKTDEVDAEVLVKYGELAPYNIWQPDSDQLRLLKQLLLRRDAYTSELNRERNRLDQAYSNNTNSKLIEIIQLDIENINNRIQYLDKLIDETIDDDISLKQDLCLLESIPAIGKRTALTLLTLFKGKSFTNAGQAAAFCGLIPLQRQSGSSIRGVSKISRSGSSKIRSKLYMAAVVAIRHNPHIKIIYDRLLRNGKAKMAALCAAMRKLIHIAFGVLKHQKPYNENLIGFAKIPC

SEQ ID NO: 299772 - protein, 389 aa, unidentified
MFYIGIDVGKFNHCACVISSEGEVLIEPFFFTNNLDGFDSFIKAVKKFKSPRHIVGLEATGHYGDNLINFLITHDYEVALINPLTTDAKRKSKIRKTKNDKKDTFLICSVLFDRDYTRVTQRKLDMKQARELTRYHASIAEDINQKKNQLQKCIDIVIPEFNTWFKTKYSKAYMAVLKEFGSSYNLASANLAHLKKVLKPKSSGSRVNIDASSLRSSAKKSIGENNEAVTLEIKMLIENIELLGSQLKTVDKKIEELAVKLDSPIFSIPGIGIYTGMSILSEIGDIHNFSSAVKVMGFAGVDPGTYQSGEYSAPRTALSKRGSRYLRKSLYQCILTVCKYNLTFNKYYKLKRLQGKSHRCAQGHSVRKLIRVIYKLLSENIQFDEKLLI

SEQ ID NO: 299773 - protein, 441 aa, unidentified
MEVVYRRCCGIDIHKDFITACVLVNEPGKQREVRKKEFRTYWSDLQKLKLWLYASKVEQVAMESTGVYWKPVWNVLEGHFPLLLANPYHMRNIPGQKTDQKDCEWISDLLAHGLLKRSFVPERPIQELRDLTRYRTKLTGEHNRIHGRIAKIMEDANVKLGSVASDILGVTGRRIIKAIIAGQEHPDWLADKACGTLRAKRDQLRLVLKGRITDHHRYMLSELMADLDRIEAKILRLETEIANRMKPHADVIDRLMTIPGLKLITAWTIIAEMGTDMAPFPDAAHAASWAGLAPGNNESGGKRRSGRTNKGNRWLRRALVQSAWAVSHRSNCFLTAQFYRRAARRGEKKAIIATAHQLLVIAFHILRDGTVYREKGGDYFDQLNPERTKQKLIARLERLGFDVILGNSTHPVPSPSVPQPSPRRRGRPCKCVERGIDCKHS

SEQ ID NO: 299774 - protein, 401 aa, unidentified
MVSDFRKGRYNLMKIYVGIDIAKLNHFAAAISSDGEIIIEPFKFTNDADGFQLLVSKLESFDKNSLIIGLESTAHYGDNLVRYLVAEFYQVCVLNPIKTCQMRKNNIRKTKTDKVDTYVIAKTLMMQDNLRFVSFFDLDMMDLKALGRFRQKTIKQRTRLKIQLTTYVDQVFPEIQYFFKSGLHQHAVYALLKEAPSPKEIASMHMTHLANLLKVNSHGHFTKEQAKELRVLAQKSVGANDSAISIQITQTIQQIELLDSQLEKIEAEMTDIMKFNDSVIMTIPGIGYINGGMILGEIGDIHRFSNPNKLLAFAGLDPSVYQSGNFQAKTTRMSKRGSRVLRYALVNAAWNVVRNNATFKAYYDAKRAEGRSHYNALGHCSGKLVRVIWKMLTDNVEFNLK

SEQ ID NO: 299775 - protein, 388 aa, unidentified
MANGLVRREVRTFKTTTKELLALSDWLAGEGCTDVAMEATGVYWKPVWHILSDGDVTLVLANAAHVKNVPGRKTDVNDATWLADLLAHGLIRGSFVPDEQTQEMRTLLRTRKQLVRECSRHVQRLQKTLEDANIKLDSVITDIMGLSGRRMIEALIAGESDPGRLAQLAHPRLKATPEALREALRGRVTRHHRLLLRLHLQQIAAINAAIEQIDREVDAQVEPFRAMIALLTTIPGVDELSARVILAEIGRDMSRFPTAGHLISWAGLCPRNDESAGKRRSTRMRKAAAWLKTTLVQCAWAAARKKASYLQAQFHRLRARRGAKKAIGAVAASILTAVYEMLKTGALYEDLGSHHFDRCGKRRQIHRLVSRLHNLGYAVQITPLPADA

SEQ ID NO: 299776 - protein, 319 aa, unidentified
MDAARTPETWIGIDVAKAWLDVASTAEERPWRVANDDDGIAVLVTDLTARAPRLVVLEATGGHERAVTAALTAAGVPVAVVNPRQVRDFAKATGQLAKSDALDARLLALFAQRVQPPIRPLPDDTAQALAALLARRRQMLEMRTAEQNRRPSLAPRLRPGLDAHLVWLSQQLAELDRALDQTLRDSPIWREKEDLLRSIPGIGPVVARTLLGDLPELGTCDRWEVAALVGVAPLNADSGTRRGKRCTWGGRGMVRAALYMAAISASRHNPVIRPYYRRLRDQGKPVKVALVACMRKLLTIANAILRDGVPWSPNPAPAA

SEQ ID NO: 299777 - protein, 345 aa, unidentified
MDHVAIDLGSRESQICVRSSDGQVLKEERVPTRSLGKYLARRPPSRVVLEACAEAFSVADAALAAGHETIVVPASLAPSLGVGDRGIKTDVRDGRNLSEASCRMSRLPSVHVPTRASRDRKSMCGVREALVQARTKLVNTVRGWGRAQGIGTIRSGSVTTFARRLREQVSEQQGEVPAYITRTLIAIDTLSVQICEADDEVEDKAKEDPTCRLLMTAPGIGPTASVRFAAVVDEIKRFPGAHRLESYLGLTPGENSSSTRKRRTGVTKAGAPKVRWALVQSAWVARRYYKDDPLVVWSFEVEKRRGKKVAVMALARRLAGVLYAMWRDGKEYNSHHVARAPMPTR

SEQ ID NO: 299778 - protein, 385 aa, unidentified
MTHPAQVSSFIPRDYDLFGGLDVDKKSMAVTFTDHRTMRKSFKLPYSASALLNYTRKHFPGQRVAFVYEAGPTGFGLYDELRAARHTCLVVSPSMVPTVGRPRVKTNRLDSAKLSVGLRGGQLRSIHVPSESYRELRHLVQLRDTQVAQLRASKCRIKSLLLYEGIPFPAANGKWSANVLRELEVLPCSATVRFKLDQLIDALQFHFLSAAKVQQEIRRFCQNDPELRQSISFLVSLPGVGSITATHALARLGDWRQISNVRQIAGFLGLVSSEHSTGDKENRGEITRIGDSRLRNKLIQCAWTAIRKDPELRAFYRRIYERQPKKVAARKAIVAVARKLTTRMYAVLKEQRPFVIRPDSSIAPLTVEETVGPRERLDTAQNEQL

SEQ ID NO: 299779 - protein, 388 aa, unidentified
MSQSFDASQSLTALDQANTIIAVIEMSKAKWLVAALVPGFKRQPLKKLDADAPALLKLLQRWRDEAGRAGHPIKRIAVAYEAAGDGFWLARWLRGRTIEAYTIHPASVAVSREHRRAKTDRLDTELLMRAFVGWLRGEKRHCTMAAIPTMEEEDARRPSRERERLVGEQTRLVNRIKAILARFGIRHLRLSLRQAADRLEAIRTAEGTALPHNTRAELHRFLERLSLVRQQIRAIEQERERKLAAAPATENDRHPMVRLIARIIGIGVETADMLVHEILSRGLRDRRAVARYAGLTGSPDESGQRRREKGLARAGNARVRRGMIQLAWRFLSFQKDSNLAQWFQARTSDGRKTTRKTMIVALARKLLIALWRLVTTGEVPHGVVLRAA

SEQ ID NO: 299780 - protein, 388 aa, unidentified
MSKPFDLSKSLTALDQDSTLIVVIEMSQSSWLVAARAPGLARDPLKKLPPDPEQLFKLIDRWREESRRAGRVVRRVCVAFEAGRDGFWLARLLRQHDIEAYVIHPTSIPVKRDHRRAKTDRLDTELLMRAFLGWLRGEADHCSMAAIQTLAEEDAKRPTRERESRVNARSRLVNRMKGALARLGIRGFNPKLRKAAEKLEELRTGAGEPLPPNTLAELRRDMAQLRFVADQIKQIEKAREARLEKAPREGAHPMVLMLASIKGVGLETAEMLVAEVLSRKLRDRRAVARYGGLTGSPDESGSRSREKGLARSGNARVRRGMIQLAWRFLMFQKESALAKWFEARTANGPRGVRKTMIVALARKLLIDLWRFVEDGTVLVGVELFDSRA

SEQ ID NO: 299781 - protein, 355 aa, unidentified
MTASYDYHIGVDYHKSYSHLVVQDSAGKTLRSGRVKNDRQSLGGFLERYRENSHAVVEATRNWMVIYDWLDDICDDVVLAHPLKVKAIADAKIKTDKIDATVLAHLLRADLVPEAWAPSEKSRDLRVALRERMFYVRLRTMTKNRIVTVFDRYPEQTAQLKKLGDLFGKAGRVQLAQVNVSEIDRIQIDRGLAFIGDIDGRIKQSEATIRTMTKANGNVRLLKTIPGIGEFFARLIDAEIDDISRFRNAKKLAAYAGLVPSTYSSGGKTFHGKIIKQGNKWLRWAFVEAVTPAIVTDAQLRAQYEHLKFRGVNKARVAVARKLLTIAFQILRDQRAYEPRGASPTEGASTISRLS

SEQ ID NO: 299782 - protein, 316 aa, unidentified
MSEPVYVGIDVAKNSFEVAVSDQAQTLRLRNDELGHAELCRMLVPLAPRLILLEATGGYEQSLALALAAVGLRVSVSNPRQARDFARCTGKLAKTDRIDAQALRAFAGLLDAQGHEPRALADEQRRELTALVVRRRQLVAMLVAERQRLGVAHARAKPSILQIMDAIAAQLHDIDTQLKQHVQAHHADLSRLLTSVKGVGQITANTLLAQLPELGQLNRKQITALVGLAPMNRDSGTLRGQRHIFGGRADVRRVLYVAALVGTRFNPVLKAFYVRLLAAGKPKKVALVACMHKLLIILNAIARTNLPWRDDPLSAQ

SEQ ID NO: 299783 - protein, 410 aa, unidentified
MEVIVERPAALDVHKAQVTACVRVPGQGGRRRSEVREFSTMVGGLLVLRDWLKAHGVTQVAMEATGVYWKPVWAVLEDDFELLLVNARHVKQVAGRKTDVSDAGWLCQLLEAGLLRPSFVPPKPIRAVRQLTRYRKAQIKERQREAQRLHKALEDSGIKLDCVATDILGKSGRAMLDALCRGTTDPEVLADLAHGKLRRKIPQLKQALEGRFEPLHALLVSSILAHLDFLDEQIERLSEAIEEQLRPFAAAVELLRSLDGIETRTAQNVLAEIGVDMSVFPTAGHLASWAGQCPGNDQSAGKRKSGKTRKGSKWLNDALKDAAMAAIRTNDSYLQAQYQRLRPRIGHGRAIGAVKHSIICACWHMLTTGELYRDLGGDYFRRRDHERQTKRLVAQLERLGHTVTLEKAAA

SEQ ID NO: 299784 - protein, 361 aa, unidentified
MFTERTSVGLDVHARSVVAAAIDGVTGEVFRARLTPGNEEILGWVRALPGPSVVVYEAGPTGFGLSRAFTAAGIRCEIAAPSKIQRPAGDRVKTDARDAMLLARLLRMDEIVAVAVPSVEQEDARDLVRAREDVRGDLMRSRHRVSKLLLRQGIVYYGGHAWTGTHLAWLRAQHFDTPGLALAFDAEHEAVLAAEARRDRLDEAIGAMAADSQFTPVVRRLGCLRGISTLTAFGLAVEIGDWDRLTGASIGAYLGLVPTESSSGASRSQGSITKTGNTHARRLLVEAAWHHHKPYRTPGATMRARWELAPAAARARGHAGNRRLHERWLRFTERKKRPVVANVAIARELAGWCWSLAVMDP

SEQ ID NO: 299785 - protein, 358 aa, unidentified
MADKVTEVAVVGGVDTHKDLHVAAVVDQHNKILGTQHFSTTRQGYRQMLAWMASFGALKRIGVECTGTYGSGLLRYLQNAGLEVLEVTAPDRMERRKRSKSDTIDAECAAHAAFSGIRTVTPKTRNGMIESLRVLKTCRKTAISARRVALQIIHSNIISAPDELREQLRNMTRMQLIRTLGSWRPDASDYRNVTNVYRISLKSLARRYLELHDEIADLDVMIAAIVDELAPEMIKRNAIGYESASQLLITAGDNPQRLRSESGFAALCGVSPVPVSSGKTNRYRLNRGGDRAANSALHIIAIGRLRTEAKTKEYVARRVAEGHTKMEAIRCLKRYISREVYTLLRNQNRQVNSIPITA

SEQ ID NO: 299786 - protein, 349 aa, unidentified
MRTKPKPNATAYGIDIGKKVFHVVSLDADGRPLQRAKFSRETLMSFFEAADSALIGMEACAGSQWLARKLAAFGHDAKIIPAKFVKPYVKSNKSDTIDAEAIAEAVTRPTMRFVQVRSEAQVDLQALHRIRDRLIRNRTGLMNQARAFCIEYGLAMRTGAGGFHADIRRHLADSENDLTGTMRALLSDLLDDLAHIEKRVAELTKEIEAIAHSNETVRRLLTIPGIGALGATALVAAAGDVRQFRKARDMAAWLGLVPAEHSSGGKQTLLGISKRGNGYVRRLIIHGARSCFLHLHRETHALGRWLSGLEERTHRNKAVVALANKLTRIAWAILTRPGENYLRTKGAAA

SEQ ID NO: 299787 - protein, 430 aa, unidentified
MEVIYPKACGVDVHKSFIVAVICDSTSVKPQYLRKRFSTFNNSLIEFRNWLLANDCHNVCMESTGKYYVPVYNALEGHISNVVVANPKWVACIKGEKDDNKDAKWIADLFKLGIVRSSFIPNKDIRILRELTRYLYKLTNMRSSEKNRFINALTVGNCKLDMVFSDIFGKTSSAIIDTILSQNEYNDEEILKNVDWRCKSSNEDILNSISGISWEDSQKQRMNVIQEHIDYLDKSIKTIREIINTIITPYESAVNLLCSIPGIKRNSAITIISEIGTDMSQFSSHYRLASWAGLAPGCNESAGKKKSVKISRAGVYLKPALVEVAHNAVKDKNNPYFANKFNVISKRRGKKRAYIAIARKILVAIYHMLSTGELFNPSDASKVETTNKDKIKFTKNNFIQSTKQLLSLGLTVDELQTFITSKISDLTPIT

SEQ ID NO: 299788 - protein, 457 aa, unidentified
MSSESLYVGVDLSKRHHVAALISTSLLGKHGRFEDCPTLSFAQSRAGFEQFYAALTGHAPPAQIYVLVERTGHYGAALEQFLHEQGIAVYRVHVREHVSRSKTDKRDAQALAVLLYNQIELHIPVLDKTQRARPIVPPTPTATLLRGLVQHRQELVREATQRKNQLTSIADELFPELEQVFRDVNSASALALRKAFPTPQAVASADLLALCATRPYSRPGSRALATLQELASRTIGTKNEWRMRSLVTEQSQLIVELSLLNTHVAALTAEIEKLVRADRAGRILLSFPCVGVTHASVILAYIGNIGNFQTEAQFKSFCGWAPTEFQTGVSFDYSVLKKSGHSMLKQTFYLITMATIHHDTRWAELYQRLLPTKAHYNARKGKWEGTMSIIGRVAGQMAGVMYTLLKRDAEVLASLKEGEEVPEPELYDPAKHFIGKRAQSLHVRPPVLRLLEQAGGE

SEQ ID NO: 299789 - protein, 292 aa, unidentified
MRFYNTQHPFDCGIDLHARMIYVCILDPSGEVLVHRNMKTDPEAFLRAMAPYRPDIVVAVECLFTGYGLADLCADEELPFVLGHALDMKAIHGGKARHDQIDSPKMAVRLRGGMLPQASVYPAERRATRALLRRRMHLAHKRGELLAQVQPTNRPYHLPAMGQHIAYPANRDGVAERFADPAGQNSIDVDRSLIGYDDARLREGELTLLKTAKPQDANTLYRRQTVPGIGKILSLVLLDEIHPIDRFPRVQELASSCRLIKCAKESNGKRSGTSGSNMGHAHLTWAFSEAAV

SEQ ID NO: 299790 - protein, 359 aa, unidentified
MNATTVGVDLAKNVFACCVADAVGRVIETREFNRAGFLAWLTTLPRDTVVAMEACGGAHCWGRTMSALGLAPRLMSAEFVQAYRKRQAVKNDRADAAAIVAALHAPGMRFIPVKTETQQQRLAWHSLRRGWIEERTALLNRIRGVLSEFGIVIENGATRLRRRLAEYESDPAQPVPIRHLIQEVRAQLGALDVRIAECDRQITVQQADDACARRARDLPSVGRLTADAVSASVGDASMFHNGRQFAAWIGLTPRQYSSGGKPKLGRITRRGDDYLRSLLVQGARSIFAATLRKSRTAPDKLTRLQQWIVRLNARVGYHKTLIAIANKQARQLWAVLSKGEAYNPEAWRQWGEVAEQVAG

SEQ ID NO: 299791 - protein, 401 aa, unidentified
MPELWAGTDAGKAAHHCTVIDADGTKVLSRRVPNNEPELLDLIGDVLALAEDGAVTWAVDLNAGGGALLIALLTGHGQRLLYIPGRTVHHASRGYRGEGKTDAKDAYVIADQARMRRDLQPLQAWDEIAVDLKILTARRYDLAADRTRAINRMRAQLLEYFPALERTFDYAASKAALILLTGYQTPAGLRRVGPSRLATWLKNRKVRDAQAIADAAVAAAQAQHTTVAGESTAAAVVNTLARSVLALDEEIAAVDAKIAARFREHRDAEVILSMPGMGPLLGAEFVACTGGDMDAFGTAGRLAGVAGLAPVPRDSGRISGNMRRPHRYHRRLLRVVYLSAQIAARFCLTSKSFYDRKRAERKSHKQAILALARRRLDVLWALIRDQRTFEAQPPQRGLAAA

SEQ ID NO: 299792 - protein, 317 aa, unidentified
MAQNGTIVGIDVAKGKIDAAIRFGAEACFANSAEGHRELLAWLKEHSVCKAVMEASGGYEKSWARLLRGAGVEVVIADPNRVRHFAKSAGQLAKNDPIDARMIAWFGAVFSQASGQPHDQERQELDQTVTARLGIVRLKEQIESWREHEQPKAVQKAQQALLKAVAIQLAKLETIIAAKIDKTERFAQRAEIIQSVPGLAGTAAAGLIAFLPELGLVDRQAAAALLGVAPFDADSGRRRGERHIQGGRHKLRKLLFMPILSAATQHNPVLKACYQRLIAKGKKAKVALIACMRKLIGILNTMLARGEKWDPARHAIA

SEQ ID NO: 299793 - protein, 340 aa, unidentified
MDHIAIDLGSRTSQICVRDAQGQIVDEQSYTTRHLGTYLRRRPAGQVIVETSSEAFGVARMAQAAGHQVSVVPSVLSRALGVGYRGTKTDVRDARALSEASTRVALPSVHIPSEQSLHWRAMSTSRQALVRARTLLINRVRGYLRTQLTARVRCSSKTMPKAVRRALESSEDGLPGHLEAALASIETLSAQIIAIESEMAAVIDEEPVAKLLMSMPGVGPITALRFMAAVDDINRFGSAQALTSYLGLTAGERSSGQTRRRTGIIKAGPSAVRHALGQGAWQLWRRRPEDPMVLWARRIAERRNTQIAITALARKMAGVLYAMWRDGQPYRPQLAAPPTT

SEQ ID NO: 299794 - protein, 338 aa, unidentified
MKLYGGIDLHSNNSVIALLDEEDRPVYRRRLGNELGLILSELAPHQASIEGLVVESTYNWYWLVDGLMEVGYRVHLANTAAIVQYEGLKYTNDDSDARWLAKLLRLGLLPEGYIYPKEERAVRDLLRKRSQLVQQRTANVLSVQNLLARNLGHSLSANATKRLSTEEVDRLLPGAHLALAVKCNLAVMQALDEQITVLEKVIKASIRPRPEFQPLLTVNGIGEILGLTIILETGAISRFDTVGDYASYCRCVGSEKISNGKRKGRGNRKNGNRYLAWAFVEAANFAVRYNAQIKRYYQRKCARSNGIIAIKTVAHKLARACYYILRDQVPFDVNKVFA

SEQ ID NO: 299795 - protein, 451 aa, unidentified
MSPRSKMKSSFSQSVVPLHNPNAAGIDVGATELYVAVPADRAPSPVRHFSTFTQDLQAIADWLKACRVSTVAMESTGVYWIPIFQILVDRGIEVCLVNARHVKNVPGRKSDVQDCQWLQYLHSVGLLRASFRPPQHICAIRSLMRHRDTLVDMASAHIQHMQKALTQMNLQIHHVLSDITGSTGLNIVDAILAGERDPEQLAKLRDRRVKATKAAIIKSLVGDYRMEHLFALEQSLKSYRHYQGLIAECEQKIQGLVGALESKMDPLKTFLPQNDKKSSKAKSGKTFTLRQELFRITGVDLTAIPGVQVTTAHTLLSEIGPNVSMFPSGKHFASWLHLCPDNRISGGRILSAKTGSGKNRAATALCIAAATLYNSQTALGHFLRRMRAKLGGIQGVVATAHKLALIVYHMLKTKQPYDETRFAYHEQQHKRRMELRLKHQAKAMGFALVPA

SEQ ID NO: 299796 - protein, 432 aa, unidentified
MKHNQSSKQNQRISRISETTLVIGTDIAKHNHVARAFNYRGIELGKRCLFQNDENGLLNLLAWAESIKQEQGLTDVLLGVEPTGHYWFPLFHFLKQRGVEVVLVNPHHVKKSKELDDNSPTKNDIKDAKVVAKLVIDGRYTQPQLPEGVYADLRVLMNQRDRLCGDLNRVKGRIHNWLDRFFPEYRQVFKDWEGKASLITLTHFPLPKDVVAAGETTIVAIWKKNGVKRAVGPKRAELLYRKAQKSIGLTEGATAAKHELAMYLEQYAMLCRQIEQLMEHVAALVEQIPGASHMMSIPCIGLVTVAGFLAEVGDLSGYDHSQQIVRHAGLSLRENSSGLHKGETTISKRGRCRLRALLYRAALTMVAKNPEFRALHVYFTTRRKNPLKKKQSMIALCNKLIRVLFELGRKQKNYDSSKVLGPLREAQLQAAA

SEQ ID NO: 299797 - protein, 342 aa, unidentified
MEHKQKFMQVYGIDLSKEKFDVNFLDANGKEKNKTVKNGLASISGFLSTVEPGSVLCAENTGTYGDLLVFLSNQFGVPIALVPGYTVKHSLGLVKGKSDPIDASRLREYGGRFFDKLSFKEYQSENMSELRQLYTLRSQLVKSRKELVTGAHAREQLPMQSVAVNLILKASLSSLDKQIGEVEKEISLIIMGDAEMAENYTLSVSVFGVGPVIATNVIIKTGNFKAIDTARRAASYAGVCPFPNTSGNMSAKSKTSPFADKELKSLLYMGAKAAVKHNKEYRLYYQKKQQEGKPHYLIMNNVMNKLLRTIYSVVKNKTPYSRDYVCLDPREKNVNGSEKKVA

SEQ ID NO: 299798 - protein, 323 aa, unidentified
MQGKVSFQEDAMPVVYAGVDVSKEWLDVHLHPLGESRRFSNDKTGIRQLKRLLARHRPKSIVMEATGKFHRPAHRSLWLDGFAVAVVDPLRARMFARACGYLAKTDRLDARFLALLAESLRPPADTPPSPHVEALQELVNARSAAKCDITALQNRSKTATTALLRGELNRLVSRLEQHVERLDKEIERRVGEDPQLSRRAEILTSIPGIGRVTALALMAGMGELGTCSGKQAAMLAGLAPIANDSGARTGRRSIRAGRPAPRRALYMAALSACRYNPALARFADTLKAAGKPAKVILVAVMRKLLVLANCLLAHDRIWTPNPP

SEQ ID NO: 299799 - protein, 423 aa, unidentified
MLDQKTNVPQRFIGLDVHKHYLIALGVDAELRVVLPAQRVEFTRLENWMNKTLTPQDAVVLEMTTNTWQLYDELTPRVHSVTVVHPPHVALITRSQVTPALTARCGVTDKIAASILARLLAKGLLVGIWVPPQEVRELRALIAQRSKITRLATQAKNRLHAVLQRHHTLPPAGNLFHPDQLDWWSALPLGPLEKINLQSDWESLHFAETQLTRLTTRMNELAVQDERVLRLIHLPGFGGVTALTVVAAIGDITRFPDAAHLVGYAGLGTRVHDSGLTTRTGRITKAGRKDLRSVLVEAAQIAANTHPHWKAELKRLEPRLGRNKAIVAIARKLLVTVWYVLTEETTDRFAEPERVARKLMHFAYQVGKSHFPREQSPAQFVRQQLDLLLLAPDLHKIAWGKKAFVSLPPSVRLEKKVSDVPHT

SEQ ID NO: 299800 - protein, 316 aa, unidentified
MGPSPLLVGMDVAKATLDIAVRPTAETWSVSNDAPGLDALVLRLGAWAPTLIVLEAPGGSQGPLVAALVAAALPVVVVNPRHLRALAQAVGLLANTDRLDARVIAPCAEAVKPAPRPLPDAETPELRALLVRRRQLVEMVSAERARLDTVPPRIQDAIQAHIAWLTTQIAGLDDALTRASQTHPVWQAKDDVLQSIPGVGPVLARTMLGQVPELGTRGPKPLAALIGVAPFNRDSGTLRGRRPVYGGRAEVRAVLDMGALVATRHNPVIKTFYERLLAAGKAKKVALTACMHKLLTIMNAMVRDLKPWQPQEVPSA

SEQ ID NO: 299801 - protein, 484 aa, unidentified
MAARQRKPRPPAESHAQRVRREAEDVARLAATPVRHPHAAGIDVGDATHWVCVDADGGDAAVREFPAHTPGLRDLVAWLRQSGVTTVALEASGVYGHVLFLTLVEAGFTAVMTAPAFTRQIKGRPKTDRRDCQWIQRLHALGFLPSVFQPDDATQTLRGYVRQRGNLVRLSAQHVQRMQKALELMNLKLTRVLGDVTGVTGLKIIRAIVAGERDPQVLAKLRDRRCQRAAAEIAQALDGRYRPEHVVELRLSLRMWDQYLAAIADLDAVIAAQLGTMRRSSPLPPLPPQPRVRGRKPHDPRFDARTALYYATGVDLTAIEGIDAIHALTLVSELGTDFTKWPTVKHFTSWLGVCPNFKKTGGKVKSSRTRRGKNRAAAALRLAAWGLMRGKSYLGAYLRRQRSRLGAPKAITATAHKLARIIYNLMRYGTAYVKREEAAYAAQVRDRQERQLYRRARELGFTVERIAPPAVDPPPGVAPPSTSA

SEQ ID NO: 299802 - protein, 345 aa, unidentified
MSKASIKSKVSVSSQAFCGIDVSKATLVVAVQREGIAGFERREFANSSAGHKQLIGWLLQRGSGARVSLEATGLYSLDVALALEGAGGIEVAMLNPKIAKLFARSLGRSKTDATDAQALSEYSRRMEFVAWQRPSAALLALRTVGRHIASLVEDHTRGKNRLHAAEGSATAPRCVCQDQKRALKGLEKRILRQRREAVALIRQDAELKRKFEQLISIPGIAETSAVQLLSELAGLDPEMTARQWVAYSGLDPAHRVSGSSVNLPSRISRHGNRHLRKGLYMPALVGVRCDPYFRAFYLELKGRGKAPLQALMAVARKLLHAIFGIFKTGTPYDGAKLFPQLIPTS

SEQ ID NO: 299803 - protein, 337 aa, unidentified
MKLYGGIDLHSNNNVIAIKDEIGKVLVCKKLRNDWEQVQQFLEPYKEMLIGLVIESTYNWYWLVDALIDAKFCVHLANTAAIQQYSGLKYADDNSDAQWLAEMLRLNILPEGYIYPKQERAVRDLMRKRMNLVQQSTANLLSIQGIYMRHLSYRLSNNKIKQLTHEQIAQDHTANTAQAVTATLNVMNCLKSEIKQIESTLLVQVKLRSEFKSLSSIDGIGNILALTIMLETGDIKRFSKPGNYASYCRCIGGARYSNGKKKGGSNSKNGNKYLAWAFVEAANFAIRHNKIVKSYYQRKAAKTNQIIAIKTVAHKLARACFYVLKDQVEFDVNKAFC

SEQ ID NO: 299804 - protein, 362 aa, unidentified
MNTKIKEKKAFTGKIFYIGIDVHKKSWSITILSDYFEHKTFNQFPETKTLINYLRKHFPGAIYYSCYEAGFSGFWLHRQLESYGVNNIVINAADVPSSNKDKVSKTDRIDSRKLAKALRGRMLNGIYIPDPQQQERRSLSRYRLILMRDLRRSKNRLKSLLQYYGISIPEGLDNSFWSKRFLNWLKTIKMQEASGQYCIATLINNYEFNCSQILQVSNKLRSIFRKEEKQMYNLLRSIPGIGPITAIALITELGPVDRFGKTTQLASFVGLTPRINNSGEKERTGGITSRSNKYLRSLIIESSWMVIRKDPALMKYYLDLRSRMIGQKAIVKVARKLLNRIRYVMKNKEEYTLGIGITEPVK

SEQ ID NO: 299805 - protein, 343 aa, unidentified
MDYFAGLDVSVKETSVCIVDDEGKIMREARVASEPEALLQVLTNTIYRFKRVGLEAGPLSQWLYSVLAEAGLPVICVETRHMRAVLKAQINKTDRNDARGMAQMMRAGLYRPVHVKTLRSQKLRVLLTHRKLLQSKAIAIENELRASLRNFGLKVGMIGTMKFEARIRELVERLPDLAVLVEPLLIVRRVVREQLGILHRRLLAIVRDDDVCRRLMTIPGVGPVVALTYRVTVDAPARFRKSKAVGAVFGLTPAKYQSGENDRTGAISRCGDEMMRIMLYEAAQSMLVRTAKWSWLKAWAMKIARHRGMKKAIVALARRLAVIMHRMWVDGTEFRWTRELPVA

SEQ ID NO: 299806 - protein, 380 aa, unidentified
MIIGLDVHKDLVYVTRMENDGKITEQYEMKNSEESWNKFVGKYILEMPEIALEASTSGKHVARILRNSGFSVHIADPKKLALIFKSSKKNDRSDSENLAKLLRLNEFPEAYLPSREYEEMRTLTRHRKYLGEEVVRIKNKVHSILSLNGIKIKATDIFGKKGLSELSKSIERLSYSEKIVINDMLKRIIDIKERSEKIENEMAKIGKDREDVKRLMTIPGINIYIATGIIGEIGDINRFRNKESLASYAGLVPRQDQSGKNDRKGHITKEGPSILRYLLVLAAHTVIKYSKKMKNKYLSLVKRIGKNRAIVAIARILAETIFTMLKKNVDFEDEIIPLTEKKVRRMIERVNSGSGEINIQESIKLISSKGFRSLSTKPFS

SEQ ID NO: 299807 - protein, 344 aa, unidentified
MNEITTVGLDLAKRVVSVCGEDGSGHMVFQRTLRREAVLSWFALRPPCLVGMEACSSAHWFARELAALGHTARIIAPEFVRSFRLSGKNDANDAQAICAAVRQPQLRFVTVKSTEQQARLVVHRLRQGWQEERTASLNRLRGLLAEFGRVFANSAAAAVAGAKSVLADETLPSALRRGVARQLEHLRELEAHLAECDREIAHDAATDPRAQRVMRLSGVGALTASAVAATVADPTQFRCGRQFAAWLGITPRQYSTGGRPRLGRITRRGDTYLRGLLVQGARSALQAALRSAPPRRTRLAAWIVTTYERIGYHKTLVAIANKHARLLWVLLTRDEPLRAHAAVN

SEQ ID NO: 299808 - protein, 412 aa, unidentified
MEVVYACCCGLDVHAKTVVACLVTKGRKEIRTFATMTDELLQLGDWLSSAGCTHVAIESTGVYWKPVFNILESLLKVILVNARHIKAVPGRKTDVRDCEWLADLLRHGLLKASFIPPREIRELRELLRYRQTVVTEHTAVANRITKLIESANIKLGQVASEVLGLSGRLMLRALAAGETNAETLAELAQGKLKSKKAELRRALEGCLTQVQRWVLTELLTRVEELEAALTRVETRIGEEVAACPDPFVPEAVELLESIPGVGKRTAQTIVAEIGVEMSRFPSAKHLASWAGVCPGNHESAGKRKSGHPTKGNKSVRTILVEAAWAATHAKGTFLQAKYHRLVKRMPKQKALGAIAHRLLVISYHLLSRRVPYAELGTAPLDQQQVARQRRRLVEQLIGLGVKVTIHEGEAVA

SEQ ID NO: 299809 - protein, 275 aa, unidentified
MKFTPFGVDIAKHLMQIHFVDEYTGEVIDRQLRRQDFLTFFSNRESCLIGMEACGGAHYWARELRKLGHEVRLLQARFVRAFRMGNKNDVQDARAIWQAVQQPGKSVAVKNEEQQAILSLHRMRYQLVKFRTAQINALHGLLLEFGETVHKGRTSLDKAMPEVLERLREKLAPFLLRLLEEQYHRLNEIDEQIEQVEKQLIAWAKQNADCQRIMKIPGVGVLIATAAIATMGDPRAFRSGREFSAYLGLVPKQTGTGGRIKLLGISKRGDIAKSY

SEQ ID NO: 299810 - protein, 423 aa, unidentified
MQNDPVDEYAAFIAIDWADQTHVYSLKVAGESKKEIGTLEQKPEVIGPWVAKLRERFRGRPVAVAVEQSRGALIHALLSYDFITIYPLHPTTVAKFREAFKFSGAKSDPLDTNQILEILTKHLELLNPLRPDTEETRLLGRLVEDRRKTVDLRTSQIQAALAVLKEYFPQAIELCSSNLSSRLAYDLLKKWPTFEAFQQAKPATIKRFFYGHNIRSPQIIDKAVEGATHGTALTTDAAIVESSSRICLMHLQVIQTLNPIIEDYEERIQKVFNGHPDAFLFEKLPGAGQALAPRLLAFFGTDRTRYAAAANVQTFSGIAPVTKSSGKSKVVYFRCACPKFDRQSFHEFARLSIRSSQWARNYYDYYKAKGKKSHAIVRALAFKWIRILFRCWQNRTAYKEDTYMESLKKRGSIFATLHLEKNS

SEQ ID NO: 299811 - protein, 353 aa, unidentified
MKYVGLDWAYRTAQWCALDPGGEIAGEGRFAADRDGLARLVLELGDEVTACLEMMSGALWARDELVACGWQVQVADARKVKTVAPLAAKTDKVDARLLAELSRRQLVPALWLPSLDDRELRERLRRRMHLVRLRTSAKGRIFGLQTQWGVRISLRRLRRADGMTLLERAGMPAVWRHSISECLALIDFLDARIVPLDAELRPFAQADPRAVLLDTIPGVAELLALTIAVEIGEISRFAGPEKLVSYGRLAPRVRQSGEGRPHTGPLNKSGSRLLGWAAVEAAQHAWRESNPWHQLYLDVSRRSRNHNSAKAAVARKILIAAWHMLSRNEPFKPAPRSTEGTPVSASSRLALAA

SEQ ID NO: 299812 - protein, 389 aa, unidentified
MLQTNDMSRSLAALNQDSTLVVVIEMGQSSWLVRGMIPGVARQPLKKVTPDEAGLLKLLHRWRSEAVRMSREIERIVVAYEAGRDGFWLARWLRARDIEVYVIHPSSVAVSREHRRAKTDRLDTELLMRAFVGWLRGEKRHCSMAAIPTIEEEDAKRPNRERQKLVGDRTRIVNRIKATLARLGICSFKPTLRNAVNRLTGLRARDGTPLPENTQAELRRDMVRLRLVSAQIKEIEEERLRKLAASASPQNSSHAMVCLIARVLGIGIETADMLVNEILSRHLRDSKAIARYAGLTGSPDESGRRRREKGLTRAGNTRVRRGMIQLAWCFLRFQKQSALAQWFQARTADGRSGTRKTMIVALARKLLIALWRLATTGEIPQGVSLRPAV

SEQ ID NO: 299813 - protein, 378 aa, unidentified
MGVIIGMDPHKRSATIEVIDERAKVLAAGRYGTDTAGYAEMLAAARRFADRVWAVGGCNGIGRHLAHRLVHDGEIVFDVPPKLSAQVRVFATGNGRKTDPVDAHSVALVALRTRGLVQVRIEEDLVVMGMLADRRDELGRARTQVISRLHRLLLELLPGGAKKFLSARQARTMIASVRPRDRAGQTRRRLAVELTGELEATGKKIKAIDKELTGLVTARGSTLIQLHGIGPSGAARLLADVGDIHRFASRDRFASWNGTAPLDASSGSQARHRLSRAGNRRINRVLHIMAIVQLRNQTKGRACYDTRRAGGMPSMMAMRALKRRLSNVVFACILADQKRRQAGPGGQSGTTTDSSAAGPDPGRRPFGQATSRARRSSA

SEQ ID NO: 299814 - protein, 377 aa, unidentified
MHSENIAAYIGLDVHKETLAVAIAAPERLGEVRYYGTINNEAQAVRRLFQKLQGLYGNILSCYEAGPCGFGLYHQLTAMNIKCQVIAPSRIPKSPTDRIKNDHRDAISLARLLRAGELTPVWIPDLTHEAMRDLIRARAAAKRDSRVARQRILSMLLRTGKRYAGKHWTGKHRTWLANQSFSQPSQQIAFQHYCQSLEQIEDRILQLDQEISRLLPEWSLCNLVCQLQALKGVGQLIAITLVAELGDFSRFSNPKQLMAFLGLVPGEYSSGNSIRPRGITKVGNSELRRLLYEAAWSYRTPAKVGAWLIYYRPDSVTQYSKDIAWKAQQRLCSRYRTLTAKGKKSQVAITAVARELTGFMWDIALAAQSSFSQQKQN

SEQ ID NO: 299815 - protein, 371 aa, unidentified
MEQSSKTLYVGLDVHKDSIAVAYAPEDRGAEVVSLGAIGPRQCDIDKLIRRLESKGAALVFVYEAGPCGYGLYRYLTGKGFACHVVAPSLIPRTAGDRVKTDRRDAMTLARLMRSGDLRAIYVPGVEDEALRDLSRGRDDALQDLKRSKRRLKSFLLRQDIRYEGRATWNPAHLRGLSEVVCPTPPQQIVFQEYLRAVSEQHERVQRVEHELHEAVQGWRLYPVVKALQALRGVELTGAVILMTELGDLTRFENPRQLMSYLGLTPSEYSSGERRRQGGITKAGNSHARRALVEGAWAYRYPAKVSRHLQLRLETLPAEVQAISWKAQVRLCKRYRQLTARGKHVNQVVVAIAREMAAFAWAIAKLVPLAT

SEQ ID NO: 299816 - protein, 351 aa, unidentified
MSQKTAATVARTIGIDTGKNTLHLIGLDDKGAIVLREKVARGRITARLANVPGCLIGIEAGMATHYVARELSALGHDVKQVPPAYAKPFRQGHKNDFRDAHAIAEAVQRPYTRCVPVKTDDQLDLQALHRVRSRLVGQRTAVINQIRGFLLEHGIAVRQGLRFLRQQLPDILAKRSDVLSPRMIRIMEDLSGDWRRLDERIQHVTEEIEVLAHGSESCRQLMTVPGIGPLIASAMVAAIGNGAAFAKGRDFAAWLGLVPKQMSTGDRTILGRISKRGNRYLRTLLMQGARVILLRPANWAKHGFGPWLTAAANRLHHNVLATALANKLARITWTVLAQARSYEARVEPRTA

SEQ ID NO: 299817 - protein, 397 aa, unidentified
MYIVGIDIAKRKHEAAVIDGEGTVIIKPFSFTNNCSGYNRLLAMLAKAKLPLDEVSFAMEATGHYWLALFTRLQKEGFRVQVINPVQTNSIRNFYIRQAKTDPRDALLIAEVIRFGHFSESTLHPENIYELRELCRGRHAIVSMQADVKRKVVALLDQVFPEYETAFTNMFGDTSMAILQTCPTPKELSEMPFEELCHLIEVSSHKRFRMAKAQELQVLARNSFGFAMAGDVFSTMIRLYARHLHFLKQQVREMDRKIAEIMDTLDTPITTITGIGPTLGAYILSEIGDISRFSSAAKLAAYAGIDPTMRQSGEYNGVRNRMSKRGSPYLRHAIWLAASSAVLHDPALKLYFQKKRDEGKPYMASVGHACRKMVSIIYAVMRDNKAYTPCIPNEISA

SEQ ID NO: 299818 - protein, 439 aa, unidentified
MAKETVFKTVNENVAGIDIGAEMIFVSPDGVEAVSFETFTSGYAACIAYLRSKMIDKVAMEATGVYWIVFYYMLEKSGIRVFLVNPKETKQVKGRKTDVKDCQWIQKLFSAGILRNSFIPEGKLMELRLLVRERMDIIEMGGTYVNKMQKCLELMNIKLKEVISQIHGTSGIRMIKAIIAGERDSSYLLSLCNKKIVKNKSEQIKKALEGEYNETYLFMLKGNMELWDIHQQHINKIDQELEKLLEELSGDKQDVPTEVAKLIRHHAPQIAGLHQMLANLYGVDMNSISGLNDYTLLRLVGETGVDMSRFPTVKHFISWLGLSPKRHRSGKINKNVKGTSCNAAGQIFKLCAQSLLTSKNIAIGSFMRKLRGRKDSGVAIKAGARKLAIAYYNTLTKGAAYVEQGTRLYEEQIKKREMAALKRLAIKYNMQLSDNQKAA

SEQ ID NO: 299819 - protein, 341 aa, unidentified
MSIVGAFDVHRRQLTFEYLDTSTGELKRGRVIPADREHLREWLARFAGQADVHFALEGCTGWRYVAEELAAAGITPHLAEPADTAALRGRKRHAKTDKTDARHLRVHLMAGDLPECWIPPAHVLEARAVVRLYKDLLDERGAWHQRIAATLFHQGVPVIGSMATPEGRAAVQQVQLSPAGRQAVQAGLRQIDRLTAELDVLRRQLGMLARRQPGCAALRATWFGIGPVTAVAIWAELGDVRRFDNSDDVVRHTGLDITVRSSDGKGPPGHLSRQGPQLLRWALYESAKCAARPAAPDHGYYTAVRDKRTAGLATLSVARKLARRCYHTLRELGEEALAPAA

SEQ ID NO: 299820 - protein, 426 aa, unidentified
MNATTDFAATIGLDWADQKHDLWLRPSEGAKAEHLRLEQTPEALHEWVAKLRERFGNRRVAISIETSRGPVISAFLAYDFIVLFPINPKALKDYRAAFSVSGAKDDRTDAMLLEEFVRLHRDKLRALEPDTELTRKLGGLTENRRHLVDERTRLANQLHSLLKTYYPLAETLLDGHMTKPLAAAFLTRWPDLPTLQKAEPKTLRAFFYKHNSRGAKKMEARLDAVKKAQALTTDAAILAPARLLVTALAGMLKPLHQAVASLDQAIAQAFDPHPEAALFRSLPGAGPALAPRLLVAFGTQRSRFASADEVAQFYGLAPVVKQSGHTKTTHMRSRCPKFGRQTFHENAGCAFKQEPWAREYYDAHKARHEGKHHQACRALAYKLIRIYYACWKQNSLYDGQRYLQALEKHGSPLHKKPPTPTPKASE

SEQ ID NO: 299821 - protein, 371 aa, unidentified
MKQQSKSSNITVGLDLGDRRHRFCALDERGEVVEEGSICNERDSLRKLAGRYHGALGVMEAGAHSPWISRFLEALGWRVVVSNPRKVRAIYQHERKSDQRDALMLARIGRMDLALLYPVGHGTAEAQQDLLRIKLRDSLVRARVAVINSVRFTLKSLGYRVRNPSSARFHKVVMEEVPESVREMITPSVQALAELTARIKMLELEINTLAQMKYPQSAQLQQIPGVGPITALYFVLKIEDPNRFAHVRDVGAYAGLCPRRDQSGESDPQLRISKRGDAYLRRLLVSAAHYILGPFGPQSALRAYGLMLAADGTARAKKRATVAVARKLAVLLLSLWKSQQPYQPFPKARLNGQQEDRRSGTIALHRMEATD

SEQ ID NO: 299822 - protein, 385 aa, unidentified
MQKLNDLSRSPSPLDPDGTLIAVIELSLSSWLVAGIVPGVERQPLKKLAVDESALLKLLHRWREEAAKAGHRIKRIAVAFEAGRDGFWLARWLSARDIEAHVIHASSVAVSREHRRAKTDRLDTELLKRSFLGWLRGERDHCKMVAIPTTKDEDAKRPNREHESLVGEQSRIVNRMKAALIRLGIRGFNPKLKKAAERLDGLRTPEGEPIPPNTLAELRRDMVRRRLISDQIRQIEDARLERLKQAPSDGPHAMVRLLARVIGVGIETADMLVQEALSRSMRDRRAVARYAGLTGSPDESGRKRREKGLARSGNARVRRGMIQLAWRFLMFQKDSTLAQWFRARTESARGTRKTMIVALARKLLIALWRLVREGVVPDGVVLRPA

SEQ ID NO: 299823 - protein, 331 aa, unidentified
MKVNVVGVDIAKRVIQLHWFDAATGQSMSMQVKRGKFLEHFANREPSLVGMESCGGSQHWARELIKLGHEVKLMSARIVKAFVCGNKDDAADARAIWMAVQQPDVKAVVIKTEEQQAVLALHRMRQQLVKFRTAQVNNLRGLLTEYGEVMPQGRRGMQRDVPDVLGRLQVRLPALLIDTLREQYARLAELDTQIKQIEQRLSRWHRENEACKRIAAIPGVGLLSATAAIALIGDGKSFKSGREFAAWLGLVPRHTGTGGKIRLLGISKRGDVYLRTLLIHGARASVLCGKAPSEWLKNMLKRRPKNVVIVALANKIARTIWALVLRRGLQG

SEQ ID NO: 299824 - protein, 316 aa, unidentified
MANYVEKITLGIDASKDLHVIYNWQTKQTTELPNERSDIKAWLKSFHGPVRIAIEPTSHYHVIMVDEALELGYEVYLVNARQIRHYREAVNERNKTDPLDAWLLARYLEHEVSHLRPFQPRDRGAQRLWKLVLRRATVVKSRQQLQQSFAEVQLSIQGLLTQFKHLLDRIERQIITLIRALGWWSDYQRCLSIPGLGAGNASALVVAYHRGCFSGSDAFVSYLGLDVRIRDSGHFKGKRKLTKRGPAELRRLLFCASHSARHYHRFAKYYQRQLDKGLCKIAARVILARKLARIAFTLMRNEETFIKEEKNYCVAS

SEQ ID NO: 299825 - protein, 312 aa, unidentified
MAKLVSKITLGADVSKVKLDICNWETQELVSLSNESAEIRSWLKGLHGPVRIAIESTSDYHLALVDEAQALGYEVYLVNGYQLSHYRESLNVRNKTDPKDAWLLARYLAHEGSELRLHPPRCRKAQELWNLVKRRAKVVEIRKEMQQSMANVSVSTKAFFTSLKQLLQYFDKRIKALIQELGWWDDYQRCQSIPGIGPLNAAALITAYHRGAFASANAFVAFIGFDVRLRESGKYKGKRKLTKRGEAELRRLLYCAAKPAQSYAPFDQYLKKQLDKGLSKIAAKVCLARKLARIAFSLIEKQQSFKKMEFAS

SEQ ID NO: 299826 - protein, 336 aa, unidentified
MKNCQFVVGIDVSKKTLDICLLVLFNAADCHYYHTTNSLKGYLRLLTWLKARKVSLKEGLFLLEHTGIYSLIVCLFLKKQSLNYSLIPGVVLKKSLGICRGKSDKKDAYAIARYGYLYREDINLQILKEDQILKLQILFSQRKRFVSALKALLSPVKEMEEMGMEDLAKQAIQNQQIVVAELKTAIKKAETQMLNLIEEDVELNKQYNLCTSIPGVGMQLATYLLIVTHAFSRFSDSRKLASYAGVAPFPYQSGTSIKGKNKTSPMGDKALKALLHMGALNVIQHDNQIKIYYTRKRAEGKNAMLVLNAVKNKLLARVLATVNRGTPFVQLAQHIS

SEQ ID NO: 299827 - protein, 406 aa, unidentified
MTPTVWPAFAGVDWGGEHHQLCVVDNAGKRLTQMRVTHDVAGLAALQAELSRFSDRMPIAIERSEGLLVEHFQALGHALFPVSPRISARARERYKVASVKDDRFDAFVLADTLRHEHGHWRTLSIPTPLLAEIKALTRDRDRLLETQQAVESQLRMILEAYHPAPVRLFSSVDRQITLSFVLDYPTPATAGRIKTTRMAGFLARHHYTGRVPAQVLAERMRTNLLTGSSGTVAGKSFSAQSFTRLLQLLNSQLAEYEDAIAAAVAEHPDAHIFASFPGVGAITTAVLLAEIGEDRARYPRPEVLLAEAGLAPVTRSSGRSRKVRFRYAANTRLRESAMWWAYNSMKESPWAAAAFREARDQRGQRYHRALRGLSARWMRILWRCWIDEIPYDPAKHTSAVALNPAS

SEQ ID NO: 299828 - protein, 393 aa, unidentified
MLYLGIDLHSKQLTVSLRNEAGDVILQRQVSTRPAKVEEFLEQVHELEDGRYVALLEVCGFHDWLVQRLRRDERCQEVIVIQPEQTSRKKTDARDARRLSEVLWVNRQRLLTGAKVQGVRRVVIPTDAERQDRQLTSLRQRLGRRRTQTLNQLRYVLRRNNLEWQRPTKGFQTKKVRAWLKTVAVDETDRLEVDQLLEQWALWDRQIDELETRIAARFDQHRGAQLVATIRGVSCYMALALVCRIGDIGRFVRGRSLANFFGLTPSSRSSGEKECLGSITKQGSQIVRFLLGQLVVHVLRTDGKLRKWYKGIKVRRGAKIARVAVMRRLAVIVWHILRHEEAYQTGGVPVGTRRRRGREDPRQACEVPERRQVLAGFPSRVEASAAEVRVPLL

SEQ ID NO: 299829 - protein, 409 aa, unidentified
MKLFVGIDVSSKDMKACVMNIDGETLDSLTVNNDLNGASYLRDQIVNLAQKHSIQEIQIGMEATSVYSWHPAMFFHEDASLRRFKTKVLTINPKLIKKFKESYVDLDKTDQIDAWIIADRLRFGRLRQSVVMQEQFIALQRLTRMRYHLVHNLTREKQYFLQHLFYKCSSFTEEVESSVFGHAIMELLSEQYSLDEISSMDIQDLANYLQEKGKNRFTDVECVAKSIQKAARSSYRLSKCVEDSIDLLLGTSIESIRSITKQIKELDKAIKKLLDGIPNTLQTIPGIGPVYCAGILAEVGQIERFNNQAALAKYAGLTWNKHQSGNFKADETKMIRSGNRYLRYYLVEAANSVQRVEPEFRTYYLKKYHEVPKHQHKRALVLTARKLVRLIDALLRNDQIYTPRRKVHN

SEQ ID NO: 299830 - protein, 443 aa, unidentified
MNTSHPYDLVIGLDRSDKKADLCLMDTRTGQRRAQIIDTAPEALWEWLLELRQQHPQARVGLCLEQPAVHLIAFLESYDWITLHPINPITLQKYREAFVTSRAKDDAKDADFLADLLLTHHDKLPVWAPEDSATRAVQQLVFHRRAVVDERTGLSNRLIALLKSYFPQALGLCGEDLWRPLATAFLLKWPSLQAVQKARAATLKQFYYLHGSRSAKLVEQRLALMAKAVPVTDETAVIESFALRVQLVCRQLQLVQRSVSEFDRQVATAYATHPDRMIFASLPGAGPVLGPRLMASLGSQRERFGAAENLQHYTGIAPVTKRSGGSCYIHRRYLCPKFHRQSFHEYAKESILWSRWAAAYYLQQRSKGSPHHTAVRALAFKWQRIIWRCWQDHKPYDEPKYEAALQKNGSPLVALFDRVELGKSPFKNPVNKLKESVDGLPQR

SEQ ID NO: 299831 - protein, 349 aa, unidentified
MKKIFIGIDFSKEKFDATVIKAEDLSEMLSVGHQEFINKVSGYRKMLRWVDSLCGADTCEDWLFCGENTGGYSQMMSNYLYSKGYDLWIENALSIKRAFAMKRGKSDRLDSLMIAEYAMRYQDKACLYEPLSPALSQLREVFLYRHMLVRHKCSFEVRRIEKRLTQQKSSAKTMISQSSRHILTELKHEIQKCDQRIQELVRSDEELSRIFGIITSMPGVGTLNAVCLMVFTNNFTKFDYNARKIACYYGVAPFARDSGTSVHSAPKVGYLANKMIKSLLSQAALAAVNFCPAMSMYYHRLVDKGKKPMVALNNVKNKMLTIITAMVKNDCKYQPEYISINARSEMLNK

SEQ ID NO: 299832 - protein, 421 aa, unidentified
MIQVSHEAFAAFVGIDWADAKQDGCLQVAGSAKREYFQREHTPEAIDAWGTTLRMRCHGQPVALCLALNKGPLGSALRTYDFLVLCPIHPLTLARYREAFTPSRAKDDPTDAALQLALLLTQRDTLQPLNPQSPTMRALAQLIAPRRRVVGDTVRITNRLPSPLKNYCPHVLHGLQEKDTAIFCDFLSRWPTLKAVPLARRATLATFFRAHHVRYAEVIAPRLQASKAAPPLPTDAGVMAPHALLVQALVAQLRGTWQALADCDTAIAQRAQSHPDFPLFQALPGAGPVFAPRLLVACGEQRERYACAADLQKYAGSAPVTERSGKKSWVHGRLQCPKFLRHTFVEWAAESLRPSFWAQVSYQQPRDKGKAHQAAVRARAFQWIRILSRCWQERTPYDAAIYRQALHRRGASLSQTLAKAS

SEQ ID NO: 299833 - protein, 359 aa, unidentified
MASKVKKSKINFKGKTVSIGIDMHKKSWRITALVEGDIVLGITLANPTYDAFEKILARFKGNHVRIVYEAGPGGFDLYDRLTDDGIKCIVTPPSLIPTESGNRVKTDKKDSLKLAQMLERNMLKAVWVLSPEERAHRQLVRTRRQILNHRSDVMRQIKSLLLFNSIEIPFKSSQHWTGVFINWLLNLDLGHEALNRSLKAQVDLFNYLNAEKKLLTKDVLQLAKDEKYAQRVDLLKTIPGIGPLSAIEILVEIQDITRFKTADELAAYLGLTPSQYSTGEYIRMGHITHAGNARVRTTLVESSWTLIGKDPEMGRKYEKIKNKRGGKKAIVAVARNLSGRIRRILLDQVPYKLDFQKAA

SEQ ID NO: 299834 - protein, 408 aa, unidentified
MDVVYSHVCGLDVHKKNVVACIITPDHKEIRTFSTMTEDLLALIDWIKSHGCTHVAMESTGSYWKPIYNLLEMEQIETLVVNARHIKNVPGRKTDVKDAEWIAGLLRHGLLKGSYIPSRPQRELRELIRYRRSLMDERAREIQRIQKVLEGANIKLSSVASDIMGKSGRLMIEAIIAGETDAAVLSELAQRRLKAKKADLQKALHGLIGPHQRLMLKTQLRHIDELDKLIEQIDAEVKKRMDPFEEDLERLDTIPGVGRRSAEQILAEIGTDMDQFPSAAHLCSWAGLAPGNNESAGKRKSGKTTKGNQKLRTALIESARAAARCKDTYLSSLYHRIAARRGANRAAVAVAHRILTICYHLLKNKQIYIELGPHYYEERKRTHVVRQAIRKLEILGYKVVVEEMDQTA

SEQ ID NO: 299835 - protein, 353 aa, unidentified
MWIIGCDFHSRFQQIAFVNTETGEYGERRLAHPEEAEKFYRQLQGQRVRVGMEAGGQSRWFERLLAELGHELWLGDPAEIRARCVRKQKTDRRDGHHLWQLMMDGRFPTIWVPPAEERDVRQLLMHRHRLVQTGTRFKNQMQAIARNEALPPKPGLWSRKGRERFEAVSLPKWTAQRRKDGLELLDELGSRIAPLDEALIQEGQSRPEVVRLRTHPGVGPVTALAFVLTIGDPKRFACGKQVASYLGLIPSEHSSGGRQRLGHISKQGNALLRGLLVEAAHRVGNDPKLGRTYRRLAVRKGSSIAAVAIARKLAVRLWWMWLRGLDYGQIVQPASHAGKSPSSPVGCDKSPSC

SEQ ID NO: 299836 - protein, 409 aa, unidentified
MQVLYPRCCGLDIHKKTVVACMLLTDPDGTNRRIVRTFGTMTVDLLALGDWLSLHEVTHVAMESTGVLWRPIFTVLEEGRSLLLVNAQHIKAVPGRKTDVKDSEWLADLLRHGLLRPSFIPPPSIRVLRDLTRYRKNLVELRTQEINRVHKVLETANIKLGAVASNVVGVSGRRMLEAIKQGESDPEVLAELAKGRLREKLPALRLALDGRVQAHHQRLIGELLDHLDYLDRAIHRVEVDIAALVAKEEKAVELLLTLPATGPVTAAAIIAEIGTDMTRFPSAAHLASWAGVCPGNKRSAGKQFSGASTKGNKQLKTILCEIAATIARTPGTYLHALYQRIARRRGKPRAMMAVAHSLLVSIYYMLRDQVSYQELGPDYFDQLHTQQLERHYVRRLEALGFQVTLTSAS

SEQ ID NO: 299837 - protein, 350 aa, unidentified
MARYIGLDVHKASCTMVVLGPSGKKLRSHVVETNASVLIELVKTIPRPRHLCFEEGTQSAWLYEVLSPHADETVVTVKQERRGNKDDERDAFSLADTLRTNSVKVRVYKDVGRYGPLRELCRVHSMQVADSVRVQNRILSLYRSRGITTSDSLYKPEQRADWIGMLPHRMQAAAGFLLRQYDAVEPLRREVEKAMVTEARKQSVSKLLATVPGLGPIRVAHLMSVVVSPHRFRSRDQLCQYAGLGVVTRSSSDYVQGDDGKWRKAKVQQTRGLNRNHNHELKSIFKGAATTVIGRAQKDCPIYHHYELMLANKTKPNLAKLTIARQIAAITLSLWKKEVAYDPAKLIKNS

SEQ ID NO: 299838 - protein, 413 aa, unidentified
MMSALVYRFHVGIDWATEKHRVVVLDAERRVVREREVCHEGAALESFADWLTQLAASAVETVAVALEVPRGAVVDVLLARGFHVFALNPKQLDRFRDRFTVAGAKDDRRDAQVLASALATDQPAFRRLEPEHPLLLELRELSRLEDDLQEELGRLTNRLREQLHRYYPQLLHLVPAADEPWLWTLLERAPTPSVAQHLPRATVRTILSRHRIRRVDTDAVLATLRAPALPVAPGTVQAAQRHLAVLLPRLRLIHQQRAECATQIEGLLERLGESQEHRDVPILRSVVGVGRVVAATMLAEASRLLAARDYHGLRAQTGVAPITRQSGRRTLVCMRYACNPRLRQAAYHWGQSAARHDPVSRAHYERLRARGHSHARAVRGVVDRLLHVLIAMLTAGTLYDPARRRLPVGEAVA

SEQ ID NO: 299839 - protein, 341 aa, unidentified
MKKFIRIGVDLAKNYFQVHALVSEVGPAVTRKLRRSKMHEFFSQIEPCLIGMEACGSAHYWARELKAMGHEVLLMPPAYTKPYVKRGKNDAVDADACCEAMSRFGMRFVPIKSAEQQATLMLHKTRELLVKQRTMSVNALRSHLSEFGIIAAKGIGRVDELLELAESDATLPNAARAGVKVLSQALEGLDKAIDDLEDEITSAHAQNEMTRLLYKVPGIGKIISSVIAASVPDPSVFKSGRDFAAWLGLTPRQNSSGGKQTLGAITKQGNRYIRKLLVLGATSLLNVMGKRKGALRDWIVGLLAKKPARLVTVALANKLARILWAMMKTGESFRSEMFAKA

SEQ ID NO: 299840 - protein, 414 aa, unidentified
MASAGPRLVRDHITVALDLAAREHQVIIVDESGKRLTRFSIAHSRAGIAELLRRSRPERWEAEARLFAFEATGHVWEALAAHLEAADERYVLVNPLATFRLREARSMDRTKTDRTDAEQIAELARTGMVTATRPLQGPYLALRRAWGEYTRLRFEAARLKSLLRQQLFGLFPELLTVWSDVARPGSLAVLRLGLTPSQIATLSRSEFLDRVCASRQGRRLWRAKVIAVHEKAAISVVEGAGLAAMAVEARRIVARYDLLTDQLAELRTEIEVLLEKIEEARWLATIPGLGFASVAGIIAHVGPIDRYRHGRQLIKLAGTNPSRNETGERRGGAQAMTHRGRAGLRQVLYMATISCLAHNERIRAHYDRLISRPERPLSKMTAVGACMNKLALYAFAVMKHQEPFAIDHQWQRTA

SEQ ID NO: 299841 - protein, 418 aa, unidentified
MKSNKTEKVKIINEKTLIVALDIGKKVHYGYFRTPKNQDVKPFPFYNTGQSFNKFWKKLCRFKEEHMLDEVVIGFESTGPYAEPISNYLRKKSVKLVQVNPMHTKRIKELTGNSPNKTDKKDPRVIADVISLGHALTVVVPEGTAAQLRRLTHARERAIGRRTAMNNQLQDLVFVIFPELGSIIKPSTKTGMYLIKNHPDPESIVSTGIGTLCNIVRKISRGRFGIDRGKELYNAAEQSVGITEGKESVIFETSHLVSNIESENRYIESLEEQMIEHLEQIPYSHSILSIKGVGYITAAGLIGEVGDFNKFNTISEITKLAGLDLFEISSGKHKGQRRISKRGRPMMRKLLFFAAINMVKSNGIMHEKYKQMLDRGMLKMKALIAIARKILGLIFAIVRNSTMYIENYTKQNHYKLAA

SEQ ID NO: 299842 - protein, 398 aa, unidentified
MTESSDYESVQVFIGVDVGKDTHHAVAINRSGKRLFDKALPNDENKLRSLISDLKQHGQILLVVDQPATIGALPVAVARSEGVLVGYLPGLAMRRIADLHAGEAKTDARDAAIIAEAARTLPHALRTLKLADEQIAELSMLCGFDDDLAAQTTQASNRIRGLLTLIHPALERVLGPRLDHPAVLDLLQRYPSPEKLASLGEKKLAAQLCKLAPRLGKRLAADIAQALAEQTVVVPGTNAAAVVLPRLALQLITLRKQRDEVALAVEQRVLAHPLYPVLTSMPGVGVRTAARLLTEVACRAFASVAHLAAYAGLAPVTRRSGSSIRGEHPSRRGNKALKRALFLSAFAALRDPLSRAYYTRKMSQGKRHNQALIALARRRCDVLFAMMRDGTFYTPQAS

SEQ ID NO: 299843 - protein, 358 aa, unidentified
MRIIGVDLHARQQTIAMLDAETGELLEKTLYHEGDQVRQFYAALPSPVLVGIEATGSMHWFLKLMEELGIDCQVGHPAKIRAAEPRKQKHDRRDAALQLKLLVENRFPSIWMPSTELQDLRVLLKHRHQWVRMRTRVQNTLQAIALSNGLRQGSSLWSQAGQARIAALPLPPYAADRRTKLQALYRKLNEQIDKLDERVRDQAFQRPGAKRLMTHPGVGPVTALATDVFLGDPTRFADGKALASYVGMIPSEDSSAGRQRLGALSKQGNPLLRFLWCEAAMHAVRQDPELKRFYRRKLQQKGLGKARVAAARKLGIRLYIMLRDEIDYQEFCRRGQTRQKNGSAHAGMPGRNSGPAVQ

SEQ ID NO: 299844 - protein, 358 aa, unidentified
MESTITESTQPQVTVGVDTHKQFHVAHAVDQLGRPLGTHRLAATPAGYRGFVSWAHTLGQLVAVGIEGPGHFGAGLARHLRAEGIAVSEVGRPKRQRRARFGKSDDADAAGAAAMVLAGDALGEPKSADGAAEMVRVLRVARTSVVRARAKAYNALQDLVVTAPAALREQLAGLYKDRLIYACEQLPEPETLTTPTDAVTVAIKSLAARCRELDTEAARLGRHVDTITATAAPELRAIYGVGPDTAATLLTALGDNPNRIGSDAAFAKLCGVSPLEASSGKTIRHRLNRGGNRDANRALHVILVVRMRRHGPTRDYFARRLADGKTKNEIMRCIKRYIAREIYHAVREPSRRTNELIA

SEQ ID NO: 299845 - protein, 451 aa, unidentified
MALLDRTVRIVLTSLLNVWWNSQWLLYLTLKGVLTIKVVYQTCCGIDVHKSFLVATIIKTTSGVDPSYQKKRFSTFNNSILQFKNWLIENQCRDVCMESTGKYWVPVFNLLEDEMNVTIANPKWVKAVKGNKDDTKASKWIGDLFRLGLVQGSYIPCKPIRILREFTRYRYKLTSCRTSEKNRYQNALTVCNVALDSVVSDIFGKSAASVIDYLIEQSGNSINHEEIASRLLRSLKKKSDSVIESIEGYQMTDPQKYRMRLVRAHLDYITSTINDIDTMLDSLIAPYENAVQLLCTIPGVDRNSAITVISEIGTDMTPFSNSKRLCCWAGLTPGSNESAGKKKSVRITRAGVYLKPALVQVAHATVKSDKSPYYKQKYERIMKRRGKKRAIIAIARMILTAIYQMLSTGEAWNPTDLYKTDMPEPLKEKQKEKAIKQAKKLLIREGILSES

SEQ ID NO: 299846 - protein, 400 aa, unidentified
MIDTGDIDVFLGLDVGKGEHHATAVTPTGKKAFDKRLPNTEPKLRELFAKLKAKHGTVLVVVDQPASIGALPLAVARDMGCPVAYLPGLTMRRIADLYPGEAKTDAKDAFIIADAARAMPHTLRAIDGEDETIAELEMIVGFDDDLAGEATRVANRLHGLLTQIHPSLERVLGPRLQHPAVLTLLERFGSPAQIRKAGRRRLVTLLRPKAPRMAERLVEEIFAALDEQTVTVPGTEAAALIAPSLAGSLAAVLDQRKLLAGRIEELLEDHPLSKVLTSMPGVGVRTGARILIEVGDGSTFATAGHLAAYAGLAPATRSSGSSIRGEQPSRRGNKQLKRAFFLSAFAALGDPASRAYYDKKIAQGKHHTQALLCLARRRADVLFAMLRDGTFYEPRPASAG

SEQ ID NO: 299847 - protein, 370 aa, unidentified
MPKTTPVFVGLDVHKETISVAYAAGGTTDPPQFVGQIGTRECDIDKLVRRLKTRSARLVFAYEAGPCGYVLHRYLSGKGLDCRVVAPSLIPKKPGDRVKNDRRDAVELARLLRSGDLTGVYVPSVEDEAIRDVSRARDATRVTLKAAKLRLKSFLLRLGFNYVGRADWNDAHRRYLAQVVCPTPAQQIVFQESLRAVDEQVERLARLEQQLLDLAPTWRLFPVVEALQALRGVQWLVALTVVAELGDLTRFDNPRQLAAFVGLTPSEHTSGDKRRQGGITKTGNGRARRVLVEGAWAYRYHAKISAHIQRRIEKLPQVAQDIGWKAQVRLCKRYRRLIARGKHANIVTTAIARELLAFMWAIAMEVPINA

SEQ ID NO: 299848 - protein, 414 aa, unidentified
MLDTIFIGIDVSSKSNVVHVMDHGGQKLWSNQYTNSALGAEALVTHLLEDPRCDNAYDRFGLEATGVYDQGVAMYLRETPKISPSRKTVHVLNPKQIKRFRDSYSDLPKDDFTDAFVIADSLRFGRIALKEVVVEDKYLALQTLTRWRFQCAHELTREKSRYLQNLFQKFSSLVQQQGTKDQLFSDLCGTTALNLIDDFEDVDQIAYTPLEELTTYLVEQSRNKFTQPLELAKAIQRAAKTSYRLPKTIQDSLNQVLAMQTNVIRFYEQQLKEIDKVIERQMQGIPNTLTSIPGIGPVYAAGLIAEIGDVKRFENEAALAKYAGLTWTKHQSGTFTADYTRLIQGGNRFLRYYFCQAANKVRQHDPDYQLFYQKKLRETPRTPHKRALVLTARKLVRLVYVLLRDQRLYKLQLR

SEQ ID NO: 299849 - protein, 484 aa, unidentified
MAKGASTYERLTEGSRKQRKDLQRRLHSENPGLELVHPNAAGIDIGNGSHFVAVPPVRDAHSVREFGSWTADLNRMADWLISCGIDTVAMQSTGVYGFAVYDVLESRGLKVFLVNASHTKNLPGRKTDVQESQWLMKLHTYGLLRNSFRPPEDIRPIRAIWRLRERHVQESSRSIQHMQKALTSMNVQLANAISDISGVSGQAIIRAILGGERDPWKLAALCDRRLKASAEEVARSLEGNWQDDQLFELQQAVDEYDFRHKQMTECDRKLHAYLTKLPTRPTPVADPGSTTPPSTPKREKKRKNTKAGNAPKSFDLAAEMRRVTGVDAFRIDGVSVMTIQTVVAELGTELQDSWPTEQHFTSWLGLTPKRDVSGGKVIRHVRNNSSNRVAEILRLAATSLLNSDSYLGARHRGLRMRLGAPKAIKASARYLACIIYRLFTKGQEWVDRGAEKFEQNRQAREFARLQAQANARGLRLVPAEEAAV

SEQ ID NO: 299850 - protein, 354 aa, unidentified
MSGLNSRIAAIGIDIGKNSFHVVGQDERGALVLRQKWSRGQVEARLANLPACLIGMEACVGAHHLSRKLQALGHDARLMPAKYVRPYSKGQKNDFRDAEAIAEAVQRPTMKFVATKTAEQLDLQALHRVRERLVGQRTGIINQIRAFLLERGIAVRQGLRFLRAELPTILATRSDALSPRMLRLIEDLAGDWRRLDERIEGISDEIEALARQDQACERLMTVPGIGPIISSAMVAAIGTGDAFSKGRDFGAWLGLVPKQISTGDRTILGSISKRGNRYLRALFVQAAWVVLVKLGKKWERYGLRSWIEAAKKRLHHNVLAIALANKLARIAWAVLHRGRAFECVKMDEIAPRSA

SEQ ID NO: 299851 - protein, 342 aa, unidentified
MDHFAGLDVSVKETSVCIVDDTGKIVREVKVASEPEALLSVLANPAYHFKRIGLEAGPLSQWLFSALADADLPVICVETRHMQAVLKAQINKTDRNDARGIAQMMRAGLYRPVHVKTLRSQKLRMLLTHRKLLQSKAIAIENDLRATLRNFGLKVGMVGTVKFEARIKELVENQPDLAALVEPLLIVRRVLREQIIILHRRLLAIVRDDEVCRRLMTTPGVGPVVALTYRATVDVPARFRKSKAVGAVFGLTCSKYQSGEIDRNGRISRCGDEMMRVMLYEAAQSMLHSKKWSWLKAWAMQIARRRGMKKAIVALARRLAVIMHRIWVDGTEFRWTREAATA

SEQ ID NO: 299852 - protein, 421 aa, unidentified
MKNSAAKKLKQVPAGYLVIGVDPHKKKHAAVIVAQDFTTHSKFKFKNSKEGFDIALERVRMEMVRTGSRGVIFAIETGGHYWRNLAYFLDERGIPFRFINQFTLKRRREGKDLNRRKNDYRDSEVAAQLLCTGEFTETQLRYGVYAELHAAHNAYRRLVKERTRITNLVKGLLDGLFPEFTQVFKDPCGLTALSVLSICPVPNIITGMTEEEFIYTIRAGHQGLLMKKKLRALHYTAKTSIGIDAGAQSVSSEISFLVEKLRLIKRHIRSIDETLVRLVDKTEEGKYLLSIIGLNYISVAGLLAELGSFRSYQSAKQLIKMAGSNPTESESAGKRGSHTPMSKKGRPVLRYCAWTAVIPMLRFNPDFRAWAKKLRERPVQANPLSGREIVGAALNRLLRLAFTLVKKQSFYRSPQLVQVTG

SEQ ID NO: 299853 - protein, 433 aa, unidentified
MPTAHPLDLVIGLDRSDRKADLHLINTRSQERCSVVIDTAPEALWEWLLQLRQEHPQARVGLCLEQPAGHLISFLEAYEWITLYPINPITLQKYREAFVTSRAKDDRRDAYFLAELLWAHHDKLKAWSPEDSATRAVQQLVFHRRAVVDERTGLTNRLQALLKQYFPQALQLCGEDLWRPLATAFLLKWPSLSAVKKARTATLKEFYYVQGSRSQKLIEQRLGLLEKAVPVTDETAVIESFVLRVQLLARELQWVQKTIQDFDQQIAQAYAAHPDREIFASLPGAGPVLGPRLLASMGSQRERFEAARQLQSYTGVAPVTKKSGGSSRIHRRYLCPKFHRQSFHEYAKESILWSRWAAAFYLQQRSKGSPHHTAVRALAFKWQRIIFRCWQERKPYQEQTYEAALRKSGSLLVGLFDRIEVGKSPWKNRAKKN

SEQ ID NO: 299854 - protein, 389 aa, unidentified
MIYVGIDVAKDKHDCCILGSEADKLFPVFTIPNNKAGFDELYEKMFSVTDDKTKIKVGLEATGHYSLNLLGSLIDKGLPTCVINPLHTNLYRKGLSLRKTKTDKVDARSIAMMLMTNKTLKPYSDISYHNEELKSLTRYRFDKVQERAKLKSSVARLVNILFPELEKLVPSLHMASMYALLSKLPGASYITECHLTHLKNLLETASKGHYGRDMAITLRNTARDSIGSVIPAKSMELKHTIHLIKVMTEEIDEIEDSIKSIMDTCNSPIMTIPGISYRMGAMILAEIGDFTRFNYADQILAFAGLSPSTYQSGQLDSSYSHMEKRGSRYLRYALFNAAKFVCKWDENFGAYLSKKIGEGKHYNVAIGHATKKLVRTIYQMELTGEAYRR

SEQ ID NO: 299855 - protein, 412 aa, unidentified
MDVQYNLAGIDVHKRMLAVVVTNARDTELQFECRRFGTTLSELRHLLAWLQERAVQEVVMESTAQYWRPVWLALEGSCRLHLAQARSNRGPRGRKTDFRDAQRAVSRLLSGDLVLSYVPEVEQRYWRTLTRTKYQLTRDKVRLQSQLESLLEECQIKLSSVVSDLLGASGLRILRALAQGETDPARLAELGDKRLRASDAELKDALSGVPQRIHRQLLSLYLARFDLIESHMENLDGMIAEEMKAHQHAIVRLAELPGLGIDSAQQIIAEIGPKAAAFPSAAQLASWVGVCPGRQESAGVSSSDRSAKGNRSMRRLLNQLAHAAVRKEDCQLQIVFRRLSSRLGYAKAVWAIAHRLCRLIWKVLHEGVSYVEYGPTPTPLALKRRRQRLVTQLKKLGYQVQLLPITLDRSSV

SEQ ID NO: 299856 - protein, 403 aa, unidentified
MNAVGIDVSKGRSTVAALRPMGEVAIAPSEVVHSAVGLERLAYQIIGLGEDTRVVMEATGRYHEPIAAALHEMGIWVAVLNPIVIKQSGAGSVRKVKNDRKDALKIAKYGLDNWSRLREHTPMDATRQQLKLFSRQYNLYMATSVSLQNNLISLLDKTFPGANELFSSPPKADGRCKWVEFVTTFWHCDCITHITPKAFYERYAKWCKRLGYNYSQDKAEDLYASSAGHFPTLPRNANTKLLITCAAAELTAFNKTLATIRAEVTRLAQQLPEYDTVRAMFGVGEITGAQLMAELGDVRRFSNRGAIVGFSGVDPQVNESGSFVPKSNPASKRGSPHLRKTLYQVVSTYLRRSPADEPVYQFLDKKRSEGKPYYVYMTAAANKFLRIYYARVKAFLETHTPSA

SEQ ID NO: 299857 - protein, 349 aa, unidentified
MLIIGCDYHPSFQQIAFVETETGELSERRLVHREEAEQFYGELKEQNAKVRVGMEASGHARWFESLLRDLQFELWIGNAAEIRTKRVRKQKTDRQDAQLLLRLLLEERFPRIWVPDSENRDLRQLLWHRHRLVQMRTRVMNQLHVVALNEGLQRKKALWRPAGRKELESFELAPWASRRRQDLLEILDQLTPKIQALSKALEDEVEKRPVTRRLMTHPGVGPLTALAYELVIGTPERFHCGKQIASYVGLVPTEESSGSRRRLGHISKQGNVLLRFLLVEAAQVTVRSQPEWRSKFFHLAMRRGRKIAKVAMARKLAVHLYWMWREGCDYSQWKKFGSHAGEPGNRDGV

SEQ ID NO: 299858 - protein, 413 aa, unidentified
MERVFRRVAGLDVHKDVVVACVRTPLPDGSQGVQTASFGTTTEDLLGLRDWLVGERVEVVGMESTGVYWKPVFYLLEDDVECWLLNARHLRNVPGRKTDVADAMWIAELVEHGLVRPSFVPPKPIRELRNLTRYRRAQVQERTRETQRLDKILQDAGIKLSSVASDVLGVSGRAMLAALIEGTSDPAAMADLAKGRLRVKLPALTKALRGRFTAHHALLVGEILAKLEFLDDSIGRLSAEIDRVMLPFGRQRDLLDTIPGVNKRSAEELIAEIGVDMARFGSAARLASWAGVCPGHHESAGKSRSGKTRKGSKWLHGTLTESAKAASRTKCTYLSAQYTRLRGRRGHAKATVAVAHSILVSAFHILDRDVPYEDLGADWFLRRHSPEHQANKLVRQLRTLGYDLQLPERSTAA

SEQ ID NO: 299859 - protein, 317 aa, unidentified
MTPTAIFVGIDIAKADFVVACRPDGTTWTATNDPKGIAATVDRLGALAPNLIVLEATGGYETPLVAALAAAGLPVVVANPRQVRDFAKATGQLAKTDRLDAHLLALFAERVHPTPRPLPDAALQQLEALMTRRRQLLDMLTAEGNRLEHAAAPIRREITRHIRWLERRVAAVDRDLDDTIQKSPVWQAKENLLRTVPGIGPVVSRTLLADLPELGRLNRKQIAALVGVAPLARDSGTLRGTRVVWGGRAPVRAVLYMGALVATRRNTVIRAFYLRLVAAGKPKKVALIACMRKLLTILNAMMRTNTQWQQISQPETA

SEQ ID NO: 299860 - protein, 403 aa, unidentified
MNMNAVGIDVSKGKSMVAILRPYGEIISKPFEVKHTVSGIRSLIEQIQSIDGESRIVMEHTGRYYEPLVRELSKADLFVSAINPKLIKDFGDNSLRKVKSDKADAVKIARYTLDSWTELRQYSLMDEIRNQLKTMNRQFDFYMKHKTAMKNNLISILDQTYPGANSYFDSPAREDGSQKWVDFSATYWHVDCVRKLSLNAFIDHYQKWCKRRKYNFSRSKAVEIYEASKELVSILPKDDLTKLIIKQAVEQLNTASQTVEQLRTMMNEAASKLPEYPVVMAMKGVGKSLGPQLMAEIGDVSRFTHKGAITAFAGVDPGVNESGSYEQKSVPASKRGSSTLRKTLFQVMDVLIKTKPQDDPVYLFMDKKRAQGKPYYVYMTAGANKFLRIYYGRVKEYLSSLPE

SEQ ID NO: 299861 - protein, 360 aa, unidentified
MEQITRGESRREAVRVGVDLAKRVIQVHAVDELGRVLTSRALARDRFIEWCTRLPAGCLVAMEASSSAHHWARKLVAIGLDARIISAQLVEPYRSQGTSGKNDANDAAAICEAASRPTMRFIPVKSIEQQSMLCVHRLREGLKEDRTACINRIRGLLAEFGLVFAQSPRELRAVLGDVLEDASNELGSLARLTLQRAQAQWHELDEHLAWCDERVAAHGQSNAAVKAAATLLGIGPVTASAVVATVGDFKQFKNGAQFGAWVGLTPRQRSSGGKNNLGGITKRGDTYLRTLLIQGAKSAVMTAHRRQDKISTWAVALRERSGWQKAVVALANKNARVLWAVMTRGAAFDPNHLSVKPASA

SEQ ID NO: 299862 - protein, 348 aa, unidentified
MVADSLDVVIGVDTHRDAHALALVATASGALLLEAVVEASREGYGDALELARAHAPGRRAWAIEGTGCYGAGLARFLLARGERVFEVDRPRRERRAQRGKSDALDALRAARSLLGGERLARPRQAGAREALRGLISTRESAVDARRAALNQLRALIVTCPEPLRAELRPLTRARLLRRLRGTRPRRHADRQLRGTLLAMRLLAVRIEALTLEQRELEGEIVALVRELAPQLLAQPGVGPITAAHVLLAWSHKGRLRNEAAFARLAGAPPIPASSGKVVRHRLDRGGDRKLNRALHTIILTRRRTDPDTIAYIQRRVSEGKSDRDAVRSLKRYLARSLFRQLEAHPQPA

SEQ ID NO: 299863 - protein, 431 aa, unidentified
MGSEQHWVCAATLDRSGREVAHFGGTTAELIRMAEWLKARQVESVAMESTGVYWIAPHEVLEAQGLQVLLVDTRQLAQVPGRDKKSDPTDCEWIQRLHSCGLLRGSFRPEEAVCMLRTLVRDKANLVAESGDWLRRMQKSLDQMNVRVHRAVSDIDGVTGMAILRAIDGGERDAQKLAKLRDRRCSKTQQEIAEQLNGHWRDDHIFSLQQALKMYDAVQERIAAYEQEILRKLGEMEGEEPHEPTAPPLQNASKARTIKKLGQEAKRQALYRMSGVDITQIDAIGVETVEVVVSEYGSDLSRFPTEKQFVSHVTLAPSVPKSGGKPVRKKKRNSASTRVAAALRMAALSLRHSQTALGAYYRRIAQRRGGDIAVFAAARKLATLIYRLLRWGQPYLDEGAAAFEIRYRQHRIGRLAATAKELGYQLTPVPA

SEQ ID NO: 299864 - protein, 313 aa, unidentified
MAEKEVFVGIDVSKGKLDVAVRPSGELMSFSNDEDGISVMIDFIKPFSPILIVLEATGGLETASVGMLAAKGLPVVVINPRQVRDFAKATGRLAKTDAIDAHVIAQFGEAVRPEIRPLKDEEAKRLSALITRRRQIVEMMTAEKNRLIAAAPWTRKDIQSHIAWLEKCLKKADQNLNDLLKKSPVWREKDDILQSTPGVGPVLSMTLLSSLPELGALNRKQIAALVGVAPLNRDSGLFRGKRTIWGGRANIRSVLYMSVTCAIRFNPVIKKFYQRLRDAGKLHKVAMTACMRKLLVILNTMIKNRTRWGTVTA

SEQ ID NO: 299865 - protein, 429 aa, unidentified
MTNQPIAGFDVSKRFSDMCILGPDNKVFARMRVHHNVSDFRKACNLLKSAEKEFAMIPTIIMEATGHYHRLLFHFLKNAGYEVIVVNPIQTDSIKNISVRKVKNDKVDAYRIAILYRLKELKPTNMPVEAILDIRTLCRQYYDISDDCTAYINKLIAVMDELFPGFNDAFGSIASKTALEILSGYPTPEDILSAPKDKLVEIISKTGRKGLKWALDKYNKLIEIATEVKPLFIKHSSSSILVNTTITFIRTFQDHLKRIENEIHKVIADNPDYVGKAIELLDSIPGIDTITAAAILGEIGDFSAFKSPKQLVAFFGIDPSQKESGQSKSTDNKMSKRGSRILRRVLYTTAMANVREKRNKELFNPVLFEYYNQKLVSKPKMVALVAVMHKLVYVIFAVLRDQKPFVLKTPEEHKKLLVLKASQHQRKTA

SEQ ID NO: 299866 - protein, 338 aa, unidentified
MKDIKLLAIDLAKNKFQLHGNDEFGNCVYKKQISRSKLMETIENLPLCTIVMEACGGANHWCRKFDAMGHTSKQVHAKYVKPFVKTGKNDANDAEAIAEAATRPYMSFSKTKSIESQDIQSLHRVRSLYVKNKTALSNQIRGILTEYGIVAPLGLAKLKIVIQDELESTENDLSASMRSIVDDLYTQLLNLESKVSEYSQIILELSKKNQNYILLQSIPGVGPMVATAVMSLMGDPNDYKNGRQFAAFLGLVPKQNSSGGKTKLAGITKYGDTYVRTLLVHGARSVVRCAKGKVDQRSLWITKKFQEIGYNKTSIAVANKMARMCLAIIKTQQPYKTI

SEQ ID NO: 299867 - protein, 312 aa, unidentified
MEAKFVGIDVSKATLDVDCLPVSTARQFSNDAGGIAALVEWLLGSGVERIVVEATGGYEIAVASALAAAGLPVVVVNPKRVRDFAKAQGVLAKSDRLDARVLALFGERIAPPVRALPQAAQRDLTELLDRRHQLVSMRAQEQARLATVLPVARGDIEQHIAWLDQRIRKHETVLLKRLRANEIWDAKVKLLDSVPGIGPVNLFTLVGRLPELGTLNRQQIAALVGVAPFNDDSGKRRGQRYIRGGRAEVRCALYMATLTAKRCNPVIAQMFERLIAKGKPFKVAMTACMRKLLTILNAILKSTQPWENRLAT

SEQ ID NO: 299868 - protein, 323 aa, unidentified
MQGKVLSEPNATPAVYAGIDVCKEWLDVYVHPAGQSFRVTNDNGGLRRLKRQLGSLAVRRAIMEATSKYHRAAQRSLHEAGLVVAVVNPLRARLFAEACGQLAKTDKIDARLLALMGVALDPAETAPASPAMEALQEMVGARSAASAERTALINRLATLQNPFLRAELKRRLKALHSHIMRLEAETGRLISADPTLARRYTILMSVPGIGPATAASLLAGLAEMGTLNAKQAAMLTGLAPVAHDSGPRLGRRAIKGGRKGVRNALYMAALSASRYNRDLAVFATRLRKAGKPAKVILVAVMRKLVVMANALITQDRIWSPTAP

SEQ ID NO: 299869 - protein, 342 aa, unidentified
MKHYAGIDVSLEQSSVCVLNASGKIVREAKVASDRQSLIDWFSSLGFGLERIGLEAGPQSQWLYAGMKEAGLAVELLETRHVRQAFKTMPVKTDRKDARGIAELIRLGWFRPVHCKSMDAQETRAILTARTLVQSKLHDIEMSLRGLLRGFGLKVGRTTPNCFAGRIQELVGDHPTLRIVADALLAPREVLLRELRGLEKRVRLMARDDARARLLMTATGVGAIVSLTYVSAIDDPARFKRSKMVGAHFGMTPKKYQSGETDITGRISKIGDKSVRTALYQAAHVILTRPVKASALKSWALRLAKRVGSSKAKVALARKLAVVMHRMLLDKKPFNLAAGAAA

SEQ ID NO: 299870 - protein, 378 aa, unidentified
MQSMKQEDTLVVGGVDAHADNHHAAALDERGALLATKSFPTTTPGYAELLGWLRAFGAVAVVAVESTGAYAAALVRYLREHDVRVVEVNQPHAHTRRRVGKSDPIDAEMAARLFLAGKAKAIPKQTDGIVESIRLLRAARHSAVKSRSAAMVQLGGLIVTAPQELRDQLSSPRTIRGKAALCRRLRPSIGELRRPTHAAKFALRSIAGRIDALDDEIAVLDRQLEQLVRAAAPRTIQLLGISTGHAGQLLVTAGQNIERLRGEAAFAALCGANPIPASSGKTTRHRLNYGGDRQANRTLHLIAVCRLRYCARTRAYTQRRTAEGKTKPEIMRCLKRYIAREAYNALRADLAALQHPAPSATVTISCSAGPIGTTRRRT

SEQ ID NO: 299871 - protein, 354 aa, unidentified
MKTYYVGMDVHRASVVIVVLNGAGKVVMQSVIETGAERVRGFLKQLRGKVYVTFEEGTQANWLHEVVRPLVTGVVVCDPRHNKLLLSGNKSDRVDAQKLAELLRNGSLRAVYHGDNGVRTLKELVRNYDCLVSDTTRVMLRLKAIFRGRAIACAGHDIYRQDRRRKWLEKLREPGARQRANFLYNQLAALRPLRHEAKLMMVKEARRQPAYPWLLSMPRLGSVSVAQLLAVVGTPHRFRSKRQFWTYVGLAVVTRTSAEHEVVDGVLRRSRRPIATRGLNRNHNHLLKKVFKSAATSACHSGPFKAAYDARVKQGMDPSLARLTIARQLAAITLSIWKRSQQFNPERMKQQTAA

SEQ ID NO: 299872 - protein, 394 aa, unidentified
MDRVFVGVDISKDNFSAAGLDAEGNECFSGSYSMDSDGFGKFLEIVIAHCPDHQKVLVGMESTACYHINLFSFLTSQGIPAAVINPLLIANFAKRSLRKTKTDKKDARTIAKFLMENREEISQLSISQDLQDLRDLARERESVSHLISATKVEIKRVLRTTFPELESVGDLFTRSMLRFLKEYPSARRVKMAKLKKLAKVLNQPHVGNKLSFSVEDILRAAHRSIATVSSAKEIILQGKIATLLHLQERLEELTKLLTDICKATRVEDWKILRSIKGVGPKTAVPFLAEMGSVENFSSHRKLIAFAGMDPSVCQSGKFIGKSKLSKRGNRHLRRAIYLMTAAVVSQNAFFKAYFLRRKKEGLIPQKALLATAHKLIRVIFAMLSHRTYFQLKMT

SEQ ID NO: 299873 - protein, 332 aa, unidentified
MSVFTNTIGIDISKDKLDAHDYKLRKHEIFKNDLEGYKKLLAWVQTKHGKELESILFCFEHTGIYSLCLSVFMEENQLIYSVIAGLEIKRSMGITRGKSDKIDCFKIAQYAYLRREQLQPTTMASASLIELKELLTIREKMVKHRGAYQSHLKGLAIFYKPDKAPLLFQGQEKLVKELTKQIKVIEEAMEKLIGEDPSIKKNYQLATSVKGVGLIVGATMLAYTNNFTSFENWRKFSSYAGIAPFEHESGSSIKKYKRVSCIAHKGIKALLSNAAASSIQYNPEMRIYYQKRVKEGKNKKLVQNIISNKVVARVFAAVKRGTPYVNTLNYAA

SEQ ID NO: 299874 - protein, 419 aa, unidentified
MTFYFERGYIRQMGLWSTSSVKQTKGGATMVYVGIDVAKDTHECLIVNGDGSIVSQPFAIANNHVGFEHLISKLESCHNDLSDIKVGLEATGHYSDNLLAFLVSKGLTTIVINPLHTNLYRKSLSLRKTKTDRIDAHSIVTLLRTETLKPYSTMSSHIRELKSLTRYRFSLVQDLAQIKSSYARLCVILFPELEKMVPTLHLISVYTMLAELPTAETIAACHLTHLENILSASSKGRYGKDKAVEIHKAAMESIGSHSDAKALELQQTIQRILCLEAQIEAVESKINPIIDSLQSPIMTVPGISYRMAAIIIAETENFTNFTHAEQVLAFAGLEPSVYQSGQLTSTHAKMVKRGSKYLRYALFNAAKYVCRWDPHFGAYLAKKRSEGKPYNVAVSHAAKKLVRVLFHLVKTNQSFISQA

SEQ ID NO: 299875 - protein, 417 aa, unidentified
MTDDARWFVGVDWASQAHQACLIDAGGKIISEQAFAHGGAGLAELCTWLLAKTGAAPSAIAVAIEVPHGPIVETLLGRGFQVYAINPKQLERFRDRFTVAGAKDDRRDAHVLSDSLRTDRHCFRRLAAGNAVVVELREWSRMAEELQQERTRLANRLREQLWRYYPQALAVGEDLAADWFLELWAAAPTPAKAARLRASAVERVLNAHRIRRITAPEVLRILRQPALAVAPGTAEAATAHIRALAERLKLVNRQIREAHRRLDGLCAKLAGDDRENSPGQATEQRDVTILRSLPGVGRIVLATLLAEAAEPVRRRDYHALRTLSGVAPVTKRSGRRCIVIMRHACHMRLRTAVYHWARTAIQHDELSRRRYASLRQRGHSHGRALRGVADRLLAVACAMLTRQAPFDPEHAGNRAAA

SEQ ID NO: 299876 - protein, 416 aa, unidentified
MNAVGIDVSSRKSTVAVLRPLGEVVCLPFDVTHDIAGLASLAEKLKALDGETRVVMEHTGRYYEAVAKALHEAGLFVCAVNPLLIKEYGANSLRRVKTDKADAVKIARYALDNWADLRDFTPMDAIRYDLKTLNRQFQLASKQRTASANNLIALLEQSFPGIRKCFDSPVRSDGTQKWVDFAHSFWHVDCVRKQPFPAFCERYRKWCKRHAYLFKLSNAEEVYALAKRAVVLTPKSKVVKVLVQEAANQLISISRSVEVYRAEMDRLAAMLPEYPVVMAMYGVGKSYGPQLMAEIGDVRRFERKQALVAFAGIDPMPNQSGDKNVRSNKSSKRGSPYLRKTLFNVIRTYLQCAPQDEPVFQFLNRKRAEGKPFYVYMLAAANKFLRRYYAKLRDYFASLDTLQPVAPIPTILKATL

SEQ ID NO: 299877 - protein, 286 aa, unidentified
MDVSKEETAFCVKDSSGKVLARGKAASDPVALFEALRDHCLCPERIVLETGTMSGWLARGLGDLGLPVDVIDARQAHAVLKLQHNKTDAGDAELLAEISRSGFCRPVSVSSEAAQEVRILLKARTHLVRQRRDTENAIRGLLGSLGLRFPKGTSKLADRVRAALEERAELGAAIGPLLFVVATLKREIAGLDQEVMTRAKSAPACRLLMSVPGVGPVTALAYVATIDDPTRFAKSRAVGAYLGLTARRFQSGEMDYSGRISKHGDAMMRSLLYEAANSLLSVVPKS

SEQ ID NO: 299878 - protein, 461 aa, unidentified
MAKKAKKVKTAKGAELRIVNPDAAGIDIADGIMQVCAPADRSKDNNRAFGAYTSDLHAISAWLRECGIKTVAMESTGVYWIPLFCRLQEDGLDVVLTNARDVKNITERKTDESDAEWLMLLHQYGLLKASFQPHNDAKRMRTLTRHRDTLSREASSIVLRMQKAMQQMNIKLTLVLSDITGKSGIRIIEAILAGERDPKRLADLADIQCKTPKEEIAKALEGNWEEDLMFVLRQNYDTFKHYCTQLGECDAELEKLMENYRAEVAKVEDTSYSPAKKRRDYKKTRHTVGFDVERKAYEMWGVNVFEIPGISHLTALELMSELGHDFTRKFPSSKQFCCWCNISPNTKISGGKRISSHVPHRRNNVGLIFRSIASSLANAKNQLGNFYRRIRSRAGGKAAVIATAHKVAEIFFAMVANQTTYNPERVGIDEKVLLEKRITRYKRELERITGTHIEIGNACVP

SEQ ID NO: 299879 - protein, 424 aa, unidentified
MKVTYQTCCGVDVHKSFLVATIIKTSSGIEPSYQKRRFSTFNNSILEFKKWLLENECLYVCMESTGKYWIPVFNILEDEINVTIANPKWVKAVKGNKDDTKDSKWIGDLFRLGLVRGSYIPCKKIRILREFTRYRYKLVSCRSSEKNRYQNALTVCNVALDSVVSDIFGKSSTSIIDYLLEHSGISINHEEIASKLLRSLKSKEDAVIESIEGYQMTDAQKYRMRLVRAHMDYITAEINDVDKMIENMISSNPDFENAVQFLCTIPGVKRDSAITIISEIGTDMSQFSSSKRLCCWAGLTPGSNESAGKKKSVRITRAGVYLKPALVQCAHAAVKSDKSPYYKKKYESLVKRRGKKRAIIAIARMILTAIYQMLSTGELWNPSDLYKIDMPVALVEKQKAKAIKQAKKLLQREGLLPPDEPLAS

SEQ ID NO: 299880 - protein, 372 aa, unidentified
MSPNGITWVGMDAHKVSIKVAALFPDRAEPVEWTEATTPEAIRRLARKLQREAPGEVRACYEAGPTGYGLQRLLEAAGVICEMIAPSLTPVRPGSHIKTDRRDARKLAELLRAGLLTTVHPPSEADEALRDLCRCRDDVRVDLLRARHRLSKFLLRRHCIYRQTQHHWGTRHWAWLEQLRFDDAVSQATFDSYMLAVRQLEERLAQLDAQLAEFGGRDPYREPVGWLRCFKGIDTVTAVCLIAELHDFRRFRSARELSSYVGLVPSEHSSGERERRGSITKAGNRHVRRLLVEAAWHHRHRPMISAPLRRRRAGQPARVLAVADRAQERLCARYRRMTGRGTIQPKTIVAMARELTGYLWAVLHPDATTTRN

SEQ ID NO: 299881 - protein, 456 aa, unidentified
MKKPRNKRTPNISKLENLKHLNLNAAGLDIGATEIYACVPEDRDEPSVRVFQTFTVDLSALADWLAACGVTTVAMESTGVYWIPVYEILEARGFAVHLINARQLKNVPGRKTDVLDCQWIQQLHTYGLLRGSFRPDEDMCALRAYIRHRDTLIRYRSAHVQHMQKALHLMNVQLPNVISDITGVTGLQIIRAIVQGEHDPHTLAAYRNEHCAKSEEDIAKALTGNYRPEHLFALKQALELYDFYNQQLAACDQEIAQKYAAFKPQVDLTAQPLPPRKRRRNKPQGNEPTFDLRSDLYQLAGVDLTQVDGLQVLTVQTIVSEIGLDMHRWPTVKHFTSWLGLAPYQDISGGKTLRTGTKKTTNRAATAFRLAAQSLHSSDSALGGFYRRMRAKHGAPKAIVATAHKLARIVYHLLTYRQDYVDPGADYYEAKYRDRTIRNLKRKARQLGLDLVPVTA

SEQ ID NO: 299882 - protein, 336 aa, unidentified
MSLRSCALCIVDGKGTVLFEREVPCEVGDIAECLVEFPHPIERVGFEAGAMSQHLFFGLTAEGFDFVCMEARQVNAALSAMRNKTDKTDARGIAQILRTGWFSPVHMKSREAHGLRALLSTRKALLKKTMDLANEVRGLLKIFGIRLPQTVKHGRFDGVVRPMIEIDDVLAHALVPLLDARVVLYQHYLELDRRVKRAASQDDVCMKLMTIPGVGPIAALSFKSAVDDPTRFKRSRTVGAHFGLTPRRYQSGEHDNPGRISKAGDRDVRAVLYAAANALLMRTMASSQIKSWGMRLMRTKGRRRAVVAVARKLAVLMHRMWIDGSEFRQDQVGGMA

SEQ ID NO: 299883 - protein, 367 aa, unidentified
MIKSLRFVGLDVHKDSITVAVAVAGREPAELLGTIKHDETALLELLEGIGPKARLRLCYEAGPTGYGLARRLNEWGFCCEVVAPSLVPVQGGRIKTDRRDARKLAHFLRSGDLTAVRIPEAQTEAMRDLERAREDAKAAERVVRHQLDKFLLRYGRIWSGGTKWTCRHWAWIRQQEFAEPAARAVRDDGIEAVEQATQRVERLTQAISDHVEQWALLPLVQALQALRGVSLLTAVILAAEIGDFKRFASPRQLMAYLGLVPSEHSSGETRWQGGITKAGNRHARWILTEAAWNYRFAPRPSKTINARRRLVSADVRSIAEKAEHRLHRRFERLTQRRKKSQKVATAVARELAGFVWAIAQQETALAV

SEQ ID NO: 299884 - protein, 340 aa, unidentified
MSEITTIGLDLAKHVFQVHGIDAQGTTVLRKRLRRGQVLAFFSRIPRCVVGLEACATAHYWGRELGALGHEVRLMPAQYVKAYIKRNKHDAADAEAICEAVQRPTMRFVPVKTAEQQATALLHRGREQLVRQRTMLVNALRAHLAEFGIVAAQGLRNVGELIAIVRDDGDTRLPDVARQVLQVLANQIEQIQTAVAALERQLLAWHKTNPVSQRLASIPGIGPTIATAIATTVADPKAFRSGREFAAWLGLVPRQNSTGGKTRLGGITKRGNRYLRRLLINGASANLLRSKATKADPWVIGLRRRRPPLVVAVALANKTARIAWAVMLREKEYQPRAVAA

SEQ ID NO: 299885 - protein, 533 aa, unidentified
MATKRNSRKSRTTGPGVLGKPRGVIQARVQKVGPERFGIVAVDCAKARSKWMLCDFYGKVLIPPTVVEHQRVALEVATLQLREAIQQHALQDHLVAVEMTGTYHRPVQRAFRKAGSETRLVHPFASRHYRLPAHADSKTDDHDLEGIFRAAVNGFGLVEPEWDQVYRHLQVWARHRRDLVEKRAKLQSQIRQAMERCLPGYAALFSGDDLWTRPVGMAVACRALRPEAIRAAGVSGVWRWLKEDKLRAQSRTVERLVAWAANAAAADPLCDYLARVWQTLYEDWQAKTRQIHRLEQDLAGILVKTPYVLLLSHPGINVVTASELAGEMGPIEHYAHAKAITGRAGLFPSRYQSDEVDRADGPLARFRNARLRAAWMRVADCLIKCNAHYRGKSALWKSRGVDAHDIHCRVANRVTRTVFQMVSGRRLYQHPSRLDRQYVLDKLRVFHQDHGTTPVEILRDLGEAAAQIPKSEQAAEARPLLEACRKSRRSRRAGPQAIGEILLVVLAKLGFGEVESEVKAPSPDANVSGTGTR

SEQ ID NO: 299886 - protein, 407 aa, unidentified
MRYIGLDIGSAKHAVAIVDESGEVRLKPRFFDANQTGYEELFETLGAPEDAVVAMEATGHYWQNIYIELASRGFAVVLINPFRTRRYAEEDLVRAKTDKIDAGLIARFAAQKRVTGERATDTLRLALRELVSLRDRLQQDLDDRGRQLHRALDLSFPESKSLFKSITSLKTTTILKTYPGGTPLAQADLDELAKLVYDGRHCVGKELASALIELAKVTVGKHQGGPYSQQIIYYCEDIQTLHKRLKDLEREIEKCLEGQQLPTLLMSIPGIGSLSVARLIATVGDPSSFASGNALASYVGVAPQVKHSGKWTPNRAAAGMMSNSRLRAKLWSPTVVATRCNPWLKQYYDRLVGNGKPKKVAIIACMRKLLLAIYSVAKNRKPFAIRTASATETETETEITSVLASAS

SEQ ID NO: 299887 - protein, 387 aa, unidentified
MLADCRPKAVEPHTKEPVMQEGTTYVGLDAHKVRIHAAVRLPGEGQTVEQTFANTPETTRRWVRRLRRRAPGEIMCCYEAGPLGYALQRELVAQGLRCQVIAPSLIPTKPGDHIKTDRRDARKLAELLEADLLTAVHPPTPAQEAVRDLCRAREAVKQDQMRLRHRLSKFLLRRAVRWTVGRRAWTQAHDRWLRGLRFEHVADQAILDDHLLALDQIAGRLQALDTKLEAWATKPPYAEPVAWLRCFRGIDTRTALGIVTELHDWRRFPSPRPLMAYLGVVPSERSSGERERRGGITRAGNRRVRRLLVEAAWHYRHRPTVSRELARRREGQPARVIAVADRAQQRLHARYQRMLARGKPHNKVVVAMARELVGFLWAALEPQPSDA

SEQ ID NO: 299888 - protein, 348 aa, unidentified
MLIIGCDYHPGFQQIAFVDTASGECGERRLSHREEAEQFYGALKQRSVRVGMEASGHSRWFERMLRDLQFELWIGDAAEIRTKRVRKQKTDRQDAQLLLRLMEEDRFPRIWVPDAENRDLRQLLWHRHRLVQMRTRVMNQLHVVALNEGLRRKKALWRPAGRNELESLKLAPWASRRRQDLLDLLDQLTPKIQDLTRALEEEVEKRPITRQLMTHPGVGPLTALAYELVIGTPERFHCGKQLASYIGLVPTEESSGDRRRLGHISKQGNVLLRFLLVEAAQVTVRSQPEWRSKFFHLAMRRGKKIAKVAMARKLAVHLYWMWRQGLDYGQTQKLGSHAGEPGNRHGVQ

SEQ ID NO: 299889 - protein, 470 aa, unidentified
MSTMMTLGIDVAVRVKHRATLADDRGEYVWSGHGFLTAPEELERLWARVPEDAEVTVVLEPTRNAWVPLVAWLRARGAQVVLVPPEQSKDLRRYYSKHAKNDKLDSRILARLPLLHPEGLRALDDLGPADALKRAVRRHATLIERRTASYHRLDCLVELLGPAWSQVLGTSDYSNTALVVLERYADPEKLRRLGRARLARLLSKHSRGQWREDKAELLLGAAEQTLTLWEAGGLDFTELAADIASEVATIRALNEQLTLVDERIERLYEQVDPAGIFRSGPAMATTSAAGILGRLGDPNRFANLGAVRAYTGLVPGVDESGQAGHHTGPTKAGDAGLRHQLYLAAERARLVDPTLAAKYYRLVVEDGRHHVSAVCHIAPILITRLAACWRNGERYIVRDIDGRPITEAEGREICAEHYRVPDEVRRRRRRTTTTQRQKGRTGRRDEESTKAAPAVDPSRSDPTHTNDIAA

SEQ ID NO: 299890 - protein, 316 aa, unidentified
MNEPTSFVGIDVSKNTLDVHVLPTGAHWQVANDPAGCAQLIERLKPLGETALVVMEATNVFWRMATTALAGASLRCAVVNPRQVRDFAKAMALLAKTDAIDARVLAEFARRIKPPVRALPSAQCQLAAEMLGRRAQLMGMRVAEINRLATATAKRVRKDIQTTISFLDKRLAAMDEEIDHWLKSTPIDQSRADLLQSFTGIGSSTSRSLLITLPELGTLSGKQIAALAGLAPFAKDSGTARGKRHIAGGRCIVRAALYMPALSAITHNPVIRALYQRLIHAGKHHYVAITACMRKILVILNAMLRSHQPWQAPQLA

SEQ ID NO: 299891 - protein, 414 aa, unidentified
MSKARKPMRVKSHQLTVGIDIGKYHHVAVGLAGDGRFTKPMKLPNTREGYEQLLLRIMAWKKEYGADEVLVGMESTGHYWEVPARWLTAHSIPVVQVNALHTKRAKEIEDNTPGKTDPKDARIIAQLVAWGKYLDCHLPDGAVAELRQFVRQRSTLTNELTEKRNYLRYLLDCVFPELFTVFKKSSGKTLLHLLALCPSPHELIGADQADVARTLRQHCPTGAAKRLDRVYALARITVGIAPARHAYAVAIRRTATRILALREEKAEVEQQMTKLLIELPEAGSLLSVKGIGPVSAAIIVGETGGLHRFGHAEEVIKLAGLNLFEVSSGTHKGTVRISKRGRPLLRQILFVLATIQAKKGMPFHACYEELLNKKMPRVKALIAVARKMVRVLFALVRDGRCYQDEKPAALKKAA

SEQ ID NO: 299892 - protein, 456 aa, unidentified
MSTYYLGIDVSKGYADFVILNRNKQCVEDSFQLDDTFSGHCHLYERLVEFFDNHPDALMYAAAESTGGYENNWFNSLVKFQATLNIQTARLNPLGVSANSRADLKRNITDKISAQNVAEFMIAHAEKITYQQEDAFANLRRQWSFIKLLTKQSTQLFNQLESLLYIANPELLAYCQDKTPKWVLRLLGKYPTASNLSKAKAKTVATIPYVSIQRAEQLIADAKNSIASATDKTTGQLITNCVKQIVHMNQIIETQTKMMVEQCSFNEVDLLKTFIGISDYSAIGLILEIQSIKRFSSVKKLASFFGLHPVFKLSGDGSGGFRMSKKGRKEPRRILFMVTIVAINHNPLIASIYKERLEKGMAKMAAIGYCMHKILRVIYGMLKTNKAFDPDIDRSNRIKNTHRQKKTRKDRNRRYQEYDAKAPVSRRQRKRRKERKESQSDNITENGIIVSAPNHA

SEQ ID NO: 299893 - protein, 345 aa, unidentified
MEITTVGLDIAKRVFQLHGVDAAGNAVLRRKLQRSEVLAFFKALPPCLVGIEACGTAHYWAREISELGHEVRLMPPSYVAAYVKRGKTDAADAAAICEAVTRPTMRFVPIKTAEQQAVLMLHRTRDLLVRQRTMLVNALRGHMAELGVIAPQGIARVADLIAVLFGEDTTKVPALARQALGGLAAELEALDRRVKEIEVAIVRWHKDNEASRRLAAIPGVGPITASAIVATITDPFQFHSARHLAAWIGLVPRQHSSGGKQRQGGISKQGDRYLRRLLVLGATAVIRHSRSKSTAEAGWLKSLLERRPARLVSVAQANKTARIVWALLVRGEAYRTPVAVPGGAA

SEQ ID NO: 299894 - protein, 320 aa, unidentified
MNRPRITGTGFMTIQHFYVGCDISKATIDFLDNSSGAHTRITNTAAEILRFLKPYQNRSVCFAFEATGAYGMELQTCLATAGIAPVQINPLHARRFAQSRGRLAKTDRIDAAQLAEMATRYALPATHVFCQDTEELKALIVRRDQLVQQRAGEKKRLQQSRMEAVRHSLGKAIAQLSEEISTFEVLIQQAIRANPDFAAKSQLLQTIPGIGPAIAPVLIAMLREAGQTNRRAIAALAGIAPYNRDSGAMQGHRSIAGGRHRIRRALYMAALTAARSKSKLGVKYLSLREAGKPPKVALVAIARKIATIINAILKTKKAYA

SEQ ID NO: 299895 - protein, 345 aa, unidentified
MNITAVGIDLAKNVFQVHAVDARGKVVLRKQLRRAQVAGFFSNMPPCLIGMEACASAHHWGRTLGRFGHTVRLMASQFVKPYVKTNKNDVADAEAICEAVGRHSMRFVPIKSVEQQAILSVHRVRQGFVKARTAQANQIRGLLGEFGLVIPQGIYNIAKRVPELLEDASNELPVPFRHLIERLTQHLKELDRQVKEFEKEIIEWHRSSELSRKLEAIPGIGPLAASALVASIADAHSFNNGRQVSAWLGLVPRQSSSGGKPTLLGMSKRGDAYLRTLLIHGARSAILAAKNKVDNTQGWLTNLLKRRHPNIAAVALANKNVRTVWALLAHGREFQADYMPTRRAA

SEQ ID NO: 299896 - protein, 408 aa, unidentified
MGRAAEVVAPSSSIRTDGGCPVVQVNDLSRSLAAFDPISTLVVVVEMSKASWLVSSVVPGVERQPLKKLEPDATALVRLIERWRNEAVRVGRPISRIALAYEAGRDGFWLARWLIARGIEAHVIHSASVAVSRERKRAKTDRLDAAMLMRVFLGWLRGERGHCGMVAIPTMEEEDARRPNRERESLVNERSRIINRMKSALARLGIRGFKPHLRKAPERLAGLRTAEGTGLPTNIIEEFRRDMARLALVREQISSIEKTRAERLERAPDTGPHAMVRLLARVIGIGIETADMLVREILSRKLRDRRALARYAGLTGSPDESGLKSREKGLAKAGNARVRRGLIQLAWRFLMFQKDSALARWYRTRTEGPSGARKTTMIVALARKLLIALWRLVTTGEVPDGVELRTAA

SEQ ID NO: 299897 - protein, 350 aa, unidentified
MTTIARRITGGVDTHLDVHVAAALDERGALLGVESFETTPKGYRALSRWLADFGSVELVGVEGTGSYGAGLTRHFLEAGVAVVEVDRPNRQRRRRKGKSDPEDAIAAARAAQGGDANGSAKARTGNVEAMRVLRVARSSARRSRTQAINQMRSLISTAPDGLRAELRDLSVYEVLDRASAYRHNHKTDVTSLTKLTLRTLARRALSLEEEVKEIDRILHTLVAETAPELVAVVGVGTDVASAILVAAGDNPERLRSEATFAKLCGVSPLDASSGKNERHRLNRSGDRQANSALWHIVFTRMVCDPNTQHYIERRMKEGRTKKEAIRCLKRYVAREVFAQLPRPQFALDSP

SEQ ID NO: 299898 - protein, 424 aa, unidentified
MNLTQNDRLKQVTSDILIVGVDVGSQTHFCRAFDWRGFELSRRVFKFSNTGMGFLTFLRWTEELMNKTEMKKVIVGCEPTGCYWLTFQKFLQDHDIQLVTVNPFTVNRSMELDDNSPEKSDLKDPKTIALLVKDGRFSTSYLPSGVYAEIREASVCRDQIMKQHVRLSNQIQGWIQKFFPEYLECYVDWDSTSGLMLLREAPLPQDILKIGAGGINQIWRNAKVRAAGIKRAQTLVEAAQNSVGLEAGEAARLEIWVLVNDYILKAEQLKRLDEYLEEKVKEVSNVEKLLAIKGVGMSTVIGFIAEVGDIGCFTDPKQIQKLAGLEIVKKSSGKKKGQPRISKRGRRKLQRAMYESARALMTWNPAFQDVFLYYRNRTKNPLGGMQAKIAVACKAIRIFYVVLQTGCDFDEEKIRKDIIRPEAA

SEQ ID NO: 299899 - protein, 366 aa, unidentified
MTSVAPAGERIYLGMDVSRDKIAVAVLRPGQDVPAVEMISHDGEMVRRLIGKFADRSVLAACYEAGPGGYELHRLLTSAGVACDVVAPALIPKAAADRVKTDRRDCVRLALSHRAGMLTAIRVPSEPEEAVRDLVRTRADLVDDRKRMMQRIGALLQRHGRVWRAPRWTCQHRAWLDRQSFTEPALEAALRTYLAALDARDAELAVLERQLRGCWASVDPLASMVRQLGCYRGIAELTALTLAAEVADFRRFASAPAFMGFTGLTPSEYSSGARTRRGGITKAGPQLVRGALVEAAWSYRHRPAIGATLRRRQAGCAAETLARSWKAQQRLHATYAKLTRRGKIPSVAVTATARELAGFVWAEMTS

SEQ ID NO: 299900 - protein, 312 aa, unidentified
MDNFVGIDLSKTHLDVAVEPGGQGWRLSNDLQGRQTLLRRLRRLQPALVVLEASGGLERAVAQCLRQAGLPVTVVNPRRVRDFAKALGLLAKTDQLDAKVLAQFAASVRPPVRDWADASTQQLQALLTRRRQLLDMVAAEKNRLPLAHPSVQPQIQAHIAHLEEQLRQLDEQAQQLQQGNAAWQTRIQLLQSVPGVGPVLTSTLLGCLPELGSLNRRQIAALAGLAPFNCDSGQFQGQRHIWGGRPLVRWALYMATVSALRCNQVIQRFYRHLKAQGKASKVALVACMRKLLSILNAMLKHQSPWQPRPLTP

SEQ ID NO: 299901 - protein, 370 aa, unidentified
MLNTTTFVGLDVHARSIKAVALDAMTGEVRSATFAYGAAAVAEWVGSLDPAAKCVYESGVTGFDLQKRLAALGVDCVVGAVSKMIKPSADRKRKNDRNDAEFLARMLSVGNVVEVWVPDDGCEAARDLVRALDDAREDLKRCKQRLSKFLMRHGYAFSETTPTGRRKGNWTAAHWAWIRSIEFPEEADDDVLAYYIDATRRAMEDKKRLEKPVEAEASKPRWKKRVDSLRRLKGVDAMTAAGIVFEAGEFSRFKNARSFAAWLGLTPSEHSSGESVRQGGITKAGNKHLRRVLVEAAWHYISASPHPKDLAKGQAPDPAARRHAAKGIRRLVKRREEMPGRGVHKNKANVATARELACWCWAIGRMVENG

SEQ ID NO: 299902 - protein, 326 aa, unidentified
MTKVQNFSGIDISKNSFDVCLEHEGRYRHKKFSYTEEGMESCVKFITPDTHCIMESTGTYHCRLAHFLHTRGITVSVVNPLSVKRFAQALMLRSKTDSADSRMLAMYGRKFTPAPWLPKKDYCIELQQLINLQQLLIKQLTADTNQLEANTHSVVRNPCVQEVLRQQVLQTQASIKQVEKQLEEIVQQYDKQNYDNVSAIPGIGKKTAIVLIAMTQNMEAFDSAKQVCSYFGLCPRLYESGTSVKGRAKICKMGMVVIRKLLYMCALSAKRYNKACRELYERLVAKGKSKKLILIAIANKLVKQVFAIMKNKTTYNENILSIKFAY

SEQ ID NO: 299903 - protein, 313 aa, unidentified
MTEHSIGIDISKSHLDVFHLETQTAKRFENSASGFRALRKWLSPLAVARVVFEATGPYHRAFEKAFSSKLPLVKVNPLQARRFAQACGTRVKTDAVDARLLARMGDALALVPDVPVSEKTHDLRDLQVARTALTKERTRLRNRGQVQTSAVLKRQTKARLALVERQIAELNDEIAKRIADDRSTARKRDILCSIPGLGPIVAAAILAFLPEIGSLGRKQAGSLAGLVPHCRESGQWKGKSFISGGRKPLRDALYMPALVAMRFNPDLRAKYTALRAAGKPAKVALVALMRKLIETANALVKADRFWVEKRACA

SEQ ID NO: 299904 - protein, 345 aa, unidentified
MEQYAGLDVSLEATSVCVVDGTGRVVREAKVPSEPEALVAWFAGQDAAMVRIGLEAGPLSQWLFAGMADAGLPVELLETRHVRAALKTMTIKTDRKDARGIAHLMRMGWFRPVHCKSTSAQEVRALLTARKILQAKRHDIEMSLRGVLRGFGLKVGPTTPKTFEARIRDLVEGNDTLTGIAEALLTARATLLRGFRSLESRLLAQARGDVRTRLLMTTPGVGALTALTFAAAIDDPARFRSSRMVGAHFGLTPTKYQSGETDVTGRISKVGDHSVRVALYEAANVILTRPVKGSALKSWALAVARRAGMKKAKVALARKLAVVLHRMLRTGQAFALDGRPVAPAA

SEQ ID NO: 299905 - protein, 345 aa, unidentified
MEPMYYIGLDVHKRKISYCVKDSSGQVCAEGSLPATRFDLDRWMKTLPQPWSAAMEATMFTGWIYDHLKPHAASLKVAHPLMLRAIAAAKRKNDRIDANKICDCLRCDFLPECYMAPTAIRERRRTLRYRNLLVRQMVQMKIKISSLLMEAGVSYNKQRLHRAGYFRELLATNPDIDEGLRSLLRQCRETVVRLSKTESALIRSLEDDRLLAERVERLMSIPAIGPITALTWALELGEVQRFSSIKKAISYCGLCGAEKSSGNTVQRTPLSKQRNKHLQTTLIEAAKMAPRYSPTLALLYDRENQRGNANRATLAVARKLVAYLMSVDRGRCHFLVLDQETSTAA

SEQ ID NO: 299906 - protein, 336 aa, unidentified
MLDVETKQRVKKKLHHASGAAEQFYRSLQGQRVRVGIEACGNTRWFERLLQRWGHELVVGDAARIRAAAVRKQKNDERDADHLLELLATGRFPAIWVPSPEERDLRQLLLHRHKLVQMRTRIKNQLQHVALDQGLQKKRQLWTERGRQWLLELSLPPWTERRRSDLLVLLDGLEPAIAELSQAVEMAAQQDPRVQLLRTHPGVGPITALAFVLVIGDVQRFAHSNQLASYLGLIPSEDSSAGRRRLGAISKQGNTLLRTLLVEAGQSAARCDPQLKRAYQRCCHRKSLTGIGKVMVARKLAVRLYWMLKSNQPYTPARMQGSPSHPVSTREGSSIV

SEQ ID NO: 299907 - protein, 358 aa, unidentified
MKKIVVGIDISKEKIDASAIDVTGSHPGVVRLDYRVFDNRPMGFRRMLVWVRHLKEGACLDEVLFCCETTGGYDRSLCDYLYAKGLSIWREGALQIKRSMGVRKCKDDKADSLMIAEYAMRHMDKAVIYETPSQSVRELKSLLLYRHKLVQEKTEKTVRMKELEATSFRSKSVSFILRDARKSIKSIEKSIKECERQILDLYKADGDLKKSYDHLTSVSGIGIVNATAFIAYSNNFTGITTANKLASYWGCASFRERSGTSLDRKAYVRCYSNSLLKAYLTQAAECTVKEHGIYHGYFLRLKSAGKPYRVIINNVRNKLIHLGFSLVTNDMDYESDHESLRAKRKREKGKSFMLDNIN

SEQ ID NO: 299908 - protein, 316 aa, unidentified
MHVGIDVSKGHLDVHVHETGLAFRVTNDHAGVEELVSRLSSLALERIVLEATGQYENAAFVALSLHRLPVAVVNPRSTRHFAKATNRLAKTDQVDAACLAEFAAALKPRITPLPDDEAVELDFLVTRRRQLVDQLVQEKNRRAGPAILKLGPDSRAKKSVEAHIVWLEQEIAQFEDQIRQRIQGSPAWKQKDELLQTVPGVGPATSANLLAHLPELGTLDRKQIAALAGLAPYNSDSGQRSMPRHIRGGRASVRTALYMATVAAVTHNEYFRAFRKRLLAAGKAGQVALTACMRKLLIVLNAMVRDNRPWTPSTNP

SEQ ID NO: 299909 - protein, 326 aa, unidentified
MTLSHLSDNIFVGIDVGGAGLDVAWHRGDSAHYANRPDAIAALVERLRAGPALTRIVLEPTGGYEKPLLKALRQAQLPVEIIHTTRFNAYRALVGVKAKSDTSDARLLASYAASPDEVRGRKAGHVDLPEDAIREALSELASRRDQLKHMIHAETCRLGTVRMAELRQAITIHLDTLKAEDKQVHRMMLALVRQRLDLQRDQRLLKTIKGIGPKSALAFLASVPELGRIDNKAAAALIGVAPFVRRSGTMTAPARIHGGRAAVRSILYMAAVTASRHNPVLRPFYERLIAKGKPPKVALIAVLRRLVVFANAVLKSGQVWKGATAS

SEQ ID NO: 299910 - protein, 400 aa, unidentified
MLSIGIDVSKGKSTVCGMKPGGEIVYAPFEVQHTREGMSELVSLLRSSGEEVRVVLESTGSYHCPVVAALLENGIFVSVVNSLRMKRFCSQSIRKVKTDRIDAMQIALYGLAYWQELQPTRLPEDTYRELQLLARQYYQMTSMLIKAKVDFNALCDQVLPGMQELMNDHAGRHKLSDFVLRYHHTTHILEMGETRFRKDYCKWAEKKGYRNCERMAALIFATAQNGIPVLPNAPSTQIVITEAIRVLHTVEASRDAILTQMQALAKTLPEYSLVREMPCIGDTLAPRLIAEIGDVRRFHSKRALIAYAGIDAPPYQSGKFCANNRHISKRGNRYLRKTGYEVMQSYVMHKPANDPIFTFIEKKRSEGKSGKLAMVAGLNKFLRVYYGKVTELYRSLPAIE

SEQ ID NO: 299911 - protein, 384 aa, unidentified
MSTAISKTPSYSLYVGLDVHKESITIAVLPERAATPTRVDKLPHDLNTLRRYFARLAADGAIRACYEASGAGYVLERALRGWGYHCEVIAPSLIPQKPGHQRKHDRYDAKQLARLYRRGELTPIRIPTEAEERVRDFVRCRATFQRELLRARHDVLKFLTRRGLRYTAGKCHWTRAHHAWLASLVKPGVLVAEDRAVFSEFLGLLHFVAQRRDALDEQIEALALAPALKTSVAWLSCCRGINTAAAVTLATEVVDWRRFGKPTQLMAYLGLVPREDSTGARERRGSITKAGNRHCRHVLVQAAWAYRHAPRLGAALARRQRGQPAVVMSHAWKAQQRLHKLYHRLAARKGPQVAVVAVARELVGFLWALMQECPMGEVSHATAA

SEQ ID NO: 299912 - protein, 296 aa, unidentified
MEQPTRFVGMDVHKDTIVVAVTVAGDVGKATFYGTIPNTTVALEKLVTRLRAAGSGPLKFCYEAGPCGYGMHRTLTRLGEDCLVAAPSMIPRRSGDRQKNDKRDASALAVLHRGGLLTAVWVPDAAHEAMRDLIRARQAAVRAARAARQQLSGFLLRHERTYPTGRRAWTKAHRGWLADQSFTQPAQQIVLQESIEAVRLAEQRLDRVDGYLRAQIPTWSLFPLVQNLCALRGVDVIAGAGLAAAIGDPSRFATAPAFMAYLGLVPSEHSSGQRRRIPRVKPKGRFCDHQGLPSGA

SEQ ID NO: 299913 - protein, 380 aa, unidentified
MDKVCGLDVHKDSVFACIRDENEEIILEKRFGTLTSDLDNLRDVLVAHSVAQVVMESTSIYWMPVWRVLATDFQLTLANPYLVKQLPGDKTDKKDAKWLSKCMQKGMIGGSFVPDEELQQLRQYARRYHYLSKQIVRVEQRLDNHLQRCNIRISNYVSNQGKNKSIRKVLKAIEQGERDPAKLCRLIHGRIKNKHGQEVITSSLTGFITDVDVEMFRQCMEELELLEKQQSQCVKLLEESAMKHYAEEITLLCTIPGIQKLSAMCILAELGVDMSVFFSAAAMVGWAGFRPRNDESAGKIRSRKIMPGNKYLRKMLIQIGWAAALSNQSFLGKKYRQLSARMKSQKAVVAIARKLLVIIFNVLSTRRSFDHKRNMQALPD

SEQ ID NO: 299914 - protein, 360 aa, unidentified
MNEITTVGVDLAKEVIAVCAADRAGRIVFTRIFRRDTFATWAVQLPPCVFGMEACGAAHHWARWLASHGHTPRLMAAEFVQPFRKSRAAKNDRNDAEAVLTAVRQPNMRFVAVKSVEQQACLSWHRMRQGWSEERTALINRLRGLLGEFGVWRGRSAALLTRALPGLEHDEGLPLMVRRLLGDARQHLAQLDAAIAGCEAEIKTHIKDNATAQHLSAINGVGPLTIAAVLATVTDARDFKNGRAFAAWQGVVPRQASSGGKARLGRITKRGDAYLRGLLTQGARSALQAALNKPPETLTRLQKWIVQLYLRVGYHKTLVAIANKHARMIWAILAKGEAYDPHAWQRRSRAATPASQAQPG

SEQ ID NO: 299915 - protein, 316 aa, unidentified
MNSKTQEEINIGIDTSQSQLDIYVRPTGDYFSVENSPKGARKAARKLREYHPTRVLIEATGRLEMHFVCAAHEVGLPVVVCNAGQVRQFARSTGRLAKTDRLDAEDIAHFGEALHPALTLLKPEKLREISDLITVRRQCLDMSTMQKNRLSRMPKSVHRPIQRILKAIQKEIERIDLKLDKLVDATPQWREQRDLLMSAKGVGKVVAYTLMSELPELGKLNRKEIASLVGVAPMNRDSGSYRGKRRVTGGRDKVRTVLYISMWSATRYDPKIKAMYERLVSAGKPKKVALVACMRKQLTILNTMMKNGTHWDEKLA

SEQ ID NO: 299916 - protein, 423 aa, unidentified
MMKLKYSICCGLDVHKNVIVATIVTTNKDGISEYLQKSFSTINSDIQRFHNWLIENNCYHVCMESTGKYWIPIFNYLEKDIEVCLTHPKYVKAIKGKKTDKKDSKWIADLYKFDLVRCSFIPPKDFRQLRELSRYRFKLVCMKSSEKNRIQNCMTISNVGIASVLSDPFGKTATEIISYLLEHTADSMDEKAVRKLIKKGAKSKSDEIIEAIKGYTIETDQAKKLELARGHLEYLDDMITQTEVELYVRIKPYYEFVEFVSTMPGMTELSSTIVLAETGVDMDIFDDAKHLCSWCGLSPANNESAGKKKSVRIAKAGDYLKPMMVQCALAAIKSKKQPYFAIKYGRIKKRRGHKKAIIAIARMMMVCIYHMVSEKKPFTPTDYEELMDPQNHVESVVLNENNVFAYLESLGYDSSKLVKRNDN

SEQ ID NO: 299917 - protein, 407 aa, unidentified
MEVLYPRCAGLDVHAGSITACARIATGAQVTYEHRTVPTTTRGLLDLAEWLTAHGCTHVAMEATGVYWKPVWHVLEEHFTLVLANAMHIRNVPGRKSDMNDATWIADLLAHGLIRNSFVPPAPIQELRDLTRTRRQLVHEVARHVLRIQKTLEDANLKMTQVMSSIVGVSGRAILKALIAGETDPERLADLTRGRLKATRADLVDALHGRITDHHRFMIQLHLDQIDALESAVAAIEARIGEALGPFRAAVSLLTTMPGISETTARVIVAEIGTDMSRFPSVGHLISWAGFCPRLDESAGKRRSTRTRQSAPWLKPTLVNAAWAATHKKDGYLRAQFLRIKSRRGAKKAILAVASSMLTAAYFMLRDGVEYHDLGHQYFAQRDKDQLAKRLLQRLRDLGVAVEVKVA

SEQ ID NO: 299918 - protein, 395 aa, unidentified
MYSLLVGIDVSKEGFSVAGIRSGGEEAFSKAYGMDSKGFEELLKTVRAHCQEDSEVLIAMESTGCYHINLFSFLTSQGIRAMVVNPLLIANYAKLSLRKTKTDRKDAMTIARFLLDHHKEISQLSISQDIQDLRDLSRERESLSHLVSATKVEIKRVLRTTFPELETIGDIYTGVMLRLIQEYPSARLVRAAKLEGIKRLLKGPYLGNKLTYTAEDILQAAKVSIATVSPGKEIILQGKIATLLHLQGRLEEITKLLTEICESTRMDDLEILRSIKGVGPNTAAPFLAEMGSIKNFPSHKKLIAFAGMDPSVSESGQYIGASKLSKRGNRHLRRAIYLMTASVVSRNTCFRAYFQKRKAEGLAPQKALFATAHKLIRVIFAMLSQRTLFQAKESI

SEQ ID NO: 299919 - protein, 383 aa, unidentified
MRPTCEDDFTPEEEVLAVALELSSGSWKIAFQDGKHAKPAIVSVSAEQSGARLHEFVREIGKIRRKWHIDPDVRTVVLYEAGQDGFWIQRALSARGIKTLICDPSSIPMPRKNRQAKTDRLDAIKLVSCLRGWLRGEHDRMHIIRIPEAQDEAQRHLSRDRGELVKERGQHRDRMRKLLRTVGCWDKLEGDVGKRLRQGEFRCHDGTSLPAELHERFVREVERMELVERQLRELEGELAQQLPEATQDKIEALQRLKAIGPIGATRLVLELFWRHFDNAKQVGACLGLVPQPFDSGESRVDQGISKHGNRKVRSLMIELAWFWLRYQPESAISQWFAARTSSTGQSKRSKRSAIVAVARRVAIAIWRYLEHGLVPDGATFKAA

SEQ ID NO: 299920 - protein, 351 aa, unidentified
MALHSIGIDLGKTVFHLVGLNHAGEVEVRKKFSRTQLLRFTANVQVDLIGMEACAGSHFLGKALVEQGHTVRLMPAQYVKPFVKTNKNDFIDAEAIAEAVGRPTMRFVPIKTDEQLDMQSLHRVRERWIMRRTAVVNQIRGLLLERGITVRTGRCHLEAALAGILEDGSSSLSGALRFLLVELKRELEQLAGHVEQAETLIQGAAQQSEACRRLDSIPGIGPLTATALIAAIGNGGAFRKGREFAAWVGLVPRQYSTGGKQKLLGISKRGNCYLRKLFVQGARAVLKYRERQCTGLRHWLAELSSRSHYNVVGVALANKLARMAWAVLARGEAYRPPVLADSVAGLQMPAV

SEQ ID NO: 299921 - protein, 347 aa, unidentified
MKRIIKQVLGIDVARKELVVCLARMQDDWTSELISHRTFANSEKGFEAMILWVKKLTIESIPVRYVMEATGVYHESLAYFLEEKGHAVSVVLPNKISSYFKSLDVKTVTDKTASDAIAQFGLERNLDNWRRPKEIFRDLKQLTRERDQTVDERTVAKNQLHAEETQAYPNKKSVARIKARIKLLNKQVAEINEEIAALVKGEKEVSKSVDRICSIPGVGLLTAATVLGETNGFELIRNKRQLTSYAGFDVQEKQSGTSVKGKPRISKKGNKHLRKAMHLPALSAIRHEERFKAIFVRLVSKHGVKMKAAVAVQRKLLEMIYTIYKTDTLFDKDHLTKHANEQQKAAA

SEQ ID NO: 299922 - protein, 367 aa, unidentified
MEKSSKVFVGMDVHKESIDITLAERGGEVRRLGQIGGDRGSLLKMVRKQQSKGGERVFVYEAGPCGFWIYRELAALGERCMVVSPALVPKRAGDHVKTDRRDSERLASLARAGELKAIHVPDIRDEAIRDLVRGRDDAVIAQRRVRQQLKALLLRNDIRYVGKTSWTGAHRRWLSELKLPEPAQQIAFEEYVDAIAVATGRIERLTRAIETEVLTWRFAPVVGSLQAMRGIQFVHAVTLVAELGDLTRFGSARALMGYLGLVPREDSSGEHRRQGSITKAGNSYARRALIEAAWAYRHPARVTRIIATRQAGIPKAVCDIAWRAQLRLSTKYRRLAARHLHHNKIVVALARELSGFVWAIGQSVKPQ

SEQ ID NO: 299923 - protein, 369 aa, unidentified
MNKNILFIGMDVHKESIEIAIAEGSTQEVRRYGQIGGTQDAMRKALRKLVSSGKLLHFCYEAGPCGYELYRYLISEGHDCWVIAPSLIPKKSGDKVKTDKRDAVQLARLFRAGELTPVYVPDREDEAIRDLSRAREDAMLIQKSARQRLKSFLLRHDIRYQGKTSWNEAHLRWLADEVCCPSAAQKIVFQEYVNTVTEAHYRLQRLNEQIEIFVKQWRLYPVVEALMSMRGVKIIVAVTVVSELGDLSRFDNPKQLMSFLGLTPSEYSSGPRQTRGRITKTGNGHVRRILIEAAWCYRYPAKVSREIQLRQDKLPLRIRDIAWKAQLRLTQRYQHMQRKGKPHNVTVVALARELAGFMWAIANEIEYPR

SEQ ID NO: 299924 - protein, 349 aa, unidentified
MKKGNTVGMDLGDQNHVVCMLDAKGDVVEQTKMACTAKAIRKYFEKQEPCVVAIEAGTHSAWVSRLLEELGHEVLVGNPRRLRVIWESDEKDDSRDAELLARIARLDRKLLHPIHHRGQRAQCDLAVIKARDMLVKSRSALIAHTRGSVKALGERISPCGADTFHLRLQQEMPEDLRPALEPILKSIEELTGRIRHYNRLIEQMGVEEYPETKTLRAIAGVGPLTALAFVLTLEESARFEKSRDVGPYLGLTPKRDQSGQTDKQLAITKAGDALLRRLLVGCAQYILGAFGPDCDLRRFGLKLAARGGKNAKRRAVVAVARKLAVLLHRLWKSGATYAPFYQQNRNQAA

SEQ ID NO: 299925 - protein, 346 aa, unidentified
MRIIGCDLHARQQTISMLDVETGEVSEKTLVHEGEAVREFYAGLPKPVLVGLEATGSMFWFLRLLEELGIEYRVGHPAAIRKAETRKQKHDRRDAELIRRLLVEKRFPQIWLPTAEQRDLRTLLQHRHQLVRMRVMTQNGLQGLALSQGLRRGAQLWSQAGQQALDSLPLADYSRRRRQQLQELRQELDQRLQQLDQAVRQQAEQRAGARLLLSHPGVGPITALATEVFLGDARRFTDAKAVASYVGMIPSEHSSGGQQRNGRLSKQGNPLLRLLWVEAARAAARKDARLKQFYRRKLVQKGLGKAVVATARKLGIRLWIMLRDQIDYTEFCRRAEPRCPHAGMPE

SEQ ID NO: 299926 - protein, 372 aa, unidentified
MSQSRTLYVGMDVHKESIAVAYVAQDHGAEVISLGTIGTRQCDSDKLLRHLQSKGQQRVFVYEAGPCGYWLYRSLMNKGYVCWVVAPSLIPKKPGDRVKTDRRDARQLARLMRAGDLTPVSVPAVDDEAIRALSRAREETLRDLKAATLRLKACLLRHDSRYTGRANWSPAHLRWLSEVVCPTPAQHIVFQEYGQTVTEQTERLQRLAHELHEQVHPWRFQPVVEAFQALRGVQCTVAVTTVAALGDLTRFDNPRQLMNYLGLTPSAYSSGARRQQGSMTKTGNTHARRALVEGAWASRYPATVSRHLQLRLEKLPQAIQAISWKAQVRLCKRYRHLRATGKHAHQVVVAIARELRAFLWAIAKQVPVTPKA

SEQ ID NO: 299927 - protein, 458 aa, unidentified
MTNRDAKQRRQRNFKQMLTVINTNAAGIDIGAKEHYVAVAPERDEQPVRRFSAFTQDLHKLAQWLKQCGVTSVAMESTGVYWIPLYQLLQDYGFTVKLVNARHVKHVPGRKSDVQDCQWLQQLESFGLLTASFRPEAQICVLRSYMRQREQLIRSAARPVQQMQKALAEMNLKLQHVLSDITGVTGMAIIRAILRGEREPLKLAALKDRRIKSDASTIAKSLEGDYRAEHLFVLRQALELYDYYQQQIVECDEQIYQEMKRLESNSEVVPSAGPRKRSCHNPFHFNAQSELQRVLGVDLTRINGISEATAQLILSELGPKLVTTWPSEAQFASWLGLCPNNEISGGKVLRRGTRKVVNRVANALRMCAESLLQSKSALGAYARRLRSRRDTRIAITATAHKLARLVYRTLKYGEEYMDQGQQLYEQKYQAAVLKSLNRTAQKLGYELVIRQPPPHVVP

SEQ ID NO: 299928 - protein, 395 aa, unidentified
MYNLLVGVDVSKDFFSAAGLDEEGKEHFSGTYEMNSHGFSEFLKALSSHGERLDQMIVAMESTGCYHINLFSFLSSQGIRTVVVNPLLISNFAKLSLRKTKTDKKDALTIARFVLGHHEQISQLPISQDHQDLRDLSRERESLCHLISATKVEIKRVLRTIFPELESIGNLYTGVMLRFLQQYPSARLVRGAKRKAIAKALKGPYVGDKLTFTAEDIVKAAQSSVAVVSPAKEIIVQGKIATLLHLQERLEEMTKLLTNLCKATRVEDLKILQSIKGVGPNTAVPFLAEVGEVKNFTSSKKLIAFAGLDPSIHQSGKFTGASKLSKRGNRHLRRAIYLMTTSVVSQNVFFKAYFLRRKKEGLPPQKALFAVAHKLIRVIFAMLSHRTYFKAEEAI

SEQ ID NO: 299929 - protein, 317 aa, unidentified
MQSPSAVLNIGIDVAKDALVVACSEGSFPVREVANQRAAVLAFLKGLPAASRIGVESTGTYHELFAETAHQLGFRVFLLNPKDTRHYAKAVGLRGKTDRVDAELIARMIAHEHTKLHVWNPPTPQQREIDRLIKRRATLISLREAVEMSLHDLGGFADELKALRTHFNQLIARIDLRTKALVEASPGRKQNVTRVCTITGVGPVVGTALVNTLERVPVKNADAFVAFTGLDPRPDDSGQHRGKRRLSKRGPGELRRLLFLAAMSAAKTKTWRPVYEHYRAKGLSGTAALVILARRIARTAWSIYTYKTEFDPLRLTN

SEQ ID NO: 299930 - protein, 371 aa, unidentified
MKKSSMFVGLDIHKSSIEIAIADAGRNGEVRSYGGIDGTLDALDKVVRKLVSKGSDLHFVYEAGPCGYEVYRHLTAQGFDCVVVAPSKIPRQSGSRIKNDRRDAQMLARLHRSGELTAVYVPCIEDEAMRDLTRAREDAKAMERNAKQRILAFLLRHGHCYSGKSPWSRAHFRWISILKMPHPAQQIVLQESLDTLAECTRRVDRLTEQIQTLSPQWRLFPVTQALQAMRGVSLIVATTTIAEIGDLTRFKKPTELMSYLGLVPSEHSSGRRTRRGSITKTGNGHVRRVLVEAAWAYRLPARVSRKLLIRQEGVSQEVCAISWKAQLRLCARYKRFTTKGKPHQLVVTAIARELCAFMWAIANEVQGPVKV

SEQ ID NO: 299931 - protein, 391 aa, unidentified
MILVGIDVAKDKHDCFISSSDGEVLFEPFTIKNNRVGFDDLFQKIKSVSGDLSNVKVGLEATGHYSYNILGYVLDKGLPTYVINPLHTNLYRKSLSLRKTKTDKIDARSIAYMLLSDQSLKPYSKVSYHNEDMKSLTRYRFKKVQECAKLKTSVSRLVNILFPELEPLVPTLFTASSLALLSELPGASYVADCHLKRLTNLLFTASKGHYGREKAVQIKEAAKASIGSVMPAKSLELKHTIAQIKALNEEIKEIEDEIQKIMDSVSSTITTIPGIGPRMGAMILAEIGDISRFSSPDQILAYAGLSPSTYQSGQLTSSYAHMEKRGSKYLRYALFNASKYVCNWDPTFNAYLSKKISEGKHYYVAISHVVKKLVRLIYAMETSGKSYCPAI

SEQ ID NO: 299932 - protein, 346 aa, unidentified
MSLSESPARYQLYVGVDIAAKTLTAAWMAPGATPGRPLTVDQTPQGFATLQDRLLATGHPAATILVVMEATGSYWVGLATTLAQAGFVVSVVNAAQAHHFAKALLKRAKTDAIDAQTITQLAARLEPAPWTPPPAIYTELQQRLAQRDTLMTLRQQVRNQRHALQHLPVVITSVLERMEALIATFDAQIAAVEQEIEQVLSQDAAWATTATLLLSITGIGLLTAAWLLVTTLNFTICATAEEATAYAGLAPHPYESGTSVRGRAAIGHGGNGRLRTALYLATLSAAQHNPHIKPFYARLRAAGKPKKVARCAAARKLLHLAWAVATKGVAFDPLYQTQHASSGSST

SEQ ID NO: 299933 - protein, 355 aa, unidentified
MNAIKYIGMDVHLATTSIAVLDANGKLTMEVTVGTQAGALRDFIRGVSGTLNVTFEEGTLAHWLYTVLEPHVAKLVVCDPRQNPRRLGEKKSDRLDARKLAELLRLGSLKPVYHGNALGPALQELARSYRTLVSDTTRVMNRLKAVYRARGIRCAGARVYSPRFRDQWLEQLHEPGVRGRAERLYKQLDLLLPLRQEARAALLAESRQHPAHKILCSIPALGPVRVAVLIALIQTPYRFRGKRQLWTYAGLALVTRTSADYQLVDGQVTRARKPALVLGLNANHNHTLKGIFKDAAASALAHPGPFKAFYTTRVAQGMKPELARLTLARKIAAIALTLWKKGECFNAEHVKTQAA

SEQ ID NO: 299934 - protein, 412 aa, unidentified
MRRIVGIDLHRTFGEVVIWENGVLRHAGRVDMTRTGVEGFAKSLRATDEVVIEATGNCFAVCRVLSPFVKRVAIANPLQVKAIAHAHVKTDKVDAGTLANLYAAGYLPEVWTPDAATERQRRLVARRYQVVRHRTRLKNEVHAILHAHLIPKCPHADLFNGRGRVWLCRQPVPDDERAAIERHIRELDRLAEDLDLLDREIAESALDDAAIKRLMTITGVNLTVAAGLMAEIGDINRFNSPQKLVSYFGLNPRVRQSGLGAAHHGRISKIGRSHARAMLVEAAWTAAKTPGPLHAFFVRIRARRGHQIAAVATARKLAVLCWHMLSKEEDYLWARPALVANKMRAMELQAGRPQQKGNRRGPAYAYNIKALREQEMHLARQAERNYERFVGAWRPRPPADHVRGRLKPAGPE

SEQ ID NO: 299935 - protein, 370 aa, unidentified
MARPSMAQLERTLVTVGVDTHRDVHVARAKDQLGRLLGENTIATTPAGYRDLLDWARTYGDVEAFGVEGTGSYGAGLSRFLLSEGQVVIEVNRPSRQARRRNGKSDPADADAAASAVLSGDANATPKAGDAHVEMVRALRIARQTAIKARTQAINAMKALVVTAPSELRESLRGKSTTMQVRACARFRPGDLEGPVVAVKVALRSLATRCETLEAEIACLERHLDGLLAEATPDLLARFGVGSDSAGALLVAVGDNPDRLRSEAAFSMLCGSSPVEASSGQQTRHRLNRGGDRQANAALHRIVMARLRWDQRSKDYLERRIKEGMSKREIIRCLKRYVAREIYGVIKIMQANDTAIAVGAVDDMAQSPKR

SEQ ID NO: 299936 - protein, 347 aa, unidentified
MLIIGCDFHPGFQQVAIFDNTSGEIGERRLGHRAEAEQFYQTLRGQEVRVGMEACGHYPWFERLLAELGFELWLGDAGKIRAQEVRKQKTDRRDAAHLLQLLLENRFPRIWVPSLEERDVRQLLMHRHKQVQTRTQVKNQLQALALGQGVQRKRKLWTQAGRAELEQLELLPYAAARRKQLLQALDRLEQEIAELNQRVEAEVEQRAAAVKLQTHPGVGPVTALAMVLTLGPAERFESAKQVGSYFGLIPSEHSSGGRQKLGRVSKQGSSFLRFLLVEAGQSAVRKDAELGRFYRRLAARKHRALAKVAVARKLATRLYLMLREDWTYAQLCRAMVSASPGHSVVER

SEQ ID NO: 299937 - protein, 523 aa, unidentified
MSATRVRQRPRSRRREVLQKPAGVIHVRVQKVGPEHFGIVGVDCAKARSKWMLCDFFGNVLIAPLVVEHNRADLEAAVGRLRQAQQVHALDDLIVAVERTGRYHHIVRQAFAAAGYEVRIVHPFTTKRYRQISDPGNKTDDTDLAAIHRAAVNGFALLERPVEPLWRELQLLVRHRRDLVFKTSALSAQIREHLEAALPGFASCFDKLWDRALAWTLLRHFESAPAMHEAGLPKLLELLRRQQVRFQRPTVERVLAWAGQAAPRDEAAALHRRIGLALYDDRTRKTQEILERERDIAGYLTQTPYVLLLSFPGINVVSAADFAGEMGPIGNYANARCITGRAGLCPSRHQSDQVDLRNGPLRRCGNRRLRAAILGIADNLIVCNHHFNALAVHWRAAGKDPRHTHVKVAQRFCRIAYQMVAGGQVFHHPALQQRHYILDKLLAFHRQHDTPMPQTLTGLQTAVGHIPSSAHADEAKPLAAELLRIHAGRRRGPQRLGDILPMVLARLGVGALQSTESGERDST

SEQ ID NO: 299938 - protein, 341 aa, unidentified
METRRHIGIDLHRNKFTCCVRLENGRNYLTEWKLEDLERFTKKLRPSDEVAVEVTGNTRLFYAAVAPHVSRVVAVDPNQFRVISHSVKKTDPNDARNLALYLEKDLLPEVRMKDKTQAQLASLTKTRDTLVKLRTSLKNKINNILSAHGINLAKEALSSQKKLNEVLAMKFDPMIRIELKVIVEQIRSLNQSIAELEKTIADEGSKLEGHKNLTSIKGIGSLTGSILLSVIGDINDFADEGKLAAYFGIVPRVSRSNETDHSGRITKRGSKLGRTALVQCALIAQRYSPYLKRYYERIKARRGTGKAIIALARKLLGIVYRTLKNKWVFEDFGNSVLAETA

SEQ ID NO: 299939 - protein, 377 aa, unidentified
MNTVRFVGLDVHAETIAVAVAEPTGEVRSLGVIPNRSESIRRVVKKLGPVERLRVCYEAGPTGYVVYWQLTALGVRCEVVAPTLVPMKAGDRVKTDRRDAEKLARSYRAGDLTAVWVPNASHEALRDLVRAREAAKKDQLRARHRLGKFLLRHGRRPSERLTPWTQRHLAWIKQAVHFAQVAQEATLSDYLHEVEHVATRIARLERAIDAALVDAPPRMRAVIDALQALRGIAKISAVTIVAEVGELSRFARARQLMGYGGLGASEDSSGARHRRGGITKTGNAHLRRIVIEAAWAYRHRPAVGGALRQRQATLSPEVTAIAWKAQHRLHTRYRRLLGRSKCQQKAITAIGRELLGFIWAIGRTVETDQAPRQPLAA

SEQ ID NO: 299940 - protein, 367 aa, unidentified
MKKIIVHSAGVAAQAVTGHLYQTPVPTIKLGLDIHQERYVVVAQEEHATPKPARRMRPEEFVPWVRTLRARGHQVFVVYEACGFGFGLCRQLMAAGATCYVIAPQKLDEQRKGVKTDALDAGVLCQRLSRYVEGNKKELAVIRVPTEEEEQLRHLHRQREALVRARTKLQAQGRALLVTHGQAAPQRWWRPQGWKAIGALLPDWLLARLDCFRPVLLVLDTQIAALTAELEAAASPELPSGLGKLTQVIVTREVCDWQRFQNRRQVSSYTGLCPGEYSSGGKRMPGAVTKHGNPRLRAALVELAWRLVRFQPGYPPIQKRLPILAKGARATGAARKKAIVAVARQLAVDLWRWQTGQCSAAKLGLKP

SEQ ID NO: 299941 - protein, 364 aa, unidentified
MKRKVYVGMDVHKETIRIANLTSNTKEIVKEQQIKHNEVQIKKFVNKLKSEWNEIHSCYEAGVTGYPLYRNLKSLGVNCILVAPGKIPRQSSDKIKTDKRDAIKLAKLLRSGELESIHVPSEEDEAVRDYLRSRDSLRLDLGRNRQRLMKFLLRKGITYSKTKYWTVSHNKWLNNLQFNNEILQETFNDYYSRVRVQEENLKAMDKRIQEIAESEPYREKVGILRCFRGVDYLTAMFLLCEVCDFKRFKTAGSFMSFLGLVPGEYSSGSKRKQTGITKTGSPRLRRILTEAAWQHRFPGTGSKIVTARRSGQPALVVALAEKASLRLHKKFRNLQQRGKTPQVMITAVSRELSGFLWAAMNLVA

SEQ ID NO: 299942 - protein, 450 aa, unidentified
MSLEVVNPNAAGIDIGSKSHWVAIGQDAEDVREFGVYSDDSMEMCQWLHDNKIKNIAMESTGTYWQNLFSCLVSQGFDVILVNGRQTKNIKGKKTDIKDCQWIQKLHSLGLLSSSFLPDSTTDVIRTYSRHRQNLIKQSARTVLKVQKYLRLMNMRLDVVVNDIVGLTGTKIITEFISGETSGKRLAKNRHYNCRKPEEEITKALQYNGRNDYLFALKQEWETYLHIQKQIESVDQEIKKLLEDIIDKDDNKKQHVADIKQHKRKNKNTIKGADINKLSYQYFEGIDLMTIEGVNDATIMAIISEIGLEGIKKFSSAKQFTAWLRLAPNNKISGGKILNHHIPKGSSRLKIAFRNAANAIGNLKEGHLADFFRRINYKKGRVTAINATARKLAVIIWNMLAKGVPYNPPAEYLFLDQKRKMKLVSRIRKNITKFDLTPEDVGFLQTADYQ

SEQ ID NO: 299943 - protein, 383 aa, unidentified
MTTAIDTRDVCCVALELSKTSWVCAFAVPGESKVAIHKIKAGDTDRLMAVLTGSKARAEQQLGRPLQIVLCYEVGYDGFWLARYLIARAIHTIVFDPASFLMPRRSRVAKTDRLDAEGMTRILRRWLSGDREMARPVQIPSVEQEDAKRIERERKYLVEERISIIGRIKGLLALHGIWLVKKNIGKGLLQRLDAMKTGDGRPLAPFLRSEIERMLTRYDLISRQIADVEADRKAALNNEKGVFPHADKVRRLTTLGAVGETTATVLVAEIYHRTFLTRRQVASFVGLAPSPYKSGEVDRDRGINKAGSKLARHMLVELAWFWLRYQSNSQLSQWWHSRFGNQGMRGRKVGIVALARKLAIALWRFVEDGIVPEGATLKVRHAG

SEQ ID NO: 299944 - protein, 355 aa, unidentified
MRRYIGMDVHAASCTLAVISEKGRKLRDFPVETNGQALVEAIRMIPGHKHLVFEEGLQSAWLYETLSPHVDELVVAGITASRGNKSDKHDAYGLAEKLRVGNLDKPVFKAPRQFTHLRELSRIHMTLVGDVVRGQSRIKSLYRSRGILVSGVNVYGVRYRKEWQKQLSSSARTRAMRLYDHLDFLLEQKKQAEADLLREAKKHPIVRIMETAPGFGPIRAARLVPIVVTPHRFRTKRQFWKYCGLGIVTRSSSDWIQAADGGWIKARVAQTRGLSRQHNHFLKSIFKGAATTVITQVNKDPIHARYERLLDGGTKPTLAKLSLARMIAATVLRMWKDEEEYDPGRGGPSTVTREG

SEQ ID NO: 299945 - protein, 317 aa, unidentified
MTQKRTLVGLDIAKGKIDAAIRPVGAEASFANDAAGRRQLLDWLAGHGVGKAVMEASGGYERAWAGLLRAAGLEVVVVDPKRVRHFAKSAGRLAKNDPIDARMIAWFGEVFEDTSGQVADEDRQELDQLVMARLGVVRLKALVESWGEHEQPKAVQKIHQALLKAIAVQLAKLETVIAARIAKVERFARQAEILHSVPGLGDAAVAGLIALLPELGRVDRQAAAALLGVAPYDDDSGERRGQRHIVGGRRKLRTLLYMPILSAIQHNPVLKAYYQRLRAKGKKPKVALVACLRKLIGILNTMLLRSEKWNPAKHAIA

SEQ ID NO: 299946 - protein, 347 aa, unidentified
MKKIVKQVVGIDVAQKELVITLGRMQDDWMPELYARKSFENTKKGFTALVSWVGKMTVDGCQIRYVMEATGVYHESLAYFLDENGHGVTVVLPNKISNYFKTLEVKTITDKTAADAIALFGLEKKLNLWKKPKPIFKKIRQLTREREQLIQSRTIAKNQLHAEQSEAEPGKKTIERLKKQIAFFNKQEKEIKEELDALQQSEEQVNKTIKRISSITGVGKLTAATVLAETNGFELVRNKRQLSSYAGYDVREKQSGTSVKGRSRISKKGNKYLRKAMYMPALTAIRHDDRFKAVYARLIARHGIKMKAAVAVQRKLLEMIYTIYKANVPYDKNYLKKKGEKKHIEVE

SEQ ID NO: 299947 - protein, 369 aa, unidentified
MPQSSTVIGLDVHKDSIVASILPSGAERASQTISFENRPATLKRFVQRLGDRGPRVFVYEAGPCGYAVQRELLTQDEHVVVVAPALTPIRPGDRVKTDRRDAAKLARLFRAGELTPIRIPTRNEEAARDLVRIREDILTDRLRARHRLSKFLLRHGRLYQDTKAWGVRHRQWLYTQHFDLAPLEQTCTAYVRGLEETEVRLQTVTQQIEDLSQTASYRQIVQALRCLKGIDTLSAFTLVTETQDFRRFPHAPAYMSATGLVSSEYSSGARAHRGSITKTGNAHLRRVLVEAAWSYRGRNGVSLVLVKRRHGCPGPVVQIAQRAQDRLHRKFWRLVSRGKAPQVAVVAVARELAGFVWAIAQLVPFPTAA

SEQ ID NO: 299948 - protein, 414 aa, unidentified
MGGFPVFTLLPFQGGVALSALYIGIDVSKDFSTAQAIDEKGNKCFYLELAMTADGFDKLLKAITTHGKDNAQVTVAMESTGCYHINLFSFLTHKGIRCVIINPLLIANFTRRSLRKTKTDKKDALTIAQFLLVHKDALLKTELSPGRQDLKDLAREHESLTNLIAGMKNDIRRMLQITFPELESLCNIFSETILDLLRQFPSARLIKIAKPNTIVKALLHEDKRKKISVSAEDIIRAAKASVASHGAAKEIILPEKISTLQHLIGKKVRMKKALVEACEGMMVEDIEIITSIRGISEITASRLLAEIGDYRAFSTYKHIIAFAGLDPSVHQSGKFEGISRISKRGNRHLRYIIYLMTTCVVRGDNIFRTYYQKRRAEGQPFKKAIMATAHKLIRVLFTMLSKRTTYQALEVNAI

SEQ ID NO: 299949 - protein, 431 aa, unidentified
MDASIATPEAVAAYIGIDWADQKHAIALRSAAEPSKIEHQLIDQKPEALMEWIGQLEQRFGTQSKILVCLEQSRGALIFHLMGYEFFELYPVNPLQLARYRETFSPGGAKDDRPDSDLLCELVYCHGDRLRALKPDSVLGRKLSFFNEGRREAVDQATGLSNAIQSQLKVYFPLALELLDQDSSTALAADLLLRWPTLEAIQKQSAPTLRKFFYGHNCRGEKRMLHRLELVQKAKPLTKDSAVIEPAALRVQMLARQLKNLLPDIARYDDKIAQLFEAHPERFLFENLPGAGKVLAPRLASAFGSNAQRWQSALEIATLSGIAPVRRASGLKSGKKGQRKASVHFRQACPKFLRQSFHEFAGCSIRYCPWAKAHYEAQRARGNGHHAAVRSVAFKWIRILFACWKHRTSYDPQRYLQALQDRGSPLASTCH

SEQ ID NO: 299950 - protein, 352 aa, unidentified
MKFYQTTTEYNCGIDLHSRQMFMCLMDSKGNKLVHTNIEGNDFGYFLKKIAPYRDSLTVSCECTFNWYWLADACRAEGLEFVLAHALYVKAIHGGKNKNDRIDSEKLAHLLRSNLIPPAYVYPAEKRPVRDLLRRRTHFVWRRATLLAQLTCSMHILGQQPVKKTQHKVRDKWFDQLRAHYEHPLTRMAAEANMHMVKEYDRIIERLEQAILKHTKKEHTRDFNILQTIPGVGDVLALTILYEAENIARFQSVQNFSSYCRLVKGSVASAGKFKGLRGGKLGNPYLRWAFGEAAILCKRDNPDLKAYAKKLEEEHIKPVANAILANKLARAVYFMLKNGKGFDPKLFARKSN

SEQ ID NO: 299951 - protein, 319 aa, unidentified
MSNIILGVDISKLTFDVALLNDNKVKTKKFNNNSKGFCELTKWLKNKKIDTAHVCMEATGGYEAPLAQYLYDNNFKVSVVNPARIKGFAMSRLSRVKTDKADSELIAYFCQAMQPDLWQPTPLHIQELQQLVRRLDSLIANKNQENNRLDGAIGEVAINISTHIEFLDKQIKKIEELISNHIKEHKDLNDKSKLLDSIPGVGEKTIGVILAFLTVEDFDSAKQVAAFVGLNPKPRQSGSSVRGVGRISKTGNADLRKAFYMPALTALRFNPIIKDFAERLLGTGKSKMVVVIASMRKLLHIIYGVLKNQIPFNENINNI

SEQ ID NO: 299952 - protein, 354 aa, unidentified
MPRQSKDTVANLGIDIGKNTFHLVGLNKRGAIVLRQKLSRRQLEARLANLPPCLIGMEACVGAHHLSRRLKAFGHDARLMPAKYVKAFLKGNKNDYRDAEAIAEAVQRPTMRFVATKTAEQLDLQALHRVRSRLVSERTAIANEIRAFLLDRGIAVAQGLHRLRVALPDILATRTDLLAPRLLHILNDLIGDWRRLDERIHAVSLEIQLLAQDDPACERLMTVPGIGPIISSATVAAIGTGDAFSKGRDFGAWLGLVPKQISTGDRTILGKISKRGNKYLRTLFVQAARVVLLRPATWERHGLQPWIAAAAQRLHHNVLAIALANKLARIAWSVLHHGRDFEVRKISEATSQPA

SEQ ID NO: 299953 - protein, 437 aa, unidentified
MEEVTDEPLYRDRVCGIDIGKAGMVATIRVPSDKDPARRAAETRSFGTTKREVLALADWLRCWQVPAVVMEATGDYWKGPFYRLEAEGFDCVLADAKQVKHLPGRPKHDPGDSRWLAACFERGAVTSCFVATPEFRVIRLHTRYRRDLTDERTREKQRAEKLLESAAIKLSSVVTDLHGVTGRDIMDHLIAGERSPRVLAQLARARARRKISELEAALEGAEFFTPAHAALLAAMLERIDRVNAEIARLTEVIETLLAPYEEQLQQAESMPGWGRRSAQDALAETGVDMTRFRTGAHLASWAGRTPLDNSSGKRKGRAKAKKGNRYLGGLLGETAVAAGKTQTREGARYRRLSRRRGKAKALVAVGNTQLKVYHKLLSSPGTRYTDLGPDYYERQASTRRQIAHHVGKLGALGFEVTLCRLPEPDPDPGQAASTQAA

SEQ ID NO: 299954 - protein, 324 aa, unidentified
METVVLSPDFSFIGVDVSKDTLDVAFPGQGEVKQYPNHKEGFRRLAVEMCARQNAWAILEASGGYQNGIAAFLHEKGILVSVVNPRQVRDFARAKGVLAKTDRIDARVLAEFGKAMPPALWKPKEEPVQELEELVKRRGQLVQILQTERTRLATTFRASAERSLEKHIRYLEGEIGVLDKEIKARMSQEGLKDKSDLLQSMAGVGPTTAATLLSQLPELGHVDGKSIAALVGVAPFNHDSGKYRGKRFVSGGRADVRRMLYMATLAAVRAVKKGGAVREFHQRLIAANKPQKVALVACMRKMIVTLNAMLRDGRTWECAPGVVG

SEQ ID NO: 299955 - protein, 342 aa, unidentified
MHNYVGLDVHKSSIYAVVMNKEGKKLFERKLKNHPHEVDKLLANLEPKNTSIALEACSVWQYLYDYLHESGYYDLSLTNPLQVRLIANSRKKTDKHDAKVLADLLRTNMLPKSYAAPKDVREQRQITRHRASLVRLRTEIKNKIHAILLRHGIEHEYSDVFGAKGTEYLRSLDLPMCDRFELDSYLDIIENINAQVKDTNERIEDYVDQHPHARLIMSMPGIDYYSALMICGEIGDVHRFPHVKKLVSFAGLNPSVYQSGNTLRQGHISKQGNRNLRWILVQCAHVAIMHDPYMAKFYRRLKKTKHHNVALVAVARKMLERVYTMMKLNLPYHVLQVNRKAS

SEQ ID NO: 299956 - protein, 438 aa, unidentified
MAIRTLGVDVGIRAAHVATLCDERGDQVWSKRRFGNRRDELEALVGEIGECDELTVVMEPTRNAWVPVAAHFMAAGATVVLVPGERSADLRRYYAKHTKNDRLDSHVLARLPLLHPEGLHPIGGLGPAEPLRRAVRRRVKLVEWRLACRQRIDAMLDLLGPGYAEVLGGPRYGKTALEILERYGDPRRLRRLGPNRLAALMRRVSGGHWGTDEATALIDAAGEAVALWEHGGLDFDELAWDLASEARLVRRLDDEIGRLETRIDELYAKADPAGIVISTPGVGPVLAGGILGRLGDANRFTDLAAVRSFSGMIPKVNQTGHTETRPGITKQGDPGLRRDIWFAADVARQTDPQLAAKYHRLIVERRLHHYSAICHLATTLLTRIAACWRRDERYVIRDIDGRRITAAEGKAIVNARYRIPPEIRNRARIPQQTSGSAQ

SEQ ID NO: 299957 - protein, 369 aa, unidentified
MNTIICGMDAHDNTLSNRIGVNTEAPETMTAKNTLEGRQKLFHYLKDLAQKKDGARIIVAYEASPLGFGIYDDCVEAGIECHILAPTKMPKSPKDKKKKYDERDAQRILELLRAHVLAGNDLPDIWIPDHQTRDDREMVRSRLDVGRKLTGLKTQVQMLLKRNKVVKPEDVGNSWTLSHRRWLEGLELKPGARIALLSLLRQIERLEEDILILDKEIKALSETERYKLPAEALVIQIKGVGLLTAMVYLTEIGDMRRFDNRKQIGSYLGLVPSSNESGEGSDRKGHITREGPARVRKVLCQATWSRVACDEQEAGVYQLIVKKNPKQKIAVVASMRRLGVLMWHIAWDAQVKAGVFKDDSIEAASFQTA

SEQ ID NO: 299958 - protein, 344 aa, unidentified
MLIIGCDFHSSFQQVAIFDNQTGEIQQRKLGHPEEAVAFYRSLKGAVQVGMEAGVPCQWLRRLLEECGHELWVGDAARIRAAEPRKQKTDRRDADLILKLMRHGQFPRIWVPSEEERDVRQLLMDRHHRMRARTQVKNQLQSLALNQGMQKGRKLWSEAGMQGLRELPMMEHAGRRRDQLLRTVCDLDAQIAELDVLVRRQAEGREDARRLMTHPGVGPQTALGMVLTLGDVSRFECSKQVGSYLGLIPGEYSSGNKQRLGHISKQGSSLMRFLLVEAGQTAVRGDAPLRRAYARLAAKKSRAVAKVMVARRLAVRLYWMLRNQWTYTELARHAGEPGSFCGAK

SEQ ID NO: 299959 - protein, 345 aa, unidentified
MKISTIGIDLAKEVFQIHAADERGKVVQRKKLKRKEMTAYFANLEPCLIGMEACSSSHYWARKLQSMGHTVKLMAPQFVKPYVKSNKNDVADAEAICEAVTRPTMRFVGIKNVNQQTVLCLHRARRLLVAERTAQANQIRGLLAEFGIVSPQGIRTLRNRIPDILEDAENELTVEMRELLTMMSERIKDIDEKVGDLELKIRQSNQRNEMIAELQKIPGIGPLTASAVVATIGDFKEFRNGRELAAFLGIVPRQHSSGGKQNLLGISKRGDGYLRTLLVHGARSVIRFAETKQEKNAWLVDLIGRRNKNIAAVALANKNIRTIWAMMTRGEQFNPAHISQAPVPV

SEQ ID NO: 299960 - protein, 346 aa, unidentified
MLYAGLDLSRKRLDFCLLDELGEKVEVGAAPPDADGLRGLAARIGRFDEPVFAAIESMNGARFVHDRLELAGWRVEIADAVKVKGLAPLACKTDRIDAWVLAELARRDLVPAIWLPDPAVRAERERARFRLHLIRHRTSLKQRVHAVLLAHGKPCPVSDLFGVAGRDLLERLELPEPWTGTVAASLQLIDELDQQIGDCERQLHRLGAEHRYVPLLVTVPGIGWVLAYTIAAEIGDISRFATPTKLTGYTGLCPRVYQSGQSDRRGALAKNGPRYLRWALIEATMHASRHPLYRDRYQHTKQRLGKQRGAKVAQVDLARRLAEAIWHMLTRDQPFAPAGAANPLAA

SEQ ID NO: 299961 - protein, 344 aa, unidentified
MDHFAGLDVSVKETSICIVDDAGKIVREVKVASEPEALLAVLKNLAYHFKRIGLEAGPLSQWLFSALAEAGLPVICVETRHMQAVLKAQINKTDRNDARGIAQMMRAGLYRPVHVKTIRSQKLRMLLTHRKLLQSKAIAIENDLRGTLRNFGLKVGMVGKVKFEARIRELVENLPDLAVLVEPMLIVRRVLREQIVILHRRLLAIVRDDEVCRRLMTTPGVGPVVALTYRATVDVPARFRKSKAVGAVFGLTCAKYQSGEVDRNGRISRCGDEMMRVMLYEAAQSMLRSKKWSWLKAWAMQIARRRGMKKAIVALARRLAVIMHRIWVDGTEFRWTREQATAAA

SEQ ID NO: 299962 - protein, 344 aa, unidentified
MSEVITIGLDIAKHVFHVHGADERGRAMFSKRISRGKLLDFFAAQPSCKVVLEACGGAHHWARQLTQLGHEVRLIPPAYVKPFAKRQKNDAIDAEAICEAAQRPSMRFVAVKSEEQQAAGLLFRTRDLLVRQRTQLINAIRGHLTEYGWIAPKGPSHVAMLADLIDEEEMASTLPKAAHAMFRLMLDLLAGLNSKIADLDKEIARRAREDEVSRRLMTVPGIGPISATAIAALAPPAETFAKGRDFAAWLGLTPLQRSTGGKQKLGATSKMGERTLRRLLIIGSSAVVQQASKRGAPKGSWLEQMLARKPRMLVTVALANKMARIVWALLVKQENYRAPAPARA

SEQ ID NO: 299963 - protein, 570 aa, unidentified
MIKNKNPYRGVWGDAGRHLRVFFIRAILYLATTLVAWEKSIMGNRRTRRKRKQHINKVQGQRLAAEFKGQDLSRVLVVAIDGAKKSHKALLADGFGEIITDTFGFPNDLAGAKMFAGSVRKAAVDINAFKIIVGLEPTGHYAENLVAYLLEQGFDVRQVNSFAVSREREAGLTWSKTDEIDLCAIGQLIINGKSSPLGHTEAIYDNMKYAARARRSTIQRTVLLESQIHAYMDRLFPGFLDRDLFSDPFGLTSMAFMARYSSANAACRAGATRIERWLSSRRGVSNPHEITQAVVELAQGALRRPADHEEALIEALRFRLREHDLLEEQIGNLNIRLAEYLVETPGIWLLAIDRVSVVSAAEYLGELGQISRYDGANQIIARAGMVPRETQSGMIGYSGGITKLGHPKLRYILGVIGHNLLTSNRYFQAFYNRLVDRGGKNERLAKTAVAGKFVRVSWAMMNLKGAFEAPTWCEDDLKKDIRTKMERFLKQFGASQIYRNSIGPRLDKVLVSGGQPSTSNSITGSHQLPSASGTHEEHDRASTKPIHIGSLIPVVLGQMAAEHDVEAHMA

SEQ ID NO: 299964 - protein, 349 aa, unidentified
MRTFQPPAGTRFYAGVDLHARALFLVVLDAGGQVRFARNLPAQPEPFLRAVQPFRDGLLVACECMHCWYWLADTCRDQGIAFALGHAYSMKAVHGCKTKCDRTDAEAIARLLKGGNFPPAYAYPRERRGLRDLLRARSRLVRQRAELYGHVHTARRQANLPPVSDDVKYKSKRGSITADIADPFVRRRVETDLALLEPLDTTIRRLEAEVEAAAQKHYPAELAVLQSTPGVGVVLSLTILLEIDTVGRFDTRQPFCSYARLCGAVQESAGKRAGEGNRRAGNAWLKWAFSEAAVLSAQKDERVGALLQRLASKLGKAKALSALAHKLGRAFYHMLHTREVFDVNRFARC

SEQ ID NO: 299965 - protein, 349 aa, unidentified
MKIIGCDFHPGYQQIAMLDLVTGEMTEKALSHERKEEVRAFYAGLEGPVRVGIEASGQSQWFERMLAELGHEVWIGDAAKIRASCERKQKTDRRDAELLLKLLAEDRFPRIWVPTAVERDDRQLLLHRHKLVRMRTQVKNQLQALALNQGVQRKWKLWSEAGRKQLESLPLLPWASRRRAELLQLLGQLEASIGELDRAVAEQASARPAARRLMTHPGVGPVTALAFTLTMGPAERFQRGKQVASYLGLIPSEHSSGRRNQRLGHISKQGSPFLRGLLVEAAQSAVRYEPEMRRAYQRLAQRKCRALAKVAMARKLAVRLYWMLRLQVNYAQLIQGSHAGQPGTFCGRG

SEQ ID NO: 299966 - protein, 391 aa, unidentified
MKIAGIDVHKKVLRVVVVDASVPEEKPARRRLVTLPSELQRFRMWLQEQGVEEAVMESTAQYWRSVWLEREPYLRLHLAQAFSNRAPRGGKHDFKDAERLVRRLIADELRLSFVPNGEQRIWRSLTRRKVQLTRDRVRLQNQMECLLEEMRIKLSIVVSNLLGASGLRILHAVAEGETDAKKLAQLGDERLHCTEQQLGDALTGRVQPMHREMLALQLQRLQWIDQQMAELNRMIAQGMKSHQDAVIRLAEVPGLGVDSAQQIIAEVGAQASTFSSAAELTSWVGTCPGKEETAEQNHSSRSAKGNKYLRRVLNQAAHAAVAKKGCHFQVVFRRLLPRLGYKSAIWAIAHRLCRVVWKILHEGVRFIEQGSEVSGSPRKEATCPDAGASPS

SEQ ID NO: 299967 - protein, 337 aa, unidentified
MQYTHIFGIDIAKKTIDVALCQNKANDPIITHKFTNNTKGYQTLLAWIKKHGAQIDQLLICLENTGIYHRNLVKFLQKHQAFVWVENAATIKWSGGLQRGKTDKKDAQHICLYAFRNQDKARTFSAKDEELEQIADLKTQREGLIQARVSLEAPIKEKREAGLEKEASMLEEVSKRTLASIEEDIKGIEAKIKTIIEEQEPLLITYQIIRSVPGVGFVTAVNLLVYTNNFKQFNNAKQLASYAGVAPFEYSSGSSIRGKTKVHSMANKTLKTSLHMCALSSIRNNATMKEYYQRKVKQGKNKMCVINAIRNKLLITVFACVRDGKVYEYNHVYKQVA

SEQ ID NO: 299968 - protein, 425 aa, unidentified
MDVLIECCAGIDIGKDEVVACVRTPAATGRGRRKRTRTFSSFTGSLEAMADWFADEGVTEIAMEATGSYWKPVWYVLEDRAFGLKLVNAHHVKILPGRKSDVLDAEWLAELLEHGLLRGSFVPPPAIRELRDLTRYRKRLIQAHTSECQRIQKTLEDAGIKLDSVASDVLGVSGRAMLTALVGGERDPRVLAELAKGRLRKKIPALRQALRGRFTDHHALLIGLCLEHTTHLEAAITRLDDRVDAVFATQISKTGQDGEGGVPFARARDRLDTITGVGKRAAETILAEIGGDMSRFPTAAHLASWAGVAPGNNITGGKRGSGKTTKGDVWLIDILTQCAWAAARTRDTYLSAQFWRLARRIGKKKAAVAVAHSILVICWHLLTDDCDYDDLGGDYFTRRNADRQRDRLIKQLHGLGYRVTLDKAA

SEQ ID NO: 299969 - protein, 408 aa, unidentified
MEPIYTSCCGLDVHKRSIQACIRRLGPDGRIHQETRSFGTMTRDILEMADWLAVAGVTHVTMESTGVYWKPIYNLLEGRFTLLLVNARHVKHVPGRKTDVKDCQWLAQLLQCGLLKGSFIPPRPQRELRELTRHRTQLVAEKTRVANRIQKILEDANIKLASVASDILGASGRDMLRALIAGEQAPEKLADLARRQLRSKIPQLCLALEGQVTEHHRFVLGELLDHLGYLESQIERFTRRIEEVSRPFASAIEALTQVTGLEQRAAQNVVAEIGATMEPFPSEHHLASWSGVCPGSNESGGKRKSGKTSKGNRWLRSALVQAAWSAVRKKDSYFQAQYRRLAARRGKKRAILAVAHSLLTVIYHMLKTGSTFKDLGGDYFDKLNKNRLLPYLVRRIKDLGYQVTLEAA

SEQ ID NO: 299970 - protein, 316 aa, unidentified
MSTNEEKTFVGIDVSKSTLDIRIEPASESMHVPYDEQGVKEVCQHLVKAAPTLIVMEATGGLETRLASILVAKGLPVAVVNPRQTRDFAKATGELAKTDRIDAAVLCRFAQAIRPAVRPFQDADTRDLEDLVNRRHQLVENRVQETLRLGTAASKALQRSLKSHIAWLDRQIATLDDDLGKRRRASDAWKAKDDLLRGIPGVGVVTSLTMTAKCPELGQLNRQRIAKLVGVAPLANDSGKHRGKRFVWGGRADVRAVLYTATVSAIRCNPVIKAFADRLKQAGKPAKVVIVACMRKLLTIMNAMIKDNAPWDPKRA

SEQ ID NO: 299971 - protein, 350 aa, unidentified
MKIIGCDFHTRYQQIAMLDEATGELIERRLEHQNGEADAFYRSLAGPVRVGIEATGPIQWFQRLLAELGHQLWIGDSAQIRASAVRQQKTDQRDAALILDLLLTNRFPRIWVASPAQADLRQLLWHRHKLVRMRTMVGNQLHALALGQGLCRKAKLFTRKGRAELRDLSLGPWASRRRRELLMLLDQLDPSIQELDRAVMEQARRRQEAVRLMTHPGIGPVNALAFLLTLGPVTRFGCSKQIVSYLGLNPRERSSGGKQRLGAISKQGNSMVRWLLIEAAQHASRFDPALRQNYQRLKFRRGSAVAKVAIARKLAVRMYWMLRTGADYAQLVRMQGSPRGTLVSTASPIC

SEQ ID NO: 299972 - protein, 387 aa, unidentified
MQAPTVSTPITGGISTIFVAIELSQKTWLVTMHSPDRDKISRHKVPGGDHASLLALIDRVRDRAARGLGAVPAVVSCYEAGYDGFWLHRLLMAAGITNYVFDPSSIAVDQRARRVKTDRIDGEKMLRTLMAYLRGEPRVVRIVRVPTPEQEDARRDTRARDRLTKEQTAHTNRIKALLRLHGFAVGHPRRRDWLTWLAGQRDWQGQGVPPRVLSEIENEHARLMLVRKQLDALARTPAAADPAPAVAEMVRRSELLQRLKSLGPAFATTLTQEVFYKDFRNRREVASYFGLAPSPWRSGGTDRDQGISKAGNPRARCSAVELSWLWLRHQPGSGLSLWFRQRTLNAGPRIRRIAIVALARKLMVALWRYLITGLVPAGAVLKSAQAQ

SEQ ID NO: 299973 - protein, 433 aa, unidentified
MHMMQHREIRYIGLDVHKLTISVAIAEEGGAPTSYGKIPNDRVAIRTLMTRLGDPNVELRVAYEAGPTGYALHRQLTGVHIQCLVAAPSLIPKQPGNKVKTDRRDALKLARLLRSGDLTPVWVPDEAHEALRNLVRARADAKADLLRAKHRLSKFLLRQGCWAPIGVRAWSKRYFTWLHQLEFEHLPDRVVFADYLTEVNAAGERVKRLEAALHECAQSSSQVALIRALQAFRGIGFLSAVTLVAEAGDLRRFRTAPQFMAYAGIVPSESSSGGKHQRGSITKTGNSLLRHVLGEAAHHARRAPRVTSTVKQRQKDVPPEIIDLAWRAQAKSACIPAIGISVRASVRSRHSPRSPASWRVSSGPPVMLFRRRYPSRHEPGGRQRGSRSELAEIAENPRALLCGSDPRPKKCDGHLGDGSLSCGTGSADPRISG

SEQ ID NO: 299974 - protein, 461 aa, unidentified
MNHDTTYVGIDAHKKEHRVAMLLPGSDEFHESATGTSAAKVRRMVRRIRKQAPGGVVFCYEAGVCGFALKRQIESAAEGVRCVVVAPSLIPIRPGARVHTDRRDARSLASYLRAGLLTEVQPPTEQQESARDLCRCRDAARKDLMRIRHQVIKFLLRRGVQYGAGSHWTMKHMRWLREVRFERPLDEAVYRDYLGELDHRLGRLEKLDEQLAGLAESPEYRQRVGWLRCFRGVDTVTAMIVLTELYGFERFGSARGLMSFVGLTASEQTSADSRRMGGITKAGNGRVRRVLIEASWHQRRPVGRNRTIGARRQGQPDWVVRLAEQAERRLHRRYWRLVGKGKMPVKAVTAVAREFSGFLWSVLYHEGPAPKADDRSAGEARPKTAGRRSKVSASKAVVSTGAVSSEAQPPASDSPRQAAEKFLASPRKGRDGSRSSPGRGPGGPGSSRSVVQVVDRGSPPE

SEQ ID NO: 299975 - protein, 360 aa, unidentified
MQTKVSENSFEDQPFYVGIDYHKKSWKVTILSDTYEHKTMSMNPDPDLLASYLHRNFPGGTYHAVYEAGFSGFGTCRKLNQLGLDCKVIHPADVPTNQKEKLQKTDKSDSRKLARSLKNKEFQSVHIPDQKLEADRALVRQRFRIMKDLSRTKNRVKSLLFQFGIEIPKQFTSAQSRHWSKVFLSWLTELPIQLQSVKKTLDNYILIGKTQRENLLMLNRQVRELSQTDAYKDNYLLLLSIPGIGVTTAMFILTQLGDIQRFTNLDELCEYIGLVPSMYGSGDKLVIGKMVHRGRKELKIMLIESSWEAVRNDPAMMAKFHELIKRMPKNKAIIRIARKLLNRIRRVLITREKYELGVVN

SEQ ID NO: 299976 - protein, 361 aa, unidentified
MSGTMTWVGLDVHARSTHAAAIDVMTGELSRVRFGAGLEGPLAWLAQLPGPVRACYEAGPTGFGLYRAATAAGIAIQVIAPGKTPRGPSDRVKTDQKDAELLARLLLAGSLSRVVVPPPEIEAAREMTRAHDACRRDLMNARHRVSKMLLRHGRVYPKPTIWTVTHRRWLAQQQFEEAASNLVFADLLAAVDGLTSRKSAIALQLSQLATDEAWWPTVARLRAFRGIDTLTAFSLHLELGGDWKRFERASALAAWLGLTPSLAQSGESSRQGSITKTGSMLARRLLVESAWHYGRAPRLGQTLATRQAGQPDHILAISNRAQQRLHHVNRSMKGRGKPHNVTVVACARQLAGFLWAAATAE

SEQ ID NO: 299977 - protein, 339 aa, unidentified
MKYTPVGVDIAKHLIQVHFINEHTGEVVDKQLRSRDFLTFFSNREPCLIGMEACGGSQHWARELTKLGHKVRLLQARFVKAFVMGNKNDVLDARAIWMAVQQPGKEIAVKTEEQQSVLVLHRTRRQLVKFRTAQINSLHGTLLEFGESIHKGRAAMEREFPEALERMKERLPPYLITVLEDQYNRLSELDSLIDDIEKQLTSVARQNETCKRLLDIPGIGPLIATAAVATMGEASAFKSGREFAAYVGLVPKQTGSGGKIRLLGISKRGDTYLRTLFIHGARAAALLTREPAPWITELKKRRPASVAIVAMANKLARTVWAIAAHGRKYDKNHVSNRPY

SEQ ID NO: 299978 - protein, 345 aa, unidentified
MNYFAGLDVSLKRTAICIVDRDGNIVREGVTDTEPEALISWLRNTRFALQRIGLEAGQCSSWLHKGLSEGGLPVVCVETRHAKSVMQAQTVKTDRNDARALAQMMRTGWFKAVHIKSENSQKLRALMGSRRCLIDKQRDLNNHIRAALRTFGFKMGLVGQSRFEERVRELVVADGDLQAIVIPLLEARRMLGEQASVLTRLIGRLVRSDAICRRFMTVPGVGPLTALAFKTTIDNPGRFRKSRHVGVHLGLTPGKYASGEVDYNGRITRCGDAFAREHLFEAAHSLMVNTRRWCSLKAWGIRIAKRSSMKNALVAVARKISVILHRMWCDGSDFRWERSEDAAAA

SEQ ID NO: 299979 - protein, 417 aa, unidentified
MREFRTFTAELHRLADWLAQCGVKTVALESTGVYWIPLYEILEQHGFEVLLVNARDVHNVRGRKSDVKDCEWLRELHSVGLLRASFRPAATIVPLRSLMRQRQTLVEEAATRIQRMQKALTEMNLKLHTVLTDLTGQTGLKIVRSILNGQRDPEQLAAHRDHHCHASHQEIVAALTGNYRAEHLFALRQNFAAYEFHLQQIAECDTALEKLLAKLAEQQPPPAGPLSTPRRKRGSKHAPTFDIRSSLHRLTGGADLSQIHSIGPHAALQIVAEIGTDMRRWPTEKHFTSWLTLAPNNKVSGGRLLTSRTPPSANRAAVILRRCAMSLGRTSTALGAFYRRLAARTGKAKAITATARKLAVLVYRALSGDLVYNDPGAAAYHQLNRARELKSLRKRAKFLGFDLINHSTGEVLLHPVS

SEQ ID NO: 299980 - protein, 344 aa, unidentified
MSKITMIGLDLAKNVFQVHAVDAAGAVVLRQQLRRAQVEKFFAGLPAAVVGMEACAGAHHWARVIGKYGHEVRLMPPAYVKPYVKRNKNDGRDAEGTCEAAGRPTMRFVAVKSVEQQAVLIVHSTRTLLVRQRTMAANALRAALSEFGIVAAQGVNGLRTLIEQLKAPSEATVSEVARGALLLLVRQWEALDADVRALERAIVRTARGDEAARRLMEVPGIGPITASATVAKVPDARVFRRARDFAAWIGLTGRGRGTGGKHRCGPISKQGDRTLRSLFITGASAHLRHQRARGVKDPWLRELLARRPYKVAMVALAAKNARIVWALLAKGERYRERALVPAVA

SEQ ID NO: 299981 - protein, 315 aa, unidentified
MTTKAEVHVGIDVSKDRLDLAVLEGRRIKQYSNRAGGIKKLVEEMIELMPALIVVEVTGGYERAVVYALFEAGLPVARVSGYRARQYAHAKGRLAKTDELDALNLADYGKHVQLRLFEAKSEQGQLLSGKLARRRQLGEMLKAEKNRLRLAYGEIGPSIERVIEFLQGELKQLDEEIRAYVDNDPEWLEQEQLLRSVKAVGPVTAVTLLAELPELGKLDNKQIASLVGLAPINQDSGKRSRYRKTGKGRPSVRSVLYMAVLTGIRYNPVIKKQYDGLVSRGKVKKVALTACMRKLLTILNAMVRDQQPFRCVATS

SEQ ID NO: 299982 - protein, 351 aa, unidentified
MQNQAYFVGIDLHKEVIQVCVLDARGEKVAERRYLGTTLEQGHAVVSELEGWKEGGRYAVEALGMNRWLVNEMKSRKLEVVVVDATKLNLRMLGKKTDRRDAYEIARRLLLGDIERNAKTYYPDEDRYGWRKVLRTRHKLVQARQQLVNQVRGILNAYRIAPPKGELTSEKNLVWLATIELPSKSLTACLHGLGQSLGSIQASIDALTERIEDGASNATVAPLHETLEGVGPQTALTLVHELGDVTRFTSTRAVASYAGLAPRVANSADKAHHGKITKCGNGELRWILSEWAVRLLARNEAVKRWAAPLLRRMHKNKVRIALARRLLIGVYIMLRRGEAFSLDRCLATKAA

SEQ ID NO: 299983 - protein, 368 aa, unidentified
MKKNNTCLKSPKRNKTRKRSLTIGMDLGDKTSRYCVLDSDGEIVREGTVTTTKKGMKQRFGSLAGCRIAIEVGTHSPWVSRLLSSLGHEVIVANARQVKLISASSRKDDRLDAQTLARLARMDPQLLRPIRHRSEKAQGDLMQVRVRAALVDTRTGLVNAARGLAKAMGERLPKCDADQMGVAKTQGMSAELSEALRPLLETVEALTKQIKASDQKLEQLAERDYPETELLRQVSGVGCLISLTFVLTVEDPHRFRRSRDVGCYVGLRPKRSESGESRPQLGISKEGDEYLRKLLVQGAHCILSHKSPDTDLKRWGLKLAGKGNKNAKKRALVAVARKLAILLHHLWVNGEVYEPLRNSRLLEQKAVA

SEQ ID NO: 299984 - protein, 358 aa, unidentified
MTMVGIEGMETKVEVILGMDTHLDFHVAVVLDHLGRRLGELSVPTTAKGYEKLLCWVEGFGPVRCAGIEGTSSYGAGVARYLKAQGIEVLEVERPKRRRRSSRRNAEKSDPLDAEGAARAVLACETSGVPKSGEGRVEMIRALRAARRSAMKARTQAANQLQGLRVTAPEELHHRLRGLSTKELVAVAARFRLGDDPHDVAAATKFALRSVARRYKALSAEIAELDAQLDRMVRQAAPELVSLAGIGTDHAAALLIVAGDNPERLRSEASFASLCGVSPVEASSGKVVRHRLNRGGNRDAHRALYMICLARMRRDRRTKEYVTRRSAEGKSKREIIRCLKRYVAREVYRVLVSLPVQC

SEQ ID NO: 299985 - protein, 417 aa, unidentified
MNLPPETIPIQRYIGIDIHQHYLMIGGQNRHQEWTLRPRKVQVSRFRDWAEKNFQPGDAVVIETTGSVWDIYDIVAPLVSRTLVAHARKVRQIAEARVKTDKEDIKRLITLLIADIVPEVWVPPMHVRELRSLISFRWRLTKQITMSKNRLHSVVQRFNLDFPEGGLLTDKNKSWWDRQEFSDLTGFEVKQDLEIVKALEGQKEAIDQKLAELSNTEPWSSDMVYLMQIPGFGLIFSMVILSAIGDIKRFSHPRKLVGYAGLGAGVHDSGKKHQGKSITKEGRKELRWALVEAAWVAVRFDPFWKAQFQRLEKRMPRNKAIVAVARRLLVSIWHILTKREPYRHFDEETIAYKMLIWAQAIGEEGRQGLTRQQFAKYGLLRLGIGQDLERIVKGGGPRRIAPTEEVLALKPELAPPR

SEQ ID NO: 299986 - protein, 413 aa, unidentified
MRLFAGDDWAEDHHDIELMDVTGRRLAKARLPEGVAGIARLHAMIGEQLGEDADEDDAGQVAVGIETERGPWVQALIAAGYTVYAINPLQASRYRERHGVSGAKSDAGDAHVLADMVRTDSHQLRAVAGDTALAAAVKVVTRTHKTLIWERTRHTQRLRHALRDYFPAALEAFEDLDAADTLELLARAADPSSAARLTTAQISAALKRARRRDIAGKAERIQAVLRAGHLGQPAVVAAAYAASARALIAVLVTLNEQVKVLQGQVEAYFGQHPDAEIITSQPGLGPILGARVLAESGDDPGRYASAKARKNYAGTSPITRASGKKKVVLARYVHNDRLIDALMGQAFAALNASPGARAYCDCQRARGSGHNPALRQLASRLVGILHGCLKTRTLYDESTAWPQQAAAAEQTAA

SEQ ID NO: 299987 - protein, 427 aa, unidentified
MDELNRNRLEEFRQLRQEIRHSQEYLIVGIDVAKDRHHAFFGTATGRTLLRRLVFGNDHEGFRKLLDQAEALRVAHGLKKVVYGMEPTANYHKPLGEYLINLGRTVVLVSGVTVKRNRESLDGRWDKHDVKDSANVADLISQGKCLYYEYPSAELRGLRGLLSLKRRLKKQEHGYKVRIRNHLIAQYFPEMDRNYERLGAAGLSIVRWCFPASQIAELDVDPFIQRVTSRRIRVETRRRLEGVWEKAGASIGCEGVPGVEHEAKVMVEGLRQIREMIKETEDKIEELCEQFPEYEYLLTIPGFGPDVSAKVLGAIGDPDRFQNGKQVLKLAGLDLSADRSGKDSDKAIPEISKRGKADLRYALYQAALIASTKNQDFMRYYTRKLEGREREKGIQTKMWVKLSAKMLLIAWTLMKKKEKFDPAYLNV

SEQ ID NO: 299988 - protein, 310 aa, unidentified
MAQHVGIDISKDRLDVEVLETAERFHVGNDKAGWARLVARFKGRQIAAIGLEASGGYERNPIRALLKADLPVRRINAYRLRRFADALGIKAKNDKLDAGVIARFVATLPTRPTQIDPLVERLAELATARHQLSNELTRAQNQAEQIRDPLIRRLGKQRIAQLKNQIVLIDKHIAQAVAADHTLAHKDRLLRSVIGVGPVFSHTLLAFMPELGRLTRAQAGSLLGAAPFDHDSGKLKGQRCIWGGRRNVRDVAFMAALSASLHNPTLKAFHQRLRAAGKKPKVALVAVMRKLITILNAILRDNVQWQNCPA

SEQ ID NO: 299989 - protein, 338 aa, unidentified
MQLYAGIDLHSSNNYLGIIDTNDKRLFGKRLPNCIKTISMALKPFRKKISGIAVESTYNWYWLVDGLQDKGYKMHLANPSAIQQYEGLKHTDDKWDSFWLAHMLKLGILPQGYIYPKKQRPMRDLMRRRLRYVSQRTSHVLSLQSMLNRHLAMQLNSNEIKKLKLIDADKLFKDPFSASAARHSISTISFLDATAKRIEKQIMASAKLEKSFQVITSMPGVGHILGLTVMLEADDFSRFESPGNYASYCRCVKSERTSNKKKKGEGNRKNGNKYLAWAYVEAAHLIIRFCPEANAFYQQKKARTNGAIATKALANKLARATFCMMRDQTMFDVKKVFR

SEQ ID NO: 299990 - protein, 329 aa, unidentified
MLIPNNIPNNLYILGIDVSKDKLVVYDGTRWYEFKNEKNVPELSKLIKKKSDYSKTVLCYEPTGVYSKYLDHFSFEHKIKVLIVNPFRSSNFMKSQKTRSKNDKNDAKGLWKFAILDFEEVKDIVIEEDNEKLKRLIAYSETLKQEEIKFLNIKKAIEYYEDIKKGYGYIQKDIDKFIEDLRKARARVLKDIKAHIKSNKKMEKAEKYIKSITGVGDKIAPILLSFFMTYKNTSRTKITSLAGLDVIEKVSGKSVRGKKKISKKGNRQVRAALFLSALVAIRHDKRMRELYNKLIEKGKAKKVAIVAVMRKILIISHSLCKNEQYYEMA

SEQ ID NO: 299991 - protein, 438 aa, unidentified
MSNKVIFNLDDLFISVGIDVGADFSWMSIALPNQQFVGKPYKILHSSIDSLTTAVSKIKEAEELYSLESRIFLESTGIYHYPLFCYLRDKGFNCSVINPIITKNSTNINIRKVHNDRFDSKKAALVGLKPDLKVSLMPSDLALNCRNLCREYYDLMDNRSAYVNKLQGELRMAFPQYLGIFSKVTINTSLTLLETYTSPSAFLKADKQEIIDIIKSTARFGLTYAQNKYNAIIQAATDANQFGYIIDSNIKRIRLYISFIRKYDEEINSILESLHELVDANEDSDFVKQIHLIETFKGAGFLSAVSIMGEIGDFSAFSKPKQLFAYFGLDPAVKQSGKFEGTKVQMSKRGSAIARRVIHTLTLQSISISRNREAKNPVLREYYLKKCDSKPKLVAMGAVSHKVCNMIFAILRDNKPFKIIAPQEHIKQYNSAKCDIAA

SEQ ID NO: 299992 - protein, 343 aa, unidentified
MDHFAGLDVSVKDTSVCIVDDTGRLVREVKVASEPEALSAVLTSPVYHFKRIGLEAGPLSQWLYSALAEAGLPAICVETRHMRAVLKAQINKTDRNDARGIAQMMRVGLYRPVHVKTLRSQKLRMLLTHRKLLQSKAIAVDNDLRASLRNFGLKVGVVGTVKFEARIKELVENLPDLAMLVEPLLIVRRVLREQIGILHRRLLAVVRDDDVCRRLMTVPGVGPVVALTFRVTVDVPARFRNSKAVGAVFGLTPSRHQSGESDRPGAISRCGDEMMRMMLYEAAQVMLVRSAKWSWLKAWAMKIARHRGMKKAIVALARRLAVIMHRIWVDGTEFRWTREVVTA

SEQ ID NO: 299993 - protein, 348 aa, unidentified
MSQFHIAQFIGMDIAKNVFQIHTVNPETGEIERRKLRRDKVVEFFANRAPAVVAMEACGGAHHWARKLCSLGHRVKLLPAKQVRAFVVRDKTDALDAQAIYVAAQQSHICEVPIKSEQQQACLSLHRLRAQLMKMRIMQTNSLRGLLYEFGVVLPKGHKKLLACIQPELARAQLERKLPDEFVLSLQEQLHRISALQQDIDSIDARLKGMACQNHQMHAAVSIPGVGYLTATAVLSTVPDLSTFSSARQFAAWLGLTPRQVGTGGRTRQLGISKRGDSYLRYLLIGGARSVAIRSGRTKWMAGIFGRRHFNVAVVALANKIARTFWAVVVKSTPFNREMWNVELPVAI

SEQ ID NO: 299994 - protein, 341 aa, unidentified
MAQVTTIGLDIAKHVFQVHGADAAGHVLFRKRVTRPKLLGFLAAQAPCVVAMEACAGAHYWGREIGKLGHRVRLIAPAYVKPFVKRQKNDAADAEAICEAAQRPSMRFVPVKTEEQQANGIVFRARDLLVRQRTQCVNALRGHLFEYGYVFPQGISHVATLVALVEDPQSSLPESVRTILKLLVDTFTAFEGQIAELDAEINRRSKTDPTARRLMTIPGVGPIISTAITALAPAAHGFAAGRDFAAWLGLTPLQKSTGGKQKLGAVSKRGERTIRRLLIIGASAVVQQASRRGAPKGSWLAQMLARKPKMLVTVALANKMARIVWALLVKGGIYRAPVAAA

SEQ ID NO: 299995 - protein, 315 aa, unidentified
MEQPSPSPHFVGIDVSKDRLDVHVLPSKQAFAVARNGEGLDRLVIELCGLAPALVVLEATGGFELTVAAALAGAGLPLAVVNPRQIRDFSRATGRLAKTDTLDAEIIALFAERIRPEPRPVAEVEAQVLAELVARRRQLVEMIGMESNRRRQARALKVQRTLEATLKTLEAQLAELDREIDDTVRGSPAWRAADDLLTSVPGVGDITARTLIAELPELGRLDRRRIAALVGIAPINRDSGQMRGHRAIAGGRTAVRNVLFMATLTATRWNPVIKAHYTQLVERGRPKKVAIVACMRRLLGILNAIIRTASPWQTA

SEQ ID NO: 299996 - protein, 317 aa, unidentified
MSPATPVHVGIDVSKARLDVCILPSAETLSVDNTDGGIAQVVALLKQHQVALVLLEATGRYERRVASELLETGFNVAVVNPRQARDFARALGKLAKTDKIDAVTLARFAQLGHARLCEKQPQKRLLLDDLVTRRRQVVAMMAMEKTRVQIPQDKATRAMIARVIRLLEQQREDLDRRIAELIESDDDWKNKRDLLTSVPGIGESTASQLVADLPELGQLNRRQIAALVGVAPINRDSGMMRGKRSIFGGRAAVRCALYMAAFCAMKFNPVIRPFAERLRAAGKPFKVIVIAAMRKLLTILNVMLRENQPWAPKLQNA

SEQ ID NO: 299997 - protein, 345 aa, unidentified
MDYFAGLDVSVKETSVCIVDGTGKIVREVKVASEPDGLLAVLANPAYRFKRVGLEAGPLSQWLFSALAEAGLPVICVETRHMRAALKAQINKTDRNDARGIAQMMRAGLYRPVHVKTLRSQKLRMLLTHRKLLQSKAIAIENDLRGTLRNFGLKVGVVGMVKFEARIRELVEDLPDLAVLVEPLLVVRRALREQIGILHRRLLAIVRDDDVCRRLMTVPGVGPVVALTYRVTVDVPARFRNSKAVGAVFGLTPSKYQSGEINRTGAISKCGDEMMRVMLYEAAQVMLTRTNKWSWLKAWAMTIARHRGMKKAVVALARRLAVIMHRIWVDGTEFRWTREQVAAAA

SEQ ID NO: 299998 - protein, 369 aa, unidentified
MFKKVIKLSSLKRKGGLKMEKTKGAFADKDLYVGIDVHKKKWAVTVRTYDLELKSFGMPPYAEDLEKFLTTNYKDALIHIVYECCFAGFWIYDYFHERGYDIIVTPTNRIYRDGSIIKTDKIDSRKLAFQHSRGLLREVKAPSVKVREYKYIFRIYDKEKMREGQILRQIKSILEQKNHRLKWERWNKEFVEKLKEVRFAEEIFNTKFKQLIREYEYVKDQIKDSEQRIKEIGKDEELKEKVKLLEKINGIGIISAVRLVIYLFDRKDKFESGEKLVHYLGLTPGEQSSGEEIIRSRTGLIGNRQLRSIIIQLAWVAVRKDGALLNKFERVYKSSGCKQKAIVAVARKLMMKVHAVIRKEEEYEINIAA

SEQ ID NO: 299999 - protein, 320 aa, unidentified
MIQKSVGIDVSKDTLVVCLSSPEKQRYQCANTLSGIEELIRWLESQKIEKSCPIVVESTSSYHWLVCLCLREQELDVRLINPIITKKYQRSSVRNAKTDRVDAERLAEIGQLEPDLPRFFDSREQLSQKRCQSLIQKLETVKQELGRAYRDAEESFARIGIEMDLECVENALKQIEESLQVLKRMIEAQADNMARELAQNIRGLSLYQASVLLTAVGGRTFENREQFIAFFGLDISRRQSGTWQGREKLSKRGNPYYRKILFQLGWSLQRNNEMYHSYYQQIRDRGKHYFTAILATARKFLRFLFSFLHQNHFFSLDASL

SEQ ID NO: 300000 - protein, 350 aa, unidentified
MDKTSGSQGATVVAAGIDTAKSTFSVCGVDLARRTVLERTLNRGRLVELFAKLAPCTVGLEASSGAHQLARELTALGHTVRIIAAKFVAPHRTSGKNDRNDARAIVDALLHPRTRFVPVKSEEQQALLSIQRARQGFIEERTALANRIRGVLAEFGVTLPVRIEVVRHRAVAAAQRLPVLAAQVIQELHAHLVVLDERIGRYDRQLRALVRHSEPASRLTEVLGIGPVTAMTSVAMVGNGREFKNGRQFSAWLGMVPRQYSTGGKTRLGPITRRGDVYLRSLFIQCAKALLAVAHRRNDRLSRWALAVRARRGFGKAVVAVAAKLARIAWAILAKGERFRPEPLVSAASA

SEQ ID NO: 300001 - protein, 400 aa, unidentified
MYYLGVDWATEKHDLCLLDEAGSIVQTLEIKQTNAGFKQFKKLVDQYGATTISINIERSDGLLVDWMLAQQWVVYVTPPVVVAHRRPRRSKSDLSDAYLLAYLLRLNDPDCRPLTRSSATVLHLRELTRALETTVADQRRLANRLSYVLYQYFPIANYLFAHVECLICLAFLEAFPTPQQAHKLTPFRLKQFLKKQNYKNMGRVDAIYGLLQTPMPTAATCEGYVAQVKILIPLLRQLHYTRSHLERELPKLFSTHPEAGWWKSFPGTKGPLTPARLLAWIGDDRSRFPSAEMLQAVAGTAPITRRSGKALSVEFRHACSHPLRKAMDDFARQSVRYSAWAREYRDEQLKRGHNKARAYRALANRWVKIIWTLWQRGEQYDEAKHVANRTHQGVPKLKTM

SEQ ID NO: 300002 - protein, 405 aa, unidentified
MIFVGDDWAEDHHDIYIEDADGARLAKCRLQESIEGVARFHELVATHANEPSDVIIGIETDQGLFVQALVAGGYEIYPINPLSASRYRDRHGLSGAKSDSADAKLLADIVRTDRHNHRKIANDSFEATAIKVLARSHQNLIWARRTNANILRSTLREFYPAALEAFGDDLSSSDALFVLTAAPTPSAGAKLTIRQIETALRLGGRQRYVESRAKEIQSHLRKDHLRAPGPLAKAFGSSVVATVGLVIACNAQIKVLEAELAANFDVHPDSVIIRSLPGLGQVLGARVLGEFGDDPNRYRNGKSRKNYASTSPITRASGKSNVVLARFTKNKRLANAWDQAAFCALTQSPGARAFYDACRAKDQSHHQALRALANRLVGILHGCLKHRVVYDEAIAWPSSTQSEAA

SEQ ID NO: 300003 - protein, 361 aa, unidentified
MNIKRKFNMPMKTNTPLNPETQARIQQLKIGVDWHVDHFRVVRMCDGQSPQPAQRFTPATFLLFVEKQRTLADQVFVVYEAGPGGFHLHRQLAGLGVRAFVVHPHKLDPLHKGVVTDKTDARELTLNLDRYLRGNLRAMSVVRVPTEAEEQRRALSRQREQLRRERQRLAAQGRSLCLTQGIRLRGEWWSQTLSLPAWLTPRLDVWRHLITAVEAQLAALTKQVEALAPKARPKGLGPLTLGMLIAELCDWSRFKNRKQIGSYTGLCGGVSSSGQSHCDLSITKAGNARVRWSLIELAWRMVLYQPQSKAVQRWKHILLNPKAAARQKKRALVALARQLAVDLWRWQTGKTTPEQLGWIMV

SEQ ID NO: 300004 - protein, 346 aa, unidentified
MENIALDVHKHYTWARVENPEGKQLYENRLAHAHGTIKNFVRRWTPGSLVAVETVGNWYWVVDEIEAGGGKPQLVNARLAKLMMGSVNKSDKLDAKGMNRLQRTGTLPTVWIPSSSVRDARELPRTRMVLSEQRTQLKNRVHATLSKYGYVVDEVSDAFGKRGRQIIKELLTQLPPHTRQALQHVLDQLDHVMENLKAIEADMISTFAPCPQTTWLKTLPGVGEILAVVIGTEIGSIERFARAEQLASYSGLVAREHSSGGKFHYGAVRRDVNVYLKWAFVEAANSSILNRERCGYHHISRLYQRIKARRGHNRAKVAVARHLSEASFWMLKKGELYREPALSTQR

SEQ ID NO: 300005 - protein, 351 aa, unidentified
MMIIGVDYHPSFQAIAFLIEETGECGEQELNHSDGQAEKFYRDLKQRGISVRVGMEATGYSRWFERLLAELGFELWIGDPAEIKAKRVRKQKFDREDARLLLRLMRENNFPQIWVPSPENRDLRQLLWHRHRLVQMRTRIMNQLHALAMNEGYRWKKKLFSEQGRAQLEKLALAPWASRRRQELLELLDRMNPTIEELTAAVEREARKRPEVLRLMTHPGVGPLTALAYVLIIGTPTRFARGKQIGTYVGMIPSEDSSAGKQRLGHVSKQGSSLLRFLLVEAAQAAARIHPDWRRRYIHLAMRRHKSIAKVAMGRRLAIRLYWMWRNGCEYSQSLEFGSYAGQLVNPHGAK

SEQ ID NO: 300006 - protein, 380 aa, unidentified
MNTTTVGIDLAKSIFAVCEGDYRGHGSQSSILKSGEFLKWLRTLPTCTVVAMEACSSAHSWGRTMQALGLEPRLIAAEFVRPYRKNQRIKNDARDAEAVLTALHAPGMRFVTIKTEDQQQRLAWHRLREGWKAERTALFNRIRGLLTEFGIVVELGAAKIRRKLAELESDAAYPQSIQLMAQSVRAQIGILDQRLAECERQIARQSKSDPAVARLRSRPGIGPLTADAIVATVGNARQFKNGRQFAASLGITPRQHGSGGKTHLGAITRRGDSYLRCLLVQGARCVLQAALRLHKNKPDTLNRLQLWMITLHERVGYHKAAVAIANKHARQVWAMIARGEAYNAEAYKDWEAAHATVRPGDIQEASDYDLSTAALAAASV

SEQ ID NO: 300007 - protein, 427 aa, unidentified
MKYKQNFKIMQITDKTLVIGVDIGKKIHYARAFDWRGIEVAKTINFKANSTGFSEFKEWARKMAEKNGKDKIVVGFEPTGHYWFTFAQAVLEEGIMVVQVNPYHVKSSKELDDNTPSKSDHKDPKTIAMLIKDGRYQIPYLPKGGYAELRKANNLREEWLKKICSVKNKVQRWLDTYFPELLDVFSSWEGKTAVMTLERMALPAKITEFTAEEILKIWREEVKRGVGIKKAQQLLETAADSVGMKEGLKMAEYEIRLLMKEYKEIREVMDDIEEKLEVMAMAIPGAINFLEIKGIGIKTVAGFFAEIGDITRFTHPKQIIKLAGLNIRENSSGEHKGQTTITKRGRSRLRALLFRAILPMTAKNEEFSELHKYYTTRKENPLKKMQSLMALCSKLIRIVYTLVTEDVKYDPEKMLKDIHRNEVPVAV

SEQ ID NO: 300008 - protein, 336 aa, unidentified
MFQLGIDVSKNTLDLCLLREGVKGRVKTRRLKNDVNAASSVITWLGKQQCAPADVHIIMEATGVYHEPLAYGLYKAGAKVSLANPHRSREFARGMDILTKNDQIDAYMLACYGALKEPEPWVPPPESIRYLSALLRRRDALVTDRSREKNRLEKCRATDIPPVIAESIENVLRNLSAEIERLDELLLTHLNQHPELKKDFDLLTSIKSVGFQLGLNMLVILRGHRFDTAGQLAAFRGVVPVEKSSGTSIRGKPKLSKNGPPEIRAKLYLASMCGLRFNPVMKEMYERLCLSGKAKMCAIGALMRKLVHLCYGVLKTQKPFDAEHLSSDARSACKAA

SEQ ID NO: 300009 - protein, 419 aa, unidentified
MSSQVVLHNPLVVGVDSHRQSNVVRLLDRHGHVIGKPLHIHNNRPGIAVLAQQLQTVVQQGRYDGIQLATEATNWYWLGMFCSLSQTQPEPLQLYAFNPRLTANFKKALWQDDHTDVADALVIAERLRMGRDLPPPFQTDTLYQPLRLLTRCRFHFVRMLVREKAYALNLIYLKASAYTAPGKQPFSDVFGATSRAVLTEFASCADILAWPLEQLAEWLDQRGKRRFADPSATARKLQVVARESFVLPSAFQAPVNLALGMALRQIVSLEQQIQRLDAPIAERLQVIPNTLTTIPGIGPVCCAGIIAELGDIHRFNGDDDKVAKFAGFKWRRHQSANFEAEDTPLTLHCNRYLRYYFCEAANLVRIHEPEYAAFYQKKYAEATKHPHKRAIVLTARKLVRLVTRLLTTNQPYRARRTKA

SEQ ID NO: 300010 - protein, 353 aa, unidentified
MIESTTVTVGLDVHARSIRLAVVRADELLEERTLPYDEEAVERLLRRWPGARCCYEAGPTGYRLARSCAEAGISCVVAAPSKIRPAADRVKTDRRDAERLARLLRLGEITPVRVPGPEEEAARDLVRAREDARGDLMRARHRLSKLLLRHGAVYDGTAWTRAHDAWVRRQRFLSGPLAIVFDECYGRMLGARPEGTHSTRRSPSSPPYVDVVERLVCLRGVSTLTAFALTVELGDWNRFRPESLGPFLGLTPSESSSGERRRQGGITKTGNSHARRLLIEAAWHQRSAPRWSVTLERRREGKSLAVRAQADSSARRLHGRWNALEARGKPRLIVVVAVARELAGHCWALATIE

SEQ ID NO: 300011 - protein, 365 aa, unidentified
MQKISTMQTSGKNIFEGQLTIGLDLGDRSSAYCVLNEAGEIVLEHKLATTPEAMKQAFGSMPRCRIAMETGTHSPWVSRLLTALGHEVIVGHAQKVRLITKSRRKDDRLDARTLARLARIDPELLSPVKHRSAQAQLHLAEIRARAVLVSARTALVNAGRGLVKSYGERLRKCGTEQFRRETTNGLSAGLQQALEPLLREVESLNERIQEYDRRIEKMAKQTYPETALLKQVKGVGDLIATAYVLTIEDPHRFRKSRDAGCFVGLQPGRRNSGESEPQMRISKEGDEYLRTLLVQGAHYILGPFGEDSDLRRWGQKLSARGGKNAKKRAVVAVARKLAVLLHRLWVSGEVYEPLRNSQKVMSAAA

SEQ ID NO: 300012 - protein, 342 aa, unidentified
MQTITRIGMDTAKNVFQLHGVDENEGVVLRRQFRRREMIAFFEKLPPALVAIEACGSSHHWARMLQSFGHEVRLLPPQYVKAYVKRGKNDAADAEALCEAVTRPSMRFVPVKSREQQAACMLMTVRERLVSVKSQLSNAIRSYAAEFGIVGPAGRQNVNALIERILDDETLPDLARDLFRFQAKEYAAVEARLEEIEDKLMVWHRADDLSRRIATIPGVGPIGSTMLSMKAPPAESFRSGRQFAAWLGLTPKDHSTGGRVRLGGITKAGDPSIRSTLIVGATALLRHIRKGRTKASPWLEALLIRKPPKLVAVALANKFARIAWRLMMSGGVYNRPPAMVAV

SEQ ID NO: 300013 - protein, 355 aa, unidentified
MNDAKYIGMDVHQATISAAVRDSSGNLVMEATLETKAETILEFVHGLRGSLRVSFEEGTWAAWLHDLLKPHVSEVLVCDSRKNALLRVGNKNDREDARKLSELLFLNKLHPVYHGETGIRTLKELARSYLTLTRDLTRVMNRLKAIYRGWGIACAGQQVYAPRYRAEWLAKISEASVCRRAGIYYQQLDVLVALRQQVRRELLAESRKHPAMRLLRQIPSIGPIRAALLIALLQTPHRFRGKRQLWAYCGLALRTYDSGEYRFVGGQLKRSRKAVSIRGLNKNHHHDLKNIFKGAATRAAAVAGPFQNFYEARIAKGMKPAMARLTLARKIAAITLLVWKKGVRFDAKQLKPQAA

SEQ ID NO: 300014 - protein, 309 aa, unidentified
MKEELVYVGVDIAKTYLDAAMGNKKCRFSNDAVGHRELIKWVKQLSASVQVICESSGGYERALVQVLARARVKISLVQANRVRQFARAAGILAKTDRIDAEVLCEFAKVMRPQTVTAARLEQERLRELESQRRHLTHLLVKEQNRGARLSDASVQRLNGSLINQIKKQIDQLDLFIKRHIDQSHELSLKAAKLTSISGVGARTAALLLAQLPELGQLNRREVAALVGVAPFNRDSGKMRGKRTIYGGRRPVRHGLYMAALVAAHHNPILRVFYLRLRAAGKPAKLALTATMRKLLIVLNSALKTDLNYA

SEQ ID NO: 300015 - protein, 341 aa, unidentified
MEKFIRTAIDLGKNYFQVHGLESEGGRSISRKVKRSKMHEVYSQIEPCRVGMEACGSAHYWARQLTAMGHEVVLIPPAYIKPYVKRGKNDVVDAAAICEAMSRPDMRFVPIKSADQQAVLMLHKTRELLVKQRTMAVNALRGHLAEFGIVAAKGIGRVDELLALAKADAALPHIAGAAVACMAQHLEGLDLSIETVDEEIAKAHRQNPISRLLDEIPGIGTLIASATAASVPDPGVFKSGRDFAAWLGLTPRQNSSGGKEKLGAITKQGNRYIRKMLVTGATSVLRVAGKRKGALADWINALRARKPERLVAVALANKLARICWAIMTTGEGFRTDTYVKA

SEQ ID NO: 300016 - protein, 422 aa, unidentified
MSYCPVAGIDVSKRFSDMCILSPDNKIFAQEKIYHDETSINRANALLQKAERLFFSKPVIVMESTSHYHLILFQFFSEHGYDVIVVNPLQSNSMKDFSIRKRKTDRVDAFKLAMMYRTKTLRPSQIPQTATRALRQLCRHRAELLNDVSSYKNRLTALLDQTFPGYDKVFSDVGGVTSCAVLVRFPTPTILLVEEESELVEVIAAASKSGYSFAKKKAGLLISAAQKAQTLGIHSCADETLIVCTIQMLRTLSESVLQIETAIDNLLAQIKEMRNNVSLLQSIPGIGSHSAALLLGEIGDISLFKKPKQLAAYFGLGPTERQSGSFRGTKNKLSKRGSSYARAALHMGIVNSICKRGKDSAANPVLLSYYEKKCKNKPAKVAQAASMHKLVFIIFAVLRDQKPFELKTPEQHAVEQGFVKAA

SEQ ID NO: 300017 - protein, 460 aa, unidentified
MLFVGCDWSDKWLDFAVLNDAGTVMAERRITYADAPDPVAEYQAFLAPLERRWRSAVTGIEDTGILFARALAAAGMKVVHVDPTRAARHRSALGIAKSDRADARMLAAMVRAGVCRPVVASSPEAQALRTLTHTHRAAVAARVEAAHSLRAALTRFWPAAAAAWPSRLGGLRNAQAMTVLAAAPGPRAASKLTRARLAELLRQAGRTRAVEDEAERLHLLFCRPAMLLDPQVEEAESVRIRDLVAVLDRAVSRAAALEKDMHAHYTRQRHYPLISRIPGIGPVLGAYLLAEIGDRPEERFGSGRSLAAYAGVAPLTWASGTTTRVAFRRASSVHLRSTLHTAAFSLAMQSPGAQHYYRRRRAAGDAHATALRKLGRRLVLCLYRCMSTGLPYDDAVAFGYDPERPDAPALQRRSPLSPDEISHARELLAQPGATVVAVAKAFDVSRQTIYRHVLGRPWAA

SEQ ID NO: 300018 - protein, 423 aa, unidentified
MPVIDDDEIAYGRVAGMDISKRDVKVAVRLIENGRVKRLKVRTFATTTPSLLRLRDWLTELDIELVAMESTGVYWKPLFLVLEDQFRCWLLNPRDVKRVPGNKTDVKDAEWIARMAQLGLVTPSFVPDIPVRELRELTRYRSNVVRDRTRAVQRLQDLLESAGIKLSSTVSDITGKSATAMLHAMINDPAGAMSDPRQVADLALVRMRSKLPELTEALTGHFTDHHARLAATMMRQINDLDTLLTDLDQQIDQEIAPFARAVDHLETIPGVSRRAAMIIVSEIGIDMSRFTGTDRLASWAGLSPGNNESAGRHLSTRTRKGNRSLRAVLFQCAKAAARTHSTYLAAKYADLCTRMKPTKALVAISRIILETCHHLIRKDTDYHDLGPTYLNEYRRRDLDKNRIRRARTILETNGYTVTHNDAA

SEQ ID NO: 300019 - protein, 339 aa, unidentified
MDKMEVCVEACGIEVSAAELVVAWGGEKKEVRVQGFANTAAGHKELLRALTRGGKRVRAVMEATGLYGLDVALMLSAQAGVELMVANPRAVRHFAQAMMQRSKNDRLDAAVLREFAARMPFQRWERPPANTLVLWAIARRLEALTRQRTAEKNRQHAAQVSQAAPAIVRKEIARSLRELERAILRLRREALRCVAAEAQLQQRYELLCSIPGVGSVSAIQVLAELAMLSEDRDVRQWVAFAGLDPREYSSGTSVRKHTRISKVGNRHLRHALYMPALVDSRHEPHLRGFYERLLARGKKKRQALVAVARKLLHAIYGMFRSGQRYDGSRVFVLPTAKIT

SEQ ID NO: 300020 - protein, 355 aa, unidentified
MESLKYVGLDVHRDTISVAVLDGGGKLLMQSILATHAAALLDFVRGLRGTVHLTFEEGTHSAWLHDLLVRRVARVVVCDPRQNALLKAGNKNDKIDARKLAELLRAELLSPVYHGESGTVTLKHLSRGYAALTEDTTRVKGRIKALYRSQAIASAGKKAYGRRHRGQWLAQLTQAGMHRRAELLYEELDGLLLLRREARRELIVESHKHDAVKLLRTVPYLGPIRAALLIARVQTPHRFRTKRQFWAYCGLALETRSSADYRIVEGQLARAKKPVFIRGLNLNHNHDLKNLFKSAATSAGARPGPFHSFYENLLIKGMQPAMARLTLARKIAAIALCVWKEGEPFDAEYLKPQAA

SEQ ID NO: 300021 - protein, 355 aa, unidentified
MVGMVVVGVDAHKRIHTLVAVDQVGRKLAERTVAATSDGHLQAVTWAAQWPQPQVTFALEDCRHLTRRLEADLLRAGHRVLRVPTRLMATARRSGRQPGKSDPIDALAVAQAALREPDLPVAHLDGPTRQVKLLADYRADLVVERTTLCNRLRWHLHELDPELQVPSRGRRRYKVIDELAARLAGVDGTVAQIARELLARCRELTVRINQLEGDLRDLVWVLAPGLLAIPGCGVLSAATILGETAGATRFRSRHAFARFNGTAPIPVWSGNAVRVRLNRGGNRTVNWALHMIAVTQARGVGPGQAYVERLLGAGKTRTEALRLLRRRLSDVVFRVLLADEHRQAATQPADTPIAA

SEQ ID NO: 300022 - protein, 335 aa, unidentified
MELFYYLGIDVSKDTIDVMLRDHKGSLLKGQFKNTKKGMKEMGKQLARCKDFEWNKTLACFEYTGIYVNHLLNFLISKNGNIWFEKPLQIKNSLGMVRGKSDLVDAERIADYAFRYQDRAKLWTPPRPVIEKLKKLSTIRRQFIKMKNQLKKPMEESKIYDDKELYTVEKQMKTSLIKKVEMDIANVDKLIATTMAQDEELSKLASKITSVTGVGKVTAAAIIVTTNEFQDIKEAKKFACYAGIAPYPNSSGSSKKGREKVSHLANKKVKTLLHLCALSAIGSKGELKLYYEKKVEQGKNKMAAINAVRNKIVHRVFAVVRDNRKYEKNYHYSLV

SEQ ID NO: 300023 - protein, 343 aa, unidentified
MMKLTIGLDLGDRYSQLCAVDGDGVVVAEERVATTRTALAARLAGVAPCRVVVEAGTHAGWVSRALEAAGHEVLVANSRKLRWLYGNEHKTDRVDATYLARVGRWDPTLLAPVRVRRAEADGALRLLRARASLVRARTRLINHVRGAVKSVGARLPACDATSFARRVTAQVPVELAGALQPVLAQIAALTATIARYDRTIEEVATTQYPVTARLRQVTGVGALTALAFVLTVDDPTRFPNGRAVGAYFGLCPRRADSGSQRPQLGITKCGDGLVRQLLVQAAHYILGPFGPDCQLRRWGMVLAQRGGKNAKKRAVVAVARKLASLLYSLWVHDTRYEPLPRTA

SEQ ID NO: 300024 - protein, 322 aa, unidentified
MINPITIAPVANTAGIDTAKDKLDVAVPDRAMHFQVANTLPGWRRVTAELAGAGVTRIGIEASGGYERPVVAHLRSAGFTVLLLQPTQVKAYARLHLRRAKNDALDAVLIAGCAATVKPPAIPPDERLEKVAPHLTFVEQTEEDIARLKVRIEHVDDPRLRRMVIADIKRLKARRAAEMAHIAKALRDHEDLARRLDLVLSVPGIGERTALAIIVRMPELGQISREEVAALAGLAPFDADSGDYHGQRHIGGGRGRLRRALFAAALPAAFRWNPQVIVFYRRLIAAGKPHNLALTACARKLLIYANTVVQRGTPWAERSVQT

SEQ ID NO: 300025 - protein, 420 aa, unidentified
MKQWKEITHYAGFDWARDHHAVVIVDSQGQMVADFEFDHSMEGWQSFGEKLAPWPHLAVAIETSQGAAVDQLLQRGYTVYPVNPVASESYRKRKAPSGTKTDHIDGWGLADALRVDGQGWKPLQPLDPLTHSLRLLCNDEVSLIQQRTQLVNQLQQALVEYYPAALQAFDDWTSPCTWDFVIAFPTPEALEKAGKRAWEKFLHTHKLWRPQTVEKRLAIFAQATQFKASAPIVRAKSQLALSLCKLLRTLAQQLAQYREQIETLFKEHPDHALFGSLPGAKKVLAPRLLAAVGADPARYGKHQVLQSFAGTAPVSYQSGQIHKTQMRRACDKFMRHTVHLWADCFRKASAWGQTYYQAKRKQGMSHACALRCLGQRLLKILFRMLLDKKPYDAELHARNQQKHGSWVLKLIEKPVAKPSE

SEQ ID NO: 300026 - protein, 429 aa, unidentified
MNSTQNKKIEQVKETTMIVGIDVGSEKHYFRAFNWRGIELTRKPVPFSNSMEGFNSFYNTVVELMQKNKLEEAMVGIEPTGHYWFDLGQFMGEKDIKFVMVNPHHVHKTKELDDNSPSKNDRKDPRVIAGLVKDGRYFYSYMPTGVYAELRNASNRRFLLVEELTRAKNRLQKWIAVYFPEYKGIYTHIDAKGGLLVLKQASTPEEIVKLGVDGIIKIWKDAKLRGNGHKKAILILNAAMNSIGLKSGLTEAKMEIQDLIEDYELQTKRLERVNGLIKELCQQIEHVDKLLEIKGIGITTVAGFIAEVGDITRFDNTKELQKLAGLELVADSSGKHNGKTKISKRGRKRLRYLLFEAAISVVGKNEEFREIHRYYTTREKNPLKKMQSLIAVACKLIRVFHVILTKGIRYNASKMLGDIKRPGTQLKAA

SEQ ID NO: 300027 - protein, 324 aa, unidentified
MNLPCLGIDIAKVKFNVCLLQLTGKLKHKVFSNTATGFEQLQQWLKKHEGQLVHSCLEATGTYGEALSLYLHHHGHTVSVMNPAAIKAFAASRLSRTKTDRVDAELIARFCLAHQPPAWTPPAAEVRELQALVRRLESLLEMRVAEENRLAAGVTVVAVRSSVEELLTHLKDQITRTEKLIRKHIDKHPGLKQQSELLNSIPGIADTTAALLLAEVPNIKQYRSARQVAAFAGLVPRERQSGSSVKGRVRLSKIGNARLRKALYFPALTALRCSPFFQHWAEGLRQRGKSKMSVIGAVMRKLIHIAYGVLKSGRPFDPELAKSA

SEQ ID NO: 300028 - protein, 370 aa, unidentified
MTIVMGLDQHRAQITAEWLDTETGEITRKRISPAHRDGVRRFCEPFRGQELEVGLEATTGWRFVADELAAVGAVVHLAEPAETAARRGTKKRAKSDRADARHIRELLMIDRLPESWIPPAHLLDLRAQVRLRHTLSHQRGEWQQRIQSVLYHHGCPQRGELLTLAGREWLAMQPLSPAGREQITVALAIIDALDIQLAPMDARLRAFARHQPGCKTLLSQFGVGELTAVTILAELGDARRFSSSRDAVRFAGLDITVHQSDQRRAPGHLSRQGPPALRWALFEASMCAARRCSPDYDYYSQAAERIGSNRARLSVARKILKRSYQCVTNAEGGVGVGDIVHRRCCARDGGLLALRRRPCGGRRQTALELR

SEQ ID NO: 300029 - protein, 339 aa, unidentified
MNTSVIGLDIAKHIFHMATLGADGKMIKKKLKRSELLAFFANYPASTIGIEACGGAHHWARELTKLGHEVVLLNARYVKSFVVGNKNDFNDAVAIYDAVSRPNKRVVAIKTIEQQDIQLIHSLRQELIDKRTALVNQLRGLLNERGIIINQGIKQVRQQLPLILEDAENGLTALSRELFAEQYERLKSLDDEIKAQDQRVNRLCNANELSKRFLDIPGIGPLTATIVAADMGDNGKGYQSSRDYAASLGVVPKQHSSGDKPVYLGISKRGNAYLRTLLIHGARAVLKSCAQKTDKLSLWLQALVARRGFNKAAVALANKNARILWAMATSGKDYQVLAA

SEQ ID NO: 300030 - protein, 317 aa, unidentified
MSSEPVFVGVDVGKDSVEVATCPPSVRCTLSNTPAGRRELVEALRGLPVALVVVEATGGYERAVAADLLEAGQRVVVVNPRQVRDFARGVGALAKTDRMDAAVLARFAQVVRPEARPAPTPEQTDLAELVTRRRQLTALLTQETNRLAMVRHPKVRRSVRTVIRTLEHEIAALDALISRHIQSDDQFRDKDRIVRSTPGVGPQTSAMLLAHLPELGRLNRQQVAALVGVAPWDRQSGQWTGRAHIGGGRKEIRSVLYMATLTAIRCNPVIRSFAQRLQQHGKAFKVVITACMRKLLVTLNTMVRNNTLWHPQLVKNA

SEQ ID NO: 300031 - protein, 362 aa, unidentified
MTSMPQDHLDRYCIIGIDTHKDVHVAVALDQLGRRLEELHIPTSTVGYTQLENWAIALGSVKAFAIEGTGSYGAGLTRFLSDRGHRVVEINRPDRATRHRLGKSDPIDAEMAARSVLCGVASGTPKDSRGNVEMIRMLNMAKDSGVKARTQSINQIKAILITAPAELRESLAGLPVGVLLDRCAAFRPGKLTSTTAVAKHTLRLLARRNFGLRVEIAELGQQIRTLADVAAPQLIKVFGIGPDNAARFLMTAGENPDRLRSEAAFAALCGSNPIPASSGKTNRHRLNRGGDRQANAALHRVVVIRLRWHQPTRAYMSRRLAEGKTKAEVIRCLKRYVAREIYNVLCPRNTDANTQTTLVQAA

SEQ ID NO: 300032 - protein, 330 aa, unidentified
MIVIGADPHKQTHTFAGHERALGFGRGLGPERVFAIEDCRHVSGRLERFLVARGERVVRVAPKLMAGARLSSRERGKSDPIDALAVARAALREGIERLPGAHLDERALEIRLLLDHHDDLVATRSDDQRRLRWHLHDLFGEQDIPAGALDRAKWLDRIEGRLKRSEQGARVRIAREQVRSIRAASKRVRVLEVEIASLVEAYAPQLLAERGCGALTAAKLIGELAGAERFATDAQLARTAGVAPIPASSGRRDRHRLDRGGNRQLNCALHRLAVNKGRWDPESAAYLARKQAEGKSRMEALRCLKRHLARRIHKLMTHNPNAPATTPALT

SEQ ID NO: 300033 - protein, 318 aa, unidentified
MIDVSMVVAGIDIGKGRLDVALHGTAGRMVFDNSAAGHRRMIQWLRAAQVVRVGLESTGSYSQGVTGALRDAGFEVAVLQPLQVRSFAKYRLQRAKSDPLDAALIATCTALLDKVHEAPDARLVPLADHLRLIEQLEEDVVRAKTRLEAAHLPHARRFLRLEIARLERREAAERALLMKSIAAEPDLLARLQLIQSVDGIGERTALSLLLLLPELGRLAREPIVSLAGLAPFVRTSGMWKGQSRIGGGRDRVRRALYAASLAAAFRWNPAIKELYQRLKAAGKPHRKIMVACARKMLIQVNAVVARGTPWISTRNAAA

SEQ ID NO: 300034 - protein, 363 aa, unidentified
MIVIGTDTHKRTHTCGAVFAGTGQLAGELTAPAREPGFRQMLDWGRDLDSERIWAIEDCRHVSGSLERFLIASGERVVRVPPMLMGESRRGERTAGKSDPIDALAIARAALREGPETLPAAHLDEDAMQVKLLLDHREDLVKARSEDQCRLRWHLHDLWPDLEIPTGALDRMVWLERVARKLARAEQGARVRVARELVTEIRRRTRRATELEREIGALVKAQAPALLELEGCGALTAAKLIAETAGAKRLPSDAKFARLAGVAPIPASSGARVRHRLDRGGNRQLNCALHRIAVTQGRCYAPAREFLAKKQAEGKTRIEALRCLKRHLARRVWKLLVNSEREISMTTVDTQRGKLTPQFAVAA

SEQ ID NO: 300035 - protein, 401 aa, unidentified
MNTTTMLYVGIDVSKDKSDICIKGQLGNDLIQRFKIANNKADLDKLYETIESIKSRTPGKSDVVFGMEATGIYSLPLYSALKRDGHKVKLYNPIQTNGFRKMNIRKTKTDPIDSATIADMLRHSEPPQVSDLQDLNLIQLRELVRVRHRLIEKQTLCKVQLVRNIDTIWPGYESIMKRVFGTTSIAILKKYSVPSKVRAKSFEEFYEFVKKLSRSKISRQKAEEIYNQAGNILTIPELDSIITIEIKTLIRQLELYEEQVESVEFKIDQSMNMIDSKIMSIPGIGDTLGPIILGEIGNVDRFSNVKKLIAFAGLDPVVSQSGRFQNISGRISKRGSPLLRQALFLAANVARQNDDNLKRFYDKKKNEGKHHFSALNAVAAKLLRIVYWVLRNNKEYQTQVN

SEQ ID NO: 300036 - protein, 341 aa, unidentified
MSIVGAFDVHRRQLTFEYLDTGTGELNRGRVVPADREHLRQWLARFGGQDDVHFALEGCTGWRYVVEELAAAGIMPHLAEPADTAALRGRKRHAKTDKTDSRHLRSHLLAGDLPESWIPPGHVLEARAVVRLYKDLLDERGAWHQRIAATLFHQGVPVSASMATPAGRAAVAQMDLSAAGWQSVETGLRQVDRLTGELEPLRRQLQMISRRQPGCRALRATQFGVGAVTSVAIWAELGDVRRFGKSDDVIRHTGLDITVYSSDGKRSAGHLSRQGPQLLRWALYEAAKCAAKPASPDHGYYTATRDRRTGGLATLSVARKLARRCYHTLRELGEEAMAPAA

SEQ ID NO: 300037 - protein, 410 aa, unidentified
MEVMFDRVAGLDVGKESVTVCVRTPGSRRGRRSETRTFKTMTGSLRVMRDWLVESGVTIAAMESTSAYWKPPFYCLEEVMEVWLLNAAHMKAVPGRKSDVRDAEWIAQLLEHGLLAPSFVPPPEIRRLRMLTRYRVQLMADRAREIVRLELMLEDASIKLSSVASSLKTVSARAILTAMIEGESDPLRLADMAKGRMRRKIPDLAQALTGHFDANHARLARSMLRRLDLVEQAIVELDAVIVEACRPWQHQIELLQTIPGVGPKVAETIVAETGADMTRFPTAAHLAAWAGVAPAMHESAGRQTPAGKRHGNKWLTAMLVEAAGSVGRMHGKNYLAVQHARLTKRRGMGRAQVAVAHSILVAAYWMLKRDEPYHDLGADWHSRRNDEAHTRRLIAQLEHLGHTVIIDPAA

SEQ ID NO: 300038 - protein, 433 aa, unidentified
MICAAVERCAGIDVGKERLSVCVMVGPLEGEPQVSRRQFLTMHADLERLRGWLMQQQVTHVVMESTGSYWKPVYNVLEGSVKVYLANPQEVKNRRGHKTDDKDGWWLAHLLRHAMIHPSFIPPRPIRELRDLTRRRKRLLGNATSEKNRVQKVLEDANVKLGNVLSDVFGVSGQLMLEALLKGKAKPAEVAALAKRRAKRKIPEIIAALEGHQMSDHHRRMIRYSMAHLRFLEEQLEELDHDIAVQIESAGLEKAWEMLRSLPGVEQTSAATILAETGSDMSQFGSEKQFSSWAGVCPGNNTSAGKSKSSHTTRGNPWLRGALTECAWAAASKKGCFLKEKFWRIAARHGGKKPPAVVAVAHTLLILVYQVLRTGQPYQERGAPAITDAQRERIIRHHIRRLGQLGVAARSYRPRGRAAAATSCCQKAKRGKA

SEQ ID NO: 300039 - protein, 341 aa, unidentified
MMIIGCDFHPRFQQIAFVDQETGEYGERRLNHPEEAERFYRSLAGRQVRIGAEATGNFRWFGHLMQELGHEFLLGDATTIRAACPRRQKTDKRDARHILSMLVEDRFPVIWQPSVENDHLRQLLHHRCRLVRMRTRIKNQLDSMAKNEGLLSSRVWSPKRRSQIEALLLPGWYAHRRADLLGLLDELDKRIRPLDEAVREAAEDNQEARLLMTHPGVGPIVSLAYVLTIGDWRRFPRGKQVGSYLGLIPEEESSGSSRRLGQVSKQGSVLVRWLLVEAAVHAQRHDASWHRQYVRLSMTKHHGVAKVAIAHKLAVRLYWMLRSGEDYSKVMERGSHVGQSV

SEQ ID NO: 300040 - protein, 418 aa, unidentified
MTATYSIDSTVLVAIDISKHRHEVLIGVPGKKRRRRMTIMNTLEDFHRLSAALVGYDLPVRIGFEATGNYHRPLAHHLGQAGFDLKLISSVGLARTREALHNSWDKNDPKDAQVILHMLEIGAVQFFHDPLVVGTADIQELSKTHEIVSRSKTELWHRILTHYLPLYFPEAERFHRSSRTGWFLAFLEKYPTPTMITAMSRDAFIADAWQVVGKKVSKERLLSDIYATAVDSVGLPVEPDSDAVRMFRLVLAEGRSLVRQRNEIEARAVELLSDLPDYQLLTTIPGIGPINAMTILAEAGDLRRFRHHRQFLKFCGMDLATVQSGMFRGQSRISKYGNARLRRTLWMAGQTAVLKRTNSFRDKFERYISKDRHNAHLRRKAYTAIAAKMARTVHAVVNHGEPYRPFFEGVSPGGRTSL

SEQ ID NO: 300041 - protein, 357 aa, unidentified
METQNTKTDFSNQTILTGIDVHKKQWKVTLRGCRMELKTFSMNASAEELYKYLRRNYPGAKYKSVYEAGFSGFGIHRELRQLGVENIVVNPGDIPIRNKEREYKTDKIDSRKLARELENGTIISIYIPNEQQEELRSLSRLRQQLVKDQTRIKNRIKGLLLYYGKKIPDNCEILHWSGNFIKYLEGIEFHTETGKQCLGTYIADLRDKREKISQTLKKLRQAIKYTCHQKTIENLCTIPGISFITAITLYAELMDIKRFNNMDRLCSYVGLTPSVSSTADHTVVRGLTDRHNRYLRNLLIESAWTAARTDPALTEKFGKLLVRMSKQKAIIRIAKKLLCRMKFVWQNEKPYQFNKKD

SEQ ID NO: 300042 - protein, 477 aa, unidentified
MAKTNSTQKQSTPKSSSNFKSSRHRKSKNRAPLKPQDWTLGLEVVHPKAAGIDVGNTEHWVAVPPHMDPEPVRVFGCYTRDLIAMADWLQSLGIQTVAMQSTGVYWIPLADILAERGIRVFVVNARDTKNLPGRKSDFQECQWLLKLHVYGLLHNSFRPEEEILRMRTYWRQRQQHVEDAARCMQRMQKALTQMNVQLANAISDISGATGQAILGAILEGERDVRVLAELRDPGIQASEEEVMQSLEGNWREELLFILRQEFETYHTFQKKIGECDQQLQAHYQSMESKADPKKLPPCRREKRPHGNVPKCFDLRSELFRTTGVDLTAIDGINVLTAQTVISEVGYHMGRFDTEAQFVSFLNLAPNNKISGGKVVGREKRKKRSRAGLALQQSATSLLRSDSYLGAQYRRLRTKLGTPKAKKAMANRLARITYRMLKYGEAYVDKGKEFYEQRYRQIQLRMLHRKAAELGLQVIEAA

SEQ ID NO: 300043 - protein, 345 aa, unidentified
MKKVMAGIDLHSNNLVIGIMDMDGKRVASQKLSCKLKEVVEFLSPFKKRLEQVAVESTYNWYWLVDGLQTLRYPVVLANPAGMEQYSGIKHADDTNDAFFLAELLRLKILPTGHIYDEQLRPVRDLLRRRMTLVHHRSALMLSFKSLYTRTTGQEMTLSQLKELEIKQAQDLYDHPANQLIAGMQIKHIEQLTESIERIEKAVLDCARELPLYSKLTTLPGVGTILGMTITMEVGDIKRFAEAGHFASYCRTVEAKRTSNSKKKGENNSKCGNKYLAWAFVEAANFARRYDEQCRRWYERKAAKKSKVIATKALACKLAKAAWHLMALGTDYEAKRMFGQPATTQ

SEQ ID NO: 300044 - protein, 346 aa, unidentified
MMIIGCDYHPSWQQVAWVETETGECGERKLVHATGEAKVFYQQLGSPALIGMEATGNSQWFIELVEDLGHAIWIGDAAQIRASYVRKQKTDKRDAAHILKLVVQGRFPRLWMPDREQRDLRQLVLHRHKLVEIRSRVKNELQHLSMNKGMQKKRTLWSQAGQKMLRQLPLKPWAACRREDLLGLLSTLNQQIGVLDAAVQTAAEENPQAKLLMTQPGVGPNTALAYVLTIGEVSRFPRGKQVASYLGLIPREHSSGGRQKLGVITKQGNRMLRSLLVEAAQTAVRLDPGMKKEYLHRCHQKPKGVAKVAAARKLAVRLYWMLRTNLSYPEIVRIESSPRVPLVGAS

SEQ ID NO: 300045 - protein, 394 aa, unidentified
MILVGIDIGKNKHTFSIIDKNSGEILLSPSDFSNNLKGFLFLIQKLSSYTKSELLIGMEDTGHYHFALLKYLLDRRYTVALINPTTTDLTRKLQGGITKNDPFDSLTICDVISSNHRNKPYRVTTLNRFDLYEQKQLTRHHHNLKEELNTYKNRLQKCIDIVFPEFNSLFHSKYGIVYMNILKAFSSAKAIANADIRSIRKCFEFKGQGKRISLSAEQLKLTAKSSIGIPSVAEEIQIRHLVSQIELLEKQLSEIDKRIEEFSLKNNSPILTIPGISHFSGTSIISELGDICNYTKASQIIKFAGVAPYHYESSQFTAQHTAITKKGSKYLRKTLYQIILPVISNNEVFYAYYTKKLNEGKGHRCAQGHCIRKLLRVIYHLLCTRQPFNPKLLV

SEQ ID NO: 300046 - protein, 343 aa, unidentified
MQAVTTIGLDIAKSVFQIHGVDAAGNVIVRRQLKRRYVLPFFQRLPPCLVGIEACASSHHWSRELKALGHTVRLMPPAYVKPYVKRQKNDAADAEAICEAVTRANMRFVETKTPEQQSCLMLHRTRHLFIRQQTAVINAIRAHLAEYGIVAAVGRNGVEELLGVVADPSDKRVPEIARACLAALGAQLRMLKAQILEFDRMITAWHRSNETSKRLDAIPGVGPALATALVASVPDPKAFRSGRNFSAWIGLVPKQHSSGGKDKLGSISKQGDRYLRSLFTAGALAVIRYAKIHGTKHRPWLTALLARRPAKVAAIALANKIARMAWAMMAKGERYKEPVALAA

SEQ ID NO: 300047 - protein, 338 aa, unidentified
MQTYAAVDLHSNNGVLTIIDERDRILKQRRISNKLEQFVAELEPFRATLKGVAIESTFNWYWLVDGLEAQHFPVVLVNTSAIQQYKGLKRSDDQYDAWWLAHMMRLGILPRGHIYPREERAVRDLLRKRATLVQQRTANILSVQNLEARNRGTKISSNEVKHLTRARIAEWYDNEDLALALTTTMEVIDTLSAQTRVLERAVLKKARLRNEFKLLLSVWGIGEILGLTIMYEAGQMARFASPGNFASYCRCVDAKRLSNGKKKANNNAKNGNQYLAWAFVEAAHFAVRFYPQAKRYHDRKAAKTNGVVAIKAIAHKLARAVFHVLREQQPFDPNKVFG

SEQ ID NO: 300048 - protein, 428 aa, unidentified
MEVVYERCRGLDVHKRTVVACLLTPGPGGRATAAIRTFSTMTDELLELGDWLTGAGCTHVAMESTGVYWQPIWYLLEDRFSLLLVNAAHIKAVPGRKTDVRDAEWIADLLRHGLLRGSVVPDQPQRELRDLTRYRAALVAERSAAANRLQKALEGANIKLSSVATDILGRSGRAMLDALVAGDTDVAALARLAKGRMRPKIAELERALTGRFGPHQRFLVARQLAHIDALDALVAELSDEIARRLQAFAPPPEPLDAPGGAVPPAAEEAIARLEMIPGVGRRTAEALVAELGLDLCRFPTAGHLASWAGMCPGNHESVGKRLSGKTRKGNRARRAVLVEAAHAAGHTKQTYLGAQFRRLAARRGKKRAAVAVGHSILVIAYHLLTEGTVYQDLGAQYFDERARQEVERRLVRRLEALGYTVALETVAA

SEQ ID NO: 300049 - protein, 387 aa, unidentified
MQRNDLSRSLVAFDQNSTLVSVVELSLKSWLVAGLVPGLARSPLKKQGADPDALLALLHRWRAEAIKAGCKIDRMVVAFEAGRDGFWLARWLRARGIEAYVIHPTSIPVSREHRRAKSDRLDTALLMRAVLGWLRGEVKHCSMVAIPTLAEEDARRPNREHETLVKERGRIVNRMKATMVRFGIRNFNIKLRKALEKLQGLRTPEGVPLPANTLDELRRDMARLRLIHEQTKEIEKARLARLKKAPQDGAHPMLLMLAKVLGIGVETADMLVHEVLSRELRDDKAVGRYGGMTGAPDESGSKRREKGLARGGNARVRRGMIQLAWRWLMFQKDSALAKWFRARTAGAGRDVRKTMIVALARKLLIALWRYVTTGEVPAGAKLRPAAI

SEQ ID NO: 300050 - protein, 318 aa, unidentified
MQISGCFIGVDVGKFELQVAGHEKSIVSGVLPNNRSSIVGWLKRLPAGSVIGMEATGSYQELLARLAHERGFVVYVLNPTHVHHYAISLGNRGKTDRLDAEVIAQYIAQRHTKLHPYEPIPPELQQVRALQALRSTVVRVSTSLRLSAQRHGCASVHQKKALAGLSSWAEQLERELIAKIEAQSEWAKIYGLLTGICGIGPINGVALTALFTRVHFTSSDAVVAFCGLDPRPKESGRKVGRRRLSKQGDKAARSLLYNAASSAVRTPHFKDYYAALRARGLASTAALVVIARKLLRIAYGVWRTGRAFDPDRLNLKTA

SEQ ID NO: 300051 - protein, 323 aa, unidentified
MFYLGVDVSKKKLDCMLLDDTNGKLKSKSLSNTKAGFEELIGWLAENKAPDAHVVMEPTGVYHEPAALALTDAGLTLSLVNPAQLRQFAQGLGVKNKTDKADSTVLARYGSAVKPEAWQAPSKSARHLKALLARRDAVADDLQREQNRQEAVEFAVSPGEVKKSIIQSISFLQAELKRLEKAIKEHIDSDPDLRSKKDLLETIPGVGKQVSNNLTALFAAKTFDSAEQLAGYLGLVPVHGESGTSVHKRPHLSKAGPAHLRKLLYMPALVARQWNPHIKAFSERLLAKGKTKMAVIGACMRKLAHLCFGVVHTGRPYDPNYAI

SEQ ID NO: 300052 - protein, 266 aa, unidentified
MKRDKYMGMDVHQATTVVAVIDAEGKIVLETIVATAAAPIRRLIESISGAVHITLEETTQAEWLYELLQGFVAEVVVCDPRRNRLLSEGSKGDKADARKLAELLRTGMVRSVWHGRQTTRGLKEMVRSYETFVADTRRTMLRIKALYRSRGIATTGTGVYQVKQREHWLKQLTEVGMQQRAAWLYQQLDHVRELRKQAKAAVLAEGQRHRAVELLRTIPQVGPVRAAQIVATAGTPHRFRTKRQFWSYSGLAVVTHTSAEYELRAG

SEQ ID NO: 300053 - protein, 327 aa, unidentified
MEQRVLGIDVAKETLDIALSDGVHLNHGQFTNNQKGHEQLEQWLRKQTDSRVHVCLEATGQYGDGVAEYLFAQGYPVSVVNPARIKHYGNSKLRRNKTDKADAQLIAEYCLREKPAIWTPPPARFKDLQALVRHLEDLQAAKLQESNRLQSGVQTSFVVDSLTSLCDFLDEQINQTKKAIQDHIKQDEELKHMQALLVTIPGIGKLTAAKLLGEIRNILDFQSARQLAAYAGLTPRNFLSGISVHKKSRLSKTGNANLRKSLYMPAIVAIKYNPIILSFCARLSESGLKPMEVIGAAMRKLLHLVYGILKTGRPFDPKYINPTQAFS

SEQ ID NO: 300054 - protein, 416 aa, unidentified
MSKPKKQMIVNTESLIIGMDIGKYHHMVVALRPDGIFKKPVKITNDLKGYRELLGLIAAWKNECTTEKVMVGMESTGHYWEIPARWLIGQGITVVQVNAAHTKRAKELEDNTPGKTDQKDARIIAGLIRYGKYFSCMLPEGVYAELRELTKIRQRLIGELTEKRNYLRRLLDTVFPEIFILFKKSDSKTLLHLLTEYPLPDDVMSAGARKIKTTLQQKYKNLVTKRFDTLWCLARDTVGVSVGHLSYRVAIRTTVERILSLKDSLTKIEGDLAALLSRIPEAPYILSLKGLGTVSAAIIIGETGGLSRYTHAEELLKLAGLNLYEISSGTHKGKVRISKRGRPLLRQGLFLLATVMVKKGMPFHEEYSRLRNRGMETIKALTAISRKVCRLVFALARDKRFFSQEAPQRMQQKKAA

SEQ ID NO: 300055 - protein, 419 aa, unidentified
MDVVVERCAGLDVHKDTVVACVRVPAPGGGRRSETRTFGAFTVDLLALRDWLLAHGVTLVGMESTGVYWRPVFYVLEDVVECWLLNAAHMRNVPGRKTDVADAAWITQLIEHGLVRPSFVPPPPIRELRALTRYRKTQIEERTRETQRLDKVLQDAGVKLSSVASDILGKSGRDMLDALVTGTRDPDVLAELARGRLRAKIPMLGQALTGRFGPTHALVVGEILAHIDYLEEAIGRVSARIEEVIAPFTAERDLLTTIPGVDQRLAEALIAEIGVDMTRFGSASRLASWAGMCPGQHESAGKSRSGRARHGDSWLQRHLAVAAMAAGRSKDTYLAAQYARLVGRRGKARARKAVGHSILVAAFHMLAGGVPYEDLGGDYYLKRNSPERRARKSLSDLKAIGWTVTENPDSVTCRPPRAA

SEQ ID NO: 300056 - protein, 370 aa, unidentified
MGKSALYVGLDVHKMSVDVAVAEPGPGAEVRFYGRIGGDLEALDKVTRKLQAKGAELRFAYEAGPCGYQVYRHLTAQGHSCLVAAPALIPRRPGDRLKNDRRDALALARLLRAGELTPVKVPDADDEAMRDLTRAREDAICVERRARQRTVAFLLRHGRVYPGKTTWGRGHWAWLLQQVMDHPAQQIVLQEYLDAVREASARVLRLTGQIRDLVPQWHQAPFVAAYQALRGVSFIVAATVVAEVGDLDRFNNPKELMAYLGLVPSEHSSGASVRRGRITKTGNSHARRVLVEAAWAYRLQARVSRTLLKRQEGLPERVRQLAWKAQLRLCTRYRRLLARGKARQTIVIALARELAAFLWAIGRAVAPATA

SEQ ID NO: 300057 - protein, 317 aa, unidentified
MQTTPFIGVDVSKQSLSIAIHNQSSAPQTIANNKSAIKNFLSTLPPQSLIAVEATNIFHRLLIELAFQSHFTVYVLNPHDVHYYCRAVGQRAKTDRVDAQLIARYLAKEHQELHPWVPPSSVQEAIFTLIARRATVTKSKQALQQSLRDVPLTKNILYALNQQLTKTLIAIDKAIVAQLKQDVQLVDTANKLRDIPGIGPLISAALATLLQRYPFANADAVTCYVGLDPRAKDSGQKRGQRKLTKRGPSEMRRLLYIAAMTAARHPQIKPIYERQLAKGLSCIAAYNVLARKLLRAAWSLIKHDQAFDLNRFANQLT

SEQ ID NO: 300058 - protein, 404 aa, unidentified
MPAICGIDWADEWHDICIADLETGELLVEQRFAHDEAGVTALLGTLTEHDVCRATIERPNGLLVGRLLAAGIAVVAIHPNQVKAARDRFRAAGGKSDRFDAFVLCELARTDSHRFAVLCPQSDETVALQALCRTREDLVQARVALGNQLRAQLDAFWPGAARIFAEVDSQIALRFIERYPTPAEARGLGPKRLARFLARHGYCGRRSPEALIERLRAAPVAVCGDAEQEARRQTVLALVSCLEPVVARIAELTSEIKGALHAHPDGQIFLAFFRDPKSSLTAAGLLGEIGDNRARYPSAAALAADAGHAPVAVESGKQRAAAFRWACDKRLRTHVCVLADATRHWHPWARDVYVRARARGQDHPHAIRTLGRAWCRVLWRCWQDGVPYDAGRHGNLNRLVAAEG

SEQ ID NO: 300059 - protein, 486 aa, unidentified
MSLKRDASSGKNQAVRYTKNLEVVNPHCAGLDIHKKKIWVCTSPFRDGVAPEVRTFATDTGSLEKLAAHLQEKKITTVALESTGNYWLPAFLTLRRAKLNPILVNPRDVKNIKGRPKSDRADCVWICRLHSYGFLRASFVPPDEVLDLRSLYYAHEKLTVDSAGLIQRMNDELVKMNIRIDLILTDLSGASGIRLIEAILQGERSPERLYQLLDRRITKKGRDAILPHLHGHYREGNLSILRIWHRLYLEVREEISRINQHIYDLLQRLPKKADAKDLPRAQKGYREDHLDFPYKLRPIFFEIYGVDLTQLPGIGAGTLLAMVCMVGADLSPWPSAKHFVSWLGLAPINQESAGYRKSGSTQRINHLLGNAFKIAAMAAKRSTTYIGRAARRLSARILPKKARVATARKLAELVYNILQNGMELKVKTEEEYEQRRKQRDIRSFVKGLFKYIVNGELIPEVEEVYQEHLQHLQSLQGTEAASLTNA

SEQ ID NO: 300060 - protein, 323 aa, unidentified
MEEGRIRSTVAALEKQFANEPRMRIALETGTHSPWVSRLLECHGHQVIVANARKIPVITASESKNDRNDAEQLARMAAFDPKLLHPVEHRSLERQQDLNLVHTRSVLVRARTMLINSVRGLVKSGGGRLPACSSAAFPGKAREVIPEVLKMACEPLLEQIAQMNRGIGEMDRQVEGLDKKYPEISILRTAPGVGPVVAACYVLTLDRAEAMETNRQAGAYFGLRPRQQQSGDSNPQRGIAKTGNNYLRSLLVQSAQYILGRFGPDSELRRWGLKLATGGGKRGKKRAIVAVARKLAVLLLSMWRNRRKFEPFPQAAAGLTVAA

SEQ ID NO: 300061 - protein, 411 aa, unidentified
MQVIHERCAALDVHKKTVVTTILKTQADGSVQEWTRTFLTMTADLLALDDWLRSHGIEIIAMESTGVFWRPVFNLLEEGRQVILVNAQHMKAVPGRKTDVKDSQWLADLLRHGLLKASFIPPKPVRELRDLMRYRKTIVQERADEVNRLQKVLETANIKLASVATDVLGKSGRSMLDALLDGQDDPEMLAELARGRLRAKLADLRKALDGRVQPHHRLLLTRILAHIDFLEESLAQLQAEMEQYLDPFEEAMELVQSVVGIDETAAASILAEIGTDMTRFASEKHIASWAGVCPGNKQSGGKRLSGKTTKGNPYLRAILCEVAWAIAHTKDNYLSAFYHRVARRHGKPKAIMALSHKVLVIIYHILRTKKPYADLGADYFDQRDRGRIERHHIHRLEQLGYTVTLMPKEAA

SEQ ID NO: 300062 - protein, 327 aa, unidentified
MMFIGIDISKEKIDLSWLRDQLTNKIKTKVFKNKHRDFLEIEKWLLNTTKSAASELVITLEPTGVYHEALMYFLHEQGFNIILANPGKAKKYADALNIIHKTDKSDATMLAHYGCAKHAVVDYWQPEALEVRELKALIRRLDALESNRQREANRLEASEFSNVSARVCQSIKVTIAFLDDEIKQLKSDIDDHIDNEPGLKRNRKLLESIPGIGHVLSRELTYLFAAKKFNKAKEAAAYCGLIPRHNESGKLKGRTTISKLGPARIRCKLYMAAIVAGQWNKRIKRHKLTLINNGKTPMQAVCANMRKLIHICFGVIKNQEEFKLQES

SEQ ID NO: 300063 - protein, 453 aa, unidentified
MIKTDAGDKPGLKMVNPGAAAVDIGSTMHMAAVNPDSDDMPVLAFGTFTQDLHELAEWFQSCGVTSIAMESTGVYWIPAFEILEQHGFEVILVNARYAKNVPGRKTDVNDAGWLRQLHSYGLLRGSFRPTAEIATLRAYLRQRERLVEYAAAHIQHMQKALMEMNLQLHHVVSDITGATGMRIIRAIAAGERDPDALASLRDVRCHSSIETIRASLVGNDRDEHVFALTQSLELYDFYQEKMLECDRKLEAAISDLTVRAEHELPSLPKARTKTKQVNAPSFDVRAALYGVLGVDLTQIHGLGPSLALKLIGECGSDLQPWPSAKHFTSWLCLAPGNKVSGGKLLSSRTRRSSSRAAALLRLAAVTIGRSDTALGAFYRRLAARIGKQKAVTATARKIAVLFYNTLRFGMIYRDPGATAYDARHRGRVLANLQRRAKSLGYSLAPTPAAGCVS

SEQ ID NO: 300064 - protein, 359 aa, unidentified
MTIVAHLYRFIVGVDTHARNHVLSILECATGAEIVCQTFANTSQGHVRAQAWITKHTRADLREVLVSMEGTASYGTRFRVALEQAGYRVVEAPRLLVRGRKKLAKNDVIDAFQIAARTLGKDETELTIPKQGDYREALRILVAARKQLTRATTVNINSLTALTRCTDLGIDARRALSVKQVHQIAALEEQPGDAIDVLVAKQEAKRLAKTIIDARTQLAENQNQLAMIVQLVTPALLEMPGVGPVTAAQMIISYSHVGRIKSEAAFAALAGTSPIPASSGNKVRYRLNRGGDRALNNALHTVALVRLRNDDQTRAYMKKRLAEGKTKRETIRLIKRYLARKIYRLLTKELTRTQVTLAA

SEQ ID NO: 300065 - protein, 343 aa, unidentified
MKLTRVGVDLAKQVFQVHGVDRAERPAWCKRLKRARWIADLERDVEPGVEIGMEACGSAHHWARLLQSKGYRVKLIAPQFVKPYVKTNKTDANDAEAICEAMSRPSMRFVAVKTVEQQDLQAVHRVRSSLIRERTAKANQLRGLVYEYGLVAPREISSLRRAVPQWLEDAENGLTVRFRSLLAGLYGDLKQLDERVRELDKEVAAITREHEPVRRLMQINGVGPLIASALYALVGDARQYRNGRDLAVALGLTPRQHSSGGKERLLGISKRGDKYVRTLLIHGARSALRTAPGRTDRISRWALALAERSHPNVAVTALANKTARVAWAMLRHGANYEPERVAA

SEQ ID NO: 300066 - protein, 344 aa, unidentified
MEQISRIGMDTSKHVFQLHGVNAAEAPVLRKKLRRKEMVAFFEKRAPTVIAIEACGASHHLARRLQSFGHTVKLIAPQLVKPYVKRGKNDAADAEALCEAMSRPTMRFVPVKTAEQQAALMLVGVRDRLIRNRTQLSNAIRGHAAEFGLTAAKGMAHLVPLLDHIKADENLPALARELFAMQAEEYARLQAQIDEVDAKLTAWHRADECSRRLAKIPSIGPIGAVLLRMKTPDPTQFQSGRQFAAWIGLTPKDHSTAGKVRLGVITRAGDEGLRSVLVVGATAVIKQVLRGGKTSAWLVELLKRKSPKLAAVALANKTARIAWKMMLTGEPYTAKSAAALAGAR

SEQ ID NO: 300067 - protein, 384 aa, unidentified
MQKPNDLNQSRIVLKQDSTLIAVIEMSLRSWLVAGIVPGVERQPLKKLAVDESALLKLLNRWREEAEKAGRRIERITVAFEAGRDGFWLARWLRARGIEAHVIHASSVAVSREHRRAKTDRLDTELLKRAFLGWLRGERDHCKMVAIPTTKDEDAKRPNRERQSLVGEQTRIVNRMKAALIRLGIRGFNPKLKKAAGRLEDLRTPEGEPIPPNTLAELHRDMERRRLVSDQIRQIEKARLERMEQAPGDGPHAMVRLIARVIGVGIETADMLVHEVLSRKLRDRRAVARYAGLTGAPDESGSKRREKGLAKAGNARVRGGMIQLAWRFLLFQKDSALAQWYRTRTEGGRNRKTIIVALARKLLIALWRLVTTGEVPAGVVLRAA

SEQ ID NO: 300068 - protein, 386 aa, unidentified
MDRTVNNLPAATHGEPVRCLFAIELSTKSWVIAFNTPLSEKISRRTLTGCKWKRLLELIEQVRARVSRETGRTVEVVSCYEAGYDGFWLHRQLEAHGVRNYVIDPASLQVDRRARRAKTDRIDTERLLRSLMAYLRGEPKVWSVVRVPSVAEEDARRLHRERDRLVSERVQHVNRIKGLCALHGIYDYNPLRPQARARLEQLRTTQGGALPPRLNSEIKRELQRLQLVVEMIATLEAERDAIVDDEASTHVNAKKIQNLHKLKAIGPEFAAVLVGEIFHRDFNNRRQLASYVGYAPSPFQSGNVAHDQGISKAGNRKGRTTGIELAWLWLRYQPDSELSAWFRARVGTTKGRIRRIAIVALARKLLVALWRYLETGLVPRGAVLKG

SEQ ID NO: 300069 - protein, 354 aa, unidentified
MKRTTKYVAFDVHQATTVASVREESGRVIARSVLPTDRGALTEFVRGMRGARHVTFEEGTQAQWLYELLAPLVDRVIVCDRRGAPRQGNKGDQVDADQLSELLRRGALRAVYHGSADRATLKELTRTYRNLVEDATRVMLRLKALFRARGIATAGTAVYHPRHRARWLAQLLEDGARFRADALYAELDILRTLRPKAKAVMVTEARRDPAWRVLRTIPFLGPVRVALLLATMQTPWRFRTKRHLWAYAGLAVVSRSSADYTLVAGAPVRRRRAPMTRGLNRNHNRVLKDVFKGAATAATARPGPLQDFYHGVMARGTREELARLTLTRKLAALTLRLWKKGERYDPTKLTTPAR

SEQ ID NO: 300070 - protein, 396 aa, unidentified
MWTLGIDVGKRRHHATLLDEDGKVVFRNVVFAQSREGVDGLLERLAATGRSPQGIQIGMEATGHYWMVLFQELTEAGYSVAVMNPLVTAARRNVTIRGTKTDAVDPALIAKVLREESPKVSAIPERDVAALRNLTRLRFECAQAATAEKLRLGALLDLVFPEYAEHFSDLFGAASREVLAQFPSAEHLAKVDIRRLTRILRQASRGQLGRDHARQLKAAAKKSFAFTSNTETLALEVRFVVERINLLIDQIDQLDRRIGTFLPDQQALLQSIAGLGPVWAPTILAEVLPVFHPDEKHGAKKFVAAAGLDVRLSDSGESSGKGKMSKRGSKYLRTAAIQAAEVAVFLAGDPLFKAVYDRHKERGKHHMVALSHVANKMLHVVFAVLKNRKPYTPILN

SEQ ID NO: 300071 - protein, 355 aa, unidentified
MSSVAHLEAARITVGVDTHRDEHVAVALDALGKKVATTSTPTTPRGYRDLLAWAEGLGAVEAWGVEGTGSYGAGLARHLLSAQHLVHEVIRPNRSLRRRKGKSDPVDAEAAARAVQAGVAAGVPKSGDGAVEMIRILRVERSSAVKQRTQSINNMRGLIVTAPAELREALRALSTPRLVAACCMLRPGELATPTAAVKFALRGLARRLRDLTEEIKVLDAELASLTLKASPRLTSLFGVGAEVAGQLLATAGDNPDRLHSEAGFAALCGVSPVEASSGQTQRHRLNRGGDRQANAALHRIVIVRLRHDEQTQRYMAKRTAEGKSKKEVIRCLKRYVANEVYAALMFPPAEPQEAV

SEQ ID NO: 300072 - protein, 427 aa, unidentified
MNCNTQNEKIEMLTDEWLIVGIDVGSEKHFARMFNNRKVELSRKALGFENDEKGFTQLEGWISNQLRTSGKKFIMCAMEPTGHYWYNLAAYLQAHGMVVVHVSPSHVKKSKELDDNNPNKNDRKDPKTIAGLVTEGRYMIPYMPNGIYASIRELNNMRMRATESLVVVKNRLARWFSIYFPEFTAVFGDLKAKSSRLLLAEAPLPEDVINLGAEGVNRIFRNAKLRSVGMKKALQIVEAAEHSIGRKENPWAAREEISELLEDLDRYLAREEKLMARLHEEVMKVPNVERILEIKGIGIRTVSGFIAEVGDISRFEDAKSIQKLSGYAIVANESGKHNGQSSISYRGRKILRYFLFQAAISVIGKNPEFAVIHEYYTTRKKNPLKKMQSVVAVACKLIRVFYTILTKGIRYDGQKMLNDIVRPEAIA

SEQ ID NO: 300073 - protein, 438 aa, unidentified
MSNKVFFNLDDLFISVGIDVGADFSWMSIALPNQQFVGKPYKILHNSIDSLTTAVSKIKEAEELYSLESRIFLESTGIYHYPLFCYLRDKGFNCSVINPIITKNSTNINIRKVHNDRFDSKKAALVGLKPDLKVSLMPSDLALNCRNLCREYYDLIDNRSAYVNKLQGELRMVFPQYLGIFSKVTINTSLTLLETYTSPSAFLKADKQEIIDIIKSTARFGLTYAQNKYNAIIQAATDANQFGYIIDSNIKRIRLYISFIRKYDEEINNILESLHELVDANEDADFVKQIHLIETFKGAGFLSAVSIMGEIGDFSAFSKPKQLFAYFGLDPAVKQSGKFEGTKVQMSKRGSAIARRVIHTLTLQSISISRNGEAKNPVLREYYLKKCDSKPKLVAMGAVSHKVCNMIFAILRDNKPFKIIAPQEHIKQYNAAKCDIAA

SEQ ID NO: 300074 - protein, 341 aa, unidentified
MKHEMNVLGIDIAKRVFHAVGMDDRGNVVYRKRLSRHDLMPFIAKLPPVRIGIEACGGAHYWARRFRAYGHEVKLMAPQFVKPYVKSNKNDSRDAEAIAEAVTRPTMRFVPIKDVAQQDIQALHRVRERLRGERTALVNAVHGLLHEYGIVIPKGVAKFRQAVVGTLESEKDKLTSLSQEMFWRLVDEFAGLEKQLAYYQEKLEALATTHPECQRLMTIPGIGPLSATALVAAVSDASAFKNGRQFAAWLGLVPRQHSTGGKERLLGMSKRGDSYLRKLLIHGARATLRWVGRQTDRRSQWIQQLSERRGTNRTAVAVANKNARIVWALLTSHQAYEPAKG

SEQ ID NO: 300075 - protein, 371 aa, unidentified
MGNHSEAFVAFDTSKLRNAVAIAEAGRTGEVRFLGEIETSEAATVKLVKKLADKYRRLTFCYEAGPTGYGLHRLIESLGHACMVVAPSLIPKKPGERVKTNRRDAMALVKLLRAGELTAVWVPDERHEAMRDLVRAREAAVDDLKSKRQQVLALLLRLGLHYTGKRTWTRAHWNWLASQKLDHREQRIAFEEMVQAVREAQARIARLDQAIRAAVPDWSLSQAVTALMALRGLDLVSATIFLAEIGDLSRFATARELMGYLGLVPSEHSTGDRIRRSGITKAGNARARRILVECAWSYRHPPRLGKEKLARVAAAPRAVQEIAWKAQARLCARYRALTRKGKRPTVVVTAIARELSGFIWAVNRAVAAPTL

SEQ ID NO: 300076 - protein, 339 aa, unidentified
MVFPNSHLNPVFPGVRFDKTGNHMTLSTAVCVGIDVSKGQLEVAIGQSLVGSFDNTSAGITRLRSRLPREVSLVVIEATGCYSALAARELTAAGYRVAVVQPGRVRQYARSQGLLAKTDGIDARIIAQYGEHSPGLRTYQEPPAVRQRLRALVDRRDQVVEDRVREENRLEACTDDLVRKSLRASVARLRRQAATLERQIKQVIAADHDLTTQADILTSQRGVGSLTAAHLMAHLPELGHVNRQEIAALAGVAPYNRDSGQYRGSRSIFGGRQRVRTAMHMAAITAMRSDHAMTSVYQRLIERGKPVKVAIVAIIRKMLMKLNTLVAAHRQQHAHPIAT

SEQ ID NO: 300077 - protein, 354 aa, unidentified
MELHSIGIDLGKTVFHLVGLNVCGEVVVRKKFSRKQLLHFTANLHVKLIGMEACGGSHFLGRALREQGHEVRLMPAQYVKPYVKTNKSDYIDAEAIAEAVGRPKMRFVPIKTDDQLDLQSLHRVRERWVMRRTAVINQIRGLLLERGITLRQGRRHIDAALPGILEDASAQLSGALRVLLVQLKLELDHLQMRIDEADAMINKTAGENEACRRLVAIPGIGPVTATAIIAAIGNGAAFKKGRGFSAWLGIVPGEYTTGGKQKLLGISKRGNSYLRRLLVQGARAVLQQSAKQSSGLSAWLAQLTTRTHSNVAAVALANKLARMAWAVLAKNEPYRPPMLAGAAEAGTGLQMMPG

SEQ ID NO: 300078 - protein, 403 aa, unidentified
MNSVGIDISKGRSTVAVMRPFGEVVISPFEVRHTDSELSELARQLKSLDGETRVVMEATGNYHTPVAKLLHDAGLYVSVVNAKLVHGYGNNDLRRVKTDKKDSVKLANYGLDRWLALTRYVPEEDTRLLLKNCYRQYRQYSKVQTVLKNNLISLLDTVFPNVNRLFSSPAREDGSEKWVDFVAEFWHCRCVSEKSEKAFANKYQRWCRKYGYNFNEAKAHTIHAEASGHIGVMPMSETTKLLVEQAVAQLRATSTALAALKHEMQALTSMLPEYPVVMDMFGVGPTLGPQLIAEIGDVRRFYSKKTLVAYAGLDAPPNDSGDVTGRHKSMSKIGASSLRRTLFLVMSVYLQTAPLDEPVYQFMDRKRAEGKPYRVYMMASANKFLRIYYATVKAYLESLEHTA

SEQ ID NO: 300079 - protein, 328 aa, unidentified
MTRIICGVDISSTSLEACIGRDGAAASFANNPEGIAELAVFCAAHQVDLVAMEATGGYEKQPFALLSEQGLAVTVLNPRAVRRFAEGMGLLEKTDALDAGVIAWFAEVKRSQPQSLQSASQQQLRALVCRLRQLTALRTAQRNESRLVTDAVVLAWFAELLEVVARQVRELESAIAALISQDPLWHELDQAFRSIKGVADRTVARLMAEMPEIGTLSNKAISKLAGVAPLAHDSGKLQGKRSVRGGRASVREILFVVAGVSGRYEPDFIAFHQRLQAAGKPGKVIRIALAHKLLVRLNAKAREVRQQFNAEPAAQQSAVLTTQRRAVA

SEQ ID NO: 300080 - protein, 485 aa, unidentified
MARRKLSTFERLQRGERLNRKERREVQQRLNLDDPGLDIIHRDAAGIDVGNESHFVSVPPDRDPQPIREFGSWTGALEEMARWLKRCGIGTVVLQSTGVYWIALHDVLQRQGLEVNLVDARGTKNVPGRKSDVQECQWLRKLHTYGLLRPCFLPPPEIQAVRTFWRLRSQHVRDAGRCIQQMQKALIQMNVQLHIALSDLSGVSGQAIIRALLAGERDPKVLAQLRDSRCQASEEEMVQSLQGNWKEDHLFELQQAVDAYDFYHQQMRKCDQQLRRYMAALPTRATVPTAASVSPMPSAKPGKQGRVRKPRKPMGNQPGFDLAAELERILGVNVATIDGIDVMTIQTVLAEVGPDLSAWKTERHWTSWLNLAPKRDISGGRVIRHVRQHHTNRAGNAFRMAAQSLVRSQSYLGARYRYLRAKLGGLKAVKAMARFLACLYYRLLTQGQIWVDRGTEEFDRRSQQRELAALQRKARKHGLQLVPAA

SEQ ID NO: 300081 - protein, 309 aa, unidentified
MKEEVVYCGVDVAKAYLDAAIGKQKRRLPNDAMGHRQLITWIKQIEAQVQVICEPSGGYERGLIRALVGAQIKVSLVQANRVRQFARAAGILAKTDSIDAEVLCAFGEAMRPQILTASKVQQGQLRELESQRRHLSRLLVMEQNRGARLSDSSVRRLNRSLSKQIQKQIERIDLLINEHIAGSQELSAKAHKLTAICGVGPRTAALLLAQMPELGQLNRREVAALVGVAPFNRDSGKLRGKRTIFGGRRHVRHGLYMAALVAARHNPILRAFYRRLRAAGKPAKLALTATMRKLLIVLNSALKPDPIYA

SEQ ID NO: 300082 - protein, 321 aa, unidentified
MKKCYFCGVDVSKNTLDLCFLTNNDNIKPKYEKLPNNKEVLKAYFNSFISDDILVVLEYTNNYHIALQEALSELKIKYSVLNPNKTSHFLKHLTHIKSDLTDSYGLALYCKMFKSYINPSKYNKEYILIKSYNTTSELLSKITTQLKNLKKSQSLTYDKDIEIIVKDLIKHIDSIKEKLNNIAFELLKQYIPQTEQIIKDSKGIGKDLALKLFPQLHFNRFKNAKEFISFIGLSPRIYESGTSVKKTKKINKIGSSTIRKALFMSALSCIRFNDKFKTRYNRLIDSGKNKKVAIVAVMCAIVRFLKSYFKNETNTYKFNTV

SEQ ID NO: 300083 - protein, 323 aa, unidentified
MAMLSFCGIDVSKDRLDVMVLPGQQSFAVRNDAAGWAELIARLRGFAIAAIGLEASGGYERGAMRALLAAGLPACQVNPFKLRQFARASGVLAKNDPLDTRMIASFVAVMPTRPAQPRPPAIERLAEMLAVRRQLNAEKVAVENAARLLEDAMLQRLSRRRIARLAADIDMLDRHLAAIVESDAALAHRYRLLTSMPGVGPVLACTLIALLPELGTMSRKQVAALVGVAPYAFESGKFKGRRCIWGGRAPVRDVLYMAAMSASNWNPVLRAFHHRLKAAGKLPKVAIVAVMRKIITMLNAMVRDDVVWADHLLHGPHSAPTAW

SEQ ID NO: 300084 - protein, 346 aa, unidentified
MMIIGCDYHPSWQQICWMDTATGETGEKKLEHASGEAEKFYRGLPAPALIGMESTGNCQWFVEMAAAVGHDLRIGDAGKIRACEVRAQKHDRRDAALILKLLLEERFPQIWMPSSQDKDLRQLLIHRYKLVRIRAQVKTELQHLAMNQGVTKKRRLWSKAGEKVLRELPLAPWASRRREDLFKVREMLSAQIDLLDQAVVEVAEKNEKARLLMTQPGVGPITSMAFVLTMGDVSRFQRGKQVASYLGLIPREYSSGGHQRFGSISKQGNWFMRMLLVEAAQNAVRYDPGFRNEYLHRCHTKAKGVAKVAAARKLAIRLYWMLRTNTGYPGVVRVESSSRVPLVSAS

SEQ ID NO: 300085 - protein, 305 aa, unidentified
MSHKTAATVAPTIGIDTGKNTLHLIGLDDNGAIVLREKIARGRIAARFANVPRCLIGIEAGMATHYVARELIALGHDVRQVPPAYAKPFRQGHKNDFRDAHAIAEAVQRPSTRCVPVKTDDQLDLQALHRVRSRLVGQRTAVINQIRGFLLEHGIAVRQGLRFLRQQLPDIMAKRSDVLSPRMIRIIGDLSADWRCLDERIEHVTEEIEVLAHGSEGCRQLMTVPGIGPIIASAMVAAIGNGAAFAKGRDFAAWLGLVPKQMSTGDRTSEPSHTTVRTGPYTAVRRIEHGRCFTPCWRVRQWSPS

SEQ ID NO: 300086 - protein, 344 aa, unidentified
MEQYAGIDVSLESACICVVDANGRIVREAKVASEPDALIAWFRGLGVPMSRIGLEAGPLSQWLYAGMREAGLAVELLETRHVRDAFKAMPVKTDRNDARGIAQLMRLGWFRSVHCKSLPAQELRALLTARKLVQEKRHDLEMSLRGILRGFGLKVGHTTPRSFEGRVRELVDGHTTLLAVADALLLARATLGEQLGKLQKRLVSLARDDARARLLMTTPGVGVLVALTYVAAIDDPGRFRSSKAAGAYFGLTPKKYQSGETDVTGRISKIGDASVRTALYEAANVILTRPVKGSSLKSWAMRVARRAGMRKAKVALARKLAVVLHRMLADGTRFAAEKAAAAAA

SEQ ID NO: 300087 - protein, 389 aa, unidentified
MLLVSRAGEVWSVSIVMGVDQHRAQITAEWIDVASGEISRARVRPADRAGVRRFLARFAGQRLEVALEATTGWRFLVEELRAAGAVVHLAEPAETAARRGNKKRAKTDRADARHHRELLLAGRLPESWIPPDHILDLRARVRLRHTLIEQHSEWQQRIQAVLYHHGCPRRRGLMQGDGRDWLGALALPETARQQITVSLELIDALELQIAPLDQQLRRYARRQTGCKALIEVHYGIGELCAVTILSELGDVGRFHNSRDAVRYGGMDITVYQSDRHRSPGHLSRQGPPALRWALYEAAHAARRPGSPDRDYYLQAAERLGGNRACLALARKLLKRCYHTLRELGDDALTPPANDRRESVSSRAARRASSGGSPRSERPETRERADALAA

SEQ ID NO: 300088 - protein, 376 aa, unidentified
MKKYSKFVGLDVHKTEISVGMANAERGDAGYYGTIENKAHCYVKLAKKLSKGGEEVLFCYEAGPCGYDVYRQLRKAGYDCMVVAPSLIPKKAGDRVKTDRRDAVSLARLLRAGELTGIWVPDKEQEAMRDLTRAREDVKAMERQSRQRLGGFLLRHGKVYPGQSKWTKTYFCWLESQRFETATQQIVFQEYIDMVKDAGQRVAAMEEEMRKALNGWTLKPVVEGLMALRGVDLIAAMTIIAELGDITRFESPRQLMAHLGLVPSEHSSGERRKRGGITKTGNGHVRRVLVEASWSYRLPARKTGHLRRKAEKASKAVQEIAWKGQKRLCNRYWYLVNKGKLPVESCTAVARELVGFIWAIACEVMGKGAVGVSMNI

SEQ ID NO: 300089 - protein, 392 aa, unidentified
MGKQAKVTQIGLDVHRKFSIAAARDASHKIVWRERLEHVDRNGLRKRLSQWPAGTPVVLEGTFGWGWMSDELKAAGVDPHLSSSGKVAGWRQARGLAKSNKIDADLLSELWDQKPELRHGELVRWWEVWLAPQEVRDQRELLRHRMSLVKVQTETKNRIHALLHRHGIVSEFADLFGVAGRRFLSLLMNDQERLRPTARMTLKDQLILLDALRRLIAQATRQFREQLKPSVNGQRLMSLPGVSTVLAYTIIAEIGRIERFRKSRSLTRYSLLAPQADDSGDEREGKPIGRKIGHAGRHVLQWAWIEAARGAVRKDASFRAIFNRRTDNGKKDRNRGYITVANVMCKVAHAMLSKQTDYQEVAPTRPGSKMNHTDFSHPGTGQPCRAMATCES

SEQ ID NO: 300090 - protein, 414 aa, unidentified
MDILHERCAGLDISKRDAKVCVRSPNPRRRATFTTETTTWASTTNAVLDLREHLIAAQVTLVVIEATSDYWKPFFYLLSEGLNVILVNARQAKNLPGRKTDVSDAAWLAQLGAYGLLRASFVPPEPVRELRDLTRARTHATRERGKVVQRLEKLLEDSGIKLSAVASDIMGVSGRAMLEALIAGQRDPEQLADLAKRRMRSRIPELTEAMEGRFREHHAFLARLYLDQYDQLTIMLGKLSGRIEEAMAPFRPVLDLLDTIPGISRAVAEVIVAETGGDMTRFPTAKHLASWAGVCPGHHESAGRSKNTKVRPGNPYLKGALGIAAMGAARTNDSYLQARYRRLTARRGVMKALVAVEHSIITAIWHMLTTNSPYHDLGGSYFTQRDPERATRRAITQLNQLGYSVTLNPLGNST

SEQ ID NO: 300091 - protein, 338 aa, unidentified
MNIVFLGIDLAKNVFQLCGLNQAGKPVYTKRTGRKELLQTLANIPACLIGIEASTGAFYWQREFEKLGHKVKVISPQYVKPFVRGQKNDGNDAQAIAVALMQPTMQFVLPKSPEQQDIQALHRARQRIVNHRTATVCQIRGLLLDRGIPIGSAVSRARRAIPLILEDAENGLTSRMRRTIAELYDLFNDLERRIHFFDKEIETVFRQSEACQRIAKVKGIGPKTATAVVAAIGKGTEFKNGRHFAAWLGLVPRQHSSGDRQVLMNMTKKGDKHLRTLFIHGARAVVRVATNNNDGHMNQWVNQLKERRGFNKTTVAVANKNARIIWSMLRNETEYQVV

SEQ ID NO: 300092 - protein, 421 aa, unidentified
MRTHRDDDFTVFVGLDWADAKHDVCLQSADSDAYEFGTFAHQPDAIDAWALALHQRFGGRIAIALELTKGPVVYALQKYDFIVLFPIDASLLATYRKAFKPSRAKDDPTDAQLALELMRRYPRRFTPLKPQSVAMRTLSFLVEQRRLLVDDKKRLINRLSHTLKKYYPQLLDWFEQHDTVVFLDFLLRWPTLKQAQRARKATLEAFFRGHNVRFATVIADRVQAIHAAMPLTGDPAVITTHQLLAEALVEQLQVTLRAIDRFDQAIAVLAPTLPDYALFEALPGSGPILTPRLLTAFGDQRECFATAEQLQQYSGVAPVTERSGKKSWVHWRWQCPTFVRQTFVEWAAQTINKSFWAGAFYRQQRAKGSPHQVAVRALAFKWIRILHRCWLSHTPYDESRYLRALQRRGSPLLAGLASSDS

SEQ ID NO: 300093 - protein, 392 aa, unidentified
MRVTQRPSGEVKQEIRTFATTTPELLALRAWLSDQRVTHVAMEATGVYWKPIYYMLEDGFELLLVNPAHFKQVPGRKTDVADCAWLAQLLEHGLLRSSFVPPAPIRELRDLTRYRKRLTEERTRAANRLHKVLQDAGIKLSSVATDMLGVSGRSMLMALVAGTTDPALLADLARGQLRKKLPELRRALTGRFGSHHRFMVSRLLADLDYVEEASADLSRRIEELLAPFAAAVERLITIPGVQRRTAEVMVAEIGADMSRFPSAAHLSSWAGMCPGNHESAGKRRSGKTRRGNRWIRTALVEAGGAAGRTKRTALGARYRRLRGHVGHGRAVLAVGRDILEIAYHLLSEQTIYRELGIDCFDRYRTERLKRRSLAQLQRLGYQVTLTHLPTAA

SEQ ID NO: 300094 - protein, 338 aa, unidentified
MQTYAGIDLHSSNNFIGVINDKDKILYGKRHANRLDDVLRALDPFKDSLKGVVVESTFNWYWLVDGLQEHGYRLHLANPSAIQQYEGLKHTDDPWDSFWLAHMYRLGILPEGYIYPKEHRAVRDLLRRRLLFVRHSTAHILSLQSMISRNLGFKMSNNEIKKLKPADIESLFDCSNLVFMANNSLAAIEFLKKITKGIEKKVKSQVKLRKEFEMLLTIPGIGNILGLTINLEVGDIGRFPKVGDYSSYCRCVESKRLSNGKKKGENNKKNGNKYLAWAYVEAAQFARRYCVKAQSFYQSKEAKTKPVVAIKALSNKLSKASYYIMRDQVAFDEEKLFG

SEQ ID NO: 300095 - protein, 330 aa, unidentified
MEYFAGLAVSMAETHVCVMHRDGAVVYEVKVPSTPADIAAGLAKAPACGRIVFETGRMAPMLYHGLRQLGLPIFCIESRQAHQALKSLATHKTDRNDARGLAHLARTGFFKPVYVKSLPAHAVRALIIARKKLVGQRVTLENQIRGLAVVFGVRLPRALRPAFVRQALQASEGIPGLSAAMRGLVAARAAVLAAVSAIDADIRQLVRASAACRRLMTIPGVGQLTALAFTAAIDDPSRFRRSRDIGAYLGLVPRRYQSGEVDYTGSISKCGDRRVRTLLYEAANVMLTRYKSALKLKDWALAIAKRSTMRKARIALARRLAIIMHAMLRH

SEQ ID NO: 300096 - protein, 359 aa, unidentified
MNKRLSKKQMFFNKINLTKDDEIYIGIDVHKKSYSVAIWLNDAPAIDFVMPADHKKLIKLLDKLRIAMKMSVYEAGPTGYGLARQLQKASLPVEVIAPSKTPRQSARDSKTDRLDCRKLAQYAAKGLLRPIAIPIKLQEADRQLTRTREQLVTKQTRVKLQIKSFLLQHNIEEPSGLSSWSISAVNELKTINLSKQLRFSLDILLEELNFILTQIKKTEKQLEKTFSEKRHSAKMKVLPTHPGVGPVIARQFTAEIFNLKRFRDKTELAKYVGLAPMIIQSGQSQRDGPITKTGRPQLRSNLIQGAWIWIRKDPKAYKIYQRLLHNTGEKNKAITAMARRLAIHLWKMSCDIKPFNPAA

SEQ ID NO: 300097 - protein, 408 aa, unidentified
MCYVDDIRLEQFRQLKKEIRGSEEYLIIGIDVAKEKHRAFFGTAQGKTLLKNVVFDNTIEGFEKLDAYVDRIKVQYSLRKVVFGIEPTADYHKPLAEHLLKCGLMVVLVGGAAVKNNRQLLNGRWDKNDDKDSANIADLIAQGKCMFYEYPLMTLQNVRVLNAVKRRLKKREHGISAYIRNHILAQYFPELDTYYGSSETLAVVRECLDPSAIAGMEYDDFCRTVAPGKMTLARERRVGAIWRTAVNSVGCTMGEAAFHEAQIAVDSLNQVRQEIKAIEDKLENACLEFPEYTYLLSIPGFGPDVSAKVLGAIGDPHRFTSGKQVLRLAGLDLCAKRSGKTSNRATPIISKQGKADLRCALYQAAFIASIKSKDFIPYFTNKLAGRAKEKGIGTKMRVKLAAKLLIIA

SEQ ID NO: 300098 - protein, 342 aa, unidentified
MDHSAGLDVSVKETSVCIVDDTGRIVREVKVASEPEALLQVLKNPGYHFKRIGLEAGPLSQWLYSALAEADLPVICVETRHMRAVLKAQINKTDRNDARGIAQMMRVGLYRPVHVKTLRSQKLRMLLTHRKLLQSKAIAIDNDLRGTLRNFGLKVGVVRTVKFEARIKELVENLPDLAELVEPLLVVRRVLREQFVIQHRRLLAIVRDDEVCRRLMTVPGVGPVVSLTYRATVDVPARFHKSKSVGAVFGLTCAKYQSGEVEWSGRISRCGDEMMRVMLYEAAQSMLRSKKWSWLKAWAMQIARRRGMKKAIVALARRLAVIMHRIWVDGTEFRWTREAAAA

SEQ ID NO: 300099 - protein, 370 aa, unidentified
METYYYIGMDIHKKTIAYCIKHQDGTIVRQGVVPSERTALRQWVLELPHPWIGAMEATIFTGWVYDFLKPHAFSLKVAHPEMVKAITAAKKKNDRSDAERIADLLRVGLLPECYMAPEELRELRRILRYRSHIVRTAVKMKNKISGLLMEVGAPYSKKRLHGRKYFRELLERIEDVPSSVVELLRLSRTNLEMFQAVQKRLIETLRNNELIRERVERLMTIRGIGEVTAFTWVLEVGEPERFNSVRQAVSYCGLCSAQRESAGKERRGPISKKRNKHLQTILIEAAKLAPYWNPQLASVHAKELQKGNCNRATLAVARKLVAYMLAVEKRQSDFVPRAEEIVSGKSTDHSRLAPPKGRGRDRSILNRMSI

SEQ ID NO: 300100 - protein, 364 aa, unidentified
MDKYIGFDIDSKKTIACIVEAGKKDRFATFRTDINQMKEFLQGQRNPNGKIHLTFEISGEAGYRYDQLAGLVDEITVSNPTKMTWIYRSIKKNDRIDARKQAVLLSIGEVPRVHMPGMMVRQWRVTIQHRRKIVNSVTRVKNRVRAMLKANGYLRPAARGSWWKSGNRRWMKSIASSDYKLAGSELWRMNLGDMLEELGLLESQLERVTGYLDEYLKRQAGGTLLMSIPGVGPRTAEAVLAYTDDVRRFGRSKQYGAYFGLTPKLDESGSSRRLGHISKQGPSVVRWVIVESAWRVVKKSPALKAFYERVKAGQKGRKKIAIVAVARKLLCIMRAMMMTGELFNEELVGRECWMGRTDDVKSSA

SEQ ID NO: 300101 - protein, 444 aa, unidentified
MAMRKREDEVYPNAAGIDVGGSSHWVAVPPHLAQQAGCDVVREFGAMTDDLNALADWLLACGVDTVALESTGVYWIPVFEVLEQRGLKVWLVDARQLKYVPGRKSDVQDCQWLQKLMSLGLLRAAWRPSAEVCVVRAVARQREVLVAEQASWVQRMQKALVQMNLQLTEVISDVMGQTGQAIIRDIVAGQRDPRVLARHRHHRIKADEQAIVKALTGNWRDEHLFVLAQALAMYDDIERHLTECDAKLDALLAERGAARVDIGKVPKAGSKTRLQFDIRQRLANWAGVDLTRINGLGVTVVMKLLTEIGPDVSRFASVKHFCSWLGLCPGTKISGGKMLSSGTKRSANRARQALKLAAQSLFRSESALGAFYRRLCGRMDKPRANTAAAHKLARMVYFMLTRGEAFVDQGQQRYDEQQRQRSIAALKRRAAALGFQINPVATPA

SEQ ID NO: 300102 - protein, 346 aa, unidentified
MTVYCGVDFHARQQTICYCDSAGGEIRLHELSHKQDDVRGFYSAFAGEVVVGIEASGYSTWFVELLEGLGHRILIGDASEIRRLAKRRQKNDRRDASLILDLLLRGEFPQVHRPPFESREVLRLLRYRHKLVQMRTRAKNSLQALAFSAGSAGRSRLLSREGRERFLRLPMSEAMGRQRAEWLSLVDELNARIKSVDAWLDQKAKRDERVMRLQTHPGIGLLTSLALVHALEPVSRFDGGRKVAAYVGLDPMEYSSGDKQRFGSISKGGSRLLRYLLVEAAQITVRRDEGLKSFYLRLLRRRGAQKAKVAAARKLLIRGYILLRDGIDYAEFLRRGVEARPARLAT

SEQ ID NO: 300103 - protein, 413 aa, unidentified
MMNPVVGLDVSKGESQVQAFLDKGQPFRKSFSVKHTVEGFENLLGFLKEIERVADGKQPSVILESTGHYHSPVIQFLEEQQYVYIIVNPLISHRARSTSLRKVKTDAVDAYLLCELYYKEEVEPYKKRGIQLLNLRNLKRQQETISSISAQTKVQLLTVLDQIFPEYRGVFGNLYSKVSLQTLFLFPTSEHVLNTTESVLTEKIVSLCTRRSEKWAKEKAQKLIEAAVRNPFQNNLYESHIFNLKMFITIVLQYQEHLSQLETEIDAHAKEIEEYKIIQSIPGIGEKIAATIISEIGGIDRFNHPKKLVAFAGIDPSVYSSGRFTATNNRITKRGSRRLRQALYMAVYCGIRDARKQKKSDTVIPRDKRLREFYDKKRDEGKPYRVAIIACANKLLHLIYALLKNKTTFQELT

SEQ ID NO: 300104 - protein, 362 aa, unidentified
MDTVHYIGFDVHKKTIAVCVKAADGRILEEETIGARREDLNAWIQRHPTPWVGALEATLFTGWIYDVLKPAARELKVGHPLMLKAITASKKKNDRVDARKLADLVRTDFLPECYIAPTPLRDLRRLLRYRNLMLRQSVRLKNRIAGLLMETGTEYVKCKLHRRGYFNELMTSLKQVDHVPSSVVNLLQISRTMLVSFREVETRLVRELVRHPNLKSRIERLMTIPGVGEITALTWALETAEVERFSSIDKACSYCGLTSAQHSSAGKDQRGPISKQRNPYLQSVLIEASKLAPLHNPALALVYERERQAGHENRASLAVARKLVAFLMAVDKSGNNFELRLPSAAMAAADPPLPTSEVLPVP

SEQ ID NO: 300105 - protein, 320 aa, unidentified
MQRPNAGVDVSKQHLDVCLHSSSGRLGNDAQGWSELVAMLKAAEVDLVVIEATGGYERGAVCALQAAGVAVARVNPRQARDFAKSMGILAKTDQVDARTLRDFADVLARHDKRGQYITPIEEPARRELGELMDRRRQLVEMRVAEHNRSEHAGPRARRSIDSVIKLLDKQLGLIEGQIDDHMDRHFKRQRELLDSVKGVGPVTILTLTAALPELGRLGRRQIAKLVGVAPLADDSGSRQGKRRVWGGRANVRAVVYMAAIVAIRHNAVMRAFYERLLAAGKPKKVAIVAAMRKLLTILNAMLRDQRLWDATRHLNIAQPG

SEQ ID NO: 300106 - protein, 374 aa, unidentified
MSSKQIHGNVFVGIDVHKRTYSITAVSEGRCVKSASMPAKFEVLLAFLRHNFPFANQIYSAYEAGFSGFGLHRFLVQNGVKNIVVHAASIEVEARSKVKNDKRDSKKIAIQLEAGRLTCIYIPSPQREQWRSVTRLRIQFVKHRSSISNQIKSLLFYYSMLPSSHRSRTSKKWILSLLTLENVDRDIFFCIQKHVESWLFYNGKIKEIDEQLKMQARLDFKVGEVYRKFRGIGFLTARVLANELGDFSQFHSQLAAFSYTGLTPCEYSSGDKRYLGNISHQGNVFVRGILIEVAWIAIEKNPQYKLIFDRIVKSTGSRKKAIVGTARRMIGHLRAEFKNSVSTEEEGKMLKKSKFGASRQIVAAGSVDPCSKGR

SEQ ID NO: 300107 - protein, 375 aa, unidentified
MEGAPMLDTTTFVGLDVHARSIKAVSLDVMTGEVRAATFGYDAGAVAEWVRSVDPRARCVYESGVTGFDLQKRLSGLGVDCVVGAVSKMIKPSADRRRKNDRNDAEFLARMLSVGNVVEVWVPDDECEAARDLTRALEDARDDLSRSKQRLSKFLLRHGLVFDERTPTGRRKGNWTRAHWSWIESIRFAERADNDVLAYYVDAVRRAAEEKARLEGLVEAEARKPRWRKRVDSLRCLKGVDTASAADLVFEAGEFSRFGNARSFAAWVGLTPSEHSSGESDRRGAITKAGNKHLRKTLVEAAWHYLTCSGRPKDLAKGQAPDRGARRHAAKGVRRLVERREALLARGVHGNKANVATARELACWVWAVGLMAEEA

SEQ ID NO: 300108 - protein, 343 aa, unidentified
MEQYVGLDVSQEQTSVCVVDGGGKVIWEGKCTSTPEAIAATLRTRAPEAVRIGLESGPLSAWHWHELRKLDLPVVCLDARHAKAALALQLNKSDRNDARGLAQIVRTGWYREVAVKSVDNHLVRSLLTTRAQLVRMRVDLANQIRGVLKPFGLIAGKGGGRPFAERVRALVAGGPLQEVAGALLAAWQAIGEQIAVLGRRLVAVARQDEAVRRLMTAPGVGVLVALAYVSVVDAPERFAKSSSVGAYIGLTPRRYQSGEADYTGHISRCGDKLLRTYLYEAAGIILHRVPRWSALKAWGTRLARKIGIRKATVAVARKLSVILHRMLRDSSEFRWSAKEVQAA

SEQ ID NO: 300109 - protein, 365 aa, unidentified
MQKLRFVGLDVHKDSVTIAVADQDGGMPHVVATLPNETRLLLKRLRKVAASDQLRCCYEAGPTGFGLCRALQDAGLWCIVVAPSLVPKQAGVRIKTDRRDAVRLARFLRSGDLTEVHVPDEQTEAMRDLERAREDAKRAERTARHHLAKFLLRHGRKYSGKSWTATHLEWVRRQQFEHEALQRVLVDHLHAVEQATARVERLTKDVAELVETWSRKPLVQALQALRGVQLVSAVTLAAELGDLSRFSSARQLMAYLGLIPSEHSSGETKKRGRITRTGNGHARRILVESAWSYRFRPAMSYEIRRRNEGLSPQVQAIAWKAQQRLHGRYRRLLGRGKNKQQTVTALARELAGFVWAIAREPRLAA

SEQ ID NO: 300110 - protein, 376 aa, unidentified
MSNVRFLGLDVHAETIAVAVAEPRGEVRSLGTMPNRPESLRKLVKKLGPAEDLRVCYEAGPTGYVIYWQLTALGVRCEVVAPTLVPTKTGDRVKTDRRDAEKLARSYRAGDLTAVWVPDAAHEALRDVVRAREAAKKDQLRARHRLGKFLLRHGRRPPTPMAPWTLRHLTWVKQVRFEHVAQEATVLDYLHEVEHVAARIARLERAIDAAVQAAPAPMRAVIAGLQALRGIAQISAATIVAEVGVLSRFARAPQLMGYSGLGPREDSSGTRTRRGGITKTGNAHLRRIVVEAAWAYRHRPAVGAALKKRQAPLSEAVKAIAWKAQHRLHSRHGTLRGRGKNPQQIVTALGRELLGFIWAIGVTVETEQKHPRPVAA

SEQ ID NO: 300111 - protein, 398 aa, unidentified
MIPRFFGLDTHKQFVMVAAVDQQQTLLQSPYRINMPQLERWAANTLTADDTVVIEVTTNTWQLHKLLSQYAGQVVVANPYKTKLIAEARIKSDKVDAIALAQLLASRFIAEVWVPDQETQQHRNLAAHRATLVRQRTQIKNRLQALLTRHNLQCPHKSLFTQEGRQWLAQQTFDPVAQLECQHWLRQLAVLNQDVHETEQLVARLAVADNRVPRLMQLTGIGVFTAFAILAQIGDIHRFPSPKKLASFAGLVPSLHQSGNRSYNGRITKAGSPMLRWLLVEAARIAVRFDPHWQAIYDRLKAQRGANIAAVAVARKLLVVIWHLLHNQSTYRFLCPQTYVTKLQQWARLIGRKQLAGVSSRQFVEQQLQRVQLEHLSQSLISTQKGNLKVQFRNSHQT

SEQ ID NO: 300112 - protein, 349 aa, unidentified
MTTMTSAASAVIGGVDTHADMHVAAACDHIGTVLGTESFPTTAAGYRQLLTWLRTFGEVSVVGVEGTGSYGVGLTRFLLEAGVELREVLRPNRQVRRRHGKTDVIDAIAAARSVINGDAKAKPKSHDGAVEALRALKIVHRSANKSRTQALNQIRDLITTAPDELRAELRGLRRRERLAVCAAFRPADRDDLLTITKLSLRTLARRVLELNAEIALLDARRRRITTAIAPNLVAAHGIGPDTACGLLLSAGDNPDRLGSERSWAALLASNPIPASSGKTQRHRYNPGGDRHGNSALWRIVMVRMSSDPRTKAYVERRTKEGLSKPEIIRCLKRYVARETYSLLPRELLS

SEQ ID NO: 300113 - protein, 347 aa, unidentified
MKRYYLGVDWDWGDEMHAVWVSDKAGKKVAEMEVKQTLEGMSGFGRWLYERKGEGIDLWAAIERPEGRIVDFLLDHEVVVYPINPKALDRVRDRFRMSQSKSDPFDAWVLAEFLRTDHAHLMALLPNSEKAQELKMMTRDHHRLGRHQTRLLNQLTATLKEYYPRPLEVFGNLSSQVALDFLPGYPTPRALCELKQKRWRNFARLHRLREARTGELWEELKSPQLPIPEHVVRAKAWLVRVLVEQLGVAVRAVEEYREEVERFFASMPAAELTKKLPGGKSGTTLPALWAELGDAQGRWESFKHLQAQAGTVPVTKRSGKSQIVCYRFACNKHMRYAVYWLAFVALR

SEQ ID NO: 300114 - protein, 359 aa, unidentified
MKKLNKARGMTVGLDLGDRNSQMVVLDEGGEVVEESRLATREEAMRRRFGGFPRMRIALETGTHSPWVSRVLTECGHEVIVANSRKLRLIYENPSKDDRIDAMYLARLARVEPALLSPVRHRSVSSQKDLALLRSRDVLVAARTQLINHVRGQVKSFGGRLPACATSAFAQRISQHVPESLRPALDPVIEEIVSLNDRIRAFNRQIEVLAQQSYPQTNLLRQVRGVGAITSLAFVLTLEDPNRFKKSRTLGPYLGLVPGRKQSGASDPQRRITRHGDHDLRRLLVNAAHYILGPFGEDCDLRRFGQRIASRGGKIANKKAIIAVARKLAILLNHLWLHQEVYDPLYNKTHRTLRRQKTA

SEQ ID NO: 300115 - protein, 352 aa, unidentified
MQHFIGCDVHTRNQVVAWIEEETGEIKKRRLEHEGKEVKEFYAQFPLGTVVGIEATFPAYWFERLMGELGHELWVGDAARIRASEVRYQKTDSRDAELLLDLLRTGRFPRIWVPSLRERDLRQLLVHRMKQVRARTQVKNQLHALAISQGVCRKGKLWSVKGRKELESLALLPWAARRRKELLESLDRLDEQVRELDRAVEEAGREREEVALLRTHPGVGMVVGLAFVLTVGPIKRFSNSRKLVSYWGLNPRENSSGARQRLGSISKQGNTMMRWLLVEAAQTAARLDPQLRRIYQRLKKQKTSGVAKVAVARRLAVRLFWMLRTRNNYAQLVHMSGSPRSAVVPPPAEPTV

SEQ ID NO: 300116 - protein, 363 aa, unidentified
MSIVAEKFSFVVGIDTHAKTNTFAIINSITGEEIANETFPVTVPGGRRALSWIQRRCQGSTEKILLTMEGTGSYGAKFRQQATDAGFQVTEAPFPERRLGRLRGKSDAIDAARAARTTMGISLEKVRDPRAGRVHLALRVLTTARTSMSRERTAAINSLNALLRTVELGLDARKALSVTQIRVVGAWRERDEDLSLQISRREAVRLAGRIIELAEQLRQNHTELERLICADHPEPLEVFGVGPVNAAIILTAWSHPGRVRSEAAFAALAGTCPVPASSGSTTRYRLNHGGDRQLNKAMYTIALSRIHWDQATKVYVAKRTSQGRTKKEIIRSLKRYITRQLFRTLKTAGSLPTLVPARATSPA

SEQ ID NO: 300117 - protein, 341 aa, unidentified
MDKELYFGVDVSKKTLDLAYYDGETIDWKNAHIKVSNDDAGFKKIGSWVAKVGKDFDTFLFCMEYTGLYNQNFRLWLESKEYIYGMVEPRKMHRFEPDLDDDQRSLDRIKTDELDAFRIAIYCEQNHKKILRNPSKLPSPVYFKLKRLLAERKQNTKQSVLYKQQLHDICAYDTDLSVERKKLLLKNMQENQKAIDKEIDSYMNEDTSIRKNYNLLTSIPGIGRIIALETIVLTENFTAINNPRKYACYIGIAPFKKESGTSVRKKTGVSKKGFSEAKADLSIAVLSAIKNNPSIRDYWIHKRKDKCGGIVLNAIKFKLVLRMFAVIKRGTPYVETDAYKN

SEQ ID NO: 300118 - protein, 347 aa, unidentified
MKFYTNMHKFYCGIDLHARSMYLCILDQEGHTLVHRNMPTNGDRFLKAIAPYREDVVVAVECIFTWYWLADLCHREGITFVLGHALYMKAIHGGKAKNDKIDADKIARLLRSNMLPQADVYPATMRATRDLLRRRNHLVNKRAELLAHIQNTNSPYNLPAFGKNIARQSNREGLSERFIDPCVQQSIELDMALIDTYDQRLTELELYIVRTAKGHDANTFYRLRSVPGIGKILALVILYEIQDIGRFEQVGHFLSYSRLVKCARESAGKRYGSSGAKIGNVHLRWAFGEAACLFLRNNSEGQTLHQRLVKKHGKAKALSILAQKLGRAVYFMLKRQQAFDMNKIIQR

SEQ ID NO: 300119 - protein, 371 aa, unidentified
MESIIYVGMDVHKDTYSLCSFDAKRSLLFSQTQMKSTTGNVVRYLKKVSEMNGGALTVCGYEAGPTGFGLCRELQKEGFACVIIAPSSIARTAKDKAVKTDKSDAQMLAKTLAFHSYKEVVLPSENIEAIKEIVRLRNTSLKACKRAKQNLLSFLLVHGFSYSDGKHWTVKFSSWLKTIHFESEYLTYCFEEYLSEATRQIQRLSLLDKKLKELEDDKEIRDGVKKLKCICGIDTIAAVGLVAEVGDFDRFRAAKDFASYTGLCPGRHSSGLTNRDTGITKQGNIYLRTLLIEAAKSIKRSASHGHKSKRILTRQEGASSEVINYADKAGARIRMKMYHLERRGLHCNKAAAAGARELACFAWGMMTGHIA

SEQ ID NO: 300120 - protein, 415 aa, unidentified
MEVLHERCAGLDVHKNTVVGCVRVARGGRVEKEVRTFKTTTKELLALADWLDGHGVDHVVMEATGVYWKPVWHVLDDGERELVLANAAHVKNVPGRKSDVSDCDWLCDLGAHGLIRASFVPDSPTQDLRSLLRTRKQLVRERSSHTLRLQKTLEDANIKLDSVISNVVGVSGRRMIEALVAGESDPAVLAALADRRIKAPPEVLCEALRGRVTRHHRFLLNLHLGHIDAIDEAIDRIDQEVEASLQPFCAAIDLVKTIPGVSELAGQAIVAEIGIDMSRFPTCGHLISWAGLCPRSDESAGKRRSTRIRKGNPWLKTTLVQCAWAATRTKTTYLHAQFLSVRSRRGARKAIIAVAASILTAIYHMLKNGTPYRDLGPQHLDNRNKEARVRRLLASLRNLGFTADFQNLRSASVSC

SEQ ID NO: 300121 - protein, 311 aa, unidentified
MDGVFIGIDIAKHYCDLAVIPDGTQKRFMNDEEGQQAILAFILLLKPARIVIEASGGYEMWVARALAEGRLPVVAVNPRQVRDFARATGRLAKTDTIDAGILAQFAKAIQPDIRPLPEKEAEALRALIARRRQLIQMLTMEKNRLEKSPSAGSEDIRNHIYYLTEALEKIDKDISRNIRKGPLWKEKETILTSTPGSGPVISCTLVAALPELGTLNRKAIAALVGLAPFNRDSGAYRGRRTMWGGRSHVRAALYMGTVSAIKFNPAIRSFYKRLVDAGKAKKLAITACMRKLLTILNTMMKNKATWIEVAS

SEQ ID NO: 300122 - protein, 347 aa, unidentified
MTIVEAARGITGGVDTHRDVHVAAALDPLGGLLGSESFSTDSAGYRALLAWLESFGDVTKIGVEGTGSYGSGLARYLKRVGIEVIEVDRPDRQKRRRAGKSDPLDAIEAARAALSGRAKGKPKSRDGAVEAIRVLVVAKRSARQARGKALVQMRHLGYSAPEQLRCRLKGLSVPALVAEGKGLRPTRSPDPVTAATKASLSSLAHRISSLDRELAELNERIEALLVATVPDLLELFGVGPDTAAALLMAAGDNPERLRSEAAWAHLCGVSPIPKGSGKNSGRVKAHDGGDRQANSALWRIVMVRIAHDPETQLYFERRVKEGKTIHEVIRILKRYVAREVYRYLPRG

SEQ ID NO: 300123 - protein, 336 aa, unidentified
MEEVQSVVGIDVSKLKLDIALLINGKIKSKVLDNSPAGHINLLEWLGKSKADLASAHICMEATGVYYEALALKLHEAGLKISVVNPSCIKGFGRSENIRNKNDAIDAGLIARYCAAMKPAPWVPPPLEQRQLRAWSLRVQSLKDIRQQEENRREAHIVSGMDDVAAHVAEHVKWIDGEIRKLEKEIDDHIDRHPGLKRDAALITSIPGIGPTTVARILGHLGDIRRFKNAKALAAFLGVTPKHHTSGTSVKGRSVVCRTGSTSLRAALFMPSMVACRFNPILNQFAERLLTTGLPKKAVICAVMHKLTHLIYGVIRTGKPFDANYLSKGLAIKDGI

SEQ ID NO: 300124 - protein, 343 aa, unidentified
MQITTIGLDLAKSVFQVHGIDAAGQAVVRKSLRRAQMLPFFAKLPPCLVGIEACGTSHHWARELIKLGHEVRLMPPAYVKPYVKRGKTDAADAEAVCEAVTRPTMRFVPVKSPEQQAALSMHRTRDLLVKQRTQLINMIRGLLAEFGVDIPKGLERALLMARQIVDGKAPEVPIEAAKIVTTLSQQALDIHVRLREIDRDLAVCLRGNDVARRLMTIPGIGPVGATALAASVTDPHQFRSGRQFAAWLGLTPLQKSSGGKERLGRISKMGDKYLRKLLIVGMTALVRRAKQNPEGDPRLADLLARKPTRVATVAMANKTARIVWAIMARGEIYRPGHRPALAA

SEQ ID NO: 300125 - protein, 350 aa, unidentified
METAYDGRQVVGMDLHRRRSVLVRMTEDGRRLGTARIINSAAELRREIARAGKSPRVVLEATYGWYWAADTLAAAGAEVHLAHPLGVKAFTCRRVKNDEKDAADLADLLRMGRLPQAWIAPAEIRELRELTRYRIKLVRARSSCKEQVHAVLAKLGIPVTCSDIFGVWGNTWLDGLSLGQPYAGKVASLRKLTSELSTEIAVLDAVIAGLLAHHDGYHAIQALPGIGPVLAAVIVAEIGDIRRFSRPARLSSWAGLTPRHRESDLKVTRGHITKQGSPLLRWAVVEAIQHQPAGSPVRDVKDRIIARRGGQAKNIAKTAAARYLLTCVFYAMRDGHARSLAARTAAQDAA

SEQ ID NO: 300126 - protein, 373 aa, unidentified
MPRYSTAFGMDVHLRSTTVCALDAETGEAVTRRFRGNPWGEVAEWMSGFPGPSLAAYESGYLGFAPQRELSGLGVDCVVAAVSRVPRSAADFSSKNDRNDAARMAKAILSHDISPVWVPSPEIEGLRDLAGAHDAATARLAAAKQRLLAFLARRGYAYGGTTPAGNPRRYWTYGFLRWLDKVRPADDGGIRALAALRNEVEAAAETRDDLLAEYRAAVAAGPLSAEVEALQSIKGCGFALAAAFASEVGDFSRFRSGRQVTSYFGLAPKQRSSADSVRLGGISGAGNALVRKLAVEGSWCYAQAGHQPKLMPKGSGVPLEIRMHGRKGSERLLRRREEMLERGMPQAKANAATAAELVRWLWALGTMCREAGE

SEQ ID NO: 300127 - protein, 454 aa, unidentified
MSKSTKKTKTGVKKITQFEIIRPHVAGIDVSDNDAMLVAYPMNEHEVKIEAFECYTRDLRRISSTLKAHHIESVAMESTGVYWIPLFLLLQEDGFEVYLVNAKHVKNVTGRKDDEEDAEWIQKLHRCGLLSASFQPDNQTRALRSVVRHRSSLVRTRSIYLNRMQKALEQMNLKIHTVISDIDGKTGLAIINAILAGERDPEKLADLRDRRIKASRDEIIKSLEGFWMEEHLFELSQCYKLYEFHVETIKECDRKIETFLQEIIKSKNNGVMPQLGKRQRKRNYKNDINTDVTNYLYELNHVDIVSTEGITGISEITALTIYSETGDNLHRFKNEKHFTSWLGLAPNTKISGGKIISSRVPKKKHYAGQVLRMAAVSLCNNKGPLGEYYRRIRSIAGRQKAVVALARKLAVIYYRMMTSKEEYNPQSLIDYQEKWRERKIRNLEKYLNKLNAAA

SEQ ID NO: 300128 - protein, 339 aa, unidentified
MSEQKITGIDLAKTNFYLFSINAHGKPAGKIKLSRNQLLNWLVQQPKMTVVMEACEASHHWAREIRKLDHDVILLPAQHVKAYLRRQKNDYNDAQAIAEACQHGTIRPVPIKTLEQQDVQTFLKVRRLVSMERTQLINHIRGLLAAYGIVFSKGATELRQKLPALLEDAENELTDTMRTLLHRQYIRLITLDNELEWYDSEQKKYVRQDPGGKRLLAIPGFGPLVSQAIKSWMGDGKQFRRGRDASAALGLVPRQFSTGGKQVLLGITKCGDQYVRSMLIHGTRAVLFRASGKTDSLSVWVYRIREKRGSNRAVVALANKLLRIAWVIIARNERYLPAT

SEQ ID NO: 300129 - protein, 466 aa, unidentified
MTPQKGKKFRTSERVADLTITHRHAAGIDVHAAVHFVAVPAEDVPAGFINPDAKLPAGVRKFGTNTGDLEALAAWLKDCGVTTVAMESTGVYWIPLYDLLAGQGFAVILVDPRQTKHAPGRPKSDVLDCQWIRRLHSYGLLTASFRPADEIVQWRGFQRQRDMLIRYAAQHVQHMQKALEEMNGKLTEVVSDVAGQTGMKIIKDIVRGERDPRKLAKHRHERCRATEAQIASALYGNWRKEHLFALKQAVQMYEFYQRQLRACDQQIEACLRGFADKSAGAALPARPRKQKPRRQEPRFDARALLFRMAGVDLTVIEGISETTALVILSEIGTDLSRFPTEKNFVSWLGLCPQHRGSAGKIFNRRVRRGANRAARALRMAAQGCHHAKNALGAFYRRIQARCGGAKAVVATARKIAERVYRLLKHGQEYVAQAEHAYEEAYRLRTLKAMARKAESLGYKLVPATAD

SEQ ID NO: 300130 - protein, 352 aa, unidentified
MKYYIGVDFHKQYSSVALMNEKGDIQDERKLFHVDEDKVIEYFAHFSDPGEVSVSIEATPNWYWFVDRLQDLGLTVKLVHARKAKIIAESTIKTDKLSAIALAHLDRSNFLPTAYIADRGTRAARELLRYYMSLVKIRTSIKNRVHAILSKNNIHHGFSDLFGKKGMMFLLGLEMPPTFGTNLTGYLQLLENVAQEISAAEKRIKEKCKGNRYFQRLVTIPGISHLTGLVLAVEIADIGRFSSYRKLCCYAGLVSSTYQSGDKMYHGHIIKESNKYIRYVLIQAVPKAIGKDPRLYRFYKKIERKKGKNKAKIAVARKLLVAIYFMLRDDTDYCIDKKSGYSQVSPMAKLGA

SEQ ID NO: 300131 - protein, 335 aa, unidentified
MDFKFFLGIDVAKLTFDAVLFDKVSKDYHHRKFTNDSEGFSSLFKWLKHFDSKPASTVGFCMEHTGIYSLPLCIYLQHKQAFYCLIPALQIKRSMGIQRGKNDKVDAQMIARYAYLYREELQASTLPSKALLKLKSLLSYRERLVKCKVAIQTAHKELNAFGGSTVDRFVRLNSLAQIQQLAKSIYQTDKKIRQVIEQDEKISRTYQLATSVKGVGLQIAANLIVATHCFSRFDNWRKFSCYCGLAPFEYSSGTSVRGKTKVSHLGNKKLKALIGNGIASAIQHDPEIAQYYHRKIQEGKHKMSVQNAIKNKLVSRVFATVNRGTPYVVMHQHAA

SEQ ID NO: 300132 - protein, 322 aa, unidentified
MTISAQSERVANIGIDVGKAQLDVVWHETGEHQAIENTPKDIKVLIKRLMKEQVQRIVLEATGRYERAFVLAAVEAGLPVIVVNPLMVRRYAGAIGRLAKTDKLDAGLIAEFAAVIKPKVRLATNAKTLQIKDLLLRRRQLMGMRTMELNRQQQYAAAQASSCKRVIALLEKEVALVERQLDLAIDDVAEWKAKKEVLLSVPGVGPTLAYTLLGDMPELGELNQRQIAALTGVAPFNRDSGSQRGNRRIHGGRAGVRTVLFMATLSATQHNPVIRAFYQRLVAAGKHKKVALVACMRKLMGILNTMLREGTRWDEKKAQIPA

SEQ ID NO: 300133 - protein, 417 aa, unidentified
MKKHTYRQIDVNNINWTKIRAQAENRDLHFCVDVAKQKFVGLLVTADSEIICLLKWTHPQDTLGLVERLCNGLGVARLEVVMEPSGTYGDVLRWQFTKRGIPVYRVGTKPVHDRAESYDGVPSLHDSKAAHIIAELHREGHSALWQETPAEQRNLRGLTAELEIQQQLHRANLNRLSALMARYYPELECVVDLSSISVLTLLSQYGTPSEIVIHEEDAATLLEKVGGYFLKTDKRLAILQSAHDSLGVPCVPGEQGQIKALAKDLLRTHQASMEVEKHMAQALKADEGMTNMADVTGKVTCIVLAAILGDLKKYANAASLLKALGLNLRERSSGKHQGQLKITKRGSGKARFYLYWLVMRLVQHDQVIKTWYERKVARDGGRFKGRALIAVMRKVVKGLWHVARGEKFDSSKLFNLA

SEQ ID NO: 300134 - protein, 334 aa, unidentified
MALELLAIDLGKRSFHLYGIDTDGVILSQKVSRAKLAAVVGNLAPTAIAMEACASAHHWARCWLAIGRQVRLINPRFVKPFVKGSKNDAVDAEAIFEAAMRPTMRFVPVKSTDQQDLQSLHRARDRLICQRTALINHTRGLLAEYGIVLPQGRWRFATQASAAIAGADLSDLARVIFGQLLDQLDDLDRRVKKLDATMVALCRTNAICRRLAKLPGVGPVVATAIVAAVNDGRQFRSGREMAAWIGLVPRQYTTGGKPRLGGIGRRANHYLRRQLIHGARAVVSRLPKHDDPRSTWLKALLARRGFNRTIVALANKTARIAWALLSRKEEYAIA

SEQ ID NO: 300135 - protein, 423 aa, unidentified
MFKIFRKNCCGLDVHKTWIYACVGITDENGRTEYKQARFSTFTKGLHELADWLAKYGCKEVCMESSGKYWIPVFNILEKTCWVTLSHPKYTKPQKGNKTDRKDAKWICDLFMCDMIKPSFIPPPDIRHLRDLVRYRFKLTNCLTGEKNRVQNCLTVSNLKLDDVFSDVFGKSARSITNYILEHPGEQFDVAPFVDGRCKTPIEEIQAAVDGSVSREQAVKLRECLAHIEEIGNHKKTIEAEILKITAPYFSILELIRTVPGFDSNPMTAVAVLSEIGADMSVFPTAKNLVSWAGCCPRNDQSGKKRKSSRISRAGVYLKPLLVQVANAVVNSNKYPEFKDRYRRIKARRGHKKAIVAICRMFLTAIWNILSKLEPYSPEGFLVDRIIPKEDTFITKSQALRYMRAKGFVILDDWDDPPAETSA

SEQ ID NO: 300136 - protein, 333 aa, unidentified
MIVGIDVGNEKHDFRAFNWRGIELTRKPVAFSNSMEGFNSFYNTIVELMQKSELEEALVGIEPTGHYWFDLGQFMGEKDIKFVMANPHHVHKTKESDDNSPSKNDRKDPRVIAGLVRDGRYFYSYMPTGVYAKLRNASNRRFVLAEEQARAKNRLQKWIAVYFPEYKGIYTHIDTKEGLLLLKQAPTPEEMVRLGVDGIIKIWKDAKLRGNWHKQAMLILNAAMKSIGLKAGLTEARMDIQDLIEDYELQTKRLERVNDLIKELCQQIRYADKLLEIKGIGITTVADFIAEIDDITRFDSTKELQKLAGLELVADSSGKHNGKAKITGVSKMY

SEQ ID NO: 300137 - protein, 408 aa, unidentified
MNPLYVGIDVSSKSNVIYLMLPDGAKHSCFSVANSQDGSSQMVKRILSAVTSRSLDTVVIGLEATSVYGDNLVYFLREDASLAPFNRKIHVLNPKQVKNFKEAYNDLPKNDYMDSFVIADCLRFGRINKEVYLGDYRYKALQNLTRARFFAVQNLVKEKQRFINVLFKKYSTMTQEKVFSDTFSTTALAVYEEFESAEALAAMDLQELTDFIMEKGKNRFPNPDAVAKAIQKAARSSYRLPKTVNDSINQVLSISITSIKALDAQIKQFNKAIEAQMELLPNVLISIPGIGPVISAGIMAEIGDINRFPGQAQLGKYAGLAWTQNQSGDFEAENTKLIRSGNRFLKYYLCEGALSLVRCDTEYSSFYHSKYKEVNRHQHKRALALTARKFVRLVFRLLKDNRLYRAAE

SEQ ID NO: 300138 - protein, 357 aa, unidentified
MKKGYQCRKVLARGRVVYLGIDAHKDSWHVTARAEGEEVFHGRLPSQYHALRSLLKRFAEHVPKVAYEAGPCGFWLYDKLTADGIETLVVPPSLIPTESGNRVKTDKRDSRKLARLLENNMLKRVHVLTEEERAHRELVRTRRQLVEHRGDVARQIKSKLLFHGVESPFPGRHAWSVRYIQWLKELSRTHKLLTLSLGFLIELYENLTIQIKKITRWVMELSKNDKYAHKIALLRSIPGVGRLVAIEILVELQDMRRFDSAEKIASYVGLTPSEHSTGQYTRQGRITRCGNKRVRTSLVEGSWILIYRDPLMRLKYERLKIRKGAKRAIIAIARQLIIRIRSVLLSNQPYRINLLAS

SEQ ID NO: 300139 - protein, 349 aa, unidentified
MTEQRRSYAGECVYVGVDVHKETYTVTCVCHKQIVKPATVQAEPGSLAVSLPRGFPGATLYSVYEAGFSAFVLHRVLTKAGITTMIVNPASIAVAANDKVKTDRRDSKKLAIDLADGRLRGIYVPTEAAELARLLPRTRAQIVEHRATIARQINAKLHQFGLIAPSSRRMISNRYLREMATWTLPPELSVSLTLLAEQWRFATRQLIEMRRLLRDQAKAQEEIEKVYRSVPGIGEVVARTFATELGDMTRFANERALFSYTGLTPSEHSSGTAVRRGSIRRQGSSRVRHLLVETAWRAIPRDKALKEIFDRIAATRGKKRAIVAIARRLTGRIRACFRQGTTYAVGTAA

SEQ ID NO: 300140 - protein, 249 aa, unidentified
MGSMDRNKSSTTIAGIDVGKRQLDAAVLGRAEQHRVANDAAGWEGLIAWLAERGVRRVGLEATAGYERGVRARLEAAGLEVVVHQPLEVKLFARLKRRRAKTDRLDAALIAAATAQVDTVRAAQDPRLAHLAERLTAYEQISDQAAQLKTFMEHVTLPDLAASLGEQIQSLARLKARLAREILAALKAWPDLLARWTLLRSLPGVGPLVAASLVIRMPELGALKRGQPASLLGVAPFDRQSGQIGRAHV

SEQ ID NO: 300141 - protein, 344 aa, unidentified
MSKVFGCDAHKRYSVFDSMNERGQAGLAVRVENERGLFRRYLNGLPAGSQIAIESVGNWYWMIEEMERAGHVPRLAHAAKAKLMMGQINKTDKLDARGLALLLHNGTLPSVWIPPGELRDQRELPRMRMGLVRVRTMLKNRIHATLAKYALDIPEVSDIFGRTGRMLMKKRLEELPPFTRQSVETQLELLDQVEDHILGCEKQIQEVVQASPEMKLLMTLPGVGQILAVVMALEIGQVSRFPGPDHLASYAGTVPRVKSSGGKTFLGKVRPDVNRYLKWALIEAANVVVLNQGRWPNRHVVQLYGRIRQRRGHAKAIGAVGRHLAEAAYWILKRNEPYKEPHGQ

SEQ ID NO: 300142 - protein, 363 aa, unidentified
MSVHVAPVTSSTIVVAVDVGKTSAVLSVTDAARHRLLAPSEFAMTGSGLTAAAARAMAVAPAAVQVKVGVEAAGHYHRPVLDHQWPDGWEVLELNPAQVAEQRRVQGRRRIKTDVIDLEAITELVLAGYGRPVTDRDVVIGEISAWAVHRSRRVATRTATKNQLLGQLDRAFPGLTLALPDVLATKIGRLVAAEFTDPARLAGLGVNRLIRFAATRDLQLRRPVAERLVAAAHDALPTRDAVIARRILAADLVLLGDLDDQIQSAETALGSLLPRSPYATLTSVPGWAVVRASNYAAALGDPKRWPGPQQIYRASGLSPMQYESAHKRRDGGISREGSVALRRALIDLGIGLWLNEPAAKNYA

SEQ ID NO: 300143 - protein, 387 aa, unidentified
MIYYVGIDISKYKHDFCIISNTGEVIVENSYFENNKKGFQYLLDQLKPYNKSEVRIAFEATGHYSKNLELFLIDQGYSFMKMNPLFIHQFLKARSLRRTKTDKADSLAIANYLMSVPYQPNSDLLYNIFTLKSLCRSREQLIKERSKYQVLLTNELDLTFPELKPFFGNKISATLLFILEKYTNTEHISLMRDYDSLKTISRGKFSYAKFAKLKELAKNSVGHHDENTDLLISTYVSIIKTFNDKIDPIEKQISTIIKDLNPRMLTIPGIGEISAATILAEYGDISNFSSPNKMLAFAGLEPSIIQSGTIESNGKMVKHGSGHLRYSIMNTAMIILRYSPTFYDYYLKKRSEGKSHRVALSHICKKLLRVIYTLEKNNIDFNPSLLK

SEQ ID NO: 300144 - protein, 273 aa, unidentified
MTDTIGIDISKTTLDIYRISDGKRARFGNDASGLKAMRKWLGAAPLRVVYEATGRYHRDLEAALAAFGHHNVKVNPARARRFAQATGQGAKTDRVDAEMLARMGTVLGLEATPVKTDELHEIKELHVARVALIKDRTACRNRIGMARNKIVLAQLRARLRQIDTQIAQIDRELRSRIKADPGLARRYEILTSIPGVGPVAAIALIIEMPELGAMSSKEAASLAGLAPITRQSGTWKGKARIGGGRTALRCMLFMFSARPVPPLAAASAARSSA

SEQ ID NO: 300145 - protein, 387 aa, unidentified
MPRPNELRRSLAALDQDSTLIAVIEISQSSWLVAGMVPGINRQPLKKLAADEVALLQLLYRWREEASKAGRTIDRVAVAYEAGRDGFWLARWLRGRGIEAHVIHPTSVAVSREHRRAKTDRLDTELLKRAFLGWLRGEQRHCSMAMIPTPEEEDAKRPNRERENLVSDRTRIVNRMKSSLARLGIRGFKPTLRKAPERLARLLTPEGALLPPNTLAELQRDMARLRFIMDQIREIEAARLVRLEHNPEQGSHAMVRLLAQVIGIGIETADMLVHEVFVRNLRDRKAVARYGGLTGSPDESGAKRREKGLARAGNARVRRGMIQLAWRFLMFQKQSALAQWYRARTADARGATRKTMIVALARKLLVALWQLVTTGEVPEGVVMRRAA

SEQ ID NO: 300146 - protein, 341 aa, unidentified
MNIVTVGIDLAKNVFALHGVDQYGKAIFIKPKVARGQLLEMVAQLPPCLIGMEACSGAHHWAREFSRVGHTVKLMAPKFVVPYRMSGKRGKNDAADAAAICEAVTRPNMRFVPVKDVDQQAILCLHRTRQGFVEERTALYNRLRGLISEFGIVLPQKVERLRREIGAHLEALPGWANRCVGDLLAHADRLNEHIDEYDKAIALAAKQDQRSRQLMQLPGIGPTTASALVASLGGGHDFKNGRQLAAWVGLVPGQYSSGGKARLGRITKAGDAYLRSLLVMGGRSVLAGLGDKQDRFSRWARNLVERRGYWKAAVAIAAKNLRLAWAVMHYGEEFRRIEDLA

SEQ ID NO: 300147 - protein, 405 aa, unidentified
MEESRFAGVDWASEEHAVCVVDVEGRIIEGRRYRHDERGVRALCARLLALGVELVAIERPDGLLIERLLDAGLSVIAIHPNQVAAMRPRFSAAGGKSDSFDAFVLAELARTDSHRFRVLVPDSDQTKALRALSRAREDLVGHRVAIANELRAQLECFWPGAARVFAEVDSPIALAFVRRYPSPADTRGLGEQRMARFLARHHYCGRRSPRELLGRLHGAGCGRADQLETEARRQIVLALVAALEPIVARIGELTSEIRAALGDHVDGPTFRSLFRDPKSAVAAAAMLSEIGDCRDRYPTKAALAADGGQSPVAVESGKSKRARFRWACDHRLRAAICTLADTSRHHNPWAADIYDRARARGATHQHAIRILGRAWCGVIWRLWQDRDVYDPDRHTARQRLTTTTA

SEQ ID NO: 300148 - protein, 344 aa, unidentified
MPTEARPSVYAGLDLHKRNVFCGLIDEESQPIYRRRLPAELPTILQALEAYRPQLKALAVESTYNWYWLVDGLQAAGYPVHLANPAAMQQYSGLKQTDDETDALWLAEMLRLGILPEGYIYPKAERPVRDMLRRRMLVVRQATQTVLSLQSMVTRHTGQSVSAAKLSGWTLSEVRGTFADPCVQETAAAMVELLGQQRHIQHRLEKQVLAVAKPTGSFQRLLTLPGIGNVLGLTICLETGPITRFASAGDYASYCRAVNSRCESDGKKKGEGNRKNGNKYLAWAYVEAAHFAQRYSPRAQAWFARKTARAGRVVAVKALACKLAKAAYHVLRDEVDFDESKLFG

SEQ ID NO: 300149 - protein, 324 aa, unidentified
MTSAKRNWTSAYYSRVKVLREEQVSNHQQAVARLIGELKNDLEMDNEQFLICAEHTGQYTFPLVCACKSVECKLWLENPSQIKYSSGMQRGKNDKVDAKRIAIYASRFGDKVKYYDRPTEEIERLKQLERERALYVTDLAKYKGQMYDQKDFMPAALYRKKTKRMKGLIQELQAAIDAITAEMEKIIGSTEVLARQMELLMSIDGVGKVVALNVIIETEAFSRFDNPRKFCCHAGVAPFSYTSGSSQHSKNKVSHRANKNIKKLLHMAAVSVTHRKEGELKAYYMRKVEEGKNKMSVINALRAKIVARMFAVIKRNEVYTPIYS

SEQ ID NO: 300150 - protein, 372 aa, unidentified
MDKKIAHLGIDYHPDSVTIAVLVQDGKDFYDTLHMANNDKVISKYLNKLSKHFELKLCYEASSSGYTFQRKVASWGYQCDVIAPSLVPKKRGERRKNDFRDARELAQLYAKGLLTVVHPPSEEQEAVRSLIRCRLAFKASVKRGKHQINSLLLSHNFRWSRTKWTNQHRQWLGSLQMPHDFLRQSLNEYLAHLDYLETCVERLDEQIEHLARCEIYAPSVKKLRAFKGIGTLTAMVLIAEITDFRRFPNPRALMAFLGLIPSENSSAGKQKGGSITKTGNIRCRTHLIESMQHYSKNPRLSQQMKHDLSQVDARSALIAINCLNRLHKRYWSLIVKGKLRPVALVAIAREFVGFVWAMMHPEQSAVPQSAAA

SEQ ID NO: 300151 - protein, 351 aa, unidentified
MVTVGLDLHKRYITGCALDPSGSVLSEHRRLEPSLDALGRWLGGLPQPVTVAMEATLYWHWLERQLTERGVSVLVAHPYQVKLIWQARTKTDPIDARKLAELARAKLLPAIWIPDPTTRALRQLLRGRVFLVRQRTVMRNRIHAYLTAETLRCPELDLYSKAGQAWLATVDLPAVVRGQVTLILANHALLTAQVRTLDRYIKAHVKRDATARRLQSIPGIGPFGALLLQAEIGPITRFGSAQELAAYAGLVPSTRSSGDKTRHGHVGRGNPWLKWLLIEPLQTLKLAPGPVGDHYRKLLRAKGKPKATVAAARKFCTYLYWMLKEEWSYTEWLRQHDRSEVRPVQPLGSAA

SEQ ID NO: 300152 - protein, 371 aa, unidentified
MSTTSITHERMVIAIDPHKASWTAAVVDASLQPVATVRVPVSRDGYRALRRFANRWPDPTWAIEGASGLGAPLTARLRTDGIDVVDVPAKLAARVRMLSTGHGRKNDDADAVSVAIAARSARRLNSAAVDGAVTALRAIVEHRDDLVKTRTQTVNRLHVVLTHLIPAGASRDLTAERAAELLRGIRPRAAAGKTLRSLAADLVAEIRQLDRSIAKAAAEIQAAVTDSGTTLTDLCGIGALTAGKILGRVGTINRFRSTAAFATYTGTAPIDVSSGDVVRHRLSRAGDRQLNLCLHVMALTQIRQDTPGRAYYLRKRSQGKSHKEAMRCLKRRLSDVVYRQLRHDANKLEAGPGGHSRAALSSSAASSNPAH

SEQ ID NO: 300153 - protein, 338 aa, unidentified
MYYTGIDLHKKTSFITTIDSKGKIVTRVNTANREEAILSYFAALDDGTKIVIESTSSWYWLYDLLAGEGFDVVISNPVKTKAIASAKIKNDKVDSHMLAQLLRADLISCVHVSTLETRKLKEILRHRSRLVRDATRMKNRIHMLLMKNNCQSPFSDLFGIQGLSYLKEIDLPDYHRQQLETYLWLYQKLKEQIEPLTKRIHGLAKKNHTAQLLMTIPGIGPITAMFIVAEVDDISRFRSYRNLASYAGLVPSLDASAGKEKKGRITKQGSVYLRTAMVEAAQAVARMKNCRLNIFFRRRIVKSGYQKAIVATAHKMLQFAFYVMKNQTPYQETYPVCA

SEQ ID NO: 300154 - protein, 319 aa, unidentified
MAKIVLGIDVSKNTLDVALIFDNRTLSKQFKNSLEGFKLLAAWLASLQITRVHACLEATGTYSEAVALFLHEQGHLVSVVNPLRIKGYAQSNMQRNKTDRLDARLIATFCLTQEPDEWQPPSAEVKHLQSLVRRVEVLGEMLRAEENRLTNVAPQIKSSIERVITLIKEEIGKLERQIKQHISQNSSLKEQSELLQTIPGIGARTANLLLSEIEFERYSSARSIAAQAGVTPRKRQSGTSLKQTGLSKLGNARLRKALYFPAIVARQHNEVIKEFAERLKKNGKTPMQIVCAAMRKLLHIAYGVLKHKRAFDASLAFSA

SEQ ID NO: 300155 - protein, 414 aa, unidentified
MDMIFEDVAGLDVHQKTVVACVRKLQPQGTVKEEVRTFGTMTGDLLQMSDWLASEGVTHVAMESTGVLWKPVWNILDGRFELLLVNPRELKRVPGRKSDVSDSQWIAHLLQCGLLRSSFVPSRPQREVRELTRQRTQLIREQTRIVNRIHKTLEDANIKLGAVATDILGKSGRAMLSALVGGERDPARLAQLAQGRLRAKKPQLKQALQGHLTEHHVFLLETMLAHLNYLEQEIAKFSRRIEECLRPFLKPEQVQRLDLIPGVNQRTIENVVAEIGSDMSRFPDEQHLCSWAGMSPGNEESAGKRIRSRTTKGDSWLRCALIEAAWAAGRTKHSYLGALYRRLAARRGKKRALVAVGHTLLVIIYHMLKAPVAYQDLGPDYFDTLKPEQYRRYLVKRLQSLGFDVELKPRDSAA

SEQ ID NO: 300156 - protein, 350 aa, unidentified
MKQILKQVAGVDIAQKELVISIGRMFNDLTIDIYAYKVFKNTATGMKAALKWVKSMTSEERRVLYVMEATGIYHEKFAYYLSENQYDISIVLPNKISNYFRTLEIKTITDKTSSQTIAQFGLERKLDLWQPPLPVFKNLKQLTRERGQIVEERTRVKNQLHAEVLEAVPNSRSIKRLKARIKFLNSQEQEIKNDIQDIINSDHELKNEIDKITTIPGIGQLTVVTALAETNGFELIRNKKQLTSYAGFDVKEKQSGTSVKGKARISKRGNKYLRSAMHLPSLSAVKYNQNHKDLYSRIVSRTGIKKKGLIAVQRKLLELIYVIYKNETVFMSNYENEKRADNLLQTAALL

SEQ ID NO: 300157 - protein, 343 aa, unidentified
MQVVRIGLDLAKYVFEVHGVDERGNVVLRKTLRRGSVSKFFANLPHCLIGMEASNGAHYWARVLTALGHKVRLISPQFVAPYVKSNKNDRNDAEAICEAVGRPTMRFVPPKSPEQLAIQALHRIRQRLVQSRTRLANQIRGILSEHGIVIARDIWRLRRALAEIAGNAPDDLNPLLRVLIMEAQGELIELDRRIASCDRRIRELYRTSELCQRLGKIEGIGPVTATALVAAVGDQSCFKNGRQFAAWLGLVPKQQSSGGRNRLFGISKRGDRYLRTLIIHGARAALGKAAGKEDPRSRWLASLRQRRHPNVAAVALANKNARIAWAMLAGNISYEPARSVQAA

SEQ ID NO: 300158 - protein, 404 aa, unidentified
MKGPIVSIDVSKGKSDYQAFKNLNVKYAGSRSIKHTKEGFDEIVNLVREMEKKLETEVCVVYEATGVYHRVLKKVLEDNNIKQFIINPLLSAKTRKNDSLRCPKTDKLDPKSIAKTYYSHSLHNSHKQETIYHELRELSRYYEDILVHIRKDKVAFRAQLDIVFPGYDTLFDDLYGPVALAVIEKYPHPEMLQKKKINTVSKVIQSKTCHRQAVSDTMADKAIEYSKTIYSGCDKDDIEVLILQRFIKKLNEDMAEAERTIGEMIKLAQELPDFSIIKSIPGIGDNLAARIIAELGDMTRFKKKNELVAFAGLDPRISESGKNDGDHMHITKKGNKRLRCLLYLAVTCSIRLKRDDNSIKDFYIKKKQQSNPMCSKAAKTACASKLVRIIYSMCKTGELYQYNK

SEQ ID NO: 300159 - protein, 340 aa, unidentified
MAIVAGFDVHRAQITFDALDRETGEVHRGRIPASPEAVAGWVTRFPDESIHVAVEAGTGWLFVCEALREAGATPHLAEPAETSALRGPKRRAKTDREDARWLRTLLCERRLPEAWIPPAHVREWRTRTRLRKTLVDERTAWLVRVQATLFHHGIGGVPDKLLSDGGREFLAGLELPAAASERIEVALALIEALDRQLAPLERELRRLARRQPGCRALMAHYGIGELTAPTILCELGDVARLSASRKAVRCAGLDVGVHRSDRRSRVGKLTKQGSPQLRWALYESAQAACRPSSPDRSDYLALKARGLSHTRASITIARKLARRCFHTLRELGPEALEPVT

SEQ ID NO: 300160 - protein, 392 aa, unidentified
MAQSKKIRIEDLADVYERCAGLDVHKESVSVCVIAPGAQGRTEGEVREFGTTTRELRKLTAWLMERGVTHVAMESTGVYWVPVWQILEEGGFQLVLANARAVRNVPGKKTDTADCVWLATLLRKGLIQASYIPPAQNRALRDLCRAHSTLVRERVRVVQRIQALLETANIKLDSVISDVMGKSGRQMLEALAGGETDAERLAEYALGRMRSKKPQLVAALEGHFRPHQTFLLQQWLAHFDELSERIDQFREQIEEYVRPFEAAVARLTQMPGLERLSATKLLAETGADLAAFSSPQRFCSWAAVCPGNRRSAGKQRSGRTRHGNPWLRSVVVECARAASRSQHTYFYAQYHRLAPRIGKNCAAMAVAHSMLSVTWYLLTQQVDFQDLGGDYY

SEQ ID NO: 300161 - protein, 342 aa, unidentified
MQVTTIGLDIAKNVFQVHGIDAAEKVVVRKQLRRRQVLEFFKALPACLVGMEACATAHYWARELTKLGHRVRLMPAKDVKAYVKRNKNDAADAEAICEAARRPTVRFVQIKSTEQQGRLMLRRARDLLMRQRTQVINAMRAHLAELGIVAAQGRDGIKELLKIIASEADARLPVDAHTSLVVLAAELQAMQTLIGSIEKRIMVQHRLSEASKRLKSIPGIGLIGATAIAATVPDPKVFGSGRDFAAWIGLVPREDSTGGKQKLGPISKRGDRYLRRILVVGACAVLRYARHKPEKYPWLTKLLERKPFKVVAVALANKMARIAWALLAKGDTYRVPALAAAT

SEQ ID NO: 300162 - protein, 367 aa, unidentified
MAGDSSMCLGSARPFVSQGVTRASLRARTVARGLDPASRKAGPGRGPSRVEAPMSGPAVCVGIDVSKATLDLAVRPSGERWTLANDAAAIQALVHDLRPRAPSLIVLEATGGFEHAVVAALAAARLPVVVANPRQVRDFARATGQLAKTDAIDAQVLALFAERVRPEPRPLADAAAQALDALLTRRRQLLDMLGAEKNRLGFARPVVRRGITQHIHWLERRLDDVDHELGQMIEHSPVWRAKDDLLRSVPGVGPVLSRTLVGELPELGRLSRKQIAALVGVAPLARDSGTLRGKRTVWGGRAPIRAVLYMGALVATRYNPVIRAFYHRLRAAGKPAKVALTACMRKLLVILNAMVRTNTPWRAPARA

SEQ ID NO: 300163 - protein, 421 aa, unidentified
MKSSTAERLKQVPERYLIVGVDPHKKKHAAVVMMQNAQVLGKRKFDNTFGGFEALVSWAQEQVRDTGSRGVMFAIEAGGHYWRNLAYYLNGHDIGLRLVSPFTLKRRREGDDINRRKNDYRDAEMAADLLRTGKFVNTRLPYGTWAELRATHSAYRRMVKESSRMGNTLKALLDGVFPEFAGVFKNPCGKTALAVLSLNVSPTDIAELKATAFVELVRKRFNGRGLAVKKLKQVHRLAGISAGVREGAESVAREVSFLVERLHLVVMQMEQQVIHLKQLVDAIPEGRPLLSIPGIGYITVAGLLAELGSLRGYQNSKQLVKMAGTNPTEEASAGRSGSHTPMSKKGRAGLRWVLWSAAANLIRVNEDFRCWARARRERAAHAHPLHRREVIGAVCNRLLRLAYALVNRGECYRYPTAEVAI

SEQ ID NO: 300164 - protein, 338 aa, unidentified
MAIIAIGIDLAKNVFAVHGVDAAGKAVLVRPAVRRDALLELIAKLPPCLIGMEACSGAHHWARQFQQFGHNVRIIAAKFVAPYRLSGKRGKNDAADAQAICEAVQRPQMRFVPIKSEDAQGRLSIHRVRQGFIEQRTATINRIRGLLSEYGHVLPQRAEVVRREAGQCLEDLPGWANTAIGDLLSEVHRLDERIAEYDRHIEVMAKADERCRKLMEVPGIGDKTATALMASIGSAHDFKCGKQLAAWLGLVPSQYSSGGKQRLGRITKAGDGYLRMLLILGARAVVAAAKKKQDRLSKWVTELAERRGYWKAVVAVAAKNARMAWAMLSKGEAFRPMA

SEQ ID NO: 300165 - protein, 403 aa, unidentified
MNSVGIDISKGRSTIAVMRPFGEVVISPFEVRHTGSELSKLAKQLKSLDGETRVVMEATGNYHASVAKLLHNAGLYVSVINAKLVHGYGNNELRRVKTDRKDAVKLANYGLDRWLTLPRYIPEEDTRLLLKNCYRQYRQYSKVQTVLKNNLISLLDTVFPNANRLFSSPIRGDGSEKWVDFVAEFWHCRCASEKSERAFTSKYLRWCRKHGYNFREAKAHTIYAEASGHIGVMPKSETTKLLVKQAVSQLRATSTALAALKQEMQSLASVLPEYPVVMDLFDVGPTLGPQLIAEIGDVRRFYSKKALVAYAGLDAPPNDSGDVTGRHKSMSKIGASSLRRTLFLVMSVYLQTAPLDEPVYQFMDRKRAEGKPYRVYMMASANKFLRIYYATVKAYLESLEHTA

SEQ ID NO: 300166 - protein, 433 aa, unidentified
MKVKYEDRQKQKVIAITTDTLVVGVDIAKNYQWARFVDFRGIEHDHALKFKNSKGGFETILARIRGICKKENFAKVVIGMEPTGHYWKAFANWLKKQEGIKVVLVNPYATKQAKELDDNSQTKSDKKDALTIAKLVKDGRYFELYLPHDVYAELRGLSTTRTGLNKRKNALKNTITAVMDEYFPEYEEVFKCPLSGKASRHILKTCPFPKFILELGEDGVTDEIKKAVKKTVGRKKAAQLIETAKESIGVDYGEEAAGLKLRLMLEELELLEKQAEELEVQMEAALQKTGYAGFLLSIKGIGVVTLAACLGEPGNPARFENPRQMSRMAGYNLVEDSSGKNKSGTKISKRGRKNLRSVLYQMALIMVATNDEMKQLYHYLKTREEAPLRKMQALIVVSKKILALIHALAKKKENYDPGKVFGHVRREQMKAAA

SEQ ID NO: 300167 - protein, 356 aa, unidentified
MSENITADQGVTIGLDLGDKHTHCCSLDDTGEVEETFRVRSTVPALSKRFGGIAPCRIVLEVGTHSPWVSRLLSHLGHEVIVANPRRVRLISANDSKNDAVDAEFLARLGRADPKLLSPITHRGQEAQKDLVLLRNRDGFVRSRTQLINQARGFAKSLGDRLPSSSTVAFPKRVREAKKEKLFSGLETLLQLIDTLTAAIGDMDRKIERLCRERYPETMLLRQIKGVGPLTALCFLLTLEDPHRFKKSRSVGAYLGLRPKQRDSGEQQPQLRITKSGDEMLRRYLVTASHYILGPFGPDTNLRRVGLRLAEHGGKAGKKRAIIAVARRLAVLLHRLWVTGEEYQPLGYGTAASKAA

SEQ ID NO: 300168 - protein, 341 aa, unidentified
MKNKSFIGIDISKNVIDASIFCEGTPIKDFPHAVFNNSRKGFGEMCTWLKKNHVVLSNCLFGMEFTGSYSMELEKFLNARKFQFCMLSTHVVKHHPMGPKDKSDKIDSAKIADFLYRYDGTECVKPYKMPDKTMQRLKALTNERKFLVEQRTCFMNRRQLCTTKEAAQLYDGYIKEFSHDIENIELKMQNLLETDDSLSTTYKNLLTIPGIGFVNAMNVIVITRNFTAFETARQYASYVGVAPHSHTSGTSVKWRPRPSARCDGQAKADLSMAATVAVQYDAELQSFYNRKLGGKQDSDTKRKALNAVKFKLILRMFAIGKQNRKWDPLNSKSSNEKLAIS

SEQ ID NO: 300169 - protein, 317 aa, unidentified
MNSINNQNQINVGVDTGKTQLDIYIRPLGIYFVVSNDESGIKEAITEIKKHKVTRVVIEATGRLEQPFIMACAKANIPFVIANPVNIKRFAGAINQRAKTDKLDAQLIAHYAEVIKPKLSQLKPEQIRLMSDLLSRRRQLMEMQTMEKNRLQIMPKEITSSIKPMLTVIKNQLEKTDNKLHKLIESCEEYKTKNDIIQSVPGVGKVVAFNLISEMPELGYINNKEAASLVGVAPFNRDSGSYKGKRMIRGGRSQIRTAMYMAMMSAIQCNPTFKAMYQRLVAAGKPKKVAIIACIRKLVITLNSMVRDGVYWDPKMN

SEQ ID NO: 300170 - protein, 403 aa, unidentified
MRRHKYFEINPPHPNPLVSEFPSNLVCESRRGKMGLPSGLQAGRQWRGRVRNPLAWVTDQVRWEPEPFVPGSETRTVDRAALESLLVFARMSPNTMTTIHAGLDIAKLNLQLHLAGRLHDLPNTAAGHRRLLKLLAGQPGVHVVCEATGGYERDVAAALHEAKVPVSVLNPARVRHFARATGQRAKTDDLDAAVLSAYGHALQPKPTAPRTQQEQQLAELVRRRVQVVEILVGQRQQIERLTMPALRRQAQSLVRRLERDLEQIEGQLKALRTQAAALDERVQKLEAITGVGAITALGVLAELPELGTLNRRQAAALAGLAPHPRESGQWHGRRRIGGGRAPVRRALYMAALVAAHSNRQLKEFYQRLRAAGKPAKVALTAVLRKLIVLMNHILKNPDFALQN

SEQ ID NO: 300171 - protein, 414 aa, unidentified
MSDVHCGIDWAEDHHDIALVDRHGDLLARRRIDDDSAGLTSLLALLAEHGDRAEDPIPVAIETPRGLLTACLRATGRPVFPINPMAVARYRDRHSIAGRKSDHGDAVVLANILRTDAHAHRPLPADSELVQAIAVLARAQQDAVWARTTAHNKLRSHLREYYPGFIAAFATARGGISRPEARAVLAAAPEPASAAKLTHTQLQTVLRRAGRSRGITAEAARLRDELRRPQMRQLPRVEQAMGRQSLALLGQLNAACAAADDLEEAVLEAFEQHHEAKIITSFPGLGSLTGARVLAEIGDDRTRFRDAKGLKAYAGAAPITRASGKTTSVQHRRIKNNRLNAAGYSWSFAALTASPGARAHYDRRRAAGDRHSAAQRNLYARLLGCLHHCLTTGQPYDEPTAFGSTSSVKSTVAA

SEQ ID NO: 300172 - protein, 350 aa, unidentified
MNKITTLGIDLAKTVFQLHGVDCAGKVVLCREVRRTQLMRAIAQLAPCLIGIEACGGANYWARRFAEFGHRVKIMSPQFVKPYRKSDKNDRNDAEAICEAVSRPSMRFVAVKSIEQQDMLTLHRVREGLMKERVALINRIRGSLTEYGIVIAKNVCNLRRTLPSILEDAGNELTTIGRQLFSDLYEELGARERRLAQLEQSIRALGSQHDVVRRLETVPGIGYLSATALYGAVGDAKHYKNGRQLAAWMGLVPRQCSSGGKQRLLGITKRGDKYLRKLLVHGARSIATHAERTPKSRDRWLNELRERRGKPRCYVAQANKTARIAWAIMARGEVYRAPEATPDTLVAVAA

SEQ ID NO: 300173 - protein, 336 aa, unidentified
MKKIFVGIDVSRQWIDVCVTTDGKSILHGQFENNIMGFKAMIKWIKQLNNQPNEWLICMEHTGIYALPLWHFLTDKNISYCVVAGSVVTGGLEIRRGKNDKIDASDIAKFTMRYQDELKPHRLPTQVLQRLKMLFGYRERLVKAKVLISVPANEAKQFAGKESKEVRTDSSSLVQIIEARIKKVEKLMLEVINSDEQTAKCYKLIVSVPGFGLVTACYLLIITQCFTILTRSRKLSNFGGTAPHPHKSGKSIEGKTRVSPIADKKLKALLSRGAGSLLQYNEEIQRYAARMIAKGKHENLVRNNIKNKMLHMVCAVVKRGTPYIENYVSPYQQNVA

SEQ ID NO: 300174 - protein, 454 aa, unidentified
MRKPQVVPDEDHEVMYERVAAVDVAKASGVVCLRTPDPARPGRFVNRIWDNVPATRAQIAGLGRELLRCQVQMVTLESTSDYWRIWYYVLETAGLAVQLVSPSQAKNLKGRPKTDKLDAMWLARLTQQGMLRPSFVPPAAIRRVRDFTRARQDLVAERTRCLQRLEKLLEDAMIKITSVAADGMKAKSVVAMVAALAAGERDPRTLADLAKGPLRAKRDALAEALDGMFDSHHGVIARMLLGQVAFLDQQITRMEDQAIAALAEVPGSWGVDASGQAGPGCGVTPGSPVLAAAHRLAEIPGISVWLAIVIIAEIGLNMAAFPTPAHLVSWMGLCRSAAQSGTRHGKGKPKKGNSYARAAAGQAAIGAARTATFLGERYARIARRRGKAIAQAAVARSIMIIVWHLLADPAARYRDLGPDFYASRINRDKKIRNHLRGLQALGVTVTITDDEQAA

SEQ ID NO: 300175 - protein, 371 aa, unidentified
MNKTVRYLGLDVHKNSIVLAAADSGSRDEAEYVGTIDHDMSQLDKIIRKYISRGFDVDCVYEAGPCGYEIHRHLTGNGIACSVIAPSRIPRQSGDRVKTDRRDAKTLARLHRAGELTPVYVPTVEDEALRDLVRAREDSKQALRRTKQQLGAFLLRRSIIYPGKTPWSKAHFNWLADITMEHRAQQIVLQEYIDAICTCQERVDRITQQIYELSEQSRLKPLIDALASMRGISTLIATILAAELGDLHRFDHPEQLMAYVGLIPSEHSSGPKVRKGTITKTGNGHVRKSLVEAAQAYRLPARKSRAILKRQQGVPKRIQEIAWKAQCRLCGRYRRLIGKGKKANVAKIAVARELVGFAWAVAQEIQIPATA

SEQ ID NO: 300176 - protein, 342 aa, unidentified
MQMETRGKKHVWVGVDVSKETFFAAVDVLDEDGSKKPVNALSAKEFELTEIGSGFFLKWLSESFADYDFSIVMESTGCYSKKLKGFLHEKQSDLPISILNGRQSSNYVKSLGTLHKTDKSDAQALARFGTERSPKPALPDDPVRESLKELSRERSALLKAKAALENRSDSLFAAFTKDINNRAIVALNLQISAIEKEMERCIKANAELRHEAELMKTVPGVGSTSAYGFLAELGSFKQYSSRRLSSLSGLLPHVFISGTSVNKTCLSKRGSARVRQLLYLDCMTAVDKIPALNAQYQNLVSRGKTKMTARCACMRKLLLIIRAVVVEDRPYEKNPKKMTKTA

SEQ ID NO: 300177 - protein, 368 aa, unidentified
MLVAVTRKSDDRVVVAVDPHKASWTAAAVDGSLQPLATVRVPVSRDGYRALRRFAQCWPHAGWAIEGAAGLGAPLTTLLRTDGIEVIDVPAKLAARVRVLSSGHGRKNDDADALSVGIAALTSHALGTAEIDAATTALRAVVEHRDDLVKTRTQTVNRLHVVLTRLVPAGARRHLSADHAAELVRGVRPRDAAAKTLRALAMDLVSEVRQLDRRIAKAATDIQTAVTASATTLTDLHGLGALTAGKILGHVGDVGRFRSAAAFASYTGTAPIEVSSGEVVRHRLSRAGNRQLNFCLHVMAIAQVRHDTPARAYYLRKRSEGKNHNEAMRCLKRRLSDIVYRQLIGDAVKQKAGPGGHSGAALSSRAAS

SEQ ID NO: 300178 - protein, 387 aa, unidentified
MLQSNDLSRSLAAVDQDSTLIAVVEMSQSSWLVAGMIPGIERHPAKKLEASESQLLSLLHRWRDEATNAGRTITRIAVAFEAGRDGFWLARWLRARGIEAHVIHATSIAVSREHRRAKTDRLDTALLKRAFLRWLRGERDHCSMVAIPSLEEEDAKRPSREREGLVGDRTRIGNRIKSTLARLGIRGFKPSLRKAAERLEQLSTPEGTSLPPNTLAELRRDMARLRFVNDQIREIEAARLERLVQQPDKGGHPMVLLLARVIGVGIETADMLVQEVLSRKLRDRRAVARYGGLTGSPEESGARRREKGLARAGNARVRRGMVQLAWRFLMFQKDSALAQWYRARTADARGATRKTMIVALARKLLIALWRLVTTGEIPQGVVLRPAA

SEQ ID NO: 300179 - protein, 364 aa, unidentified
MRKNTQVAVTMESQMETFIGIDLATKKSKFCVLDAQAQVLFRGEVPTTREDFEKRFAPFVPARVAIETGSVARMADDVLSGMGHTVVVANPRRVSAITKNIKKCDEEDAELLARLVRSDPHLLSPIEHRSATAHEGLSLLRARDLCVRTRTAHVNLVRGMAKGFEVKLPTCEADVFAERISEVVAGTTLGTLLAPILKLITELTKSIDEFDNMLAEFGAKHVPTAKPLQRISGIGPITAIGFALAVDDPKRFPNQRAIGAYFGLVPRRDQSGELDKKLGITKAGDPLIRRLLTQAAQRILMTHSKDCDLKRFGEHLLNAGKTNRKRAVSAVARKLACQMLRILKTGVPYEPNFQLQQEGKKTQT

SEQ ID NO: 300180 - protein, 418 aa, unidentified
MLGVGIDWAEEFHLVALGSPGEGVIEVLRVEHRPEKVSALVERIAGLEADPAEVRVVLETRHGLLVEALVDAGYTVLPVNPELVSRRRGPARKKDDAEDARICCLLALDRHAGLRRLIPHGQVAGELRSIARDDERACRDERRLLNRLRADLIVTFPAALAIAGEDLGATRILRLLERWPTAGALAAASREEIIEFGRAQRTGYLQRFADRIQAALAEEQFIAPPHLVRAKVDTIRLLARQLLLIDAQRRAWEKRMGELLLGTPGQPTEDQPGNAFPGGEIYLSFPGLGRRLAARTAGEIGEHIEQFTTPNSLQCYAGRAPVTRRSGKRDLVVAHRLACNRYLADAVHKWAFASLRRSAWAREFYDAQRARGKNHHAALRALGNRWLEVLWHCLTNDMPYDEAVHIANRNRALSSIAA

SEQ ID NO: 300181 - protein, 316 aa, unidentified
MKTVTSQNINVGVDTGKQSLDIFIRPLDIYFTVTNDEKGVKEAISLIKKHCPQRIVIEATGRLELLFVMACAKANLPFVVANPVHVRRFAGAIGLNAKTDKLDAQLIAHYGEAIQPKLSTLKPESMRLMADLVARRNQILNMQTMEKNRLQIMPKGLHSTINPILTAYKNQLAKIEKQLVKLIESCPDYQEKNDIVQSMPGIGKVSAAALIGYFPELGYVSNKQAAALVGVAPMNRESGRYQGKRTINGGRPQVRTVLYMAMMSAMQCNSVFKRTYQALLAAGKPKKVAIIACVRKMVVILNSMVRDGKKWEENMV

SEQ ID NO: 300182 - protein, 397 aa, unidentified
MYIVGIDIAKRKHEAAVIDGEGTVIIKPFSFTNNCSGYNRLLTMLAKAKLPLDEVSFAMEATGHYWLALFTRLQKEGFRVQVINPVQTNSIRSFYIRQAKTDPRDALLIAEVIRFGHFSESTLHPENIYELRELCRGRHAIVSMQADVKRKVVALLDQVFPEYETAFTNMFSDTSMAILQTCPTPKELSEMPLEELCHLIEVSSRKRFRMAKARELQELARNSFGFAMAGDVFSTMIRLYAKHLDFLKQQVREMDRKIAEIMDTLDTPITTITGIGPTLGAYILSEIGDISRFSSAAKLAAYAGIDPTMRQSGEYNGVRNRMSKRGSPYLRHAIWLTASSAVLHDPALKLYFQKKRDEGKPYMASVGHACRKMVSIIYAVMRDNKAYTPYIPNEISA

SEQ ID NO: 300183 - protein, 344 aa, unidentified
MEITTIGLDLAKSVFQVHGVDATGQVVVRRALRRAQMVPFFARLPSCLIGIEACGTSHFWARELIKLGHQVRLMPPAYVKPYVKRGKTDAADAEAVCEAVTRPTMRFVPVKSAEQQAALSMHRTRDLLVKQRTQAINMIRGLLAEFGIDIPKGLERALLMARRIVDGEAPDVPMEAAKIVGTLSQQALDIHIRLREIDRDLLVWQRGNDVARRLLTIPGIGPVGATALAASITDAHQFRSGRQFAAWLGLTPLQKSSGGKERLGRISKMGDKYLRKLLIVGMTSLVRRAKYNPRTVDPRLADLLARKPVRVATVAMANKTARIVWAVMTRGETYRAGHRPALAA

SEQ ID NO: 300184 - protein, 488 aa, unidentified
MKPDSPALYVGMDVSKGYADLHAINHARSVYATGRFDDTREGHERVLKVLTQWREQHPGAAMCVGVEASGGLERNWVRMFHERMPGVTVARLNPLAVKRSLAVKVHRSVTDQGSAAGIATYLAEGRPLHETRWDPRREGLQELYRDIRARIEHLQQTKNRLQSLLPRVHPGLVEFTRSDFAKWLLTVLTRYPTAPALACARVEDLVHIPYFKDEARAVEMIEAAKVSVAGQTDTLTARTVVSLASEILHQQQQIKALQDAMYEELKDDPGIRAMSSITGIGKWSAVCLRVEIGCVERFPTAEALTAYAGLDPVYHQSGDKTRVCRISKHGRRQIRAVLYMCVCSALRSNPVIDVFVNRLIAAGKPKMVALTAAMRKMLHLAYACWISETSFDPNHEQARRARRALAPRPDAAVPATNDEASHVANHPSIEETNTVVHDEATGGTAHAVTVASAKPGTVLPRISAPVSRREAQRRRRNAEEQSKRQRPE

SEQ ID NO: 300185 - protein, 416 aa, unidentified
MNAVGIDVSSRKSTVAVLRPLGEVVCLPFDVTHDIAGLASLAEKLKALDGETRVVMEHTGRYYEAVEKALHEAGFFVCAVNPLLIKEYGANSLRRVKTDKADAIKIARYALDNWADLRDFTPMDAIRYDLKTLNRQFQLASKQRTASANNLIALLEQSFPGIRKCFDSPVRSDGTQKWVDFAHSFWHVDCVRKQPFAAFCERYRKWCKRHAYLFKLSNAEEVYALAKRAVVLTPKSKVVKVLVQEAANQLSSISRSVEVYRAEMDRLAAMLPEYPVVMAMYGVGKSYGPQLMAEIGDVRRFERKQALVAFAGIDPMPNQSGDKNVRSNKSSKRGSPYLRKTLFNVIRTYLQCAPQDEPVFQFLNRKQAEGKPFYVYMLAAANKFLRRYYAKLRDYFASLNPLQPVAPIPTILKATL

SEQ ID NO: 300186 - protein, 454 aa, unidentified
MPKPKRSRREREMSPVHAGAAAIDVGATMHVAAVGPGRDPEPVRSFGTFTADLHRLADWFRQCGIKTVAMESTGVYWIPAFEILEQRGFAVVLVNARAAKHVPGRKTDVTDAQWLQRLHEYGLLRASFHPERRIAALRDYLRQRERLLDYAASHIQHMQKALMQMNLQLHHVVSDTTGATGMRIIRAVLAGERDPAVLAALRDQRVKASEETVRQALVGNDREEHVFALSQAMELYDAYQAKVAACDVRIEAALEELEASCPPPAAPLPAPRHRTQQPNALAFPAREALHRILGVDLTQIHGLGPYLALKLVGECGTDLSAWPSAKHFTSWLCLAPSNKISGGKVLSARTRRSSNRAAALLRLAAVTVGRTETALGAFYRRLAGRVGKAKAVTATARKLAVLFYNTLRHGMDYTDPGASYYEDRYRRRVLTNLQRRAKSLGFVLQAAEPDPGSV

SEQ ID NO: 300187 - protein, 460 aa, unidentified
MATQRGKRKKDAKADATEGLPPLNLHAAGIDVGSAEHYVAVPSDRDAEPVRKFGSFTADLHRMARWLKGCRITTVVMQSTGVYWVALHDVLESHGFEVNVANARHTKTLPGRKTDVQECQWLQKLHTFGLLNNSFRPPEEIRTLRGYLRQRENLVAAAATCIQHMQKALTEMNIQLANVISDISGTTGLAILSDIVRGERDPYKLAMHKHSRIRASRQEIARSLEGTWRKELLFVLEQSLDLYQTYQQKIQTCDERIDGQLRSMEPRIDPMSEPIPEPRRGKDARGHQSGFDLRGQLYRITGVDLTRIDGIEVQNAQTIVSEVGVDMSRWKTEKHFASWLGLCPDNRISGGKVLKRGTRHVINRASTALRLAAWALLRSQSALGAKFRRLRSKLGAPKAITAMAHMLARLVYRMLKFGHDYVDRGVEFYEAKYRHQQLERIRKQAAALHMQLIPLTGIVS

SEQ ID NO: 300188 - protein, 340 aa, unidentified
MKLYGAIDLHSTNNVTVVIDEQDRVVYQKRLPNDLALILKELSVYQSELEGIVVESTYNWYWLVDGLMEQGYKLHLANTAAIQQYEGLKYTDDHSDARWLAHLLRLDVLPEGHIYPKADRPVRDLLRKRSQMVRQRTTNLLSIQNLLTRNTGSSLSANRVKGLDVQQVDQLLPDGELALAVKANLSVMSSADEQVELLEQTVTQRVQLRPQFSFLKSVPGIGEILALTIMLETGDVRRFCSVGNLASYCRCVGSQKISNGKKKGQGNTKNGNKYLSWAFVEAAHFAIRYNSKIKSFYQRKKAKTKIVVAIKAVAHKLCRACYYIMRDRVPFNITKAFGQN

SEQ ID NO: 300189 - protein, 340 aa, unidentified
METETNVIWSGLDVGKKTFFASIDIKSESGARLMLDKLPTKEFKRNLNGVNSFLKWQTELTIEHKNAIVMETTGCYSLELIAWIKMLRPDMTVSLQNARMVSDFIKSLNLPHKTDKTDAQAIARFGTERNPEPAVMAEKHWQDLREFERERTALIEVRVDLENRSESLFTLVAKRANQRAISALNMEISEIEREIKLLVLEHEDIHFEVRILTTMPGVNFVSACCILAELGSLKQYNSRQISAVSGLAPRIMSSGTSLNKSFMGRRGSPRLRQILYLDSISAVNKVPLLSAMYARLIAKGKSKMTARCACMRKLLLILRAMVVNSKAYDENYFKTFPKSA

SEQ ID NO: 300190 - protein, 377 aa, unidentified
MKRIKFVGLDVHAETISVAVAEQCGEIRSLGVIPNREESIRKLVKKLGPVEELRFCYEAGPTGYALYWQLTRMGAKCEVVAPTLVPVKAGDRVKTDRRDALKLARNYRAGELTAVWVPDAAHEALRDLVRAREAAKKDELRARHRLSKFLLRHGRRPPMGVKAWTLEYLAWVKRGVQFEQMAQEATLLDYLHEVEHGAARIARLDGAIEEAVKLAPPEMRAVIEALQALRGIAQVSAVTVVAELGEFSRFARAKQLMGYGGIVPGEDSSGERTRRGNITKTGNAHLRRVVVEAAWAYRHRPSVGAKLRKRQAHVSEEVKEISWKAQQRLHQRYKKLLAKGKNKGVVMTAVGRELLGFIWAIGIHVETAQKEPLQRAA

SEQ ID NO: 300191 - protein, 253 aa, unidentified
MDEVKRFVGIDVTKTALDVFIGSAGAAFSVANDEVGIRELLRQLAPADFVILEATGGLEMPVASALAAAGIAVAIVNPRQVRDFARATGRLAKTDRLDAELLARFGDAVRPAARPLANEQAQALEALVTRRRQLVEMLTAEKNRRASAPKVSHRSIDDHIRWLEKRLAGFDDELAELIRNTPLWRKRDELMRSVPGVGKVLSSTLLAHLPELGALNRKQIAALAGLAPFNRDSGSLHGSRCIWGGRAQVRRVL

SEQ ID NO: 300192 - protein, 366 aa, unidentified
MKKKIAYVGVDYHLNSLSMAVMIEGQKKVYETIRIKNEDKLTHKFMKKLSREFEIQACYEASTNGYAFQKKMKSWGYHCDVIAPSLIPQKSGSRRKNDFRDAMNLVQNYAAGMLSIVHPPTQDEEAVRSLVRCRMAFKESEKRVKFQINSLLLAQDLHWPRSKWTFQHRNWLSDLKMPNEHLQMVLEEHLGHLAYLEARLAYLDGQIEEIARSEVYAPSVRKLRAFRGIGTLSAMLLIAEITGFRRFKSPRALMAFLGLIPSEDSSGDKRVNGPITKAGNRRCRTQLIESVQHYVRSPQISLQMKSDLAQVDAQTANTAIKCLKRLHKRYWTLAMRGKIRPVAITAIAREFVGFIWAVMQPEPMAV

SEQ ID NO: 300193 - protein, 391 aa, unidentified
MILAGIDVAKDKHDCFIMNSDGEILVKAFTFSNNLEGFNFLYEKIRSVTKPKDKIKVGLEATGHYSYNLLGFLLNKGLPTFVINPLHTNLFRKSLTLRKTKTDKVDSRTIAMMLMSDVSLKPYTDTSYHNEELKSLSRYRFTKVQERSKLKTSVSRLVQILFPELEKIVCTIHTSSVYHLLEEYPGASYIASVHLTKLTNLLMEASHGRYNRNIAIKFREAARNSIGSILPAKSLELKHTIKLIRELTVEIDEIDAEIKKMMDSIASPITTIPGIGYSMGAMIISEIGDFSRFSSPDKILAYAGLSPSTYQSGQLNNCYSHMEKRGSRYLRYALFTVAQKVCIWDNTFAEYLSKKRAEGKHYYVAISHAVKKLVRVIFHLERTGQAYLKAA

SEQ ID NO: 300194 - protein, 310 aa, unidentified
MTIICGVDVSKSWLDAWIEPAGHQRFANTAEGVAELGVYCRAHHAALVVMEASGGLEQPAYLALWQAGQPCAIANARSVRKFAEAMGYLEKTDRIDAMMIARFADAKRMVATPPPSADQQRLTALAARLRQVTADLGVQKQRLHSVRDPFARQSVQEAIAFFTTQASRLASEIAALIEVDPLWVALDRTFRSIKGVADRTVAYILAELPEIGTISNRAVTKLVGLAPLPDDSGQRRGRRSIRGGRAGLRSILFLVADVARRYDQSLTDFRERLLARGLSKMEIRIALARKLLVRLNAKARDVRAELPHAL

SEQ ID NO: 300195 - protein, 407 aa, unidentified
MRPIYERCCGLDVHKKTVVACRLTPEGSQTRGFGTMTGELIQLRDWLLEAGVTHVAMESTGVYWKPVFNLLEDQGMELMVVNARHVKAVPGRKTDVKDAEWLAELLQHGLLKASFIPDRESRERRELVRYRRSLVEQRAHLVQRIQKLLEGANIKLGDVASDVMGVSGRAMLQALAAGVDDPAAVAGMAKTALRNKIPQLERALTGSVGHHQRFLLRSQFRLLESIETEIAALDEEVAERMRPFQTALDRLDEIPGIGRRAAEQILVETGTEMSRFPTSGHFASWARVCPGNNESAGKRQYASIGGGNRWLRTALLEAAWTVSHSRKPTFFTARYRRLAARRGRKRAAVAIAHSLLIAVYHVLKDGVVFQDLGPTHFERRNQEAIVRRSLHRLEALGYKVTVEAMPA

SEQ ID NO: 300196 - protein, 422 aa, unidentified
MIGADPHKHSVTIEVVDERERILHKGRYSTDTDGYRQMLAAARRYPRRRWAVEGCNGIGRHVAQRLVADGESVVDVPAKLAARARVFDTGNGRKSDPADAHSVAVVALRTRHLTVVRADDELVALRLLVDRRDELGRTRTQTINRLHRLLLELIPGGAKRFLSAAQAQALLGSVCATDVAGRVRHQLATELLAEIVVLDAKMKASDKTLRQAVTATGTGLLDLYGIGPASAARILGDVADVARFGTRARFASWNGTAPLDASSGAQERHRLSRAGNRRINRALHIMAIVQIRHDTEGRAYFRRRVAAGKTKMEALRALKRRLSDVVYRQLVADMKKASPAGHPEATTTSSAADPTPTVSSSDQSQPGLATEPTTARHSRRPTAFRRSTRIRTAAPGPDPRRPAPADTHDGPGPRQHPTPGHS

SEQ ID NO: 300197 - protein, 343 aa, unidentified
MRLTDRDSLVKERVNMQAGEGIIGIDISKDSFDVVLRSTGGEQHRVFSNDQKGYKTLVGWAEKQPERVVHICMEATGSYWEGLAEYLYQGEYTVSVVNPYQIKRYADHLLNRNKTDKADASLIAEFCEKDRERLRVWKPFSPEIKALRSMGRRLDELQDMKQQEQNRLKSGVRDLVVIESLEENIRQLKDQIKALWKKIKEHVKQHPDLREQQRLLMSIPGIGKLTAIKLIAEIGDIRDFSSASQLAAYAGLAPKQFRSGSSVRKQTRISKQGRTELRRCLYMPAVVASEHNPIIMDLKRRMLASGHVMMEVIVAAMKKLLHLVFGVLKSGKPFDPDYGSHSC

SEQ ID NO: 300198 - protein, 397 aa, unidentified
MIGIGIDVSKGKSTVAIINSEGELILRPTEFQHNQSSLQKLIDLINSFKDDHRIVMEATGHFHYPILNRLNQEGFFLHVVNPYLMKKYSDNEIRKGKTDKKDSIKIAKYALEKCFTMKRYEAVDMKYDELRFLSRQYNQMISMKVKSKVQLSNLLDEIMPGIRKLFLTSSISPEDNRLYSFIEEFEHFDLINMMGEKRFISKYLKWVKKVGYRNGAKKSTAIYELAHNSIPTRPHDSTTCLAVAQCLSVLRQNEIACNEIISQMQSVAYTLPEYATVRAMKGVGDKLAPRLIAEIGDIRRFYNAKALNAYAGNDAPPYQSGQFEGTRRHISKRGSTSLRKAGYEVMKCLKTTKPTEDNAVYLFMLKKEAEGKPKNVAKMAALNKFLRIYYARVMELY

SEQ ID NO: 300199 - protein, 336 aa, unidentified
MNIKRIGLDLAKQIFQLHAVDHHERVVLRKTLRRSQMLTFFTRLEPCLIGIEACGSSHYWARELTRLGHIVRIIAPQFVKPYLRGNKNDANDAEAICEAVSRPGMRFVAVKSEAQQCMQAEHRVRARLIRDRTALSNEIRGMLGEFGLVLPVGLPALRRALPEILSQQEQWDNRFIRLLCELAEELQALDERLKRYDRRLKQLAQEEARIRRLQEVSGIGPVTASALVAAVGDAGQFKNGREMAAWLGLVPRQHSSGGKSRLGHISKRGDSYLRTLLIHGARAVLNACGHKEDRRSQWLKSVAERRNRNVATVAMANKNARIAWAILSREEEYRVM

SEQ ID NO: 300200 - protein, 349 aa, unidentified
MMRNKPRGAAVYGVDLGKNLFHVVGVDTAGQVIQRAKFRRETVLTFFERADPAIVGMEACPGSQWFARKLQAMGHTVRIIPAQFVKPYVKSNKNDTIDAAAIAEAVTRPMMRFVEVKTAEQLDLQALHRIRNLMVTNRTRLICQMRAFCLEQGIAIHQGVGKFKADLPRVLANEENDLTAMMRRLLVDLFDDLKKLELRIADVSREIEAIAARDDRSRRLMTVPGIGPLTATAIVAAVGDGRQFRRARDMAAWLGLVPREHSTGGKTTLLGISKRGNRYLRRLLVHGARSSVMHMDRSRDRLGAWLDGLERRMHANKVTVALAAKIARIAWVILTRPGALYERREPAAT

SEQ ID NO: 300201 - protein, 340 aa, unidentified
MNVATIGLDIAKHLFHIHAVDPGGQVVSRQRLRRDEVISFFSSLTPCLVGIEACATAHHWAREIQQLGHNVRLIPPAYVKPYVRRGAKNDAADAAAICEAVSRPNMRFVPIKSVQNQGFLMLHRARGLLVRQRTMTACAIRAHFAEFGIIVGQGRQRVDGLVEMLDDERLTLPAIARVALAALVNQLKELGQQIEAIERELADLQRTNPMAKLLSSIPGIGPITATALAATVPDPTIFRSGREFAAWLGLTPKQNTTGGKDRLGRITKQGDAYLRHLLVIGARNVVRYPKARSRVGGGWIEALLERRRPMVVAVAVANKLARVIWAMMTTGEFYRPKLAT

SEQ ID NO: 300202 - protein, 314 aa, unidentified
MKRILKIGMDVHTTNYTLCAMEPIIGEDDRVFATIKVTPDYKNILLFIENLKTKLGLNDEYDIQCGYEAGRLGYSLYNQLTAAGVKCVILAPTTMLTPQGVRIKTDMRDAYMIAQCLSYGGYHAVYIPTEDDDSVKEYLRMRNDHKLALKKIKQQINAFCIRHGFCYDGTKWTLKHLKWLKKLEITNELYRETLDEYMASYEEQEAKIERYDKRIEEIAEQTKYHDKVKKLECFLGIKTHTALSLIVETGDFERFAKGNQYASYLGLAPGENSSSDSIHRLGITKAGNSHLRQLLIEASGGIYERKEMVYPWNE

SEQ ID NO: 300203 - protein, 343 aa, unidentified
MNVFIGLDVSLASTAICVLGPQGKVVEELEAASEPEALVRAMASLPYAVDAIGLEAGPLSQWLSKGIEEAGFDVVLMETRLVKAALKAMPIKTDRRDAQGIARLLQMGWYRPVHRKSVSSQEIRALLTARKSVQQGIINLELSMRGVLRNFGLKLGHVTRIRYEARVRELVEQNEILSASTEALLRARARLRAELAELDATIADLAKQDDVCRLMMTMPGVGRIVALTVKSAIDDPTRFARSKDVGPWVGLTPKRTQSGEMDIVGQITRAGDRALRTALYQAAMILMHRGSPNWLQAWALRVAHRRGSKRALIALARRIGVVLHRMWRDGTPFRHAQSSPATV

SEQ ID NO: 300204 - protein, 341 aa, unidentified
MKQYVGLDISMEETSICVLDQAGDVTFEGCGPTNPEAIAKLLRRHAGKAERIVFETGSLSNWLWHQLRALGFPVICLDARHANAALSMRINKSDQNDARGLAEMARMGWYREVAVKGAESWKTRSMLAARSKLVDLRRDLDNQMRGLCKGLGIVLGRAGSTNLARKVNAVLAESPDLQDIFAPLLLAQSCLTEQIEKFDRELLVMAKGDQTVRRMMTVPGIGPLTALAFVVTIDNPARFRHSADVGAYLGLTPRRYQSGEVDRTGRISKRGNHQVRTYLFEAANVLLTVVRRGSALKRWGSKLTKRIGAKKAKVAVARKMAVILHTIWTDGTEFQAEMRAA

SEQ ID NO: 300205 - protein, 364 aa, unidentified
MHNKPNSHSTVHSTAHGSTVAWLGLDAHAQNCVLAHLEDDGAQRRFWRMPTQPDKLVAQVQAIEAPDKRLALEESNLARWLWQLLRPHVSQLVVCDARHNKLISTHHNKKDPRDAFGLARLLRLNELKPVWQVPTDERALFKSAAQSYQEAVLRQTQLKQQIKSTFQHWGLFPTGTRLYSEAGRSAWLKRLPHADLRAQVELLYASMEQAVQTQADTRKLLVRLGKAFPEVQLLSSAPGLGVVGAHVFAAYIADPARFQDDSQLVRYCRLGIRDRTSDDKPLGYEQLDRHGHGVLKAISYRAWLQAMKRQEGAVYQFFQWSKKNTGSATHARLNTQRKLLRAWWTLWQEGKEWDEEKFFPTQNK

SEQ ID NO: 300206 - protein, 430 aa, unidentified
MSYRIVGIDVHKKILAVVVSDVEIDSEFHFERRWFGSNPEQLRSLAAWLLEQEVEEVVMESTAQYWKPVWEALERYWKPIREKREGARRRSGTLHLAQALSNRGRRGRKRDFPDAERLVKRLVSRELTLSFVPDPEQRLWRTVTRKKYQLTRDKVRLQNQLEALLEEAHIKLSSLVSDLLGASARRMLQALAEGETNPAALATLADQHLRATPEQLCDALGACTDLKPVYRRLLKMALEQLQFLEQQMGQLDQEMANLLSQHQDAVQRLAEVPGLGVDSAHQIIAEVGPSAATFPSEECLSSWVGVCPGQEESAGVNYSHRSPKGNRNMRRLLNQTANAAVKAKGSIFEIVYRRSVPRLGHNRAIGAIAHRLCRLIWLILYRKVRYEERGPAVSQKSKQARTSRMIRQLRRLGYRIEPPNTQHASSAQVQ

SEQ ID NO: 300207 - protein, 402 aa, unidentified
MNAVGIDVSKGKSMVAIMRPFGEIVSAPFEIKHTASDINSLVELINSVEGESRIVMEHTGRYYEVLAHQLSEANLFVSAINPKLIKDFDNDSLRKVKTDKADSVKIARYALDKWQNLKQYSVMDELRNQLKTMNRQFGFYMKHKTAMKNNLIGILDQTYPGVNTYFDSPARSDGSQKWVDFASTYWHVDCVRKMSINAFIDHYENWCKRKKYNFSKSKAEEIYGKAKELVPVLPKDAITKLIIKQAVDQLNSASATVESLRTLMNETASQLPEYPVVMAMKGVGSSLGPQLMAEIGDVSRFTHKGAITAFAGVDPGVNESGRYEQKSVPTSKRGSSDLRKTLFQIMDVLIKTHPKDDPVYQFIDKKRAQGKPYYVYMTAGANKFLRIYYGRVKEYLSSLSES

SEQ ID NO: 300208 - protein, 354 aa, unidentified
MIIIGVDFHPEFQQIALLNTRTGEVEEKRLAHPEEAEKFYRALAGAGETVRIGMEASGHARWFERLVAELQFDLWIGDAAEIRTKRVRKQKTDRQDAQLILSLLLEDRFPKIWVPSWENRDLRQLLWHRHRMVQARTRVMNQLQAVALNEGLRCKKKLWRERGRQQLESFGLAPWASRRRRDLLELLDRFNPAIAELTQAIEREVENCPAAQRLRTHPGVGVLTALAFVLILGDAERFHCGKQVASYLGLVPLEDSSGNRRRLGHITKQGSSILRFLRVEAAQVAVRSLPEWRSKYFHLVLRRGRKIAKVAMARRLAVQLFWMMRKEWNYEQLKKFGSHAGQPGNRHGVQSNTE

SEQ ID NO: 300209 - protein, 375 aa, unidentified
MKEKLRFLGLDVHAETIAVAIAESDGEVRSLGTIPNRLESIRKLIKKLGPTEKLRACYEAGPTGYVVYWQLAELGVKCDVVAPTLVPVKAGDRVKTDRRDAEKLARSHRSGDLTAVWVPDEGSEALRDLVRTREAAKQDQLRARHRLSKFLLRSGQRPPTGIRPWTRPYLIWVAQLRFTQMAQEATRLDYLHEVEHMRERVERLERAITEAVTLASPALQQVINDLQALRGIADISAVTIAAELGQVSRFDGARQLMGYCGAVPSEDSSGKRTRRGSITKTGNAHLRRIVVEAAWSYHRPPCIWYGLRKRQESISEEVKEIAWKAQHRLHKRYMRLAAAGKDKRKITTAVARELLGFIWAIGTRAETTVRQRIAA

SEQ ID NO: 300210 - protein, 437 aa, unidentified
MNFNAAGVDVSPKELQVCVPSDRDEKCNRTFGVYTKDLHEISRWLKQCGIDTVVMESTGVYWLPLFRVLKDDGFEVILVNPKDAKNYAGKKTDEADAHWLMVLHTYGLLKPCYQPENITRQIRTLSRHRDNLIRSSSREVLHLQKEMEQMNLKIDNAFSDILGKSGQAIIKKILEGERDPEKLASLADRRCKKSKEEIMHSLEATWDEDHLFVMKQCQELYEYYKKQIDAVEAEIERIVVQYTAQVDTDKTKAMERSKKQKQLHNDVGFDIEQHAFNLWGVNVMRMPAMSKNTVLRLVSELGADFVEKFPDARHFTSWANLVPDNKISGGQLLSSKVPKRKNPVGIVFRQCANSLCRSKTPLGDRFRQIKARSGHKQAMVAIGKTLATIFYTMVKNKEEYDATKFTSHREKQLDCSIERLQAKILRLQNEKARCANF

SEQ ID NO: 300211 - protein, 348 aa, unidentified
MKSITTIGLDLAKSVFQVHGVDADGKVLVRRKLRRTELLDFFGRLPPCLIGLEACASSHHWSRELERLGHTVVQMPGEYVAGYRQHGRKTDAADAEAICEAVSRPRRRVVATKSIEQQTTSMPHTVRNQLVATRVALANMLRSLMAEFGIVAASGEAGFSWLMGIVTDEARDELGAAQRAALAPVAALIIDTDAAIEVASAQIIAHARSCPTARRLQSAPGIGDIVSSAFSSLVDASLFKSGRAFSAWLGQTPKLNGTGGEVRHGKMSKAGNEYLRRLLFMSAASRLAHTIRFPAKADPELVELLGKWGFKKAACVLANKMARMIWALMVRGGTYVKHHRPSAYAGNA

SEQ ID NO: 300212 - protein, 341 aa, unidentified
MNKISIAAIDLGKHTFHLHAQDDRGHEVCRKKFTRSALMQYLMNLQPCTVVMEACGGAHFMAQEVAKLGHIPKLIAPHLVRPYVKSNKNDFADAEAICEAATRPTMRFVPPKNQAQQALVMLNSTRDAFIKDRTAAVNRIHAALLEVGVSLAASLKSIRSLSALLEASSIAQPFKNTLTRLYQHFKHLDEEIKSLDKDVECQAAEDDLAIRLMTIPCVGPITSTVLAAELGDGKQFKCGRGYAASIGLVPKQHSTGGRTVLLGISKRGDRNQRRLLVQCARVYLIQLERQKGWLADWVRRLLENHHSNHVVCALANKLARIAWAVAAHHTEFDAGPSAMNA

SEQ ID NO: 300213 - protein, 410 aa, unidentified
MEVLHTHCAGLDVHKDSVVACVRHMAGGEVKTAVRTFRTVTVSLTALSDWLESEGVTHIAMEATGVYWRPVWHVLSDGAFTLVLANAAHVKNVPGRKTDVKDAVWLADLMAHGLIKASFVPDEPTQQMRNLLRTRKQFVRERTSHIQRLQKTLEDANVKLDSVVSNIVGLSGRRMIEALIAGQSDAVAMAGLAHRRLQASQPDLEAALAGRVTSHHRFLLRLHLDHMDAVDAAIASVDREVELCLEPFRTAVQQLSTIPGVSSLSAEVIVAEIGLDMSRFATVGHLISWAGLCPGNDESAGKRRSTRMKKGAPWLKTSLIQCAWAAVRTRNTYLQAQYLRLKSRRGPKKAIGAVAASILSAAYHMIQQGTAYQDPGPDFFQRNHKEKLAHKLFDRLQKLGFNVQITPATA

SEQ ID NO: 300214 - protein, 370 aa, unidentified
MKTWQQLTHDAGFDWARDPHDIAVVDGQGHLVAQFRIEHTLAGWQEFRQKISAYPALGVVIETNQGAAVDQLLQAEGVTVYPIHPMSAQRYRERKSPTGNKTDQLDARSLADALRLDGSQWKALAPLDPLTQQLRLLCRDEMSLIEQRTALINQLRQAVSEYYPAVLEAFEDWRRPSVWKFVIEFPTPEILLKRKRSRWEKFLHKHRLWRSDTGEKRLEIFARAGAFCGSPGVTAAKSLLAVSLARLLGLLQNQLDEYRSQIEKLFEPHPDSGLFGSLPGAARYLAPRLLGEVTADAQRFEDPQALQCLAGTGPVSYPSGQIHKVRVRHACNKTLRHIIHLWADCARHAAPWAQPTTNKNASKARATPAL

SEQ ID NO: 300215 - protein, 357 aa, unidentified
MGKSIRKLSSVTRVGLDLAKKVFQVHAVDANGEIVVARKLARGRLIAFFSELPRCVVAMEACSSAHHWGRQLLALGFEVRLIPPAHVKPYVRRNKNDAVDAAAICEAAGRPGQRFVPVRSIENQAELMRHRARELLAGQRTAALNALRGHLAEIGVIAPQGVQHAYDLKRLAVDGFDEYGEVVVPDSVRVALRPLVSQIDALDAAIGAIDNEIAMSVKADETAKRLMTVPGVGPVTASAIVATIQDMGDFASGREFAAFLGLTPRQSSTGGKPGLGRVTKMGDRYLRKLLVVGACSTLSHRQGHNDALRRWASGMLERKTVRYKFKLTAVALANKVARIVFVLMTRGGEYDDRPVAA

SEQ ID NO: 300216 - protein, 337 aa, unidentified
MKVTLIGIDLAKTIFQACGVNQAGKKVFNRQLRRNKLIAFLMQHPEATIAMEACSGSNYWGRVLEKKGFTVMLIPPQHVKPFVKGNKNDRNDAFAICEAARRPAMRCVQPRSLAQTDTMLIHRILERRVSERNSLMNQIRGLLNEYGVVIARGKEKLRNELPFILEDAENELTETARYYLHRQLLEWYELDAAIAELDKAIAQQVKSSEQSSRLKKIKGVGNKISSAAEAFMGNGSGYHSGRHFAANLGLVPKEHSSGGKQRLGRITKRGNAYLRRLLIQGAWSVVRYADHSEDRLSRWAKQLIQRRGKHKAAIAVANKLARIIWAMSYHQTEYRAN

SEQ ID NO: 300217 - protein, 427 aa, unidentified
MKYQVAAIDVHKKMLAVVVADVAGEGEYQFERRKFGTTPEQLHVLAQRMIQQEVEEIVMESTAQYWKPVWGALERLWKPARQQREGATKMSGKLHLCQAKSNRGQRGRKSDFLDAERLVKRLVAQKLVLSLVPDAEQRLWRTVTRRKYQLTRDKVRLHNQLESLLEEAHIKLSSFVSDLLGLSARRMLKALVEGATDPAAIAALADGRLRATPAQLRDALGASTQLHGVYRRLLKMMLEDLKQLEEQMEQLDGEMATLLEDHQEVVQRLAEVPGLGVSSAVQIIAEVRPQAEVFNSAKELSSWVGVCPGSEESAGESQSTRSPKGNRNMRRLLNQAAQAAVKMKGSIFEITFRKLVPRLGYKAAIWAIAHRLCRLLWILLRKGVRYQEHGPAVSAKSQRARTTKMIKELRKLGYRIESGPLPAGAVA

SEQ ID NO: 300218 - protein, 428 aa, unidentified
MNTTTTTTADLTPAPAPLPAPAAWIGLDWGHHEHAFALQTATGATEEGTLTQSAETLHAWLQALAQRFGGRPVAVGLETSRGAVVAALLQYPWITIYPINPVTSARYRKTFTPSGASDDLPDARVLLELVRDHTAKLRPLEPEDSQTVKLAGLVEARRDLVDRRTQVLNQITSLLRGYYPQALELVGDLDPALAVDFLRRWPDLLTLKAVKPGVLKRFYYTHHLRRPELLEQRLALVRQAVVLTPDDARVSVAVLQLRCLLDQLRALRQHVAIFDQEIKTVFAAHPEAALFRDLPGAGPALAPRLCVAFGTIRTLYPDPASFQKHAGVAPVREKSGRSCWTHWRWQAPVFLRQSLVEWAGLTVVYSAWAKVYYQRMKAKGKGHHVILRSLAFKWIRVLWKCWQTRTPYDEAVYLRQLARRKSPNAVAA

SEQ ID NO: 300219 - protein, 338 aa, unidentified
MAIVSVGIDLAKNVFAVHGVDESGRPALVRPSVPRAKLLELIASLPPCLIGMEACSGAHHWAREFARFGHTVRLMAPKFVIPYRLSGKRGKNDAADAAAICEAVTRPNMRFVPVKSLDQQGQLLVHRARQGFVEQRTATLNRIRGLLSELGIVLPLKAAVVRREALTRLEELPGWANTVIGDLLGEVSRLDERIAQYDQHIKAMAGQSAEAQRLMQLSGIGETTATALLSTIGNGRDFKCGRQLCAWLGLVPGQYSSGGKQRLGRITKAGDPYLRSLLVLGARAVLAAAKNKSDAISRWATALAQRRGYWKAVVAIAAKNARMCWTVLSRGEDFRLPA

SEQ ID NO: 300220 - protein, 359 aa, unidentified
MEYFAGLDVSMEETAICVVDQEGKVVLESKVATNPDAIFKVLKTYAPRLRRLGHEAGSLSPWLQVELKQRGLTAICVEAWHMRAALSAMRNKTDKADARGIAHIMRTGWFREVHVKSDESYRLRLLLTQRRNLKRKFLDIENAIRHSIKTFGLKVGPVSRGRFEARVRELVAGDELIAGLTDCMLRARAALWQEYLRLHKVVVAVVRRDELCRRFMRIPGVGPISALAYKTAVDDPQRFRHSKTVGAYLGLTSRRWQSGTSIDVQGHISRAGDGEVRHPLYEAANIMLTRFRGFSSLKAWGLKIAKKRGHRRACVAVARKLAVIMHAMWRDGTEFRFKAPKEFGEGAVKGCPRVVGVAA

SEQ ID NO: 300221 - protein, 335 aa, unidentified
MTITTIGLDTSKTWFQVHCVDADGRTVLRRKLARSKVLSFFANIPSCLVGLEACGGSHFWARELAKLGHDARLMPARYVRAYVKTNKHDAADAEACCEAVQRPGMRFVPVKTEEQQSTLMIHRARDLLVRQRTAAVNALRGHLAEFGIVAAKGTAKAHELMRLAGDDERLPQMAREALGYIVAQIHDIESRLKIFEQRIRSLAKEDEVCRRLMTVQSVGPHIATAIAATVGDPRNFASGRHFAAWLGLTPKQHSTGGKEKLGGISKRGDSYIRRLLIHGARAIVARVRSGQMKSAWLSGILSRRHSNVATVALANKTARVAWAVMSTEQAYRSAA

SEQ ID NO: 300222 - protein, 310 aa, unidentified
MGIHVGVDVSKQHFDWAIGTKGEVERASNTPAGVRRLVTSLGEFELTSIVVESTGGYERPLIDALAKANLPVALVNPWRVRRFGEGLGILAKTDPLDARVLALFGERAQPDRRPIPGSRQRQMADLVRRRRQLISIIVAEKNRLDTASKLIRKDIEGVVRLLERRVAKLDDKIDQAIQADDEKAGTWSRLQTVPSVGPGVARALIVDLPELGQLTRRQICSLVGLAPFAKDSGKKVGQRKIRAGRAAPRTALYLAAMNGARFNPALKQMYERMLGAGKPKKVALVALARKLLTILNAMVRDRRDWAEINS

SEQ ID NO: 300223 - protein, 344 aa, unidentified
MQIAVLGIDLGKNSCSVVGLDSTGAVIKRRRMRPESIAAFTEKLPACIVAMEACCGAHHLGRMMAGQGHQVRLMSPEYVRPYVKAQKNDDRDAEAIAEAATRPTMRFVELKSESQLDVQTLHRARDRLVGERTALINQLRAVLLERGVTIPQGRRKLEQHLDAFAASDDDHSLSPRIRRLIDDMRAEWVELDRRIATFDNEFAAYARSDSDARRLATIPGIGVLNATALLAAIGDGRTFARGRDLAAWLGLVPRQVTTGGKPRLVGITKRGNKYLRKLLIHGARAALPSLATSATPLGGWLRALMQRVHKNAAVVALANKLARIVWVVLRRGEEFNAAAATAMA

SEQ ID NO: 300224 - protein, 430 aa, unidentified
MSTNVQPVIFTGVDWGSQSHCVCLVDAAGTVLGETSFPHSGDGLHEMLDWILARAGCDAACIAVAIEVPHGPIVDMLMERGFSVFAINPKQLDRFRDRFSPVGAKDDRRDARVLADAVRTDPQCLRNLDPVDPWTIQLRECSRMAEELTMQRTRMTHQVRTQLWRYFPQFLALGFPLYSAVFQALWMLIPTPSRARRVRLTSVEKVLKRHRIRRIRAKEVLAILKTTPLNVADGVQEAIVANLRLQQLALIESQLQESERAMETILETMATTSISTSEPTDSEPTEMASDPIPPESVPCDVDILRSLPGVGTKVLAIVLSEASGLIKDRDHQGLRAFCGVAPVTRQSGKSRQVVRRKACLRRLANATYHWSRVAIQHDPVSKAKYDALRDRGHTHGRALRSVADRLLAVACAMLRDQTLYDPSRQSVATA

SEQ ID NO: 300225 - protein, 350 aa, unidentified
MIIGVDYHPSFQTVAYLVEETGECGEQDLNHSEGKAEKFYRDLKQRGISVRVGMEATGYARWFERLLAELGFELWIGDPAQIKAKRVKKQKYDREDARLLRRLMLENNFPQIWVPDPENRDLRQLLWHRHRLVQMRTRIMNQLQALAMNEGYRWKKKLFSQQGRVLLEKLALAPWASRRRQELLELLDRMNPTIEELTAAVEREARKRPAAVRLMTHPGVGPITALAYVLIIGTPARFQRGKQIGTYVGVIPCEDSSARKQRLGHVTKQGNSLLRFLLVEAAQAAARVHPDWRRRYIHLAMRRHKSIAKVAMGRRMAVRLYWMWRNGCDYSPSLEFGSYAGQLETGHGVK

SEQ ID NO: 300226 - protein, 335 aa, unidentified
MKVFYLGVDVSKKKLDLCLRSNGKDILYDVIANDLSSIKSWLTRTFEKFFLSEDSLVVCAEHTGQYTYPLVCATKSIGVYLCLEDAAKIKYCHGIPRGKNDKIDACRIAMYAERYNDCLQPYTASELIIQKLKNLSTERSMLVADRAKYQSQLKDQVDYMEHSIYIAKCNRVEGIINTFTDYIAQIDLEIKELINQAPVIAHQMDLLMSVDGVGERVALKMIMETDAFTSFTDPRKFCCHAGVVPFVYVSGSSQRSKNRVSNRADKSIKHLLHMAALSVSQVKNSPLKKYYDRKVEEGKNKMSVLNAVRAKLVTIMFAVIRADAFFSRNYQNSLA

SEQ ID NO: 300227 - protein, 361 aa, unidentified
MTASNIVGVDPHRKTFTATVLDSRGGELGHAHFPNTRQGHGAGLAWAAGLGPADRWGVEGASGLGRHLAEFLVAAGCDVRDVPPHKTAVRQRGRHEGKTDRLDSHRVAAETQTNPRLARAFKHAVSAAPDSVRDRIALWHNARTSLTKVRVQLLGELDALVHDLPEDLRTQLRPAKTVSARVNSLRRLDTSGVTDPTVALRLRLIEHRVAMLRDVLEQDKAATAELTALVEETKSTLTELVGIAPRAAAEIIVETGDIRRFTEAGFARFNGTAPIPASSGEGENAPVRHRLSRGGNRRLNAAIYRVAMIQLRYEPRARQIHDQARAHGHTRREAMRVLKRHLSDAIYRTMLRDARRAGDLT

SEQ ID NO: 300228 - protein, 375 aa, unidentified
MKKKRDREGMVTAALDLGDSESLATILSPDGDVVDSFSMSMSDDGYSSFASKVPKDARIAFEATSMAYPVSRRLTALGYSDITVAHSKELAWIVKSKKKNDRIDSLKIARLHMAHMLPESHLLSREEQVKRDLLIQRVTLGKEIGKMKLKLIAYLKREDVYLSLPESSDSFSRERRQAIRSMRFGGDGDDDGRGLVVGTMMDRLEFLERQCAPLEEKVRTIVKDSEDIRRLMSIKGVDFYLASLASSYVGDVNRFPDDDHLASFLGIIPESWDSANVKRRGHMSKEGPSTARWAFSVMTDTVMRYNPRLKTYYLSVKKRKNSGSLAHVATMRKLVRMIDHMLRYKENWRWEDEASTAKKLANLDRGAEAKTMGGD

SEQ ID NO: 300229 - protein, 342 aa, unidentified
MKKMVKQVVGIDVAQKELVVCLGRMYDDWSPELYSSKNFANNAKGFEALVSWVKKMTVPQVSIRYVMEATGIYHESLCYYLADKGYALSVVLPNKISNYFRTLAVKTITDKTASEAIALFGLERKLDDWKRPEPVYKKLKQLTREREQLVQIRTMAKNQLHAEQSEAEPNKSSIARVQKQIAFLNKQEQEIKAELQELVKQNDQLKSTVKTIGSLPGVGLLTAVTVLAETNGFELIRNKRQLASYAGLDVKEKQSGTSVKGKPRISKKGNRFLRKAMHLPALAAIRHDERFKAIFARLVAKHGIKMKAAVAVQRKLLEMIYTLYKTNKIYDPNYLNIKVESN

SEQ ID NO: 300230 - protein, 434 aa, unidentified
MQVTRGMRRRSEKMARRRERLPVDALIAGVDLAKKESVVVFVRAADRARVGKLRVPSDRVGIEHVVARGRELVAEHGTGPLVIAMEPTSHFWKPVARAADDAGVGYVLVQGLVVARARELDDLTRDKTDSRDAALIADLAAELRFTETRLPEGPWAELDLLVDARDARRVERSAALQEIRALLELAWPGLLSACPDISGTHLQALLRTGLTPGQVAALPRRRFDALLRRDHPHRFLRWMAGRLHTAARDVGSVPGTAAAALRWRLAAERVALADAAIAELDARMIELLEATGYGWLRGQIKGLGDPTLAAILALTGDPAGYDDARCLVKLAGTNPTERSSGEHEAAGGIHRRGRPVLRYVAYQAAVCLVRHEPGFRARYLELTARERSNRLAPKQAYVALANKLLRTLWSMATSGQRYQPAIARGEVRPLPRAA

SEQ ID NO: 300231 - protein, 360 aa, unidentified
MSDIETEDVRKCVVGGVDTHKDLHVAVVDDLDRVLASACFATTRHGYKQMLTWMRSFGELTRVGIECTGTYGAGLLRYLEHAKISVLEVAAPDRSDRRKRGKDDTLDACNAAHAAFAGIRTVTPKKRDGMVESLRVLKVCRKTAIQARRVTLQLIQNTIVSAPDELREQLRRLTRMQLIRMLAAWRPDLSDYRQLASAYRIALKTLGRRYLELHDEIADLDVMIAGLVDELAPELVSRNAIGYETAAQLLLTAGDNSDRFRSESSFAALCGVIPVQASSGKVSRHRLNRGGDRAANSALHIIAIGRLRTDVRTQTYVAKRIAEGHSKLEAIRCLKRYIAREVYGIIQSRNLTINQSTIST

SEQ ID NO: 300232 - protein, 428 aa, unidentified
MYEVDSIRVEQFRQLKDEIRGSQDYLIVGIDVAKEKHNAFFGTATGKALLKRLVFGNNIEGFNKLLTFVEAVKVKHGLSREVFGLEPTANYHKPLGEYLIKCGLDVVLVSGLAVNKNRELIDGRWDKHDTKDSANVADLVSQGKCLYYDYPCMPLRGLRDLLSLKRRFRKREHGARVRIRNHLLAQYFPELDRYFVGAGSQGLAIVRWCLAPGVIAGLEYDDFVGLVAPGKKSIGQQRRLRAIWKSAVDSIGCDAGESLEFEAKMMVEELQRLKEAIRLIDAKIEDICLQFPEYSYLLTIPGFGPDISSKVLGAIGNPFRFDTGKQVLKLAGMDLSAKRSGKRSQASIPVLSKKGKADLRYALYQAALVASSKNTNFVIYYTNKLRGREKEKGIKTKMRVKLAAKLLIIAWTLMKKQEPFDPEYLKLK

SEQ ID NO: 300233 - protein, 346 aa, unidentified
MTIVDSSRPNVGGVDTHLDNHVAAVLDANGGVLGVESFATTPVGFVALHDWLCAFGPVARVGVEGTGAYGAGLSRYLQSRGLVVIEVDRTNRQLRRMQGKSDPVDAIEAARAALSGRASGIAKTADGNVEAIRALLVAQRSGRQARARCLNQIRHLGFTSPDSLREQFRDVPKAHLAQRAAALRPRADGDPVVRATKLAMRTLGRRALAISDDMHDFDQVLAELVLATAPALLACHGVGVDTAAILLVAAGDNPERVRNEAAWAHMCGVAPLPMSSGKHVRHRLSRAGNRQANHALWRIVFTRMGHDLRTRVYVERRTEEGLSKPEIMRVLKRYVARETYQLLPRS

SEQ ID NO: 300234 - protein, 390 aa, unidentified
MDETKQEKRVIGLDAHPYMFSAAALSGSNALHAQIEWSVDRISLNSLERILKKRANPGDIVVLEASGNTFALAERLLRIGLHPIVLESQSVGKVGKTYCATDKTDAIKIARVYLSGLAHEVWLPNAKASEQRELFFAYRNAVGDSVRVRNRIWAFLNQQCRQRPRGLRLSSPSALSGLLALHPWTPTQKWLLSEAVEAFQTAESRRKRMRSRIAEEVANDPNILKMTRLLGVRDKVAFALAAFVGDINRFENPKKLVAFFGLNPKVNRSGISGGNGSLSGYGRADVRALLIQAAQSIMRHGQGDTHKWAVALKMRKGTNIAVAALARKLVTSIWYLLKGFFTPMTEVTAHIQIKIHKIATEIGKSRLRELGYKKSVEFEAEKIKLLLETA

SEQ ID NO: 300235 - protein, 347 aa, unidentified
MNNIFVGMDLHKKTSSFCVLDKEGKVLLEKTIRTDPEEVRKFIKSLGKQNKINLVMEPLSQWYFYADFIEAQGVEITLAHPLKVKAIAFAKVKTDKIDAHVLANLLRCNLIPKAYFAPKYVREWKELSRARMSLIDIQTQVKNKIHAILFRNGLNYSKTALFGRSGRAWLSDLKLDPVFRLNLQSNLNTLDSLKEQITILEKEIKKTVDDNKEMSLLRTIPGIDYITSITIMSEIGDIHRFPNEKKLHSYAGLVPVVRSSGGKTQRGHISKEGSKFLRYIMVQTAQHQKILKNKIGLKWYLDRLVLNNKNNQTAIVATARKLLTIVFKVLSEGRPFEERLPKTIQII

SEQ ID NO: 300236 - protein, 422 aa, unidentified
MLEEDPQAEEIIARVAALDIGKAELVCCVRVPHEGKPGRRLQEVETYSTMTRSLLAMSDHLRCLGVSRVVMEATSDYWKPVFYLLEAQGLDPWLVNPKDVKHLPGRPKTDKLDAVWLCKVAERQMIRPSFVPPPEIRRLRDVTRYRIDLVGVRTAEKQRVEKLLEDAQIKLSVVASDIFGVSGREMMAALVGGQTNPKVLAQLARGRMRVKIGALEEAFTGHFTDHHGFLLATMLTRIDALDADIAALEHKIEEMVAPFALAVEKLDEIPGVGVTGAHVILAEIGVDMSRFPTAAHLASWARFAPGVKESAGRKKGNGTTGHGNRYLARVLGEAAVSAGKTDTFLGERYRRIAKRRGKKRAIVAVGRSILVIIWHLLSDPEARFHDLGPDFYDTRIGPDRKKRNHIRQLETLGYKVTLEPAA

SEQ ID NO: 300237 - protein, 465 aa, unidentified
MKQPLKKASAKKAKINIQPDWELVNPNAAGIDIGSREHWVCVPPDRAATPVRKFGTFTCDLEALADWLQQCGVQSVAMEATGVYWIAAFQILERRGLAVILVNARQTKNVAGRKSDVQDCQWIQRLHTYGLLQGSFRPEDRYCVLRTFLRYRDELVCARSTQCQHMQKALQEMNVQLHHVLSDVTGVSGLAIIQAILAGQRDPAQLAGLADRRVRASQETIGKALTGDYRAEHLFVLRCAFELHQTLAEKLRACDEQLVAEIGRLPEPVPPAAQPLPARKAGRPAAADQMLGQDMREPLYRKLGSDLTAIEGIGITTALVLLSELGTGVDHFPSEKHFASWLGLCPDNRISGGKVLSSRTRRVNNRIATALRMSAMTLHRSQSALGAFHRRMRARLGAAAAITATAHKLARLVHRLLKHGEAYVRQGMEEYERKFQEQKLRGLKKSAAALGFELTAVQPRAVPVS

SEQ ID NO: 300238 - protein, 345 aa, unidentified
MVVLGADLHKRWHTVVAVSDTGRRLAEKTVRATPEGHLELRRWVAQWPERHWALEDCRHLSRRLEVDLLRSGEAVVRVPPKLMAGVRRSVREPGKSDPIDALAVARAALANPDLPVATLDGPERELRLLVDHREDLVAERTRHVQRLRWHLLDLGIPEPGPRSLDRVVVQADLEGRLDGRTEPAARLARDILGRVRDLTAAIHPLEREIEALVAALAPTLLALPGCGPLTAAKIVGETAGMTRFRSKEAFARHNGSAPVPVWSGNVTRFRLSRGGNRQINLALHRIAITQMRIDERGRAYLEHRRAAGDTKTEAIRALRRRISDEVFRRLRADEAARVTPLAVAA

SEQ ID NO: 300239 - protein, 358 aa, unidentified
MATTNLSALQSFVLPYHSEPFWIGIDVHKRSYHLALIRADAKTFTLVASAAPEKLVEQLRYLEIKVAGVAYEAGPTGFCLARALEAEHIPVIVAAPSKVPRSISAGAKTDRLDCLKLALFASKGLLRPIAVPTTQEEAERALCRRRHQLVDSIRRCKQRIKGFLLYHGFEETESLRRWHTDYPEQIAALPLETEGRLTIESHLRELTFFESELCSVIDQLGHMNKHPRHQPVIKSLTSVPGVGKVVATTFHTELFRPERFNRGEEVASYLGLAPTVRHSGEKTPRGYLVPVGQTRLRSLLIQAAWIWRAKDPYAHEIYNRLLSKSGVPQKAIAALARRLAIILWRLSIEQRVYRPIET

SEQ ID NO: 300240 - protein, 346 aa, unidentified
MRQIVRIGLDIAKRWFQVHAVDEVEKEVFNRKLPRDKVLGFLGSLPACEVALEACSSSHHWGREIGRLGHRVRLISPNYVKPFVKRGKSDAHDARAICEAASRPDMRFVRVKSEEQQAALMRHTSRQLLIDQRTAVANSLRGQLAEFGVIERQGIENLADLVRRLDEKDPEIAHIPQPALAVMNILADQLRAVEAHLSMIDDEIEAWRQSSASAQALKSIPGVGALISAALAAHVPDPSAFPSGRDFAAWLGLVPRQNSSGGKERFGRITKQGNPYLRRLLVLGATASLRWLHKRTDPLALWTHQLLQRRPARLVTVALANKLARIAWAIMTTGELFRAEAPPVGA

SEQ ID NO: 300241 - protein, 352 aa, unidentified
MERYRRKAQEGKAVFVGVDLHRSEWHVTVRTEDEELFSGTIPGHWEALRRLLDRYGGCLIHVVYEAGYFGFWLYDRVVGYGADCTVTPPSLLPQEYGNRVKTDRRDSRKLAYLLSKGMLKRVWVPSVEERYHRQVVRRRRQLIGDRVRVQNRIKSELQFYGIPLVGPRGPWPRVYVEKLWCIRFGDRWMQESFSRLLEQYEFLSGQISKQTKLLRELSRTPLYRERVEILRSVPGIGLIAAMELLVELQDVSRFREADKLAAYVGLTPSQYSSADKIRMGRITRIGKNSLRGTLVEASWKLIAKDKAIRQKYDRIKVRSGAKRAIVAIARMLLLRLRRILLDGRPYVLELAE

SEQ ID NO: 300242 - protein, 438 aa, unidentified
MSNKVIFNLDELFISVGIDVGADFSWMSIALPNQQFVGKPYKILHNSIDSLTTAVSKIKEAEELYSLESRIFLESTGIYHYPLFCYLRDKGFNCSVINPIITKNSTNINIRKVHNDRFDSKKAALVGLKPDLKVSLMPSDLALNCRNLCREYYDLMDNRSAYVNKLQGELRMAFPQYLGIFSKVTINTSLTLLETYTSPSAFLKADKQEIIDIIKSTARFGLTYAQNKYNAIIQAATDANQFGYIIDSNIKRIRLYISFIRKYDEEINSILESLHELVDANEDSDFVKQIHLIETFKGAGFLSSVSIMGEIGDFSAFSKPKQLFAYFGLDPAVKQSGKFEGTKVQMSKRGSAIARRVIHTLTLQSISISRNREAKNPVLREYYLKKCDSKPKLVAMGAVSHKVCNMIFAILRDNKPFKIIAPQEHIKQYNAAKCDIAA

SEQ ID NO: 300243 - protein, 499 aa, unidentified
MEWDWRASDVGARRKTKQKPAMVEPVEIPDAEHELVVERAAAIDVAKAAGKVCVRLPGNSGRRFSRVWDVPARTGAITELAEQLVELGTEKVSVESTSDYWRIWYYLLEDAGLDVQLVNSRDVKNVPGRPKTDKLDAVWLAKLTEKGLLRPSFVPPAAIRVLRDYTRLREDLIRECTRYWQRLEKLLEDAAIKVSAVASKLDTLSTRDMVEALIAGERDPRRLADLARGRMKAKRSDLITALDGRFDDHHAELARLLLGQIDALTAQIDALSARIEQLIDAMDESDPHIGDRGGSGGAGPTTTGAPSTGEQTTPPARRTTTAIGVDSDIATVVEPQRLTAVERLDEITGVGQRAAQTIIAEIGLDMTRFATPEHLVSWAKLCPRTIQSGPVVRAGKTGKGNPYLKGALGEAAAAAARTDTFLGERYRRLVKRRGKLKALVAVARSILVIAWQLLSEPTARFHDLGPDYHTSRVVTERKIRNHIAHLTAMGFHVTLQPAA

SEQ ID NO: 300244 - protein, 369 aa, unidentified
MKEFNAEAVRIETASALETVRPAQAEGRYPAYIGLDVHKETIAVAVARAGRAAPESRGEIANKPKAVAKLVERLNQEFDGEVLLFCYEAGPCGYGLYRQLLALGHDCQVVAPSLIPKKPGERIKTDRRDARKLAQALRSGDLTAVWVPDEEQEAMRDLTRARDDLKAQERKARQQLNAYVLRHGHAWPSNKTRWTQTHYNWLESLKFAHDWQQVVLQEYIDAAKAGSQRVAGITAQMERVLPQWSLAPVVDSLVALRGIDKLAAMVLLAELGDISRFDSPKQLMAYLGLAPSEHSSGGRRRQGAITKTGNSHATKSAPMQARPRQRFPCCRSDCNESRRSFGQHGGIPGCPVFLRVSEPRHSPRRRCQR

SEQ ID NO: 300245 - protein, 347 aa, unidentified
MKYVSTIGLDLAKHVFQVHGADIAGSPLFNRKLRRGEVLPFFEKLPSCLVGMEACGGAHYWAREIANLGHEVRLIPPAYVKPFVKRGKTDAADAEAISEAVIRKTMRFVPIKTAEQQADAMVLKTRALLVQQRTQSVNALRAHLAELGIIAAGGLPSVAALMTIVREGEDTRLPAAARFALMAVADQIDTLADQIFKLERAIVTEAKRDEDMRRLTTIPGVGAITAATIKALVPDPGGFKSARHFAAWVGLTPRPHSSGGKERLGGISKMGNPELRVLLVLGATAVLRIARNDDRARPWLKALLARRPFKVAAVALANKMARIIWALLNKGGIYHRPEPLSIAAVAR

SEQ ID NO: 300246 - protein, 362 aa, unidentified
MASEICKRRSGVVHWVGLDVSKAGFDAGFVAAGQKFPATRMCDVPADSFERNRQGAELFLDWLDGIIASGVEPGRVRVVMEATGKYSVELAVWLLERRPSLEPAIVCPSHTAAFIKSLGLRNKTDKLDARALGFYGVEREPVAYEPPTPEQAELQALSRWRDALVGEKIALGNRAAEGTVSKFVRQLEAKRLRLLKADIERTEAEMKKVVNSSPKLKHDVELLCTIYGVAFVTATTIISELGDLRRFDRARKLTAFAGVSPRMYKSGTSVNGRTRMCKKGNPRVRSALYMSALTATRGNSDLKRTYTRLLNDGKEPMAALGAIMRKLLCIMRIMLIKERPYEPDWKLHENSRSTRYNNRKIA

SEQ ID NO: 300247 - protein, 318 aa, unidentified
MNSPSMTVGIDVSKQRLDFARFPQGDTFSVAYTDTGLAKLLKRLRSWSPQIILLEASGGYEYGVVAALVAASLTPVLINPRQVRDFARALGILAKTDKIDAKVLAEFAFRVQPEPRPLPAAQQQELNHLLSRRRQLLEMIQMECNRREVSPFLRVRQSIDHNLDSLRRQLTDLEREIDDFFNQSPLWVQQDALLRTVPGIGPQTVLSLQAWLPELGALNRHQIAALVGLAPFNRDSGVLRGRRMIRGGRHKVRQALYMATLSAVRYNPVIKALFERLAGHSGKPGKVALVACMRKLLTILNAMVKNQTTWRPMTPLTS

SEQ ID NO: 300248 - protein, 359 aa, unidentified
MNIVGCDFHPKWQQVAVFASATGEISEHKLMNGDGEAERFYRGLDAGALVGVEACGNSQWFVDLVQRLGHTVWIGDAAQIRASYVRRQKTDRRDAGHILRLLMENRFPRLWTPTAEQRDLRQLLIHRHKLVEIRTRVKNGLQHLAMNQGVEKHSRLWTVRGRAYLEELPLAGWTGRRREDLLQLLAGLDNQIAELDEAVKLAADEHVQARLLMTQPGVGPITALAFVLTIGDVSRFEHSGQVASYVGLIPREHSSGGKQRLGSISKQGNRFMRQLLVEAVQTTNRLDEGFRKQYQARCHHKPKGVAKVAAARKLAVRLYWMLRQNVGYPEIALIESSPRVPLAGTNKAEGLVGRSRTLR

SEQ ID NO: 300249 - protein, 366 aa, unidentified
MKKTSTVRVNGSVIFKGHKLTIGLDLGDRWSFYCVLDEAGEVLLEQKLPTTPEAMKQTFGKIPRSLIALETGTHSPWVSRLLSALGHEVIVAHAQKVQLITKSNRKDDRHDARTLARLARIDPALLGPVRHRSVQAQLHLTVIRARAELVSARTALVNAARGLVKSYGQRLPKCGTYQVNEKLAEGLSAELREALVPLFKEIESLNERVKEYDERMEKLAKQVYPEVSLLKQVKGVGTQIALTYVLTIEDPYRFAKSRQVGCFLGLRPGRRNSGESEPQKGISKEGDRYLRTMMVQGAHYILGPFGEDSDLRRWGLKLAERGGKNAKKRAVVAVARKLAVLLHRLWVGGEVYEPLRNSQKAMREVA

SEQ ID NO: 300250 - protein, 370 aa, unidentified
MKETITSFVGLDVHKDSIAIAVAQAGRQAPQFIGTVTPQMSSLCKALRRLASAARTLVVYEAGPCGYGLARRLNAQGYTCEVVAPSHIARSPIDQRIKTDRRDALLLARESRAGNLVPVAMPDERDEALRDLSRTREDVLAARLRAHQQMKALLLRHGRTCPGRIAWSAAHERTLSTIRLPHPAQEIAFVEYRNAIKDAHERLERITEALRSQSSQWRMRPLVQALMCLRGFDFIAAVTFVAEIRDPRRFAHPTALMAYLGLVPSEFSTGNSRYQGSITKAGNKHARRILIEAAWAYCHSPRVSRVLEVRQQGQPKSVRDISWRAQLRLTKRFRHLRMGRKLPQNKVCVAVARELCGFIWDIARQVKPLA

SEQ ID NO: 300251 - protein, 420 aa, unidentified
MDPVSDNQFTAFVGIDWADAKHDVCVQAAHSEEREFDSFAHQVDRIEQWALALYQRFGGPIAVALELARGPIVYALQKYNFFVLFPINPSTLAKYREAFKPSRAKDDPTDAQLALELLVRHRERFKPLKPQSVEMRKLLFLVEERRHLVDDATRLTNRLGYTLKQYFPQALEWFERRDTILFCDFVTRWPTLTQVKRARKATLEAFFRSHNMRFPEVLARRIASIRAAQPLTLDAAVITPHRLQALTLADLLRVTLQAIDRFDDEIASIAPKLPDYAIFRTLPGAGPSLTPRLMVAFGEQRERFLGAEQVQKFSGVAPVTERSGQKQWIHWRWQCPTFVRQTFVEWAAQTINKSFWAGAYYRQQRDKGSSHQAALRALAFKWIRILYRCWQTRTPYDESTYLKALKQRGSPLLKQLGAST

SEQ ID NO: 300252 - protein, 414 aa, unidentified
MHTTIAGIDVHKRVLLVAVGQVTDTERPDAIQFESRRFGTTMAELLHLIAWLQQRGVREAVMESTAQYWKPVWLTLERHFRLYLAQAWSNRAPRGKKTDFKDAQRLVRRHVAGELTLSFVPDAEQRLMRTLTRRRTQLTRDRVRIQNQVESLLEETRIKLSSVVTDLFGASGLRILTALVQGETDAAKLAGLADARVRCEPEALAEALTGVVSETHRRLLQQHLAHLALVDAQREELSQLTARLLHEHGEVVARLSRIPGIRVLAAQQIVAEAGPRASVFPSAAQFSSWIGVCPGRDESAGENHSSRCAKGNMYLRRVLCQAAQAAVRTKNSFFEQKFRRLLPRLGYPKAIWAIARHLSVVIWNVLHEGAEYIEHGLATTPQALKRRLQRLKRELALLGYSAQLTPLRPEAVAQ

SEQ ID NO: 300253 - protein, 342 aa, unidentified
MANHTLVAVDLAKAVFEVAVSHHPGQVAKQRRYSRARFPQALAQLPPATVIMESCGSAHYWARRAQALGHTPLLLPPHAVRPYVRRNKTDRADTKGMLEAFRNEEIHPVPVKSLAQQTLTSLHRLRSGWLSERTARINTLRGLLREFGILIPLGAHHAVPGAWAQIEDAQSEIPDPLRPALAELCSEIRQLEGRIKMVERQLAALAPQTPAVAHLMTIPGIGLLIATALVAFVGDIRRFPSGRHFASYLGLTPRENSSGLRRRLGAISKRGDVYLRTLLIHGARSVLHAAKRRTPDRLRAWAVSLERARGHNKAATALANKLARIIWAVWKHQSPFRSTPAA

SEQ ID NO: 300254 - protein, 342 aa, unidentified
MKITTVGIDLAKNVFQIHGVDQRDKVVVRKRLRRHQVLTYFAQLTPCLVGMEACGGAHYWARKLQAQGHTVKLMAPQFVKPYVKANKTDAADAEAICEAVTRPSMRFVPIKNADQQAILSLHRARQGFVRARTAQANQVRGLLAEYGITLAQGISHVANRLPGIVEDAENELPGLFRALLQRLVVHLRELNDQVQELEEQINAWHRGSGASQKLAKIPGIGPLTASALSASIGDAKSFRNGRELAAWLGLVPRQHSSGGKPMLLGISKRGDAYLRTLMIHGARSVVRVAKSKSTPTDRWSTDLLERRHTNVVAVARTNKNARIVWALLAHDRDYRADYELAA

SEQ ID NO: 300255 - protein, 358 aa, unidentified
MNKCNNLDFSGTTIFCGLDVHLKSWRVNIRDQEMELRDFSQNPDPVALHHFLTKNYPNASYKVGYEAGFCGFGIQRQLALLQIDCVVLNAADIPKSDKDKRQKNDKRDARAISEEIKNNSKSGIHVPAAAMEYARSLVRQRQRLVLDSTRQKCRIWHCLHFHGLELPQKIDTGQYWSNLFIKKLESNTCNGDTWLKMNLQLMIKDHQQKRALILETTRGIRSLCRQEVFKKQIELITGIPGIGEINAAIILFELENINRFQSADHLYSYAGLVPDTNDSGDTKKTKGITHRQNTRLRKAIVESSWVIIRQDPAMLMMYKNYCKSMHKNKAIIRIGKHLLSRIRYVLKQQKPYVQAVLK

SEQ ID NO: 300256 - protein, 370 aa, unidentified
MIRLARAMQYLINTELSSHEGTRFEFNRSTGAIKLGIDVHQDFYVVVEQVEGGNPKPPQRFDKQAFLHWASKLKQRGAEVHAVYEACGFGFSLQRNLTALGIKCHVVCPQKLDERNKRVKTDGLDAKALCLKLDRFVQGNCDALAIVRVPSEEEERSRAIHRQREQLVGARKRLEAQGRSLLVNHGLEPMQNWWRPRTFAALPVPQWMRELLLNSQPILLALQEKIAALTLQLQSAAAPNQARGLGKMTSVIIDREIGDWRRFNNRRQIASYTGLCPGEYSSGNTRLQSCVTKHGNPRLRAALVELAWRLVRFQPSYKPVVKWRQILAKGALATGAARKKAIVAVARQLAVDLWRIKTGRLRAEQLGLTI

SEQ ID NO: 300257 - protein, 413 aa, unidentified
MKEWQERAHFGALDWASDHHDVVVVDRQGQVVESFGFAHSGEGWAELRLKLARYSQLAIAVETNQGAAVQQLIEAGLDIYPVNPKSAQRYRERKAPSGVKDDQLDAWSLADALRLDGHGWRPLAPEDPLIEQLRLLCRDEIALIEQRTALVNQLLQALREYYPAALEAFDNWTKDYTWRFLESFPTPEKLESAGKRKWEKFLHAHKLWRPDTAPKRLEIFARAAAFTGSAAQTAAKSLLAVSCARVLQTLERQLLTYRAAIEALFAQHPDHDLFGSLPGAGPKLAPRLLAEIGDQRDRFEEPQSLQCHAGTAPITIQSGQILRHRLRHGCDLTLRSTVHQWADHSRKTCPWAQTYYQAHRAKGQSHACALRCLGQRWLKILWKMWQTRSCYDEALHTRNQTKHGSWVLQFKPA

SEQ ID NO: 300258 - protein, 310 aa, unidentified
MEHHRIVGIDVSKDRLDVHVLPSQEAFAVSRDATGLVELCRRLGDTVDLVAVEATGGYETLVAATLSDHGVPVVIVNPAQVRAFAQALGQRAKTDPIDAAVIARFAEATRPQIRPLPDGAARLLADLMARRRQIVEMIASERQRLHRTEPPRVRKSIERLLKALERELGTIDHDIDGAVRGSPLWREKEDLLASVPGIGSIIARTLLAELPELGRLDHKKIAALAGLAPYTRQSGLWKGKARIGGGRAVVRTALFIGAQVAKRWNPPLKAFYERLIAAGKTKMVATIAVARKLLVILNAILRDRTPWQNA

SEQ ID NO: 300259 - protein, 344 aa, unidentified
MQITTIGLDLAKSVFQVHGVDAAGQAVVRKSLRRSQMLPFFAKLPPCLVGIEACGTSHHWARELIKLGHEVRLMPPAYVKPYVKRGKTDAADAEAVCEAVTRPTMRFVPVKSPEQQAALSMHRTRDLLVKQRTQLINMIRGLLAEFGVDIPKGLERALLMARQIVDGKAPEVPMEAAKIVATLSQQALDTHARLREIDRDLAVWLRGNDVARRLMTIPGIGPVGATALAASVTDPHQFRSGRQFAAWLGLTPLQKSSGGKERLGRITKMGDKYLRKLLIVGMTSLVRRAKYNPGKIDPRLADLLARKPTRVATVAMANKTARVIWAIMARGETYRTGHQPALAA

SEQ ID NO: 300260 - protein, 392 aa, unidentified
MYYIGIDIGKQYHEASIVDSSGNLISKSLKFSSNHKGADKLMDYISEHISDENYVVGMEATGHYWYTIYSYLISRGITVYVINPLQSDSFRNLYIRQTKNDSKDSFLIAEVIRFGQFTTTTLANDNLLSLRQLCRYRANVISARTEIKLRINTILEQIYPEYEKIFNDKYGSSSLAILKKYLLPENIAKASIDELHDILKVNSHNRFSAGKAGELKESAINTFGIKIAQSAFAFQLKQLIDRLKLLNDQITELDNEILSYYNKFDCYLHTIPSLTPISAACILAEIGDIHRFKNSSALVAYAGIDPTVHQSGAYCSTHNRMSKRGSSYLRHTLFLAASCCVFHGSAFNDYYLKKRARGKHHLVAIGAVSRKLTTVVYAILKSGKPYEDVKFV

SEQ ID NO: 300261 - protein, 319 aa, unidentified
MKKEEIVFEQIIERGCGIDVHKEVIVSTIRGTGIKESTRTYSGFTESIESMRDWLKENKITHIAMESTGIYWKPIYNILEEDFEIILVNARHIKNVPGRKTDKKDSKWIAKLLLSGLLNGSFIPSKHIRDLRDLTRYRKKIIGQIASEKNRIQKILEDANIKLSSVVSDMSGATATKIINAMISGEEDIEELVKYRHGKMQATEEELASSLKGKLTEHHKFMLTTIKESMQEKESIIEKLDKRIDEQLKSHKLILDSELLQTIPGVGETAAASILAEIGNEMSQFPNEQHLASWAGMSPGNNESAGKKKVARQHMAINI

SEQ ID NO: 300262 - protein, 464 aa, unidentified
MKHPQRRPRKPSASGSSLLERIQPNAAGIDCGSAEHYVAVPADRDATPVRSFPTVTAELDRLADWLAACGVTTVAMESTGVYWIPLYEILEARGFDVVLVNAHHVKNVPGRKTDVVDCQWLQELHSVGLLRGSFRPTAAIAALRAYLRHRETLVQSAATHVHRMQKALVQMNLQLPTVISDITGVTGLRIVRDIVAGQTDPHVLAQHRDGRCRASEAEVAAALTGHYRPEHLFVLQQNLELFDTYQRQMTACDAAIEAHVLTLAAQAPAAAGPLPAPRTKNKPRDNEPRFDIRTPLHQLTGVDLTQLDAIGPYSALRLLAEIGTDMSRWPTEKHFTSWLTLAPHNKISGGRLLSSKTQPSANRAAGVLRMAAMTLGRTETALGAFYRRLAYRVGKAKAITATARKLAILVYRTLKDGLVYHDPGAAAYDAQHRQRVIHRLRQRAANLGLALVDRSTGEVLEGAV

SEQ ID NO: 300263 - protein, 344 aa, unidentified
MTIVEITRLVTGGVDTHADVHVAAAVDANGGVLGVEMFATTPSGYAELADWLAGFGELVRVGVEGTGAYGAGLARFLRTRDVTVIEVDRPNRQARRRQGKSDTIDAIEAARAALSGRASGVAKTADGDVEAIRALLVARRSGRNVRVKYLNQLRHLIFTAPDELRERFRHVHRDQLARTAASLRPSGDVVTSATKLAMITLGRRVLALEADGARLDRDLERLVRTVAPKLLEVYGVGVHTAAILLVAAGDNPHRLKSEAAFAHLCGVAPIPASSGKTTRYRLNPGGNRQANHALWRIVFTRMSNDERTRNYVARRLAEGKTIREIMRVLKRYVARELYPHVVTR

SEQ ID NO: 300264 - protein, 327 aa, unidentified
MRQHKSSTEKVKTSVAFDVCKATLDGHILVDGKVFSVPNADDGFDQIAAILADYHISLVLMESTGGYEDAAACFFQSIGYDVVVVNPRHARRFAQSMGIMAKTDRIDAAVLAQFASVLDSLPDRERYIRPLTDETRKFLSRMVTRRRQIVELITVEKQHLSCADDYSRQSINMVLPFLQAQLKDINDDISLYVKKNFSYLSKILSEIPGVGKQAVGVLIGDVPELGRIDNRQLSAVIGVAPFNHDSGKMRGRRFISGGRKQVRNVLYMGIISATRFNPVIKAFYERKLNEGKPKKVALIACMHKLLRIINAMVRDGASFNPSLHTVS

SEQ ID NO: 300265 - protein, 419 aa, unidentified
MDVMLERCCGLDVHKRDVVACLLMGPTERAPTKEVRRFSTVTAGLRELREWLVQAGCTHLAMESTGPYWKPVFNLLEDAMTVLLANARHIKNVPGRKTDVKDCEWIARLLRHGLVRGSFIPPRPIRELRDLTRYRRQLVEEGARERNRIQKVLEDANLKMGSVVTDVFGVSGQAILEAIVAGQGTPEQMAQLARGRLRSRLPELTQALDGLPSLHHRFLLRQMLDHVARVEEQVEELDRRITEQLAPFHADIERLQTIPGIKETGAATLVAELGTNMDQFPTDAHVAAWAGMCPGNNESAGKTRSTHMRHGNAWLCTALIEAGWAASRTKGTFLKGMYHRIAARRGRKRAIVAVGHKLLIIAYHVLKQRRPYLELGEHHVDALRHDVTKRHLLRRLQDLGYTATLEPLDVPAPEPSFAA

SEQ ID NO: 300266 - protein, 327 aa, unidentified
MGPLKNRAADEATAPAVYVGVDISKDRLDAAITPNKQTWAYPHTEQGIAALVQHCQALSPALIVLEATGKLELPLVTALMAAGLPVFVANPTRTHHFAKALGLLVKTDKTDAYALARYAEAVKPKLRTLPDQATRDLAELVIRRAQLADMITAEQNRKRLVSQAMKERILQDIAYLKARKDDLDKQIARTIQNSPAWHTHQRLLSSVPGIGPVTLACLIARLPELGRLTRREIAALVGVAPFAHDSGTKRGHRVIKAGRAALRRVLYMATLVATRYNPVIKAFYERLCNAHKQKKVALVACMRKLLCILNAMMKQLSPWKTQLSMLP

SEQ ID NO: 300267 - protein, 373 aa, unidentified
MPRYSTAFGMDVHLRSTTVCALDAETGEAVTRRFRGNPWGEVAEWMSGFPGPSLAAYESGYLGFAPQRELSGLGVDCVVAAVSKVPRSAADCSSKNDRNDAARMAKAILSHDVTPVWVPSPEIEGLRDLAAAHDAATARLATAKQRLLAFLARRGYAYGGTTPAGNPRKYWTYGFLRWLDGIHPADDGGIRALAALRNEVEAAAETRDDLLAEYRAAVAAGPLSAEVEALQSIKGCGFALAAAFASEVGDFSRFRSGRQVTAYFGLAPRQRSSADSVRLGGISGAGNALVRKLAVEGSWRYAQAGHQPKLMPKGSGVPLEIRMHGRKGSERLLRRREEMLERGMPQAKANAATAAELVRWLWALGTMCREAGE

SEQ ID NO: 300268 - protein, 397 aa, unidentified
MQKETGMKNDSSSDKQQKTVATRKKTTKAATEFGEKQLYAMTAVGGGGSGRPTIGLDLGDRSSRWCALGADGEVIGRGEVESERQELERFFGRIPKSLVALEVGSHSPWISRLLEKLGHEVVVANARRVKLISESSRKNDDVDAELLARLVRADRQLLSPVKHRGEEAQADLMAVRVRAQLVELRTQAASAARGLVKPFGQRLPSCDADSLSKAHAGHLNAAIRGHAERLLGVVEELTKQIEACDKELERIAKERYDKETTQLRQVPGVGPITALTFVLTLDDAGRFAKSRDVGCFLGLRPRSRQSGASEPEMRISKEGDGYLRTLLVQCAQYILSRRGPDSDLKRWGLLMAAKGKKKAKKRAVVAVARKLAVLLHRLWVSGEEYERRRSSAMKVAA

SEQ ID NO: 300269 - protein, 421 aa, unidentified
MLNENLIERGKYVNREILVVGVDIGKYTHVAVGTSLEGGFTKSFPIRNNRKSYKDFESIMKNWKERFNCGYIVIGFESTGHYWKPLGYYLKDRGYMLLEVSPSNTKKSKEMMDNSPLKSDPKDARVIADLIKQGKILTPVFPEGRILDLRGFMHTRENFIKERTSILNRLEKIMDVAFPERKEIIKKVGNKTSLFLLKEVPFPADILKKGLRWLSKYMWKKSRGRYNELNAKRLYNLAKETVGLKQGMEGFLYELNALLVRLKEINKKIEEVESIIESYLEDIEEARYLLSIKGVGPNIAAAIISESGGLSKYRRAESVIKIAGLNLYERSSGKSKGEKHITKRGRSLMRQKLYFAALQQTHPGMPLYSYYRRLVEENGLEETKAIIATARKLLRIMFALVRDKSEYKWNYKERELQKEAA

SEQ ID NO: 300270 - protein, 390 aa, unidentified
MTQVDDLSRCLATLDENSTLVAVVEMSQSSWLTAGLVPGVDRRPLKKLAPDAPTLLHLLERWREEAKTAGRMITRIVLAYEAGRDGFWLARWLRARGIEAYVIHSTSVAVSREHKRAKTDRLDAAMLLRVFLGWLRGERDHCGMVAIPTIEQEDAKRPSRERESLVGERSRIINRMKSALARLGIRGFKPELRKAPERLEALGTPEGDSIPPNTLDELRRDLARIAVVRGQIEAIEQNRLARMEQMPAQGPHAMVRLLARVIGIGVETADMLVQEILSRNLRDRRAVARYAGLTGSPDESGSKRREKGLCKAGNARVRRGMIQLAWRFLIFQKESELAQWYREQTVATKGAGKDKRKKMIVALARKLLIALWRMATTGEIPEGVMLRPAA

SEQ ID NO: 300271 - protein, 345 aa, unidentified
MSTVYVGMDVGSKVTAVAARSESGEVVERLSFKTSKENLISHISRYGMDAEVLLEEGELAGWVYRTLLAYTGEVIVCDPKRNAWIAKGKDKSDKVDADKLSELLRINSFATIYHTPDEHIAAFKVAVKHYEEATERAARQMVQIKAMFRTNGVFPEGKRVYGIQGRCEYLRMTENPTIRNILVQEYDMLDYLSKAKVEAGGLVVKVSLNFPVIEHFKRIPGVGPVLAARFVAYVLDPNRFNKRGLWKFSCLGIVNRSSDGVSLGRQHLDRAGVSAMKDLSRKAFDGAMRTKETNGIQVFFQRSYMNCGDHDHARLSTQRKILSMMNAMWRDGTDYSDEMFIGPRA

SEQ ID NO: 300272 - protein, 412 aa, unidentified
MRIVYKRCCGLDVHKKVIVACLLLLEPDGELRQEFRKFGTMTQDLLELLDWLQQAGCTHVAMESTGVYWKPIYNILEGHLEVVVVNAQHLKGVPGRKTDVLDAEWLAECFQLGLLKASFIPPAPVRELRDLTRYRTSLIRERARTANRLQKVLEDANIKLAGVVTDIQGVSAWAMLQAIVSGTTDPEALADLAKGLLRKKREQLVTALSGRVKPHHRFLIAEHLSQIEYLEEAIQRIGAEVAQRLRPFEVEVKRLDSIPGISRQIAEVMLAEIGWDMSRFPTDKNLASWAGMCPGNNESAGKRRNGKTRKGSRWLRHALIEAAHGAARTKNKYLKAQYHRIAAHRGKKKALVAVGHSILIISYHLLTRGQEYTDLGANYFDERDRNAVQRRCVKRLEKLGFKVALQPTAIAA

SEQ ID NO: 300273 - protein, 365 aa, unidentified
MSSEYYTTIGMDVSDRTTKVCVMSKEGRAPRVVMETTIPTTKEGLAKFLSTQDAATPVAFETGTHCRWMNEVAQGMGFKVYVANPCRLRMVTDSKAKNDKNDARMIARLALADPGLLHPVRLRGAEYQRMINLHEMRGLLVKQRSGIIVQLRAVAKSMGFRIAKVSAVGFHNLDRAAWPKELRDIAWPMLKNLEQLAVTIKTYDKLIRELAGTPAFKAQVDRLMEIHCVGILVATAFVAVTGGDMGRFEKPRDVGPWSGLAPKQDQSGDVDRQCHVTKAGSPLLMRLLVESSQLIMRDCSPDTDLKAKGLRICARGGKIARRKAVTAVARSLAVLMAAMLKKPDAPYVPLSERCEKELLAMRAMA

SEQ ID NO: 300274 - protein, 334 aa, unidentified
MKQVNQVGVDVDSQELVCAMQRAGQRAPMGTFANSAVGHQKFIQWATKGGRSARVCLEATGIYSLEFALALDRAKNVEVMVANPRAIKNFARACMQRAKTDVVDAGVILDFLERMPFTPWQAPAAEILELQAINRRIVQLDTELTREKNRHHASEFAGAGGDAIAHDIEVNIHHLERRIERMHNSGLQLIRGTPALAAKLAHLVSAKGIGEASAMRLLAELLVLPGHLAAPQWVAHAGLDPRPYESGISIHRPRRITKVGNRHLRAALYMPALVAIQHDPNVKAFYNKLIAAGKKPMQAVVAVMRKLLHAIWGMLKHDQDFDGNKFFNLAAKTA

SEQ ID NO: 300275 - protein, 429 aa, unidentified
MPNSTSTLKHVVAWIGLDWADQQHAVCLQAAGSSAVEHSTLQQKPEALQLWLAELRCRFPQGQIAIALEQSRGSLFYALMNYDFLLLYPIPPKALADYRKALYPSGAKDDPVDAELLLEFLRKHPERFRPWRPDDAQTREIALLGEHRRQLVDDRTALTNRLRALLKGYFPQALEWAGDLSAPLAWDFLTQWPSLEAAKRAPRLQVLKVYRAHTRRSSEEMEQLLEQIQTARPLITDSAVIESSVLIVQASAGQLRALHAGLQGIEGRLYRLATSHPDYPLFKSLPGAGQVLAPRLLAAWGSDRQRFQGAEQMQAFSGIAPVTERSGKRSWVHWRWACPKFLRQTFHEFAAQSRLQSPWAEAYYQQMRERGLEHQAAIRALAFKWIRIMYCCWKNRTPYNETRYQQALNHRASPLATRLCQLAIQEARA

SEQ ID NO: 300276 - protein, 403 aa, unidentified
MNNVAGIDVSKGKSMVSVLRPFGEVVAKPFSIGHTGSELKELADYLKSLDGETRVVMEHTGRYYEPVARFLHDEGVFVSAVNPKLIKDYGNNTLRKVKTDKADSRKIARYGIDNWAELRQHTPMDTIRMQLKTLNRQQSLYAKTKTMMKNNLIALLDQTYPGVNALFDSPVREDGSQKWVDFATAFWHVDCVRNMSLTAFAERYRKWCKRHGYNFSQSKAVEVHTGAQDLIAMLPKDALTKTMVRQAIDALNAVSASLERLKAEMQALAAQLPEYPVVMAMHGVGDSLGPQLMAELGDVARFTHRNAITAFAGVDPGADQSGTHEAKSTRVSKSGPPELRRALFLVMDCLLKTQPQDDPVYRFMDKKRAEGKPYLVYMTAGANKFLRIYYGRVKEYLASLEEN

SEQ ID NO: 300277 - protein, 455 aa, unidentified
MAKQSGKRKKGGAKADATEGLPPLNLHAAGIDVGSAEHYVAVPLDRDVEPVRRFGSFTADLHRMAHWLKDCTTVVMQSTGVYWMALHDVLESHGFEVNVANARHTKTLPGRKTDVQERQWLQKLHTFGLLNNSFRPPEEIRVLRGYLRQRENLVAAAATCIQHMQKALTEMNIQLANVISDISGTTGLAILYDIVRGERDPYKLAMHKHSRIRASRQEIARSLQGTWRQELLFVLEQSLDLYQTYQQKIQTCDERIDGQLRSMEPKIDPVSEPIPEPRRGKDWRGHQSGFDLRGQLYRITGVDLTRIDGIEVQNAQTIISEVGVDMSRWKTEKHFASWLGLCPDNRISGGKVLKRGTRHVVNRASTALPLAASALLRSQSALGAKFRRLRSKLGAPKAITAMAHTLARLVYRMLKFGHDYVDRGIDFYEAKYQHQQLQRIRKQAAALHMQLIPLT

SEQ ID NO: 300278 - protein, 364 aa, unidentified
MSTLHYVGMDVHKETIDVSMYKENDPRPYYEKRIPNRDTSIKKLFKGIMKTGSVVACYEAGCMGFTLQRTLEGMGVTTVIAAPGKMPRRSSDRVKTDRRDARTLATYLRNGDIEAIRVPTEEEEVVRDYLRGREDVRLDQARTKQRLQKFLLRHGYMYESVRYWTGPHEKWLRSLEFKNPLMKETFDEYHVGIQELGGKLRMMDKRIDEIALSEPYAAKVKKLRCFKGIDFLTALTLVSEVGDFRRFKSAESFMAFLGLVPSEYSSGGKRRQGGITKAGNTHVRRFLIESSWHYRYSASPSKQLMERRYGQPTDVIAYADRAMKRLQHKFFKLILRGKTSQVAVTAVARELAGFVWGMMVGCTA

SEQ ID NO: 300279 - protein, 347 aa, unidentified
MDDKVTYVGLDVHAETTVASWGRPHEAIQRLEIPTTREGFQLLNRRIGRKRIWGAYEASSCGFIPYEWLRDTKWRASVIPPTHLKRSAKSRKNKADAKDADMLREHVMAHGELGTEMAEVVVPDAELRDDRELTRQRLQRGGRTSAVKAEVLQLLRRHGVERPPELKSNWTKQHVAWLRGLASGKGALPPMSRLVLAGKLRELEFLEAETQVLDEAVEALARKPRYEAALRRMRRHKGVGLLTAAVLLMEMGDPRRFANRKKLASFFGLTPIRHDSGKKVDRLGHITRMGSPHARKVLNQSAWAFLRSHDRWKAWFKQVAARRGKMRAIVALMRKLSIILWHEAAAA

SEQ ID NO: 300280 - protein, 458 aa, unidentified
MNRNKSKSKIDHTMPMVHPNAAAIDIGATMHMAAVRADRTPEPVRSFGTFTTDLHRLVDWFKECGVETVVMESTSVYWIPIFELLDARGFTVFLVNARDAKHVPGRKTDVSDAQWLQRLHSFGLLRASFRPKGQIAELRAYMRQRERLLEYAASHIQHMQKALTEMNVQLHHVVADITGATGLRIIRAILAGERDPKVLTRLRDYRCHSSAETIEKALTGSYRAEHLFALEQALALYDVYHEKASACDARIESVLKELSIDRGRRSDPLPSSGRPRSDQANALAFDVRAALFALLGKDITQIDGLGPYLSLKLIAECGDDLSAWPSAKHFTSWLGLAPSNKISGGKILSSRTRRCGSRASAHLRLAAVSVGRTDTALGAFFRRLSARIGKAKAVTATARKIAVLFYNAVRHGMEYVDPGASYYETRYRTRVVNNLHRRAKAFGFVLQPMEPPPGVVVS

SEQ ID NO: 300281 - protein, 405 aa, unidentified
MQNIYERCCGIDVHKKLIVACFRNGKKAELRKFDTLTSSIKELGNWLLDNECQMVAMESTGAYWKPIYNILELLNLDVMVVNAHHMKNVPGRKTDVKDAEWIAELLQHGLLKASYIPDREQRELREIVRYRKNLVEERSREINRLEKTLEGANIKLSSFVSDLTGVSSRNILQLALTGEVNEENIENLMHPSMKATKEQLFRAMDGVLSPVQKKLVSAILDHIDDMTRRIQDLDKIIDDQIKDHEKALKNIDELPGIGKRSAEIIVAEIGTDMNRFPSAGHLASWSGLCPGNNESAGKRKSGRTTKGNKYLKSTLIQCAKAAIKNKDSFFHAQYQRLVVRRGANRATVAVAHSMLIAIFHVLKDGVPFKDLTSDYYTKFNTEAKARYYMRKLQDLGMSIPVSLAT

SEQ ID NO: 300282 - protein, 404 aa, unidentified
MWYAGIDWADTHHDALVIDEKGSQVGSLRVDHTPQGMSKLNAFLEQIIGTAPKEQMACIIETTHGLLIAHLLEAGWPVYPVNPRTVDRRRSASGAKTDTIDAYLLAKTGRADFADLHRLTPDSEKVAELKLLTRDQDALIQTQTRLVNQLTACLKAYYPVALELFTKVQQHTTLVFLQTYPTPQAAKSASIEQITQVLKKAGHPNPLAVAPKIVERLQPPHLQADAVITRTKSRLMLALVSQLLPLIEQIAQDDKEIDTLFLTHEDHEIFESLPRAGQRLAPRLLAEIGDDRKRYQDASSLQALGGTSPVLYQSGMYSKAHRRLGCIKPLRNALHQFAWQTTQSEAWARAYYQRKRAEGKSHTVAIRALANVWVRIIFAMWLHHRCYETATFEQAQQQHARRVA

SEQ ID NO: 300283 - protein, 343 aa, unidentified
MSDKLYFGVDVSKHWLDIAYYDGMDVDWKHGHIRVDNDERGFAQLGRWLDRLCVGKGTCIFCMEYTGLYSQEFRQWLERMKIVYGMVSPRKMHRFEPDLGENERALDRIKTDEMDSFRIAIYCKEHSMKIRRKPSHLPSDAYFKLKRLLAERRQYVKQSALYKQQLHDIGKYDTEASRHRKEAELASLTEKNLQTSKEMETIIREDADIRRSYDLLLSIKGIGLVVAAETVVLTENFTSITNPRRYACYIGIAPGRKESGVSIQGSDHVGRKGFTQAKADLSMAALHAIHYDKGIRAYWLRRKTEGKHSGVVLNAVKFKIVLRMFAVIRRQKPYVEMEEYGKK

SEQ ID NO: 300284 - protein, 338 aa, unidentified
MKQYPSVLGIDLAKRVFHIVGMDEAGHVVMRKRLTRDALMPFITQLPPVIIGMEACGGAHYWARRFREHGHTAKLIAPQFVKPYVKSNKNDPGDAEAICEAVTRPTMRFVPIKEVAQQDLQSLHRARERVVKARTALVNEIHGLGMEYGIVLPQGVAKFRHTFMAILDAERAKLTSMGLELFMQLYEEFCVLDKRLASYNAKIEAIATAHPVCQRLETIPGVGPLTATALIAAVSDVSAFKNGRQFAAWLGLVPRQHSTGGTARLLGISKRGDVYLRTLLVHGARATLRWVGLKTDRRSKWVRALMERRGKNKTAVALANKNARIAWVLLNSDQTYMD

SEQ ID NO: 300285 - protein, 370 aa, unidentified
MKMSIGVDLHKTQFTVCCLSEDRAIQETGTYPTTDQGYRAFIKRISGWHERGYEVRAAVESTGNSRYFRNRLVKAGIEVKIVNTLKFKVVNESVKKTDKHDSRTLAEFLEKDMLPESILCSQESEDIRRLLKSRSVLVKALVSLKNQVHGLLLGYGIESRRGQLQSKKERQRILDGLADHRSFGNAAQAVKPLLVTIDQITSEVKELERVLSDLVSADEDVALLQMIPGVGMITAATVRAYSDDINRYENAKKYAAHAGLAPWVQNSNKTIRHGHITKRGPVELRTAFVQMVMGMLRLQNKTDGYRLMYRYRTMKKSKGTGRSIIATARKMSAIVYAVLKTKQPFDPSKMLSDPKDVEMSKVARRYVLAA

SEQ ID NO: 300286 - protein, 348 aa, unidentified
MSKHSVPAGEVSGLLRRFAELRRKAAARTGRDFPIIVIQEAGLDGFWIHRVLQSEGIESHVADAASILTSRRRRRAKTDRIDGETLVRTLMAYKRGEPRVCSMARAPTPEEEDRRRVCRERRTLVGERVRHVNRIKGLLSAQGVFGYEPLRKGRHERLEELRTGDGRPLPVHLKAQIIRELDRLEVLLEQLKTVEAERDTLLKLASDEVASPAPMLARLKGIGPETAAVLWSEGLFRQFDNRRQVAAYAGLAPTPWKSGSIDHEQGVSKAGNPRLRTTMVELAWLWLQNQPTSALSLWFHERVQRLGGRMRKTIIVALARKLLIALWRYTTAGVVIEGAVMKAASAAI

SEQ ID NO: 300287 - protein, 313 aa, unidentified
MSPTNLSILYLGLDIAKSSLQLDLAGKPHTLTNDAKGHDQLLGLLKDHPTAHLICEATGGYEQPVLRALQAAGKPVSIVEAGRVRHFAKAKGLRAKTDPIDAVLLSDYGRTFQPAATPAPTDQQTRLAALTARRRQLIDSRLVESNRAEHYQDKDCLRQSQQLLRLLEKQINACDTAIAKLVAEDASLKAKADRLDAIPGVGPLTAATVLAELPELGKLSHQAAAALAGVAPYNSDSGTAHGVRHIAGGRRPVRCALYMAALSAIRHDAILKAFYTRLRDAGKKPKVALVAYMRKLVILMNRLLKNDKFQLAN

SEQ ID NO: 300288 - protein, 340 aa, unidentified
MSAITIIGVDLAKRVFQLHGAKADGSVAFRKKLSRGRFLSFLAEQPPCVVGMEACSTAHGWGREIEKLGHTGRLIPPIYVKPFVKRQKNDAADAEAIAEAASRPTMRFVAVKSEEQQARAMLFRTRDLLVRQRTQLINAVRGHLAEHGVVAAQGPAHLKRLADAVVDEPSPLPAMVRELGKLFLEQIDVLDTRIGELDKKLRTVAGQAETTRRLQTMPGVGPITAVAVETFAPAMGSFTRGRDFAAWLGLVPRQHSTGGKQRMGKVSKMGQRDIRRLLIIGAMAVVQAASRSGAPKDSWLARMLAKKPRMLVAIALANKMARGLWAMMTKQENYRNPAAV

SEQ ID NO: 300289 - protein, 370 aa, unidentified
MIKSVVYVGLDVHKDSISVAFAREGREPAEEWKTVPYDGKRLLKSLKMLTSKGGTLKVCYEAGPTGFGLCRRLREAGVDCSVVAPSLVPGKPGDRVKTNRRDARKLAHFLRSGDLTEVHVPDEAVEAVRDLERARDDAKRAERVARHQLGKFLLRHDRHWDGKAWTQKHLNWVRTQKFAYPAQQSVLADYLKAVEDLAERVASLTSAMETLVEKTVLAPLVKALQAFRGISLVSAVIIAAEVGGDLRRFATAGQFMSYVGLTPSENSTGEHRRQGRITRCGNGHLRRILVESAWHYRHMPAIGVELRRRNRGVADGVRRIAWEAQKRLNKRLYHLLHAGKSSQKAVVALARELAGFIWSVGQEERLLAAS

SEQ ID NO: 300290 - protein, 410 aa, unidentified
MDRFVERCAGLDVHKDSVTATVRVPGSGRERLQETSTFQTTTRGLVTLADWLESYGVTLVGMESTGCYWKPVFYLLEERFECWLLNPRHLRNVPGRKTDVQDSAWICELVEHGLVRASFVPPPPIRELRDLTRYRKTQIEERSREVQRLDKVLQDAGIKVSSVASKTLGVSVRRMLEALVAGTHDPEVLAELARGRLRRKLPELREALEGRFRGQHHGLLVSQILAHIDYLDETIATLSERIEQALTPFSRERELLETIPGIGRTAAQVLIAEVGVDMSVFPTSAHLASWAGQCPGNRESAGKRRSGHTRHGSRWLRTTLTESAKAASRCRGSYLSAQYQRLRGRRGPGKATGALSHSILVAAYHILDQHVPYQELGADYFNRRSTQQRTTRLVRQLEQLGHNVSLEPNA

SEQ ID NO: 300291 - protein, 343 aa, unidentified
MDQYIGLDVSLKDTAVSIREDRKRIWRGKCPSDPKALSQIIRKHAPHAKLVVFETGPLSTWFYHALAAEGIPAICIEARHAQKVLNETLNKTDANDADGLAQLAEAGFYKVVRVKTFDNMLTRTLVAARSQLVSISKQLSNQIRGLLKTFGLIVPKGEGRVFDANVRELLNENRGLAAVILPLLDAWRDIRKRAANLDHQLLAASRQSQGAKLLMTIPGVGAVTAVSYIAAIEDPENFPTSRSVGAWLGLTTRRYQSGEIDYDGHISRRGDSRLRGLLYEAATVLLTRTTARTECSLKTWGIKLRERLGFKRAAVAVARKLAVIMHSMLKAGEAFNPLGGAAA

SEQ ID NO: 300292 - protein, 411 aa, unidentified
MQVIHERCAALDVHKKTVVTTIMITQADGSVQEQTRTSFTMTADLLALDDWLRRHDIKVIAMESTGVFWRPVFNLLEEGRQVILVNAQHMKAVPGRKTDVKDSQWLADLLRHGLLKASFIPPKPVRELRDLMRYRKTLVQERADEVNRLQKVLETANIKLASVATDVLGKSGRSMLDAMLGGQDDPEMLAELARGRLRAKLPDLRKALDGRVQPHHRVLLTRILAHIDFLEESLLQLQAEMEQYLHPFEEAMELVQSVVGIEETAAASILAEIGTDMTRFASDKHLASWAGVCPGNKQSGGKRLSGKTTKGNPYLRAILFEVAWAIAHTKDNYLSAFYHRMARRHGKQKAIMALAHKVLVIVYHILRTKKPYTDLGAEYFDQRDRGRIERHHIHRLEQLGYSVTLTPKEAA

SEQ ID NO: 300293 - protein, 395 aa, unidentified
MSFKILKNNCCGLDVHKTWIYACIGITDSLKRTEYKEARFSSFTKGLNELCDWLSKYNCTDVCMESTGKYWIPVFNILEQHSFWVTLSHPKYTKPMKGNKTDRKDAKWICDLYMCGMVKPSFIPPADIRELRDLVRYRFKLTCMITGEKNRAHNCLTVSNLKLDDVFSDIFGKSSRSITEQILQHPGETFDVAPFVDGRCKTPIEEIQAAVDGAISKEQAVKLRQCLNHIDELEMHKAEIEREIFRLSDKYESVLSLIRTVPGFDKTPMTAIQVLSEIGGDMSVFPTAKNLVSWAGCCPRNDQSNHKIKSKKHPEFTTRYRRIKARRGHKKAIIAICRMILTAIWHILTDLKPYTPEGFLESRPVNKEKVLTISQALNLMKQRGYIIKDDVVTVT

SEQ ID NO: 300294 - protein, 422 aa, unidentified
MNNFQHLHPKMTRTYAGIDSHKDSHTIVFLNCFHEILGEITIGSAPSEFPIFIKRVKKFIQPHTNLVFGFEDVSAYGRAFVKFLVEKNYIVKHVDASKVATERGQVLHKTDSFDAECAARVLINQFDKLPDANPQDKYWILSTLVTRHASITKINVMIKNSLHALLGHNYPSYKKFFARLTAQSAIAFYETYPSARHLENVSVEELASFLKTASRGQNSIQKAELILTAVGNDNVPVNEFQDAQDFNILSLVRQIKNNFDELDEVNKQIEKLLNHFDLPLRSMKGIDVLTEAKIISEIGDISRFKNAAALAKYAGVAPVTYASGMSALQMANARGNRKLNDIFFKIALTTITPFGTNKVLVHPIFYDYYQKKVSEGKTKMQALKCVQRRLVNIIYNMMKHQRPYENLETSYLKADVNNAKTV

SEQ ID NO: 300295 - protein, 383 aa, unidentified
MRSFIRTIGRISPHSLLIGYKGPNRISVPTAIGHLIKVLVKVTQFIHLKYKVMRINQTIGIDISKLKFDVRIHSNQMFNVFTNNQKGFKELIKWVRANNPFSTEETIIVFEHTGLYSFPLALFLSEQQLAFALVPGLEIKRSLGISRGKDDKVDATKIALYGYRLRDEINPYILPSNEIITMKQLLSLRDRFIKQRAGFRASLKEQKIFLLKKNHQILFDTQQKMIGYLTKQIDKVDKKLNAIINDNEVLKNIFTLITSVKGVGAQTALHLIAYTEAFTKFKTWRKFASYCGVAPFPNISGTSIRGKTKVSNLANKKIKSLLDLCAKNAIQYNPEMSIFYKRRVEIGKNKMSTINIIRNKLLSRIFAVVDRKIPYVDIMKYVA

SEQ ID NO: 300296 - protein, 378 aa, unidentified
MAWLMTDMPFGVSTQAGANRNRLGRSTAAMNMLAETVDAVIGVDTHTDTHTACLVDRVGREIASTTVEATPDGYAGLLAWATQLAPGLQLVWAVEGCRSHGAGLLRVLIAAGQQVVEAGRPRRASRRPGGKSDPADAQLAARNVLGAKRHAQPRRDGDREAPRILLVARDHVNTTRTAAVNLFKSLLLTAPDVLREPLRRLSTPRQTAACAVLRANPREPMEDRVRRQTLRSLAQRIRLLDKEIRANERQLRDLVEAVMPALLDEPGIGPVSAAHLIVAWSHPGRCRSEAAFAALAGVSPLEASSGRITRHRLNPFGDRSLNRALHTIVNWRMIHGHEPTQHYLVRRRGQQKSDNEIRRCLKRYTARHLFRLMERTDI

SEQ ID NO: 300297 - protein, 339 aa, unidentified
MSQSQYVGIDLHKRRSVIVRMDAAGERLSCTRIVNDPVALAAEVAKAGAEPEVVLEATYSWYWAVDVLNDYGATVHLAHPLGVKGFGYRRVKNDERDASDLCDLLRMGRLPEAWAAPPEVRELRELVRQRQKLVQRRSGIKAQVHAVLGKLGIHVPVSDLFGVAGPALLDKAPLGPLYGERVAALVRLIEAHDAEITSIDRTLSAALADDPGYRAIQVIPGVGPILGAIFVAEIGDVSRFPSPGHLTSWAGLTPRHRESDATVRRGRITKQGSPIVRWAAVEAAQNAPRATFLKEDYRRIVERRGCRPIAKVAVARKIVTLVFYGLRDGEIRCLQEAAA

SEQ ID NO: 300298 - protein, 391 aa, unidentified
MIYIGIDVAKDKHDCFITNSEGEVLFNAFTIPNNADGFHDLFQKISSLTNDFSNVKVGLEATGHYSYNLLGFLLDKGLTTYVINPLHTNLYRKSLSLRKTKTDKVDSRTIATMMMSDMNLKSYSDTSYHNEELKSLTRYRFDKVKERAKLKSSVSRLVCILFPELEKLVPTLHMASVYALLFEFPSADAVANSHLTRLSNLLAESSKGRYGKDTAVMFREAARSSIGSHMPAKSLELKHTIKLIHELDAEIEEIENEIKSIMDEIHSPILTIPGISYRMGAMIIAEIGDFSRFDSPDKILAYAGMSPSTYQSGQLDNCYSHMEKRGSRYLRYALYNATKYVCHWDESFAVYLAKKRAEGKHYNVALSHATKKLVRTIYAMEKSGQPYQSAS

SEQ ID NO: 300299 - protein, 372 aa, unidentified
MDKYIGFDIDDKKTIACVVQEGKPDMYETLPTEINFLKLWLKQQRNSSDKLHLTFEVSGQAGWLYDELFDLVDTLTVSNPSKMTWIYRTAKKTDRIDARKQAVLLQLGEIPKVHMPNHEVRQWRGQIQHRRKLMGSSVQIKNRVRGLVKGQGYRQGHYGGSWWSKKNRGWLEQLAASSEHLWCDQLGDMLEQLSLYEGQIKRVTKRLDERLKIHPGAVVLMDIPGVGPRTTEAVLAYTDEVERFRRGRDYCSYFGMTPKLDQSGSVRRVGHISKQGPSVVRWLIVESAWRAIRKSPALKEFYERVRHGQDKRKKIAIVATARKMLSIMRAKLISGEVFNEKLILQQEQLKRAQQEWERNEEQLRNKMRNFYN

SEQ ID NO: 300300 - protein, 410 aa, unidentified
MTVITIAQNTPVLVAVDIAKARHEVLISVPGKKRHRRLTVLNELADFTRLIAALKDYGHPVRAAFEATGNYHRALAYHLATAGFEVKLVSSVALARTREALHNSWDKNDPKDAQVILHMMEIGNEQFYHDPLVRGTNDIQELSKTHDIVSKSKTELWHRILTHYLPLYFPEADRFHRSSRSDWFFAFLERYPSPHFISAMSKDAFIADAWDVVGRKVAKERLLADIYETSKVSVGLPVGLDSDAISMFRLVLGEGRSLIAQRNQIEDRAVALLKDLPDYQLLTSIPGIGPINALTILAEAGDLRRFGHHRQFLKFCGMDLATIQSGTFRGQTKLSKYGNARLRRTLWMAGQVAILQRANSFRDKFERYIAKDRHNTHLRRKAYTAIAAKMARTVHGIIKNGEPYRPFFEG

SEQ ID NO: 300301 - protein, 368 aa, unidentified
MDEATTAFVGLDAHAQSTAIAVAELGREAPRFLGTVGPRLAELKKALTKLGEPSKLEIVYEAGPCGYALARELTGAGYRCEVVAPSKVPRRVGERVKTDRRDALMLASLARAGELTPVSVPDERDEAMRDLSRARVDAVRARQKARQQLKALLLRQGRRYTGKSSWTAAHERYLASLSFAHSAQQIAFVEYQQAVSESHSRVQRLGEALSEELAHWRMKPLVQALMSLRGVDQLVGTTLVAELGDFRRFTHPRQLMGYLGLVPSEHSSGERRCRGAITKTGNTHARRVLIEAAWNYRFPPRLNYALQKPQEQLSPAIRAIAWRAQLRLNHRYRRLQARGLQHNKICVAIARELAGFLWSIGQHVPACP

SEQ ID NO: 300302 - protein, 438 aa, unidentified
MKKKIQYRTESVEQILPEQLAGAFQAGSRVLVGVDVAKRNFVAALCNAAGDTVLRVRFEHPRQTAQFVGLLAGLQTGERLVEVAMEPTGTYGDALRYRLGSSKIAVFRVSNKHVHDASELFDSSPSKHDGKDSSVIGWLHAHGRSKRWEELDSTRRSVRALVAQRDLYDEPMRRLMTQAEPLLARHFPEFENVFDLSERLTPWVLLEVFGSPAAIAQLSVEQILEALTGKIGRRPSVEDLQSLLVAARGTLGTAMVGEERELLRRMAAEVLHLMRKRREVDARIAKVTEDVEAVKAIRPCLGPVTAAVVFAYLGDPKSYASAAALEKAAGLNLVESSSGTDPNAQDNVPRHISKRGASIVRKYLFLAAMRLVRSDPVAKAWYQGRRSFKAHQGTKAIVAVERKLCRSLFHVAKGQSFDAEKLFDNKRLGVVLPEKKVA

SEQ ID NO: 300303 - protein, 357 aa, unidentified
MKIIGVDLHTRQQTIAMLDDQTGELVEKQLSHEGEQVREFYAGLPKPVLVGLEATGSMHWFLRLLEELAIEFRVGHPAKIRAAEPRKQKNDRRDARLLLTLLAENRFPAIWMPSREQHDLQILLRHRDQFVRIRTRVQLSLQALALSHGLPRGHSLWTCGGQHTLRALPLAAHASEQRDTLLALYPQLQGPIKDLDRQVEREAQQRSQSRRLMTHPGVGPITALATEVFLGDPQRFADGKAVASYIGMIPREHSSGGRQRFGRISKQGNSLLRFLWGEAAIHAVRRDPELRRFYRRKLVQKGMGKARVAAARKLGIRLWIMLRDEIDYTEFCRRGHQRRQCSGAACAGMLHGDSGPN

SEQ ID NO: 300304 - protein, 342 aa, unidentified
MKQYVALDCSLKQISVCVMTEQRRVVREAVIAADAGSIAEFVWSQAPEAELIGLESGPSSSWLFHALRAEGLPVVVIDARHARAVLSLRINKTDRNDAVGLAELLVSGWYKPVTVKSLESHRVRTVLTNRALLVGIRQDLENQVRSVLKTFGFVLGKGRGSFVDRVSEILEGKRLLLQLVRPLLKAWAAIREQLLSVDKEALSIAAQDVTCRRLMSVPGVGAITALAFKTTIDNPWRFSSSDKVGAYLGLTPRRYASGETDRAGRISKCGDGLVRTYLVEAAGVLLTRSKATSDLKDWGLRLAKRASAAKARVGVARKLSVILLRLWTDNSVFQPRANVITG

SEQ ID NO: 300305 - protein, 285 aa, unidentified
MLIIGCDYHPSVQQIAWADTETGEGGEKRLMHSDGEAERFYRELKQKGVQVRVGIEATGHSRWFERLLAELGFELWVGDAAEIRAARVRKQRNDRFEAKHILKLLMEDRFPKIWTASSENRDARQLLLHRHRLVGMRTRVMNQLQAIAMNEGLRRKGGLWSKKGRARLESLSLAPWTSRRRLELLELLDRLNPLIDELSKAIEQEAARRPEVQLLMTHPGVGPITALAFVLIIGTPERFHCGRQIASYLGVIPCEESLAAGTHYQARQCADAVLASGDGTNRGAL

SEQ ID NO: 300306 - protein, 351 aa, unidentified
MWIIGVDYHPSVQQIAFVNTDTGECGERRLSHSDREAEKFYRELKAAGCSVRVGMEATGHARWFERLLAELGFELWIGDPAKIKAKRVRKQKTDRLDAALLLELLLEDRFPRVWVPSPENRDLRQLLWHRHRLVQMRTRIMNQLQAAAMNEGVRRKKALWSKSGRAQLESLPLAPWAARRRHDLLELLDRLSPTIEELSAAVEQQVKHRPEVLRLMTHPGVGPITALAFVLIIDSAERFACGKQIASYVGLIPCEDSSSDQRRLGHITKQGNTLLRYLLVEAAQAVVRCDPDWRRRYIHLAMRRDKRIAKVAMARKLAVRLYWMMRKEWNYEQLQKFGSYAGESDLVHGVQ

SEQ ID NO: 300307 - protein, 354 aa, unidentified
MATKSNQKVPELASVGIDIGKDVFHIVGFDPGGKIVLRRKFKRLALEAEFAKLPPCIVGMEACLSAHFVSRTLRKLGHRPKIIPAIYVKPFLKGQKNDYHDAEAIAEAGLRPNLRPVREKTQDQLDLQACHRVRSRLVSRRTATINHIRAFLIEQNITVRSGARALRNSLFAILQHREGEISPRMIDLIVGLYEDWLWLDERIETITNEIEQISRREENCKRLMSVPGIGPMISTAMVAAIGNGDAFERGRDFGAWLGLVPRQFSTGGRTILGRISKRGNKYLRTLFIQAANVIMMRPQKWEKFSFGPWLVDASKRLHRNKLATALANKLARIAWSVLRNEHHFDESRYEVPAV

SEQ ID NO: 300308 - protein, 339 aa, unidentified
MSIGTVAAVTHDRTVAGSPIARTRKVTVAKIICGVDVSSKTLDARIGEDGPSQSFDRTPEGIRALAAFCKSHDVEFVAMEATGGYEKLPFSLLWLAGVPCAILNPRSVRRFAEAMGTFEKTDDIDAGVIAHFAEVKRIVPQTPASATQQELEALVTRLRQVTDLRTSQTNQRRLVTDAGVLEGIDELVALLNRQIRALEAKIAQSIDADPLWKALDAAFRSIKGVADRTVARLMADLPEIGTISGKKAAKLVGLAPLANDSGKVKGKRSIFGGRANVRSILFVVAELVRRHEPDFCKFHQTLTAAGKPKKAIRVALARKLLVRLNAKARDARKELGLAV

SEQ ID NO: 300309 - protein, 401 aa, unidentified
MAIPCGEIIGGVDTHADTHHAAVIDTNGKHLGDAKFPTTPAGYAALAAFVAAFGLIVRVGVEGTGSYGAGLTRYLRDTGLEVVEVIRPNRQLRRLRGKSDPIDAYAAATTALAATEHPTPKVTTGTIEAIRYLLVARRSAVKARTAAQVQIKSLLVTAPTQLRERYRDASDKSMIEGLSRMRASFTEIALGAIVTSLKSLARRHQQLTQEIAELEATLAPLTAEANPALVASKGVGTITAAQLLITAGENADRLRNEAAFAALAGVSPIPASSGKTNRHRLNRGGDRQANAALHRIALVRMSYEPRTRDYVAKKRAEGRSNKEIIRCLKRAIAREIFTLLTTIIEVPEIEDLRPLRQARGISLTTVAKHFGVWPASISNIERGTRRDDEFVTTYREWLTAA

SEQ ID NO: 300310 - protein, 407 aa, unidentified
MISIGIDIAKEKFTVCALEQGSKIVRKPFDVHLKKTKVEEFLKKLDSLNEEVKIVMEATGKYHLPILYELKDKGYFVSVVNPLKMKQFCRVLNFRKAKNDNIDAIQIAEYGLMYWKELQEYKVDSESFRVLKELNRSYQHYMDLRINQMNFIDQTISQTFPGIKKLIPHASGDFSKDKLLDFLEIRWHKNLVLEKSEEKFIEDFKNWAKEKRYHPNADKAKSIYKLAEESISTQPSNSSYIKMNIQEGIELIKHINQILHTILSQMIEIAEPLEEYQEAKKFSGISDKLAVQITAEFGDLSKFKNKKSLISFVGIDSPPYESGNFKADQRKITKRGNAILRKVGYQAMKCMMSAKDTENDIYLYMVKKEKDGKSKKVCKFAGLNKFLRIYYAKIMASKQEKKVLKVA

SEQ ID NO: 300311 - protein, 315 aa, unidentified
MRSTVAQSVGVDISKDTLDVAIHPGGESFRITNNPEGHRALIKRLKGFDIARIVFEATGAYHRLFQQALVEAGLPWVKVNPCQARRFAQATGKLAKTDRCDALMLARMGAVLDLETRAPASKTVEVMRELVNARDALIKDRVAALNRQAIAVSPLIKRQLAQRLRQIDGQIEAIDRRLKTLRNADSDLCQRFDILTSIPGIGEVTANVLVVETPELGRLEHAQAASLVGLAPVPRDSGQTHGKRSIRGGRPRARQALYMPALNAIRLNPEFKAKYEAMVKAGKPAKVAIVAITRKLLILANALIRDQRKWAPAKT

SEQ ID NO: 300312 - protein, 359 aa, unidentified
MTTTAVTTAAGPILAIDLGKYKCVACVYRSTTEHTFQTMDTSRAEVARLIGRTRPAVVVIEACSLSGWVHDLCGELGVPCRVANTAAEAWKYKHTKRKTDRDDALRLAQLFALGQLPEVVVPAKATREWRALIAHRQALVTQRVAAQNRIRSILVGQGLPAPRGAKAWSATGLAGIGQFARPLAECGPEELWRGLLELALTAYRQAEELVAIAQAKLDAIGKTDARVRLLDSMPGLGPRTAEAVVAHLDDPHRFRSGKQVAAYGGLVPRQYQSGEDDRRGRITKRGPAVLRKLLVQCAWAMIRYNPWAQAVYVRLSRGKARKKQAVVALARKILVRCWAMLRDGVPWRPDASATVVAAT

SEQ ID NO: 300313 - protein, 313 aa, unidentified
MINIICGVDVSKAKLDVCIEPGAIFESFENDAAGIAELAAFCRRHQAGLVVMEATGGYERQPFLLLWEAGITCAMTNPRSVRRYAEAMGVLEKTDRIDASIIARFAHAKKLQPTPAPTPAQQRLKALVARLRQVTEDLTVQKQRRASLLDNVEMLASIDEVIALLKRQSRKLEGEIASMIDDDPLWEQLAKAWRSVKGVAGRTVARLMADVPEIGIYSNKAVAKLVGLAPLADDSGKRKGKRSIRGGRASVRSILFLVARIAAKYDKSLAAFRDRLLAAGKHKMTVRIALAHKLLVRLNAKARDARAQYANAT

SEQ ID NO: 300314 - protein, 345 aa, unidentified
MKKGITIGMDLGDKKHQVCILDKTGKIIAEEEVTGTRAAVTQFFKQYREAVVAMETGTHSRWVSQIAEAEGLNVLVGNARKLRMIWQSRQKSDTRDAVMLARIARMDPALLYPIRHRGEQVQMDLEIIRARDLLVRERTRMVTHVRSVVKSMGERLSPSSAASFGHKAKIPEALNETMKPMLEMIRELTKKIRGYDLMIKEAATEKYPATERLSQVGGVGPLTALAYVLTLEEPQRFAKSRMVGAYLGLVPRLDQSGQTDKQLRITKHGDGYLRRLLVGSAHYILGPFGPDCDLRTFGLKLMQRGGKNAKKRAVVAVARKLAVLLHALWRSGQQYEPKRKQPLAA

SEQ ID NO: 300315 - protein, 474 aa, unidentified
MNIKGKKKKNQAVMENIFEQQELLKKAEVIRENLTASTWHELETNGKFDKNKKLSFVSDDMLILGCDVGSDTHYLRAIDTRGRELSKSAFPFSNDSEGFQSAKEWAVKIAAEHNKNQIVLGLEPTGHYWFCLATWMISNGISVVQVNPYAVKQIKEVEDNSQLKDDTKDPKLIANLVKDGNFGMPYLPEKLYAELRRLSMFRDQLNEDRIRAINRMHREMKIYFPEYKDALGKVDGAFSLELLKQVPFPEDLTALGEDGIRKIWNDAKLRGRGYSRAGKILRYAKASVGLREGIEVGKAAVKWFVQKIMELDAELVEIENQINQKCREIPHAGNILEISGIGENTLSGILAEMGDISRFDDGKEIQKLSGLGLVACSSGKHKGETKISHRGRKRLRYWLFQAAKSVVAHAEEFKELHIYYTTRADNPLKKMQSLIVIACKLLRLIYTILKNGTFYNPKKLLMDIRHPEKDVTAA

SEQ ID NO: 300316 - protein, 315 aa, unidentified
MTTIGFDVGKLELVGVRIGKDAKVRERYYIANQPKAIDNLLSILGNKYKHIRIGSEATAEYHRLLALSCIDKNIPFCLINPIVTKQFTRATVRKKKTDVSDALVIAKLIRQGEGRLVSKDDFMASKAILRTANKLSSMHQALSLIKRRFEDNYHNETTTIKIVDHCLSVVEDSIGQIRKQAQAEDEELLKLLCSLPGVGKITANALIAEIGNIERFKNSKSLIAYAGLDPRVRQSGKLLHHNTRLTKRGSPYLRKALFTAASIGLRHDKELGDYYTKKRNEGRSYKEAVIATARKLTNRAYAVWRERRVYVKTQT

SEQ ID NO: 300317 - protein, 352 aa, unidentified
MERFCVGIDVSAKKLDVAYRHSKGGIERQTFDNESIGHAELVRHLRKRAGGKVIRVVLESTGVYGLDLALALDGASFEVMVVNPRASSNFAKATMQRSKTDRLDSAMLLEFAEQMTFKRWQAPSTVQLQVRTISRRVYALIRTIRDEKNRMHAANQVDGTTIVKRSIRDTIKQLERQVRKLRAAALELIEGEPQLARRYELLLSVKGIGPISAIAILAELAVLPSDMNNRQWVAHAGLDPREFESGTSIKMPPRISKRGNKYLRSALYLPARVACRFEPGVASVAARLRASGKKPLQIHVAVMRKLLHAIHAMFESGQEFDGTRFYLRAAAAVGTSGIASSAISEVSTAVFP

SEQ ID NO: 300318 - protein, 361 aa, unidentified
MERINLSRISSFVLGFEKRVFWIGVDVHKKSYSIALRRSDNKYLTWTSPASPKLFVDQIRRFGLHVGAVAYEAGPTGFSLARTLKSAGLKVIVAAPSRIPRPVTAGAKCDRLDCIKLSVYAARGMLKSIAIPSVEEEAQRALLRRRHAVVDAIRRCKQRIKSQLLYLGLEAPQEISHWSSQAATALKKVALEPCAKLVMDSLLRELAFFNRELRQLERDLVHSFKDRKNRSRISYLKSVPGVGFIVASSFALELFRPERFTKADQVSSYLGLAPMVRQSGQSRSSGRLVPVGQSRLRSLLIEASWSWKSRDPYAAALYNRFISRMGIAQKAICAVARKLAIILWRLIVEKRAYRSQLAVAT

SEQ ID NO: 300319 - protein, 276 aa, unidentified
MAIVGAFDVHRAQLTYDYVSTETGEVQRGQIRPADRQHLRAWLARFEGETQVVFAVEACTGWRYVVEELKRVGCEVHLAEPADLSRDKGSKQRAKTDAADARHLRELLVQDRVPESWIPPAEVLEARGLMRLYMDLTEERAGWRQRISATLFHQGAGKLESVLDASGRSLLLDVGLSPVGRQAVEVGLRQVARLSAEQALPGHLSRQGPPLLRWALFEAALQASRAASPDHAYYESVKARRQGDAKIAALAVARKLARRCYHTLRELGPEAWPAAA

SEQ ID NO: 300320 - protein, 331 aa, unidentified
MKNYFIGIDVSKMKLDVALHSTEGRLNCNHIVIENNGKGFKDLLTWFKKMGINHQEVLICMEHTGIYADKVVDFFETKGIAYSLQSALHVKKSLGLVRGKSDKVDAFRLSEFCYEKRATIKESQKPSQNIIVLKHLFTERRKLVGTRAQYKQIRSEIAIYQGKGFVKRKERIIKNLQRDIDEIDQEIIEIIKSDPEIYCNFLLLISIIGIGNVNAVGAIVYTNNFKNFSDPRAYACYIGVAPFPCSSGTSIHKRKSVSKMGRLQLKADLTQAARSAILYDPQMKAYFKRKFNDKKGAESNYGTVLNAVKFKLICRMFSVIRRQSAYIKFAF

SEQ ID NO: 300321 - protein, 400 aa, unidentified
MISVGIDVSKGKSTVCILKPYGEIVSKPFNITHTQKDLSELSSMLFRLNDEVKIVMEATGIYHLPVLTYLQEKGFFVSVINPYLMKSYRNESLRKAKTDKIDSRIIANYGIDHWFKMKEFQTSGEIYEELKLLGQQYRHYMKLHLLSLAELTHLLDLTMPGIKNLLASWNETNRKDKRSDFVERFWHYDVITSMSEQEFTEEYILWAKEKKYVPSQEKAKVIYTLAQESIPTLPSETSSIKMLVTEAVRVLKEVDATLGLILSRMQEIAKTLPEYSVVIEMGGVGNTLAPKLIAEIGDVRRFRNGKALVAFAGIDPPPYESGQFVGCNRKISKRGSASLRKVGYETMRSLKMRSRPEDPVYRYVVKKESEGKSKKSAKIAGLNKFLRIYYARVTELYKNI

SEQ ID NO: 300322 - protein, 369 aa, unidentified
MGAALQVDGEYEVRVYGLKHQKEKRSIDYFAGLDVSVKETSVCIVDDTGKIVRELKVASEPEALLAVLTNPAYRFKRIGLEAGPLSQWLYSALAEADLPVVCVETRHMQAILKAQINKTDRNDARGIAQMMRVGVYRPVHVKTLRSQKLRMLLTHRKLLQSKAIAIENDLRGTLRNFGLKVGIVGTAKFEVRIKELVENLPDLAILVEPLLIVRRVLREQIVVLHRRLLTIVRDDGVCRRLMTTPGVGPVVALTYRATVDVPARFRKSKSVGAVFGLTCSKYQSGEIDRSGRISRCGDEMMRVMLYEAAQSMLRSKKWSWLKAWAMQIARRRGMKKAIVALARRLAVIMHRIWVDGTEFRWTREVVTAV

SEQ ID NO: 300323 - protein, 451 aa, unidentified
MAKRREKRERRSVVVEPDAAGIDIGAEEIYVAVPPDRDEESTRRFSSFTGDLHALADWLGRCRIRTVAMESTGVYWIPLFQILEERGFQVYLVNAHYLKSVPGRKSDVSDCEWIQYLHSVGLLRASFRPPEAICALRTLWRHRGSLLEMAAEHIQHMQKALSQMNLQLHHVLSDITGTSGQAILDAILAGKRDPIELAQLCHTRVKSPRDKVAQALVGDYRPEHLFTLKQSLEGYRYYQKLILELDRETARFMQALPTATQQPMPPRTKPTAYHRQGNDPQFDLRSELYRIAGVDLTDIPGVSAATAQVILTEIGTDVSRFRHASAFASWLGLCPEKRVSGGKVLSSKTRKVKHRAATALRMGANSLCRAKGYFGEFFRRMRAKLGTAQAITATAHKIARILYHVLSTKEPYTETVFHLYDEQAHQRAETRLRKQAARLGFQLLPIPATGE

SEQ ID NO: 300324 - protein, 320 aa, unidentified
MEKIEFTQVVKVGCGIDVHKDIIVATIRKSENDYETKEFKSFTSSLTELREWCKGEGVTHVAMESTGIYWKPVYNILEEGEFEIILVNARHVRNVPGHKTDKKDSQWLSKLLLSGLLKASFIPPVEIRDLRDLVRYKKKIVGQAASEKNRIIKILEDANIKLSSVLSNVDGAVGTKIIDDLIAGKTSVGELIKHYHGKMKASKAEVKQALQGRLTKHHQFMLQVIKQSIKDKEALIEKIETQIDELVKQYAVEIEMLQTIPGVAYDSAVSIISEVGVDMKQFASEQHLSSWAGMSPGNNESGGKKKVPPPFTETNTSSAP

SEQ ID NO: 300325 - protein, 317 aa, unidentified
MTANQPFVGIDVAKDRLDLDTLPHSKAWHTTNDTKGIAQLCQRLRALEPQLIVVEATGGYERVLSAALAADGLPVAVVNPRQVRDFARATGQLAKTDAIDAQVLALFAERIRPQVRPLPEAEQQTMAALVARRRQLIEMLQAEKNRLPMAHKAVQNELRAHIRFLEKRLDKANRALKETIEASPIWRTKEDLLRSTPGVGPVLSATLLAELPELGQLSGREIAALVGVAPFNRDSGQFRGQRCIWGGRVSVRCALYMATLVAVRHNPVLRPFYEQLLARGKTKKVALVACMRKLLVILNAMMKTQTHWNPDFCCKST

SEQ ID NO: 300326 - protein, 374 aa, unidentified
MMPQQRRAFRYLGLDVHKASISVAIADESGPPTTYGRIPNEPSAIRTVLTRLAGPGLELRVAYEAGPTGYALHRQLTRLGIACMVVAPSLIPKQPGNKVKTDRRDALKLARLLRSGDLTPVWVPDEAHEALRSLVRARADAKADQLRAKHRLSKFLLRQGCWPPIGVRNWSKRYFTWLHQLEFEHLPDRIVFADYLAQVNAAGERINRLDGALSQCAQSSSQVALIRGLQAFRGIGFLSAVTLVAEAGDVRRFRTAPQFMAYAGIVPSESSSGNQHRRGSITRTGNRLLRHVLGEAAHHARHAPRVTSKVKQRQADVPAEIVDLAWRAQVRLHTRYRQLSARIGSLKALIAIARELAGFIWAAGHVLQEVPAAA

SEQ ID NO: 300327 - protein, 339 aa, unidentified
MKRILKIGMDVHTTNYTLCAMEPIIGEDDRVFATIKVTPDYKNILMFIENLKLKLGLNDEYDIQCGYEAGCLGYSLYNQLTAAGIKCVILAPTTMLTPQGVRIKTDMRDAYMIAQCLSYGGYHAVYIPTEDDDSVKEYLRMRNDHKLALKKIKQQINAFCIRHGFCYDGTKWTLSHLKWLKKLEITNGLYRETLDEYMASYEEQEAKIERYDKRIGEIAEQTRYHDKVKKLGCFLGIKTHTALSLIVETGDFERFAKGNQYASYLGLAPGENSSSDNIHRLGITKAGNSHLRQLLIEASGGICKGAVGHKSKELRARQNGNTAEVIAYADKANTRLRSR

SEQ ID NO: 300328 - protein, 342 aa, unidentified
MKKIIKQVVAIDVAQEELVVCLGRLNEDLSKELFAHKTFGNNKKGFTELVKWVTKSMIKEVAVQYVMEATGVYHEALAFFLDGHKKALSIVLPNKISNYARTLDIKTVTDKTSSEAIALFSLERQLEKWVRPAAIYLQMRQLTRERSQLLDERTVLKNQLHAEQSSGWPNKESIARTNKRIALLTKQDKEITESLQKLIKEDPELASIIKLICSIPGISTITAATIIAETNCFALIKNKRQLTSYAGLDIREKQSGTSVKGKPRISKRGNKKLRSALYMPALTAIRHDERYKAVYARLVGKHGVKMKAAVAIQRKLLEMSYTVFKTGTAYDKDYYKKLGGNP

SEQ ID NO: 300329 - protein, 347 aa, unidentified
MEQFIRVGMDTSKHVFQLHGVNAAEEPVLRKKLRRKEMVEFFGKLPPTVVAIEACGGSHHWARELQSLGHEVKMLPPQYVKPYVKRGKNDAADAEALCEAMSRPTMRCVPVKTAEQQAALMLVGMRDRLVRNRTQLTNAIRGYAAELGLTAAKGMRHITPLLDRIATDETLPEMARDLFALHAHEYAQLQKEIERVESRLMTWHRADECSRRLAQIPGVGPIGASLLMMKTPAPELFGSGRDFAAWLGLTPRDHSTAGKTRLGVITRAGDEALRSTLIQGATALLRQVRMGRSKNASSWLMELLKRKPPKLVAVALANKVARIAWKMMMTGEPYKSRSAVPALGVAA

SEQ ID NO: 300330 - protein, 465 aa, unidentified
MKRYRRHPSPKPRTSPHALARLHPHAAGIDCGSAEHFVAVPPDRAPTPVRSFATFTGDLHRLGDWLTACRVTHVAMEATGVYWIPIFEILEARGFDVILVNARHVKNLPGRKSDVSDCEWLRDLHLLGLLRGSFRPADGIVALRGYLRHRATLLDSAGALVQRMQKALVQMNVQLPLVVSDITGVTGLSILRDIVAGHRDPHQLAQHRDYRCHASEAEMVAALTGNYRAEHIFVLQQNLELFDTYQRELTACDTAIEAHLVHLTATVATPTSPLPPPRGRQKLRKNEPRFDLRTPLHQLTGADLSQIDGLGPYNALRLLSEIGTDMTRWPTAKHFTSWLTLAPNNKISGGRLLSSRTQPSANRAAAILRLAAMTLGRTQTALGAFYRRLAFRVGKAKAITATARKLATLIYRTLKEGIVYTDPGADAYDSQHRTHVLRRLRQRAQNLGFGLIDLSTGEVVDGTVS

SEQ ID NO: 300331 - protein, 415 aa, unidentified
MALKIVYKICCGIDVHKTFVVACIASTDKHGVTSYERHRFSTYTKGLKNLLQWLLEHNCKDVCMESTGKYWIPVYNILEKDCSIVLAHPKYVKAIRGKKTDKKDAKWIADLFKHDLVSGSFMPPADIRQLRDLMRYRFKLTCFKSSEKNRLQNCLTVSNIQLGNVVSDTFGKSAQAILDKILENPEDTSFDLEPLVFKSLKKKLPELRDAIDGYITPEQAGKLKIIKAHYESLESRKAELEELILALAAPYQQELTILQTAPGISSNFTAIGIISEIGTNMEAFPSAKHLCSWAGLTPTNNESAGKKKSVRVSKAGCYIKPLLVQCANAVVKSTKHPEMRNRYLRLKKRRGHKKAIITIARMLLTALYHMLKNGENYNPELYQKTDLPPVDREIIIEQALMLIRNQGYKIKSAAE

SEQ ID NO: 300332 - protein, 387 aa, unidentified
MIYYIGIDISKYKHDFCIISNTGEVIVENLFFENNKKGFQELLEKLKPYNKSDVHIAFEATGHYSKNLELFLIDQGYSFMKMNPLVIHQFLKARSLRRTKTDKADSLAIANYLMSVPYKPNSDLLYNIFTLKSLCRAREQLIKERSKYQVLLTNQLDLTFPELKQFLNNRISATLLFILEKYTNTNHISLMRDYDSIKNISRGKFSYAKFAKLKELAKNSIGHHDENNDLLISTYVSIIKTLNDKIDPIEKQISTIIKELNPRMLTIPGLGEISAATILAEYGDINNFSSPNKMLAFAGLEPSIIQSGTIENNGKMVKHGSGHLRYSIMNAAMIILRYSPTFYDYYLKKRSEGKCHRVALSHVCKKLLRVIYTLEKNNIDFDSSLLK

SEQ ID NO: 300333 - protein, 474 aa, unidentified
MRYTVVAVAPKDRYSRGRSQFDWKLDSAYLDEPRIVDVLERRNTQGSLCSGQVRPGGCERSKQMEEIYPESSGLDVHQKFVVACVLIPNREGKLKPKRRRFATTTKGLSELAEWLANHGIKQVAMESTGVYWKPVYNILHDDFDVWVVNARHLAQVPGRKTDDTDATWITKLMRYGLLQASFIPEEWQRDLREMTRYRTRLHQEKSSAVNRLHKILEDANIKLSSVVSDIQGVSARAMLEALIEDKLDVEQMADLAQRSLRKKIPQLVEALTGLVRSHHRFMLQEILTHIDELNQRIVSLNQQISQTVAPYASLIERLDEIVGVGRLTAEIILAEIGPSVEKWPTSGHLASWGCLCPGNNESGGKRRRSKRRKGQKWLVTALVEAAWAASRSKNTYLAAQFHRIRARRGEKRAAVAVAHSILTIVYHLLANPEARFQELGGDYFLKKNKGQEERRAVKILNTLGFEVALTPIAA

SEQ ID NO: 300334 - protein, 343 aa, unidentified
MDVHSNHCVLGDMDARGNFRGAQTFCTSEQSIIKALQDVKATEKYLTLEEGNLAYWVAQVAAPYVTEVIPCDPKENALIYKGSNKNDKVDTKKLCRLLRLGELKRVYHPETDERAIFKAAAQHYIDLRDQQISLKQKIKAMYRHWGVIDVAGEAVYSPKKRDNYLCQIKHLAIRNEISRLYYLMDQTESMQERALKAMKQLGRKYPEIKQFQKMPGIGEVLSHIFDAFIQTPLRFPDKHKLWRYSRLGVTDRSSDGKPLGFKRLDRSGISELKSLTYQAWMSALRSDNEVKRFYKNSLERTFSRVHARLNTQRKIIATMYGMWKRGEPYNPKLFLDSPQSGVV

SEQ ID NO: 300335 - protein, 344 aa, unidentified
MQITTIGLDLAKSVFQIHGVDATGQVAVRKSLRRSQMLPFFAKLPPCLVGIEACGTSHHWARELIKLGHEVRLMPPAYVKPYVKRGKTDAADAEAVCEAVTRPTMRFVPVKSPEQQAALSMHRTRDLLVKQRTQLINMIRGLLAEFGVDIPKGLERALLLARQIVEGNAPEVPFEAAKIVGTLSQQALDTHVRLREIDRDLVVWLRGNDVARRLMTIPGIGPVGATALAASVTDPQQFRSGRQFAAWLGLTPLQKSSGGKERLGGITKMGDKYLRRLLIVGMTSLVRRAKYSPGKIDPRLVDLLARKPIRVATVAMANKTARIIWAIMSRGEIYRTGHLPVLAA

SEQ ID NO: 300336 - protein, 405 aa, unidentified
MELLYPKCAGLDVHPRSVSACTRLAIDGQTSHEVRTFGTSTRELREMADWLSRQGCTHVAMESTGVYWKPVWHVLEGRFELVLANAMYIRNIPGRKSDVKDAVWIADLLAHGLLRGSFVPPEKIQDLRDLTRTRKQLTREITRHTQRIQKTLEDANVKLTEVISNVLGTSGRAILRGLIAGECDPSRLVDLTEGRLKASREKLIDALQGRVTEHHRFMLNLHLTQIESLERAVRELEARADQGSFRAAIELLTTIPGVSDVTARVIVAEIGDDMSRFPSAGNLISWAGLCPRLDESAGKQRSNRTRRGAPWLKTVLVQAARAAANKRDSYPRAQYLRLKARRGPNKALLAVAATLLTAAYHMLKYGAEYRDLGPNHFDRDKELQTNRLIRRLKALGVQVTVTPAA

SEQ ID NO: 300337 - protein, 344 aa, unidentified
MKTNYIGADVDCKMTELAVEINGKIVIRDRVPTDIRSLGSFLNSITGKKIMVIEEGTMAGWLYRNLKSKVDEFIVCDPRRNKLISCDGDKDDTIDAGDLAILLRGGYLRKVYHTDDEDRLALKEVVALYHDRVRESVRQMNKLRDCCRSHGIKIPAGTVKHLPARAQWLKQIGPSVLARQLSIRWIGFDAVATQVKMARQEMTRRSKSYPIIGFWKDLPGVGPVRAITLFAYLDTPWRFGSSKKLWKYSGIGLKRFASGSDKEGRPKAGNLRLFRGVNRRLKDAIMGAALSAICQSSNPFADNYKRMVRNGVTPSNARHTVARKMLSVMWGMWKTSCRYDENLV

SEQ ID NO: 300338 - protein, 391 aa, unidentified
MFYIGIDIAKKNHEASIIDSNGKLLDKSISFSNSQAGCTKLISYFEKFEADTSNTIIGMEATGHYWVSLYSYLIDLGFTVYVINPIQSDAFRKMYIRQTKNDSKDSFIIAQIMRFGEFSTTSLADEDILALRQLSRYRLALVDECSDWKRKCIALLDQVFPEYSKLFSDTFGVTSKELLSKYPTPEDMLSVDAGTLAELLAKASKGRFSISKANEIQESASNTFGVSFAKDAFAFQIKQIIAQINFIEEQLKELETEISNLLHKTNTVITTITGIGDVLGAIIIGEIGDICRFEKASQLVAYAGLDVAVRQSGDFEGTKTKISKRGSPYLRRAIWLAATIAAFKDPALSVYYQSLRARGKHHLTAIGAVARKMCNIIFAVLRDNKPYVPHI

SEQ ID NO: 300339 - protein, 427 aa, unidentified
MPYKIAGIDVHKRMLHVVVSDVQVDGEYDFTRRSFGSLPEALRSLAAWLVEQQVQEVVMESTAQYWKPVWGALERYWKPICQTREGALAMSGTLHLAQAQSNRGRRGRKKDFRDAERLVKRLVAHELVLSFVPDVEQRLWRTVVRTKYQITRNRVQLQNRLEALLEEAHIKLSSLVSDLLGASARRMLAAVANGETNHETLAALADRGLRATQEQLRDALGVCQELNPVYRRLIRMVLDEVASIDKRIEQLNQEMANLLRPHEDQVRRLAEVPGLGVDSAQQVIAEVGATAATFPSEKHLSSWVGACPGDEESAEVNRSRRSPQGNRQMRRILNQAANAAAKYKGSIFQILYRRYVPRMGHNQTIGIIAHKLCRLVWKILHRGIRYDERGPEVSKASKQKRTRKMIQALHRLGYRIEPSLSQSAITA

SEQ ID NO: 300340 - protein, 390 aa, unidentified
MEVDVLGIDLAKRVFQLHGATRTGVVVHRSKVSRPSFLESIRRLSPKLVVMEACSSAHHWARVLQRQGIEVRLISPQYVAPFVKTNKNDRNDAEAIVEAASRPSMRFVSIKTVEQQDLQALHRLRQLLVQQRTAIINQVRGVLAERGIVVAQSPTAFHRAMPTVLAGQDDELSQFCRGLLVELLEHLKSVEEKIDSCDARVKVFMASSQACKRIGEIDGVGPLTATAIVAAVGDASEFKNGRHLAAWLGLVPRQYSSGGKSKLYGISKRGDTYLRTLLIHGARAVLRYVAGKTDSQSRWLQQLIERRGYNRAAVAVANKNARIIQALLSSERAYVRPAAVGSCAPVLDPATRPSSSCRSKQSAAAKSTRPASKAHQSARRSTRPDFGCPC

SEQ ID NO: 300341 - protein, 394 aa, unidentified
MGYATILGLDLGKFKSVCCVMNAASGEHRFETIDTTPAAVKALLVDHASADRGVLLVVEACDAAGWVHDVGSAVPGVTVTVVHTQGDERWRWRKVKRKTDRDDALKLARLARLGELPDPPVHVPSPQRRQWRRLVLHRRSVVTRRTASRNAIRSIYSQQGLPLARGNKQQWTKMGVAQLEADARTLEDCEDALDLWRGRLHAELQLMAAADAQLKVLDRRLDTLAAADPRVALLRTVKGVGPRVAEAVVLHIGDEPRRFKSGRQLAGYAGLVPKLLESGQTTRLGHITRRGPALLRSLLVESAWMVWRLNDWARAFVEKVGRGGRGRRKLAIVALAGRLLILLWGMLKSNRPFREPAAKLKFTPKEEAPKEQTPKEQTPPAVAAMAYGMLSLSL

SEQ ID NO: 300342 - protein, 338 aa, unidentified
MVLYAGIDLHSNNNVVVVQDEEDKVVGRRRLANDLTTVLAWLEPYREDLAGVVVESTYNWYWLVDGLMEQGYAVHLANTVAIQQYGGLKYRDDASDARWLAKLLRLGQLPEGYIYPRTERAIRDLLRKRSQLVRQATMNLLSIQNLFARNRGENISANRVKQLTPETVDAAFEDANVALAVKSNVKVLDCLLKQIFVLETAVHDQVRLRKSYKKLLTVPGIGKILALTIMLETGDISRFRDVGNYVSYGRLVGSSHLTNGKRKGSGNTKNGNAFLCWAFIEAANYAIRYNPTIRRYYQRKQARTKRIVALKAVAHKLARACYHMIKEYASFDMTRVFV

SEQ ID NO: 300343 - protein, 364 aa, unidentified
MRRVGNRWIAYPPPHRIDNDMNDKPQKEAPSEPKPRHFAGIDVGAEELVLVIRKDGKPFDPQKYANTRADHARMAKKLGKLPGVVACMEATGVYHFDLAVALHDAGIKVMVVNPKVSHNFAKVLMKNSKTDAVDAGTLAVYAERMDFVAWARPSDEKIALRCFSRRIGALTKQKAAAKNQLHALESTAETPKAVMRDVKLAISQLEKRIDKLTAEALALIGKHPELARVLELLTGIKGVAEASAIALMGELLLLPPGLSHREWVKFAGLDPKSFDSGKSVHKKTRISKAGNSHVRAALYMPAMNAVQHDQHVKAYFQHLADMGKLPMQGLCAVMRKLLHAIHGMLKHDKPFDNTRFYANPISAG

SEQ ID NO: 300344 - protein, 407 aa, unidentified
MQFIYERCCGLDVHQKTITACIITPKGKVVRTFGTMTGEILELVEWIKEHQCTHVAMESTGVYWKPIYNLLELSEIEAIVVNAQHIKAVPGRKTDVKDAEWIADLLRHGLLKGSYIPSREQRELRELVRYRKSLIEERSREVNRLQKILEGCNIKLSSVVSDITGVSARSMIEAIISNISDPKLLSKLAKGRLQSKKENLEQALHGLVGPHQRKMLAAQLDHIDFLDGKIKELDQEVEDRQRPFEEELELLDTIPGVGRRSAEVILAEIGTDMDRFPSAAHLASWAGMSPGSNESAGKRKSGKTTKGNKHLRSTLVQCARAAARSKQTYLSAQYHRIAARRGSNRAATAVGHSILVIAYHLLKKRQPYHDLGANYFDKRKSAAVLNSAVKRIEALGYKVIVEEKIAS

SEQ ID NO: 300345 - protein, 324 aa, unidentified
MSAIAFLIAVGIDIAKAHVAAARLGADGKYKHKKFDNTPEGFARFAEWLAGFGPAAAHLGMEATGAYSVPLAGFLAARGFHVSVVNPAKIAAFGKSELSRAKTDKADAKLSARYPLAMRPPAWMPPPAEIRELQVLLRRLEHLLEMQRMEQNREDTADPAVAASIQAVLATLEQEIKAVREAIRRHLDGNPGLKPRAGLLDSIPGVGTATAAWLLTLLSEHRGFDDPKQAVAFAGLAPRRRQSGRWAGQTRLSKTSDPRRRQALYMPMRSALAFNPAIRAFCQRLKANGKPGKSYVCAAMRKVIHIAFAILTSGKPFDPNYGLA

SEQ ID NO: 300346 - protein, 344 aa, unidentified
MEHFAGLDVSVNETSVCIVDDAGRIVREVVVASEPDALLAVLKSGAYHFKRIGLEAGPLSQWLYSAFAEANLPVICVETRHMRAVLKAQINKTDRNDARGMAQMMRAGLYRPVHVKTLRSQKLRMLLTHRKLLQGKAIAIENDLRGTLRNFGLKVGMVGAVRFETRIRELVKDLPDIAILVEPLLVVRRTLREQLGILHRHLLTIARDDEVCRRLMTVPGVGPVVALTYRATVDVPARFRNSRAVGAVLGLTPCKYQSGQSERTGAISKCGDEMMRVMLYEAAQVMLVRSTRWSWLKAWAMQIARRRGVKKAIVALARRLAVVMHRIWVDGTEFRWSRQEAVAA

SEQ ID NO: 300347 - protein, 447 aa, unidentified
MTECIKHVGLDVHSKTIEVAVADEAAPDRTGCRGEVRRFGGIANRTAAVAKLVKQLCPAGERLCFWYEAGPTGYGLYRQLIAAGHECHVVAPSLVPRKAGDRVKTDRRDALMLARLGRAGELTSVWVPGTDQEAMRDLTRCRSDAKVMQRVTKQQLGAFLLRHSRHFDQGKKKWTKTFFRWLGDQKFESPVQQIVFQEYVDAVEQTTERVDQLTRQLETCVQSWSLWPIVEALMALRGVDLITAATVMAELGDLTRFDSPRQLMAYLGLVPSEHSSGRRRRQGGITKTGNTHVRRVLVESSWSYQYPARKTKHLQRRAKQTSSAVQAIAWKAQKRLCGRYQHLVSKGKLKVQTCVAVARELTGFIWAIAQQVCREEDLFSPPVELADGRANDLSKDTNINAAKGGSKSGTKSGSKSRTNNSATGGRGRNPLVAQVTGSRFAEPSTDL

SEQ ID NO: 300348 - protein, 345 aa, unidentified
MTTMTQSASTQVTVGVDTHLDVHVAVVKDQLGRRLATTSVATTPAGYAELLGWAEQVGPVEAWGIEGTGSFGAALTRFLRAHGQVVVEVNRPDRAARRRRGKSDSLDAEAAARTAQAHQGSMPKAGDGLVEMIRLLRVARASAMKARTQAINALKALVVTAPAELREPLRNLSTVRLVQTTAALEPGPVTTPLAAATLGLRTLARRYQLLSAELTTLDAELDRLTRAAAPKLVALFGVGSDSAGALLVAAGDNPDRLRSNAAFSMLCGSSPIEASSGKTRRHRLNRGGDRQANAALHRIVVARLRHDQQTKDYLARRIREGKSKKEAIRCLKRYVAREVFAALPR

SEQ ID NO: 300349 - protein, 472 aa, unidentified
MHVVHERCCGLDVHKKIVVACLIILLPNGRRQKEIRTFGTTTRDLLALLEWLKAAHCTHVAMESTGVYWKPIFNILEGDLAVLLVNAQHVKALPGRKTDVKDAEWLADLLQHGLLRPSFIPPAPQRELRELTRYRSSLVADRARTINRLQKVLEDTNLKLASVVTDVTGVTARAILRAFLDGQTDPWELANLARGSLRGKQIQLAQAMVGTMKDHHRFLLLQQLTLIDVLDGQIDDLDQEIAHRIAQDDEATALLPAEASVEPDGQRDIADAALVDQEQDDLRVSEVPCQLAADERTQEVSRYGLEGYARALVRLDSVTGVNRRVAEIVLAEIGINMNQFPSDGHLASWAGMCPGNKVSAGKRLSGKTGKGSRWLRAALLEAAHGASHSQGTYLGEQYRRLSKRIGKKKALVAVAHSILVIIYHILKEEKTYHELGSTYFEEREHDAVKRRALRSLERLGYDVSLQEKGNVA

SEQ ID NO: 300350 - protein, 439 aa, unidentified
MNTSNVPSTPLAVTPPPLVFAAYVGLDWGDEQHAVSLAAAGSEKIERSTLEQTPEALVAWASELRQRFPDGKIAVCLEQARGPLIYGLQCYEHLVLYPINPKSLARLREALHPSHTKDDPLDADLALELVRKHREHFRPWQPDTVPTRQLALLTEGRRGFVDQHTAGTNALQTHLKSIFPQALELIGQDLGSPLATDFLKKWPTLQHVQKVKAAVLRRFYYGHNSRSEELIQQRLELVQKAQPLTSDEALLAAHGLAIQSLAAQLAVLHQTITQYDRQIAAVFTSHPDAPIFQSLPGAGAALAPRLLAALGTDRSRYPTALAVNCASGIAPVTEKSGKTQYWVHLRWSCPKFQRQSWHEFAGCSIKLCAWARCCYDQLRKRMGHHEALRKLAYKWQRIVWRMWQERQSYDESRYVKCLQRDGLKTYAELVPQRPATNCE

SEQ ID NO: 300351 - protein, 416 aa, unidentified
MKIVRPICCGMDVHKNIIVATIGITDKKTRITEYIQETFSTLNPDLLNLKQWLINHKCFDACMESTGKYWIPIFNILEDEINIYLTHPKYVKAIKGKKTDKKDSKWICDLFKHDLIKFSFIPPKEIRALREISRYRYKLVGMRSSERNRYQNCMTVSNIGIGSVFSDPFGKSAKAIMKEVLESDVIEDKKILKCIHGSCKNKDKILDSIKHCHIETDQRFKMNESMTHMEELQVHINNCEIEMIKRASPMFDQFMHITQLPGINTLSAILIISEIGVDMKQFESDKQLACWAGLAPANNESANKKKSVRISKAGQYLKPLLVQCALGAIKDKDSYFGIKYTRIKKRRGHKKAIIAIARMMLVSIYHMILTGEVFKPSDYETFKNPPPSVKQQELTEKSAIEFLKKSGFDVSKLTKL

SEQ ID NO: 300352 - protein, 406 aa, unidentified
MEIIIERGCGLDVHKGTVVACIMGTGIKKEVKTYTTMTNDLLRLKEWLQEAGITHVAMESTGVYWKPVFNILENSFEVILVNARHVKNVPGRKTDVQDSEWLCKLLRSGLVRGSFIPPRDIRELRDLTRYKRKLIQAIVAEKQRVEKVLEDANIKLSSIASDSFGASGKRIIEELIKGELEVEEMAELSKGRLRQKRGDLKEALVGEVREHHKFMIKTSLKHIRAMEKILSEIERRIQEKIDRHYKEEYALLQTIPGVKGEASTLIAEMGVDMERFPSEEHLSSWAGMSPGNNESGGKKKPGSTTYGNKCLKTMLTEFGWVASKTKDTYLRSKYHSLVGRRGKKKALVALGHKILIMCYHILKYRCAYKELGVDYLDQRRKDKIARSYIQRLQHLGYEVILQEPHR

SEQ ID NO: 300353 - protein, 275 aa, unidentified
MEHTTIAVDLAKSVFQIAVSHRPGHVAEERRLPRDRFLEFFAQRPAATIVLEACGSAHHWARQLQPFGHTVQLIAPHDVRPYVRRNKTDRTDAKGLLEAHRNTEIHPVPVKTITHQAIASLHVVRATWLATRTARLNTLRGVLREFGLFIPLGSHHVLTHVRAHVADDALPSLLHPSLLATCDEVHTLEMQIRAVERQLTQVAIDTPAVALLQTIPGIGVLTATALLAHVTDIHRFPSARHFASYLGLTPREDSTGLHRRLARSANGVTCTSGCY

SEQ ID NO: 300354 - protein, 355 aa, unidentified
MNAIKYIGMDVHLATISIAVLDAPGKLMMEVTIATQAGALLDFIRGVSGTLNVTFEEGTSAHWLYTVLDPHVAKVVVCDPRQNPRRLGEKKSDRLDARKLAEWLRLGTLKPVYHGHSLGPALKELARSYRTLVSDTVRVMNRLKALYRARGIRCAGTRVYSPRFRDQWLEQLHEPGVRGRAERLYKQLDLLLPLRQEARAAMLAESRKHPAHKILCSIPSLGPVRVALLMALMQTPHRFRGKRQLWTYAGLALVTRTSADYQLVDGQVTRARKPALVLGLNANHNHTLKGIFKDAAASALAHPGPFKDFYTTRVAQGMEPELARLTLARKIAAIALTLWKKGECFNAEHVKAQAA

SEQ ID NO: 300355 - protein, 368 aa, unidentified
MKKNNTCLKSPKRSKTRQRSITIGIDLGDKTSRYCVLDSEGEVVREGTVATTKKGMKQRFGNLARCRIAIEVGTHSPWVSRLLSSLGHEVIVANARQVKLISTSSRKDDRLDAQTLARLARVDPQLLRPIRHRSEKAQGDLMQVRVRAALVDTRTGLVNTARGLAKAMGERLPKCDADQMGVGKMQGLPAVLVEALAPLLETVELLTQQIKASDQKLEQLAGRDYPETELLRQVSGVGSLISLTFVLTVEDPKRFRKSRDVGCYVGLRPRRSESGESRPQLGISKEGDEYLRKLLVQGAHCILSHKSPDTDLKRWGLKLAGKGNKNAKKRALVAVARKLAILLHHLWVNGEVYEPLRNSRLLEQKAVA

SEQ ID NO: 300356 - protein, 330 aa, unidentified
MRTIGIDVSKATLDVVLQDEQGKLVQEERVKNSCVGLRSLLRKWARQGHCDTTALVCLEPTGHYSHGVVKTLLDLGHPTWLAHATDIRLSIGMQRGKSDKVDARRIAQYAHRFRDKARLVGQSHVEFAELKALLALRERLVKERGKNTAQLKDNVLYLTGNTKDLVKAELQRQLKALELSITKLDRAIAVFLRKDSALQGRNKLAQTVSGIGPVLASELIAHTEGFTRFDSPRQLVCYAGVAPFERTSGSSVRGKTATSSFANHRLKSLLKLAALAAVRVPGDLQDYYHRKIAQGKRPIVVLNNVAGKIIHHLWAVIHSGRPYQPRLHMS

SEQ ID NO: 300357 - protein, 469 aa, unidentified
MSQEQKSKPKARSKSRDRQDHRAKLKPQDGTLGLQVVHPRAAGIDVGNEEHWVAVPGERDAHPVQSFGCFTRDLEEMADWLVQCGIETVAMQSTGVYWIALYDILAERGLRVFVVNAQDTRNLPGRKTDIQECQWLLKLHTYGLLRNSFRPEEEILVMRTYWRQRQQHIADASRCIQHMQKALTQMNVQLANAISDISGSTGQAILAAIVVGERDPRKLARLRDPRIKASEATVAKSLEGNWRPELLFVLQQELESYQTFQNKIAECDEQLRQHYQTMEAKGDPRLLAPVPRDKRAHGNVPAGFDLRDELFRATGVDLTAIDGMNVLTAQTVLAEVGSDMNRFPTEAHFVSFLGLSPRNKISGGKVVGREKRKSKNRAGLALRLAAGTLLKSETYLGAQYRRLRTRLGAPKARKAMASRLARIIYRMLKYGDQYVDKGREFYEQKYRQSQIQMLTRRASELGLQLLHSA

SEQ ID NO: 300358 - protein, 373 aa, unidentified
MDYSTVYVGVDAHSNSFTLSCYTNEKETAEYTQKVEGHYSKILNYIEAMRFHYGDDALFICGYEAGCLGFTLYHQLMDHGVKCIILAPSTMLEQRSRKRVKTDKRDAELIARCLAHHDYSPVHIPTEQDDQTKEYIRMRDDHKLELKKLKQRILSFCLRHNYRYDVGKTNWTQTHLRWLKSLKPDGLYAEILAEYLGTFDYLSRKIERLDQKIEELASGMRYKENVRKLTCLMGIRPQTALAVITEVGDFNRFAAARHFASYIGLTPGEDSSGENQTRLGITKAGNSHVRRLLIEAAQCYTRGRAGHKSREMQKRQLGNRPEVIAYADRANERLRRRYYRMVLKNNKKANVAKTAIARELACYIWGMLTDNIA

SEQ ID NO: 300359 - protein, 353 aa, unidentified
MTNEKYVGLDVHKATIVAAVQDGSGKCLMTSVIETKAETIRAFIKGLTGTVHVTFEEGTHATWLFDLIKPLVAEVVVCNPRHNALLQSGNKSDKIDANKLADLLRTGMVKPVYHDAHGAQSLKQLAQCYETLVADNIRVKNRIKALYRGRGIDCSGNGVYCESQRKDWVAKLEEPGARSRAQLLYSQLESVKKLRRQARNEMIKESRRQAASKLLRAVPGLGPVRVGLILATVVTPFRFRTKRQLWTYVGLAVVTKTSAEYEFVGGQLRKRNKPTSTRGLNRNHNRRLKKVFKSAALDAIRTEPFASYYRDLIEKGRSPEIARVNIARKLAAIVLSLWKRGEEYDRQRMKKSA

SEQ ID NO: 300360 - protein, 339 aa, unidentified
MIVIGVDVHKQSVTAVAVDEAGRMLGEVTVLVGSDELVGWAAGLSDEERLWAVEDCRRLTRWLEQQLLAAAEQLVRVPPKLMAPERRSGRGRGKSDPIDALAVARAALREPGLARPRADEEPFRELKLLVDHRDAIVDERRRVHQRLRWHLHQLDPTFEVPLRMLARNSHLERVSRWLARQEQELQVRLARELVAHCRSLNRTIAALDQELEQRTAQLAPALLELPGCGALTAAKLLAEIGPVGRFRSDAQLARHSGVAPLEASSGRIQRHRLDRGGNRQLNAALHRIAITQARCHADARAYLDRKKAEGKSRREAIRCLKRQLARVVFNTLKASPALT

SEQ ID NO: 300361 - protein, 342 aa, unidentified
MAIAVVGLDLAKHVFQVHAVDETGRAVLRRQLRRAGVEAFFKILPPCIVGIEACASAHYWARRITALGHEVRLIAPAKVKPYVQRGKKNDANDAAAIVEAVMRPHMVFVPIKNEEQQAVLMLHRTRDLLVRQRTMLVNAIRAHLAEFGIVAAQGRRKVKELIAGLDNTEMPELARIALWQIADQIDECDKRIDALERRILAWHKSDESSCNLATIPGIGPITASAMAATVPSPSAFRNGRQLAAWLGLVPRQNSSGGKDRLSGITKAGNPYIRRLLVIGATSVIRYARSKAPGTAEWLKKLLDRKSARLASVALANKMARIAWSVLTRGEVYRNTYPIPKPT

SEQ ID NO: 300362 - protein, 367 aa, unidentified
MLRFISRSIKPNGNLGPLLRSQSLHTRKVRAMNETACVVGIDVAKRKFDIALLINNKIKTKVFDNTPAGHRAFLGWLDERGAIREEAHLCMEATGPYSETLATNLVEDGWRVSVVNPARIKGFAQGELARNKTDRADAALLARFCAVMRPSLWTPPPVAWRELRGWVDRLQALKDMHQQESNRLEAHRASGQTSLVQSVLIHLDWLAMQIKELERNINDHIDRHPDLKRDADLIGSIPGIGDTTVAKVLAYAGDVRRFANAKALAAFIGVTPRQRLSGSSVKGRTMMSRTGHSELRRALYMPGLVARRHNPALKIFGDRLSTAGLAPKAVVGAVMRKLAHLIYGVIKTGEPFDANFHLSGLAIQDGI

SEQ ID NO: 300363 - protein, 475 aa, unidentified
MQNESTPGARGPVFCGVDTHADSHWLCVLDWRGRKVLSRQLPADAAGYEALAGAIAAAGEPACVAMEGTSSYGAGLTRHLASLGMPVREALSPAGMQRRRPGQGKCDEADAERAARAAMSGSRLGTPKSQDGWVDGVRCMLAARSGAVKARTSAINTARSLLTTAPEGLRSRFRGMGGPRLMEELPSVRAEGALGAALGALADLWAAARDAALDMERAIEASLEENCPALLAMYGCGPVSAAKLAVAAGDNPGRLRSEASFAAICGACPIPASSGKTVRHRLNRGGDRQANSALHEIARQRVMRDPETAEYAERARARGKSDREVMRCLKRYVAREAYRALMRPHEVRRPEDASGLVAARRAARVSQVRAASILGTSEKYISMLERGQRELKPIRRAYEAWVEAGLPLDWDRQAFEAERKMDSKKTTLPNRSVSSREPFYSASTISSALPSVSLFGSFISVFLATVSVSPSSAGR

SEQ ID NO: 300364 - protein, 342 aa, unidentified
MQVTTIGLDIAKNVFQVHGIDANEKVVVRKQLRRSQVLAFFAALGPCLIGMEACATAHYWARELTKLGHKVRLMPAKDVKAYLKRNKNDAADAAAICEAVRRPTMRFVRIKTAEQQGQLTQHRTRDLLMRQRTQVINALRAHLAEFGIVAAQGNQGVKELLAIVADQQDARLPVDARASVIVLAAQLEAVQTMLRSLDQRIMKQHRANEASQRVETIPGIGVIGASAIAATVSDPMVFRSGRDFAAWIGLVPRQDSTGGKQKLGPISKQGDRYLRRILIVGAHSVLRCAKENPLKYPWLTQLLARRPFKVVAVALANKMARTAWALLAHGGTYRAPQLAAAA

SEQ ID NO: 300365 - protein, 328 aa, unidentified
MRKETFYIGIDVGQKELWAAMEGHKPRSFAHTVVGIRALWNWVRRINAEVTLHFCMEATGVYSQSLATCLVTYPDTQVSIINPAQIASFAKAQLRRSKTDRVDAQVILAFAQSQHPRIWRPQPKTLQQLYALVVQADALRATQRQWANRRHTQAYIPVLPDVVRKTSTALQRSIERQLAKIEKSIQELCASDPTLKIQMQLLCSIPGVAEHSASRLLAYGKTALTSYSVKALVAHAGLAPRHQQSGTSLQAKSHLAKQGDKRLRHALYMPALVGIVHNPILRKHYQRLLAKGKPKMLGLVACMRKLLIIAKAILTQQISFNPTIQSLT

SEQ ID NO: 300366 - protein, 345 aa, unidentified
MELHMIGIDLGKTVFHLVGLNLCGEVVVRKKFSRKQLLHFTANLQVKLIGMEACGGSHFLGRALREQGHEVRLMPAQYVKPYVKTNKSDYIDAEAIAEAVGRPKMRFVPIKTDDQLDLQSLHRVRERWVMRRTAVINQIRGLLLERGITLRQGRGHVDAALPGILEDASALLSGALRLLLAQLKLELDHLQMRIDEADAMIKKAAGDNEACRRLVAIPGIGPVTATAIIAAIGNGAAFKKGRGFSAWLGIVPGEYTTGGKQKLLGISKRGNSYLRRLFVQGARAVLQQRAKQSSGLSAWLAQLTTRTHSNVAAVALANKLARMAWAVLAKNEPYRPPIVVGAATT

SEQ ID NO: 300367 - protein, 371 aa, unidentified
MQLFVGDDRAEDHHDIEVMDAAGKVLAKRRLPEGVAGIAQLHELLGRQLGEDADEAGVIVGIETDRGPWVAALIAAGYLVFPVNPLQASRYRERHGVSGAKSGGGDAHMLADMVRTDSHQLRPAAGDSAEAEAIKVLARTHKTLIWERTRAVQRLRHQLREYFPAALEAFEDLDAPDTLELLARAPDPGRAARLTRAQVSAVLKRAGRRGIAGKTDAILAALRSDQLAQPAALTAAYTATVRAHLSVIVTLNQQVKVLQGQVGEHFGQHPDAEIYLSQPGMGTVLGARVLAEFGDGPHRYRDGRARRNYAATSPITRASGKKKVVAARFIHNDRLVDALRAQAFAALNASPGARAFYDAQRAKGLEHNDAL

SEQ ID NO: 300368 - protein, 346 aa, unidentified
MWSVGLDFHQRSSMICILDEHGKGVKTMPVNGGWPAVVTMLKGLDHPFAVCYEASCGYGHLYDQLKRVAKRVVVAHPGQLRLIFRSKKKNDRVDAKKLAMLLLLDQVPVVHVPSIEVRSWRSLIEFRHQLVAKRTRVKNALRSLMRGHGVLLPAGKRLWTRKGLALLRGAELDTHAANVQRDLLLEELEYLEKQVHRVTRELDVLGRDHPGVCLLRTIPGVGPRTAEAMAAYIDEARRFRRNKCVGSYFGLVPSQDASGPVNRLGHITREGPAVPRKLLTEAAWQGIRRSPRIQAFFERVLQKDPDRKKIALVATAHYLARVMLAMLRTGEAWRDEVPTAQEVAIG

SEQ ID NO: 300369 - protein, 438 aa, unidentified
MAKVVKFFQVHGKGAGIDIGTRQIFVSVDGTSAVNFQTYTADYEVCCKYLLENGITEVAMEATGVYWFCLYTMLEDHGIRVCLVNPREVQQVRGRKSDVQDCQWIQQLFTAGLLRESLIPQGLLKELRFLVRERLDLIESSSTYVNKMQRALELMNIKLANVISQIQGASGLKILRAILAGERDPERLASLCHKSILKTKAENIVKSLHGNYNGVYLSMLRHALEMWEFHMAQIKELEQEISVLLDRINRDTSQVEVKSEPRPTRHHNPAIEDLHTKMVQIYGGIDLTGIAGINDVTLMRLLAEVGTDLDRFPDVGHFVSWLGLSPAHKQSGKMKRRIKGNPSNHAGQIFRQCAQSLIASRYNAIGEFMRRLRSRKGSRIAIKAGARKIAQAYYNALTKGLEYVEQGAEQYKKMLKQREIDLMKKLAKKHAFELKECA

SEQ ID NO: 300370 - protein, 410 aa, unidentified
MVYECGGGLDVQAKTVVACLLKQGRKQLRTFATMTDELLQLADWLASEGCTHVAIESTGVYWKPVFNILEGVVQVILVNARHIKAVPGRKTDVRDCEWLADLLRHGLLKASFIPPLEIRELRELTRYRQTLVTEHTAVANRLQKLLESANIKLGQVASDVLGLSGRLMLRAIADGEQDAEKLAELAQGKLKSKKGELRRALAGRLTQAQRWVLAEFLTRLDETEAALSRVEARIGEEVKTCPDPFVKEAVALLDSMPGVGERVAQTIIAEIGVDMDRFPSAKHLASWAGMCPGNNESAGKRRSGQTTKGSKYLRTALVEAAWAATRAKGTYLQAQYQRLVKRMPKKKALVAVGHTMLVIGYHLLSRRVAYADLGSDYVDRQHIERQRRRLVERLAALGVKVTIEEVAEAA

SEQ ID NO: 300371 - protein, 391 aa, unidentified
MIYVGIDIAKDKHDCIIVDDEGESLVDHFSFSNNLSGFELLVQNIHSASDDFENIKIGLEATGHYSYNILGFLTEKKYATYVLNPLHTNLYRKGLSLRKTKTDKVDAYVIALMIMSKQFLKSYSHLSYHNEDLKSLTRYRFDLVAQRAKLKQSVARLINIIFPELESLVSGLHLKAVYALLSEYPSAHQIANAHLTKLTNLLLENSRGHFSKDFAIKLRETAQSSIGSNMSAKSFELKHTISRIQDLTVLVNETDKQIKQVIEMTESTILSIPGISHTLGAMIISEIGDMERFESPDKILAYAGLSPSTYQSGKLESAYAKMEKRGSKYLRYALFSAAKFVCNWDPTFGDYLAKKRAEGKHYNVAISHVTKKLVRLIFALHKSGQVYTPRA

SEQ ID NO: 300372 - protein, 382 aa, unidentified
MMPFVVLHTAEDLAELTNTLRSIGGEIRVVMEHTGMYWRPIALALKEAGFFVSVVNAMLIHDFSDNSIRKIKTDRADSLKIANYALTFWQELRDYSVEDETRQMLKIQSRLYERTLNSSVALRNGLISLLDQTFPGANKLFDEQRTKAGHIKWVDFVRRFWHKDCVAASSFSSFADTFQKWCKRTGYHYSLSDAKRIHGIARNSVATLAKNDSTKLLITQAVDSLNAVYDTLQILRSEMQRLASLLPEYEIVMGMQGAGPITGPQLMAEIGDVRRFTSKGALVAFAGVDAPPFQSGSFNSKSRHVSKRGSPHLRRVLFTICSVILQHSDPENAVFQFMDKKRAEGKHFYVYTVAGGAKFLRIYYAKVKEYLNTLDSQTGCVA

SEQ ID NO: 300373 - protein, 354 aa, unidentified
MNYVGVDIHKRYSVLVAVDERGRELARGRISGNSVHAFAQFFEALQGPGKVVLEACWNWGRIYDVLSEIEQVEEVVLAHPLKTRLIAEAQIKTDSLDALALATLLRGNLIARAHVPSKATRARKELLRQRLYWARLRTRVRNRVHAVLDRQRELEMPQCSDLFGRKGLNALSKLRLAEPDATLLSEELDLLKLIDSQIKAQEGRIVAFNANEQATQYLQSLPGMGKILAAVAAAEIDAIERFDGAAKLCAYAGLVPTTYGSGGKVHQGHLLKSRNKWLQWAFIEAAWVAVGCSSYFGGIYRYHRARGKKANIAITIVARRMCRIAFTLLKERRNFQEQHRTFPGRSAVRLTAAA

SEQ ID NO: 300374 - protein, 411 aa, unidentified
MEQKCCGIDVHRDTLVTTILDQAGHKQTQTFQNSITDMEQLKNWLRQNNCLNAVMESTGPYWTTLYTVLEDAGFQPVLANAHQVKAIPGRKTDQRDSEWLAYLLRSDLIRPSYVPAKPIRELRELSRTRVRYVETRTQYKNRCQKLLSKNNLRLSSVLSDIFGKAGKEIIDGLMKGKTVEDILKATQNNYLKKHEQKIIDAAKGALSETDIFLLKQMSRTITELTVQIHELETHMAELVDKDALEIVCSVPGVGKLSGATILAELGEVARFSNGKQVASWCGFAPFVSQSAGVTKIGGITKRGSRWLRRVMVEVAHVAVRMDCRFKDMFWRITARKCRKVACVAVARKMLTVIWHLLLNGELFMEEGFSKKSVLARSTKYAGGNGGDGVGLSLDEMAGVLGCVVKVVSDDG

SEQ ID NO: 300375 - protein, 417 aa, unidentified
MWNKATRVKSSVESASNKHIGGILMVCVGIDVAKDKHDCFIISSEGEILADVFTIPNNAEGFDTLLQAIRRSTRPEDKIKVGLEATGHYSYNILGFLLNEGLDTYVINPLHTNLYRKSLSLRKTKTDRVDARTIAAMLMSDVDLKSYTDTVYHNEELKSLTRYRFDKVRERAKLKQSVSRLVTILFPELEKLVSSLHSASVYALLSEFPGAKQISSTHMTHLKAVLKNASQGRYGQEMAETIRNAARSSVGSVMPAKSLELQHTIRLIRELDAEIEDIETAIQAIVDEMQSPITTIPGMGVRMGAVILAEIGDFSRFDSPDKILAYAGMSPSTYQSGQLSLSGAYSHMEKRGSRYLRYALYNATKHVCHWDPTFAAYLAKKRAEGKHYNVALSHAAKKLVRLIFAMEKSQRPYCAAA

SEQ ID NO: 300376 - protein, 409 aa, unidentified
MERQIERACGLDVHRDTVAACVRVPEGRGQRAQHVRTFGTTAAELLALRDWLEGHGVTHVAMESTGVYWKPVFYVLEEAFTCLLVNAAHMKQVPGRKTDVLDCIWIAQLLEHGLLRGSFVPPAPIRELRDLTRHRKVLIQERQRAANRVHKLLQDAGIKLASVATDILGVSGRAMLEALVQGTTDPAVLADLARGKLRKKLPALRQALTGRFRPHHAFLVSQLLAHVDYLDEAITTVGTEVDARLAPFATALAQLDTIPGVGTRTAEVIVAEIGVDMRRFPSDRHLASWAGLCPGNHESAGKHKSGKTRKGNRWLRTALIEAAAAAVRTKDSALAARYRRVMRHRGHKKAIVAVAHTMLRTAYHVLADLTPYRELGPDYYDRRHAERVTRRAIDLLERQGYRVVLEPAA

SEQ ID NO: 300377 - protein, 337 aa, unidentified
MTQVHILAIDLAKRSFQVCGTDRGGAVLFNRVLTRARLIQLLNEQSPCIVAMEACATSHFWGRFAQSCGHNVRLIPPIYVKRFVKRQKNDAADAAAIAEAAQRPNMHYVEVKSAEHQARAVAFRTHQCFVRQRTQLINALRGHLGEFGIMVAQGPANLTAVVGILADETNDLPAGVREIGQLYLDQISLLTEKIDGLMLKLREATKANEDMRRLCTVPGVGPVTAGAILAFAPDLRAFKSGRNFAAWLGLVPRQHSTGGKTRLGGVSKMGQTDIRKLLIVGAMSLIRWIVRKGVLPDNWLGGVLGRKPRMVAAVALANKMARIIWAMMTREQNYRMA

SEQ ID NO: 300378 - protein, 461 aa, unidentified
MKTGVVRVAGIANGSIGGQAIRALLLGRRAFSQRVTHPTYFDNLGGKLPKVTCGIDWAQDHHDIALVDADGRLLAKRRILESVAGFSELTAMLADAGDDPEDQIPVAIETPRGLLVAVLRASGRPIYPINPMSVARYRERTSMSGKKSDHGDAVTLANILRTDIDQHRRLPADTELAQSITVLARAHQDATWRRGRAGNELRSLLREYFPGFLHAFADRPGGITGPEARAVLAIAPTPAKAARLSKPQIAAALHRAGRRRGLTTLAATIHEQLRLPQLRHPTVVEDAFGIQAVALLATLDAECASVDRLGEATAAAFTQHPDHAIITSFVGVADLTGARLLAEIGDDRARFADARALKAFAGSAPVTKASGRSVRITHRHVKNNRLAAVGFVWAFIAAGCQGPTRAHYLARRDHGDRHAAALRHLYNRMLGQLYHCLQTGQTYDPIKAYGSPPTNPIRAAA

SEQ ID NO: 300379 - protein, 339 aa, unidentified
MRSEAFSFTVGIDIASLTFAVRLLHDGTPVGAAAEFENRAAGFAQVEHWLNRQGATPAQTLVVMEATGVYWEECALYLHGQGYRVNVVNPAQVKGYARTTLRRAKTDATDADLIARFAWSVPLPRWQPPSLELEALQLLIRQREAYLSMLTQEKNRLHALERRPQVPRSLVKSTKEHIRFLERQVQKLEDSFKSELKQYPQWQQSLDLLQSIPGVGPIIAAVLLTETGAFASFVEARQLTAYAGIAPVPYTSGSSVKRPSSISKVGNARLRRALYMAALSASRTQSMLGEFYRRLRAKGKPAKVALVALARKILVIALALVRSQKTFDPLLAQTACQPT

SEQ ID NO: 300380 - protein, 415 aa, unidentified
MEILFTHCVGLDVHKKTIVACVLLSSPEGVQRLIKHFATTMAGLEALDAWLTGLGVTHVAMESTGVYWKPVFNVLSSHLEVWIVNARDMKQVPGRKTDVCDAEWICRLMGYGLLKRSFIPEVEQRDLRDLTRYRRRLVEERTSASNRIEKILEDSNVKLSAVVSKLQGVSARAMIEALIAGETDTTKIADLAKARLRSKIPELEAALVGQIRDHHRFLWRELLVHLDELNARIAAINERIAEYTAPHEILIQRLCTIPGVNRWTAEVILAEIGPDITPFPTAHHLASWACLCPGNNISANKRRTGKTRRGQNWLRPALVEAAWATSHTKTYFGSQFHRLRARRGDKRAAVAVAHSILIVVYHLLANPEAVYTELGADYFTKRNPEQEQRRAIRKLETLGFTVTLTPAQAAAAAPS

SEQ ID NO: 300381 - protein, 363 aa, unidentified
MTVKATCLVGLDVHARQTHATLLDRATGELSACRLRGTPEEAVLPYLERIGRDLLAVYEAGPTGFGLAREAERRGLDVRVVAPGSIPRAPGDRVKTDSRDSRKLLRQLAAGELTFAFVPSEEDEAFRDLIRGIEDLRGDLMRARHRLSKFLLRRGHRYQDGHAWTPKHGRWLRSLSFDGCAQATFADYCASVELLVGRRRTLLETLEQAVPGCTHAPTIGRLRCFRGIETLSAAGVCAETGGFDRFHRPTLLSGFLGIVPSERTSDLKRRQGSITKAGSPHARRLLVEAAQHYRKQPAIGQTLARRQAGQDPRVIEIAWRAQQRLHQRWQRLYHERRKPAGVVAIAVARELAGFLWEAATLDA

SEQ ID NO: 300382 - protein, 388 aa, unidentified
MNYMGIDISKYKHDCFVLSDFGEVVNAGFSFTNDADGFKRLEQELNLCGKGNVRIGLEATGNYGINLKLFLEKIGFEFMEINPLLVKEHVRSNSLRRTKTDRLDAKAIAGYMLSKGYRPHQTEFYSKFALKQLTRFRSRLVSIRSSYLVKMTNVLDCIFPEFKPLFDNKFSATALFILANYPSPEAIANMNSRSYDILRRKSHGKFSIDKFVTLKALAKSTVGVYDKCYGDQLDTLLDLYSQIDCKIDEVEAKITQIVEELNPPTLSVKGIGPISAASIVSEFGDFSRFPNPSKMLSFAGLEPGYFQSGTAEHTGHMVKRGSPFLRSTLLNCCRSLRLHNETFAAYYRKKASEGKHESVALSHMAKKLVRLIFTLETKGISFDPDKLR

SEQ ID NO: 300383 - protein, 396 aa, unidentified
MIKDHETIDVFIGVDVGKNDHHAVALNKTGKKLLDKALPQDEAKLKAMLKTLSTHGRLLFVVDQPAAIGALPVAVAQAQGIEVGYLPGLAMRRIADLHPGEAKTDARDALIIASAARTMPHTLRNVEIADEQVAELSMLCGFRDDLTKEGTATSNRIRGLLTHIHPALERVIGQHLDHPAMLELLAKYSTPTTLRRAGKSRVETLLRKHAPRAWKRWVPQFFEAIDQQTVVVPGTEAAGTALGHQARSLAQNLTARADVLPLIQALVEAHPLHELLTSLPGVGIKTAARILTEVSGKEFATPGHLASYAGLAPVTWRSGTSIRGDHSSKKGNKVLKCALYLSAFASISSKDPTSRIYYDKKRTQGKNHTQAVIALARRRCNVLFAMLRDGTLYDVA

SEQ ID NO: 300384 - protein, 339 aa, unidentified
MTIVGGFDVHRRQITFDYLDSETGEVNRGRIIPATRESLRQWLTRFEEDKATFAVEGCTGWRFVVEELERAGIKAHLAEPADTAALRGKKRRAKTDRADARHLRELLSEHRLPEAWIPPTHVADMRTRARLYRALMHERDVWQLRIHAVLFHHGAPAQPSVLSAQGRALVQRADVSTAGRQVITAGLAVIDHLEQLIAPLRAELTSFGRRQPGCRALTVHYGIGPLLAVVIWSELGDPRRFSSSRQAVRHTGLDVTVHSSDAKRTRGVLSRQGPPALRWALYEAAICAARSGSPDRDYYLTTKARLGGGRANISVARKLAARCHHTLRELGDGAWVEVS

SEQ ID NO: 300385 - protein, 410 aa, unidentified
MLELFVGDDWAEEHHDVELMDPAGRRLARARLPEGVTGMARLHAMIAAHLGEGVEDVVVKVGIETDRGPWAQALIAAGYEVFAVNPLQAARYRERHSVSGAKSDKADAHTLADMVRTDSHQLRPVAADTPRAEAIKVVARAHKTLIWERTRHTQRLRHALREYFPAALEAFEDLAASDTLELLSKAPDPAAAARLSISQISAALRRAGRRKIEEKAAVIQTALRAEHLRQPEVVAAAYAASVQSTVAVLKVLVEQVKTLQGQVESHFGRHPVAEIILSQPGLGPILGARVLGEFGDAEDRYVSAKSRKNYAGTSPITRASGKKKLVLARFVHNDRLIDALNAQAFAALSASPGARAYYDRIRARGVGHRAALRQLANRLVGILHGCLTTGTVYDETTAWPADATDSPAAA

SEQ ID NO: 300386 - protein, 319 aa, unidentified
MTTACAAGIDAGKSYLDVGLAPSRRHFRVANKREGIEHIVDRLHEAGIAKVVLEAIGPYAQPLVTRLVAAGFEVGVVNPRRIKAFREAEGRTAKTDRLDAALIARFAVKMTDALRPVPSADQQFLKAIATRRRQLVEMIAMEKTRLKQCVEPFLCESHRMTIATLTAERRRIEADLEGRLAADPKQLRQRAILQSLPGFGAAVSTTLITDMPELGTLDRRAAASLAGVAPHPSQSGTGPSRNEIAGGRPCVRTAVYMAALSAIRCDPRFKAEYQAMREAGKPAKVAIIAIARKLIVLANALLKSDALYDPKHDGAIHAP

SEQ ID NO: 300387 - protein, 408 aa, unidentified
MQVLYSRCAGLDVHKDTIVACVRCVSPPMHQEVRSFGTTTAELLKLADWLAEHDCTHVAMEATGVYWKPVWHVLEAEFELVLANAAHIRNVPGRKTDVNDAMWIADLLAHGLIRSSFVPPQAIQQLRDLTRTRKQLVREVSQHSLRIQKVLEDANLKLGSVLSDVLGKSGRAMLDAIVAGHTDPACLAALAQGTARNKTAELREALRGRITDHHRTMLRLHLQVVDALQRTLAELDAAVGKALAPIQQRARLLTTMPGISDLTASVVVAEIGVDMSRFPTAGHLVSWAGLCPRSDESAGKRRSTRVRKSGTWIKTTLVTAAWAAVRVKTSYLRAQFLRIKARRGAKKAILAVAASMLTAAFHMLRDGTEYNDLGSEHFDRQDKSKTIRRLLKRLQDLGCDVPELAHTT

SEQ ID NO: 300388 - protein, 342 aa, unidentified
MKDVSILAIDLAKHSFQVCGTTADGEILFNRKYSRAKFEQFLTSHPACLVAMEACATSHHWGRTAREAGHEVKLIPPVYVKPFVRRGKNDANDAAAIATAVRQPDMRFVAVKSQEQQAQAILFRTHQSFTRARARMMTTLRGQLAEHGVIVPKGHAALLAFEEELERSPERVPDLVLEAVRLFYHQIQQLGQSIKTLERQMTEIAKKDEVARRIQTMPGVGPINAAAFLAFTPPMESFKRGRDFAAWLGLVPKQLSTGGKTRLGRVNKMGQSDMRRLLVNGATVCMRWAAAKGVDPESWLGRLMARKPWKVAAIALANKMARALWAMVTKKEEYAGGLVTYA

SEQ ID NO: 300389 - protein, 352 aa, unidentified
MDATTVAVDLAKDIFHVALANRAGRVVERKRLTRAQCSRFIDGLDAGTDVIMEACGMAHYWGRRCQAGGLRPRLLPVQYVRPYVRRNKTDRTDTEAMLEAARCGDIRPVPVKTIEQQTLQALHRVRTQWQAARTARINVVRGLLREQGLPVPVGARTILARVAAILEDAEVALPDLLRHTVALVVDEIRGLDHRIATIDRQLAKVAAEHPVAQRVQQIPGVGVLTATAMVGAVSHIHAFRRGREFASWLGLTPRASSTGGRRDLGRISKRGDVYLRCLLTHGARAVLLSAQRTSRTAPQRLTRRQAWMVATAARRGHNKTAIAVANTLARIIGVVWHKEVDFQSQPRVTHVA

SEQ ID NO: 300390 - protein, 414 aa, unidentified
MLFIGDDWAEDHHDVELVDESGGKLAAARLPEGMEGITRLHELIATHHHTASDPDDHTSTNEVVIGIETDRGPWVGALVAAGYRVYAINPMSAARYRERHSTSRAKSDAGDAHLLAEIVRLDRAHHRPIAGDTEAADAIKLLARAHQNAVRERARQTLRLRSTLLDFFPAAVQAFPELTARDALALLERAPDPDRAARLTATRIIAEFKLAQRKNKEAKAVELRELFRAPALRHPATLQGAYAELVVSLVRAIRAINEQIVHLAGAMDNAFAAHPAADIYLSQPGLGPVLGARALGEFGDDPHRFANAQSRKNYSGQSPITRASGKKTVVMARRSGNRRLTDTLHAQAFSALTASPGARDYYDRLKARNIGHHAALRQLANKLVGILHACLKTNTPYNEDLAWQVQTAPGQLAA

SEQ ID NO: 300391 - protein, 344 aa, unidentified
MKITRVGLDIAKQVFQVHGVDERGKARVSKQLARTQVLKFFAQLPPCLIGIEACGSAHYWGREFTKLGHTVKLMAAQFVIRYRPRGKNDANDAEAICEAVGRPNMRFVAIKSEEQQSVLMVHRARTLVVANRTAQVNQIRGLLGEFGLVVPKGVARLRRELPGILEDAENGLPALAREVLAGLLEQFHEFDARVAVYDRQIRALAEASEPARRLMKVEAIGPQTATALVASMGDPHVFKSGRGYAASLGITPRQHSSGGKERLGQITRQGDRYLRTLLVHGARAYLRVVDKKTDAKSAWARRLKERRHVNVVAVALAAKHARIAWAILAHGTEYRPAGPEVVAA

SEQ ID NO: 300392 - protein, 346 aa, unidentified
MQFYTRQHKFYCGIDLHARKMYVCILDAGGNIRVHQNIKTEPEAFLRVITPFREDIVVTVECIFTWYWLADLCQKEGIPFVLGHALYMKAIHGGKTKNDKIDSHKIAVLLRGGMIPMAYVYPKKMRATRDLLRRRNHLMRKRAELFAHIQNTNTQYNLSDSFGCIAKPQNRNGIVEQFEHPAVQKSMAVDLELIRTYDVILTDLERTIIKLANHHDPVSYALLQSIHGVGRILGLVMLYEIEDIDRFPRVQDFVSYSRLVKCSHESNGKKCGTNGNKIGNAHLKWAFSEAAILFLKGNDPAKRYFDRIIHKHGKAKALSILAHKLGRAVYFMLKNKESFDQEKFLR

SEQ ID NO: 300393 - protein, 350 aa, unidentified
MLIIGCDFHTRYQQIAMMDEATGELVERRLEHQSGEAHAFYRSLPKPVRVGVEATGTLHWFERLLAELGHELWIGDSAEIRARAVRQQKTDQRDAAHILNLLLTNRFPRIWVPSPAERDLRQLLWHRHKLVCMRTLVTNQLHALAMSQGLCRKRKLFTKKGRAELGSLTLGPWASRRREELARLLDQLEPSIVELDRAVLNEAKRRDDAVRLMTHPGIGPVNALAFVLTIGPVARFRRSKQVASYLGLNPSEHSSGGKQRLGAISKQGNTMVRWLLVEAAQMAARLDPQLRQDFLRLKSRRGHAVAKVAIARKLAVRMYWMLRSGADYARLVRMQGSPAATLVNASSPLG

SEQ ID NO: 300394 - protein, 389 aa, unidentified
MKIYVGIDIAKLNHFAAAISSDGEIIIEPFKFTNDADGFQLLVSKLESFDKNSIIIGLESTAHYGDNLVRYLVAEFYQVCVLNPIKTCQMRKNNIRKTKTDKVDTFVIAKTLMMQDDLRFVSFYDLDMMDLKALGRFRQKTIKQRTRLKIQLTTYVDQVFPEIQYFFKSGLHQHAVYALLKEAPSPKEIASMHMTHLANLLKVNSHGHFTKEQAKELRVLAQKSVGANDSAISIQITQTIQQIELLDIQLEKIEAEMTDIMRFNDSVIMTIPGIGYINGGMILGEIGDIHRFSNPNKLLAFAGLDPSVYQSGNFQAKTTRMSKRGSRVLRYALVNAAWNVVRNNATFKAYYDAKRAEGRSHYNALGHCAGKLVRVIWKMLTDEVEFNLE

SEQ ID NO: 300395 - protein, 340 aa, unidentified
MPMIRIGLDVAKNVFQAHGVDEHGQVVLRKQLRRREVLTFFAALPPCLIGIEACSASHYWARELTALGHQVRMMPARYVKPYVQRGKSDALDAAAICEAVSRPTMRFAAIKSVEQQSALTLHRAREILVKQETMLANLIRGCLGEFGIVAPLGIRRIAELVGIIRDETDSRIPPHARIAMRAVADQLGDLQRRIKEIEQAIRAWHRNNEASRRLATIPGVGIITASAIAATVATPTEFKSARHFAAFLGLTPKQHSTGGRQRLGRISKQGDGYIRRLLILGGTALVRYARGAGGTVWAKQLLARRPARVVTVALANKAARIIWALLVRGGVYRSAAPQAA

SEQ ID NO: 300396 - protein, 412 aa, unidentified
MPQPNDLSRSLAALDENTTLIAVIEMSQSSWLVAGIVPGVERHPAKQLEPDEAGLLRLLHRWRGEAEKVGRNINRIAVAFEAGGDGFWLARWLRTHGLEAYVIHPNSIAVSREHRRAKTDRLDTALLKRAFLGWRRGEREHCSMAAIPNLEEEDAKRPSRERENLVGERTRIGNRIKSTLARLGIRGFKPTLRTTAQRLEQLRTPEGAAMPPNTLAELRRQMSRLRLLAEQIREIETARLERLERQPNGGAHRMIRLLAQVRGLGIETADMLAHEAFWRSLRDRWAVARYGGLTGAPDESGARRREKGLARAGNTRVRRGMIQLAWRFLRFSERQRAGAVVSSPHCRCARRHPQGIDRRAGAQAAYRLVAAGDDRRIAARRRVATGAVSTRPISSSHRTSGAPPPRGPLPMT

SEQ ID NO: 300397 - protein, 356 aa, unidentified
MSNITRVGVDLAKNLIQVHAVDAAGKVVTNRALKREKFLVWCAALPAGCLVAMEACGGAHHWCRKLRESGLDARMIPAQFVAPYRIQGKSGKNDANDAAAVCEAASRPHMNFVPPKTLAQQGMLCVHRLREALKEERTACINRIRGLLAEFGVVLPQTPAILRQHLNEVLEDASNDLAGMARLVLQRAQEHWRELDKHIQWCDERIAAHQKDDEQVQRAAELKGVGVITASAVVATVGDFKQFKNGAQFGAWLGLAPKQNSSGGKTSLGSITKRGSNYLRTLLIQGAKAVVLVGKHNDDPISQWVQRLRQRSGWQKAAVALANKNARILWAVMTGNKRYDSHHVSIPPAGVIPAVA

SEQ ID NO: 300398 - protein, 356 aa, unidentified
MSVYLGVDFHARTQTVCWCDQADGLVHLRTLHHEHDDVRGFYTQFAVPAIVGLEATGYARWFHRLLESLGHRLLVGDAYVIRKCALRRKKNDRRDAELLLDLLLHGDFPAVHIPPMASQAVLRLLRYRQRLVEIQTKLRNGLQALALNHQLRLGPKLWSKPGQQELLALELDDTDVLQREHSLELLTQIRSRIRAIEKDLTLRADQDARVRLLRTHPGVGLLTSLAVVHTLEPVTRFDRARRIAAYCGLDPRETSSGDTVRMGHISKQGNRLLRHLLVEAAHRAVHSKADTDLRNFYFRLMERKKNAAVAITAVARKLALRLYRMLREDIDYTEFRRRGREARRARKAPSPTAGGC

SEQ ID NO: 300399 - protein, 410 aa, unidentified
MIYVGIDWADDHHEVAITDDSAKTLSQFHISHDSSGFATLHDQLARFHQPPDQILVALETSRGLLVHELLRSGYSVYAINPKALNRYKDRYVLSQAKSDPIDALALAHLLRTDRNRFRALSPLPEDYRLLDRLCQDLRKLVDEKSRISNQITSLLKEYYPKALELLSVDSKIGIAFLRAFPDPHALRACSKKTFMTFFKKHGYSRPNRLKDLWVVAQAPTVRPDGVILKAGRLRLLALVDQLVPLKEHIASYEKEVKAILDKLPESESIGSLPGVGNRLGAELTAALGPKEPDCQSRFQSAEEIMKLSGSVPVTRQSGKWKTVSVRYACVKSLRRTFRDWAFASLKRSVWARAYYDFHKAMNMPHSTILRNLGKKWARILFALWCQGATYDEALYIQALKRRKVPWAMSL

SEQ ID NO: 300400 - protein, 330 aa, unidentified
MEKVLQFVGADISKKSIDLVIHSTKQHLCIDNSKAGFKQMLLWLKQSINDLSTVTVVMEHTGLYSHCFEKFLFEKTIPFSKVNPVDIKFSIGVTRGKSDKVDAARIAKYGAEKHDRLQIQTQISKALEDLRMLSTSRDNLVRTRASLKTSVEEFRNIGMSDREPALRAQVKVIKSLDKEIKTLDDQIQLTIQQESGLRKTYDLLISIKGVGPVVATNMIVKTGNFKRFKNSRKFACYSGIAPFEHSSGASIRGKRRVNHMADKSMKTLLDLAAKTAIRCDPEIRAFYEKRTALGKPKMSTINIVRFKLVGRMFAVVKRQTPYQTHLRKAA

SEQ ID NO: 300401 - protein, 460 aa, unidentified
MKTKRQAQKTSGRAVREVTQLDPLAQLNENAAGLDIGAEEIYACVPEGRDAEASVRVFGTYTPDLQALADWLVACAIDTVALESTGVYWIPIFEILEARGLQVYLVNARQSKNVTGRKTDVLDCQWLQQLHTYGLLRNSFRPEADLCALRAYLRHRSNLVRYRSAHIQHMQKALQQMNVQLTQAVRDITGLTGLRIIRAIVAGERDPQVLAQQRDPRCAKSAAEIAQALSGHYRPEHVFALQQAVELYDFYTQQIRACDGEIERQFQQIAAQVDVATHPLPVKPKSRAKNAPAFDVRTQVYRVSGVDLTQIDGIDAGLAQEIISEIGVDMSAWPTVKHFASWLRLAPRNDISGGQVLRSRTGKTGNRAAQAFRMAAQAVQRTDSALGAFYRRMKSKYGAAQAITATAHKIARMVYHLLKFKKPYVDPGATYYEEQHRQRALKNLERKAARLGMQVVPTAT

SEQ ID NO: 300402 - protein, 339 aa, unidentified
MSKPIPLKQALVFCGIDVSAATLSVAVQQEDQRFEERIFDNDAGGHKALIGWLRKGNQPVRVSLEATGIYSLDLALALDGAEGIEVAVLNPKLIHRFAQTLRRSKTDSADAQVLSEYSRRMPFVPWVAPELSGLQLRTISRHIQGLVVEHTRQVNRLHAAQQSASTPRCVVQDLKRSMASLKLRIARLRREALELVGSDEAMRKRFELLIRIPGIAAVSALQLLGELAPLSPDMSVRQWVAHSGLDPAHQVSGTSVHKQSRISRAGNRHLRHALYMPALVAVRRDPHLKAFYEILLSRHKAKLQALIAVARKLLHAIYGILRTQTPYEGRKLFPQLGIP

SEQ ID NO: 300403 - protein, 333 aa, unidentified
MHYLYYVGLDVSKETFDASLVAFEDANEMAHRKFANSRKGICSCLHWVEKRHGIRLDDVIFCAEDMGSYISEMAVCASDRTLNFNFSLISPLVIKYSMGIARGKTDRVDARRIAEYAITHYRKIALYLPAEKELCQLRTWLILRAHLAKQRVAKLVLLEKLDYKEKFADVSIQRSMLQEEIAYAETHMKTIEREMKELIAADSNICRNYKLLTSIKGVGPITAIVMLCSTLNFTKITDHRKFACYCGLAPFEHSSGVRGGCHTSSMANRDIKVQLNRSALIAIRCDPQLKAYYERKVAEGKHKFSVLNAVRAKIAARCFAVVRRGTPYVALQI

SEQ ID NO: 300404 - protein, 363 aa, unidentified
MIVIGADTHKSTHALAAVDAGTGEVRGEREITADDEGHRKALIWAHEIDPDVVWALEDCRHVSHHLERALVRSGERVLRVAPRLMGQTRRGEREAGKSDQIDARAVSRAVLREGVEKFPGAHLDERAMEIRLLCDHREDQVAEINRLTNRLRWNLVILDPALEASIPPRKMDFAGQLDRVARRLRGMEPSARVRISKEQVRKIRELSRQARELKRELDILIAAYRPELLAELGCSTITAAILIGQTAGAERFPTDAHFARMAGVAPIPASSGKQERHRLHRGGNRRLNRALHVIAITRGRWDPATKAYLQRKEAEGKTRLEALRCLKRQLARHFHRLLLKPPATATPRTAITACSAIAVPCPT

SEQ ID NO: 300405 - protein, 463 aa, unidentified
MPFRLGVDVACRAAHQVSLADEQGRFVWIGRRFRTTAEDLTRLWLMLPDGFDPAEVMVVMEPTRNAWVPLAAWFRRHGAQVVLVPPERSADLRRYYAKHTKSDRLDSQLLARLPMLHPDGLYAEPGLGPGDALKRAAKLHSTLVHRRSQSLARLDALLEILGPGWHAALGADLANRTPLRFLAAGYADPHVVRRLGRARLARFCYRHSRGAWGEPQADALLAAASETLELWAGGELDYPDLAEDIALEARLALQLTEEIKDLDERTAVLLRAADPDGILTSAPGVATITAAAILGRLGNPDRFTSLAGARAFTGLVPSLDASGLNGRHGGPTKRGDAVLRQALFMAAGQARRIDPTLAAKYQRLMTEAGKHHNSALCHIATTLLTRIIACWRAGQPYQLRDIDGTPVTLEQARAIIADRYAIPPDVRARRKTTTGTRTDRRSKESPSAPSTDPPKHNATTTAA

SEQ ID NO: 300406 - protein, 430 aa, unidentified
MKSNTQNAKIEAITEKTLVLGIDVGSETHYARAFDYRGIEYSKKPFKFSNTEAGFVTFKEWILDLKERHEKDKVVPGMEPTGHYWFNLGKFLQDNEMKPVLVNPHHVKKSKELDDNNPTKNDRKDPKVIAGLVREGRYMIPYLPDGVYADLRTASNIRFQLQAELTRIQNRISRWFNIYFPEYKTVYGKPDAKSGMLILKAAPLPEDILTLGIDGVNQIWRDAKLRAVGKARAKTLIEAAEHSVGSKEGAVSARMEIRMLLEDYESRNIRLQEVMALIEGLVKQIPMAEKLLEIKGVGIRTVSGFLAEVGDISRFNNPKELQKLAGLALVENSSGKHKGETTISRRGRKRLRYLLFEVAMSLVAKNPEFRELHNYYTTRRLNPLKKMQSLMAIAAKLIRVFYAMLTKGVDYDPKKMVSDIKRPAVYLQAA

SEQ ID NO: 300407 - protein, 350 aa, unidentified
MDKELYIGVDVSKQTLDLAYYDGESIDWKKAHIKVSNNNAGFKKIGSWVAKVSKGFDIVLFCMEYTGLYTQNFRLWLEEKHYIYRMVEPRKMHRFEPDLDDGLRSLDRIKTDELDSFRIAIYCEQNHRKILRNPSKLPSPVYFKLKRLLAERKQTVKQSVLYKQQLHDICAYDTDLSVERKNGQLKTLNDALKGIDNEIDMYIKEDADISKNFSLLTSIPGIGRVVALETIVLTENFMAIDNPRKYACYIGVAPFKKESGTSVRKGSSVSKKGFKQAKADLSIACLVCMQHIPNIRDYWERKRKEKCSGIVFNAIKFKMILRMFAVIKRGTPYVETDNYRNGKNKQSGVN

SEQ ID NO: 300408 - protein, 376 aa, unidentified
MQQRNIILGLDVHKETITAARADRSGRAPISVGTIPNDPQAVVKLLRKQGPPEQLAACYEAGPCGYGLYRQLSGLGVECTVVAPSLVPKAPGDRGKTDRRDAQHLAQLHRSGLLTAVWVPDADHEAVRDLVRSREQARQDLQRARQRLAKFLLRLDLAPPSGVRAWTKVYHRWLDALHLEHSAQQLVLAELVDMEALAKRRIQRLDTAIVDHLQASTLAPLWAALQSMRGVSTVTASVLVAELGDLSRFPHPRQLMAYAGLTPSEHSSGSRQHRGGLTHTGNSAVRRVLVEMAWHYLRRPHVGAPLKMRQRGQPEAVIAIAWTAQNRLYPRFHRLLFRGKPKPQAAVAIARELLGVIWEIAETVRMIEPSPSPQPR

SEQ ID NO: 300409 - protein, 455 aa, unidentified
MKCPKTLRYIGLDVHKKWIQFCMVNRQGHVVREGRFMATAAAIGDFARSLRPTDAVALEATGFTWALVDRLEQHAGRLVVSNPLQTRAIAHAKVKTDKVDALVLAQLLRLDYLPTVWRPDAQTRAWRQAVHFRAMFVRRRTQLKNQIHAIFHRRLRAFDGADLFGKTGRQWIATERQALPERDRLELDILLDELDRTDERIAVLSEALAREVYRIDDVRLLMTIPGVDIYAAVSLLAAIGDIARFPSAKHLASYFGLVSRVSQSGEHCWTGRITKRGRSHARWIAIQSAQHLCRAPGPMHHFYQHIKKRKGHNVAIVAVARKLVTLAWHILTKREPYRYSVPRTTETKLSRLRVLATGKKKKTGPRVGTARSKNYGTGQRVKYAKSLNQVYRENELPPLGSLPKGERTMLRRRGLHAWAEKNIHKGKPIVTIRNNGKRSKPKTADREKTQREHVV

SEQ ID NO: 300410 - protein, 406 aa, unidentified
MLEVLIGSCAGLDVHRRQVVCTVIREGRKETREYATFTRELKELAVWLGREQVELAVMESTGIFWKAVFASLEEAGIQGCVVNARHVKQVPGRKTDVCDSEWLAELGRCGLLRPSFIPPRDLRELRLLTRYRRKLSGIIAGEKNRLHKVLDDAGIRLGCVVSDIDGVSARSMVEALIEGGFTPEQIAGEALGQLRKKKDQLQLALEGEISDRHRLVLKKIQSHIKWLERHTTLIDAQIVVGMKPYQEEWKLLQTIPGLDALSAAMLLAETGVDMSRFGSKDRLCSWAGMCPGNQESAGKRKTGRVRKANSYVRSLLCEAANSARKTRSQFQGFYKGLVIRRGHKRAIVAVGHKILEIIYVLISRKEPYRDPEIDYEALVVHRNAPRWIEALSKYGYLARLQRSAQR

SEQ ID NO: 300411 - protein, 434 aa, unidentified
MLGQSNPRSYCATDFDIFLGMDVDKKSIDFTCSDSKGILRSLHIPNNSEHLVRYVRKHFPGQRVIWAYEAGPTGYGLYDGLTAAGFTCLVSPASMIPTAPGQRVKTNRLDSKKITEALRAGQLKSIHVPSSTYRHLRHLTKIRDLVVRQIGGTKCRIKTLLLFEGIPFPEAPQKSHHWSRSVIAQLHRLPCSEAVKFRLGRYLEALEFQRQQYLKITRERRNFCRHESELKRCLSYLTSIPGIGQIIAPHLLARIGHWQNLEEHRVHELAAFLGLVPAEHSTGDRVHRGSITRAGDKRLRSKLLQGAWTAIRQDPELREFYRSVYRRHAPQVAARKAIVAVARKLTTRIFAVLKEQRPFVLRSEIHSRPLLPEEIGPRERLDASQKEEERTFRVSFSRQRLSRGLRPSGAHLSQCDGSKAVPRMAASLSGTKGA

SEQ ID NO: 300412 - protein, 349 aa, unidentified
MSPKLNAAIAVIGIDIGKNSFHVVGLDWRGAIVLRQKWSRGQVEGRLANLPPCLIGMEACVGAHHLSRKLTSLGHDARLMPAKYVRPYSRGQKNDFRDAEAIAEAVQRPTMKFVATKTAEQLDLQALHRVRERLVRQRTGIINQIRAFLLERGVAVRQGLRFLRAELPRILATPCDVLSPRMVRVLEDLAADWRRLDERIERLSSEIEALARRDAGCERLMSVPGVGPIISSAMVAAIGAGEAFSKGRDFAAWLGLVPKQISTGDRTILGKISKRGNRYLRVLFVQAAWVVLIKPKSWQRHGLKPWLEAAKRRLHHNVLAIALANKLARIAWSVLAHGRTFETSKIHAA

SEQ ID NO: 300413 - protein, 330 aa, unidentified
MKVPYIIGADLSKKSIDVACHSTHQHVKITNDQSGYEDLLKWLKQQHINTSQMMMVMEHTGMYSYRLEQFLHNQHVRFTKVSGLAIKKSMGLVRGKTDKQDAARIARYGFEKADQLVIAEPVDENLQRLQILHSLRERLVRNRASLLTAVGELQEVYAFKATDLVITAQRKLIKNFDQQLEKIEHEIQHILETGKSIRQNYLLLQSIKGVGKVLALATIIKTNNFTRFTNARKFACFCGTAPFENTSGTSIRGKTRVSHLADKRLKTLLDLSAKSAIQYDKELREYYLRRIQNGKSKMSTINVVRNKILYRMFAVIKRQTPYQTEILIQP

SEQ ID NO: 300414 - protein, 350 aa, unidentified
MLIVGCDYHPGFQQIAFVDTDTGELQERRLQHREEAERFYRDLAARGMKVRIGMEASGQARWFERLVAELNFELWIGDAAKMRAKRVRKQKTDRQDAQHILTLLVEDRFPRIWVADWENRDLRQLLWHRHRMVQTRTRMMNQLQAVALNEGLRCKKRLWREKGRQQLESLWLAPWATRRRRDLLELLDRLNPIMAELTQAIEQEVEKHPEARRLMTHPGVGALTALAFVLVIGTAERFQCGKQIASYLGLVPAEDSSGERRRLGHISKQGSAILRFFLVEAAQVTVRIVPEWRSKFFHLAMRRGRKIAKVAMARGLAVHLFWMWRKQWDYQQLKEFGPYAGKPGTGVGVH

SEQ ID NO: 300415 - protein, 340 aa, unidentified
MNATSIGVDLSKSVFQVSFANPAGRIVERKRLSRQQYERFLVQQPAAAIVMEACATAHHWARTAREHGHDPCLLHAQYVRPYVRRNKTDAADADALLRARRDPDLKPVPIKSLDQHALQGLHRIRQQWVTTRTQRINLARGLLAEFGISLPAGAAGIVRRLHETVDGVPPPLIAALAPILDEIKAIEDHLKQLDRQLTEIAKTDPDMQRLMTIPGVGVIIATAMVASVADIHSFARARQFAAWLGLTPREHSSGQMRHLGNISKRGDGYLRIMLTHGARSALLLAHRQANKGEHTLTSLQQWVLELERRTHHNKAAIALANKMARIIRVTSTRAQDYSAR

SEQ ID NO: 300416 - protein, 401 aa, unidentified
MIDISEIGVFLGLDVGKGEHHATALTPVGKKAFDKRLPNSEPKLREVFAKLQAKHGTVLVVVDQPASIGALPLAVARDAGCKVAYLPGLTMRRIADLYPGEAKTDARDAFIIADAARAMPHTLRAIDVEDETIAELEMIVGFDDDLAGEATRISNRLRGLLTQIHPSLERVLGPRVQHPAVLLMLERFGSPAQLRKAGRRRLISLIRAKAPRMAERLVDDVFTALDEQTVVVPGTDAAGLIVPSLSGQLNTVLDQRKLLATRIEELLKTHPLSKVLISMPGIGVRTGARILIDVGDGTKFPTAAHLASYAGLAPATRSSGSSIRGEQPSRRGNKQLKRAFFLSAFAALADPASRAYYDKKIAQGKHHTQALLCLARRRADVLFAMLRDGTFYEPQPASVVS

SEQ ID NO: 300417 - protein, 418 aa, unidentified
MPNIEHPVRTATRFDHATPIDMDATLFVALELSLSSWVVVASAPGEDKASKHRVEACDGPGLLALLDRLRLRAEQRCRRPVAVVVMQEAGRDGFWVHRLLEAHGVRSFVVDPSSIAVNRRSRRAKTDRIDAEAMLRTLMAWARGERQACAMVRPPTREAEDARRINREREALLTERIRHANRIKGLLATQGVFGFEPTLRDRRARLAEVRTPEGAALPPRLAAEIERQMDRLELAMSQLAAVEAARNAALAAECTASPAQDAAETVSDGANGTAASLPQHEGPGARLLQLKGIGPETASVLAGEAFFRDFRNRREVASYAGLAPSPWQSGGVDHEQGISKAGNARVRKTMGQLAWLWLRNQPDTALSAWYRDRVRDGRGRIKRIAITALARKLLVALWRFVTQGLVPTGAVLKPAQAD

SEQ ID NO: 300418 - protein, 339 aa, unidentified
MKFAGCDLHKQTITICVVDQLRRVLERRTVRCGEERTILAFFERLGDFEAVVEATASYEWFVRLIEPVAHRVLLAHPKKLRVIAESTRKSDRLDAQILAEFLALEMIPTSYRATPRQHEHRRLVRQRGGVQRRLTSVKNRLRRILCDYNADRPSLFTVDGLAYLAQVPLLGADRFAVDQMVEELHFGRRQLLAVNARLKEFAEAAPLCEQEARTLLRTIPGVGFVTTEVVLAELADIDRFGSQKRVVAYAGLSPGQRESAGKSRELHLEKNGSTLLRSTLVEAAWRLVQHSLRWRRIYERLKLRVRAKKAIVAVARRLLCLMTAILKTGQPYSLSQQPT

SEQ ID NO: 300419 - protein, 427 aa, unidentified
MKRRAYRRTPINQFDVTKAVEKATSQRLILAVDVAKDDMVAALTTQTAEVLCTLAWKHLDQTPIMLDKLGQLRDLGYTVEPVMESTGTYGDVLRHQLQHAGFAVYQVSGKRVHDAQVVYDGVASLHDSKSAAIIAKLHADGRSALWAIKSPAERELKAAVAGMDVYQVQHLRLVHMLESWLARYWPEVTRLLELTSATLLALLGRVGGPADVAANPDAARKLMTGMSHRLMSAEKIECVLQSATQSVGLVPLPEERTALMTIAAEAHRCLRAFKQAKQRVLELAAGGPSEAIAPAVGKATAAVLLTEVGDPRNYPSARAYLKAYGLNLKEKSSGKYQGRLRITKMGSGRARQYLWLAVFRWRQKDPIVQAWYAAKVKRDGGSKARAAVALMRKLVKALFHVARGVPMNTQKLFDASRLSIVPALSEG

SEQ ID NO: 300420 - protein, 315 aa, unidentified
MAMPVSVKKPIVGVDVAKNELVIYHAELDQLEEIPNNKTAIKHWLKALSGTVAVAIESTNIYHLEFADLAYEAGCVIYMVGGYELSHYRKGVNIRAKTDALDARLLARYLKNEGDDLHPWTPPSPLYRQLLSLFRRRAALVQARVGLVQSWANEPLLKSAFAEQVKSMQKLETLVEKTINDRLKEAGLLGQLKRCLKVEGIGFLTGARLLTTFQRGEFRSADAFIAFLGMDLRVSKSGQKDGRRSLTKRGDPEARRLLHNAAMSASRTSAWKGFYEEQRARGFSTTQALVILARKLARIVFALLKGQSEYQPKAS

SEQ ID NO: 300421 - protein, 430 aa, unidentified
MHNKNYISVGIDVGSAFSFMTILAPDETVILKPFKITHNNKDSLERAVSEIKKAEELYSLESRIFLESTGIYHFPLFCYLVDCGFNASIINPIITHSTKNGNIRKVKNDKIDSKGIAKLGLSKDIPVSQFPAKLVLELRSLTRKYYDLTDERSAHINKLKGDLHTVFPQYLDVFCDVTGKTSTMILRQYGTPDKILRGHKKTMIEKISKASRKGLAKASERYEKLCAAANAAKTFGCQIDSIYFNIFLTLDLVEKLDSALDSILNRIRQLITFNKNEKFIQQIKLLNTIPGVGFLTAVTIMCEIGDFSAFRNPKQLFAYFGLDPEVNESGKFVGTQLHMSKRGSRIARRAIFAVALAYIRTKRNGEGINPYLRKYYELKSGQKPKMVAIGAVMHKVCNIVFAVLRDEKAFELRSPEEHCKQYQRPALAAA

SEQ ID NO: 300422 - protein, 424 aa, unidentified
MNSTTTLCVGADVHLDEMVLRAVDKADGHEVVQRFHVTNNRPGAQSTVATIAQTATQGGYTHVEIGWEATGLLWVPFHRLLSTSPLLQPFQPDLVCFNPKLVANFKDGLVLRRPKNDDRDAWDIAARLRFGELPVSYIPSDFWQGLRRLTRYRFRLAQMLTREEQRFQSYAFLKASDWKRVKAFSNVFGATSVALLTEFTIAELTALSHDELVDVITHRGHGRFEDPQATARLVQAALHTSYPIDPQMDELVTLTLTTLWEHIRFIKRLTKRLDRQIAHYITPFPNPLLSVKGLGAVITAGILAEIVDITRFPTHKQVAQYVGLTWEKRSTGQSVSPTTRLTKVGNVYLRYYLILGADKLRQFNLEYKTYYWRKHQEVSQYQHKRALVLTARKLVRLVFALLTKNTTYVRPRTLAQVQEEPLLQ

SEQ ID NO: 300423 - protein, 364 aa, unidentified
MNEITVLGIDLAKNVFQVIGVDRHHKEVLKKRLTRQKFEEFVMSHPRCTILMEACGGSNHWGRRFSDAGHEVKLISPQHVTPYVSNHKNDYKDTVAIIEAGTRPRTKFVSVKTLEQQDMQSILRIRERLVGNRVSLSNQIKGLLLEYGIDIAQGFSCFRKVIPALLEASNEQLSIPMKEALEDCYEEFKTLSARIATYDKRIEKISSEHESCRLLRTVPGIGPVTAVALYAAVGNGSQFRNGREMAAHAGLVPKQHSSGERQVLLGITKKGDANLKQLLIHGARAVVLHAGKKTDWRSQWIQKLSQRKHTNTVVTAVANRTARIAWAVLQSCKAYNANHAGITEGGACYPQPCHALHNSEGLRA

SEQ ID NO: 300424 - protein, 462 aa, unidentified
MINVQEQREMVEKANHILSEMKSFTWRDLETQGKFSKNDKLSFISDDMLILGCDIGSETHYARAIDARGRELGRKALAFDNNAKGFQKARDWAVQLAAANDKKQIVLGLEPTGHYWFCLAAWMVSNGISVVQVNPYAVKQTKELEDNSQQKDDRKDPKLIANLVKDGNYGMPYLPEKVYAELRRLSMFREQLTEDRNRNMNRLHREMKIYFPEYKDAFGKIDGAFCMAVLKEAPFPEDILRLGIEGIREIWHEAKLRGRGYSRAAEIVKYAEMSIGLKEGTAAGKEAVRWFAEKIMELDEELEKIENSLSEKCKEIPHAENVLEIPGIGGKILSGILAEMGDISRFDDVKELQKLSGLGLVSCSSGKHKGETRISHRGRKRLRYWLFQAARSAVSHGEEYKRIHAHYTTRAGNPLQKMQSLIVIACKLLRVIYTMLKTGKGYDPEKLLKDIRYPENVQTAAA

SEQ ID NO: 300425 - protein, 369 aa, unidentified
MFSHEETRFEFNRSTGAIKSAEGRIRPVCGLGIDVHQDFYVVVEQVGGTNPKPPQRFGKQAFLHWAAKLKQSGVEVHAVYEACGFGFSLQRQLSAVGIHCYVVCPQKLDERNKRVKTDGLDAKALCLKLDRFVQGNRDALAIVRVPSEEEERSRAIHRQREQLVGARKRLEAQGRTLMVNHGLEPVKNWWKPRTFAALPVPQWMRELLGNSQPILLALQEKIAALTVQLQRAADPRQPRGLGLMSSVVIDREIGDWRRFNNRRQIASYTGLCPGQYSSGNTRLQSCVTKHGNPRLRAALVELAWRLVRFQPNYKPVVKWRQILAPQPRGALATGAARKKTIVAVARQLAVDLWRIKTGRLTAEQLGLTI

SEQ ID NO: 300426 - protein, 318 aa, unidentified
MSDSVFVGIDVSSQTLEVGCSSEPKTWQVANDATGLETLVSRLLELKPALTVLEATGGYEFEAACAVQACGLAVAVVNPRTARDFARAMGALAKTDALDARMLAAFARVLHQHPERERFVKPLADAELQRLQALVLRRRQLVQMITSERQRMRISHVAARPSIERVIEFLKTELADSDADVAAHVQRHHAQFAAALTSVPGIGAASVAVLLAELPELGKLDRRRVAALVGVAPVNRDSGQIRGQRSIWGGRADVRRTLYMATLTAVRHNAVLKTHYQHLLAAGKRKKVALVACMRKLLTMLNAIAKRGSKWDPTLHNA

SEQ ID NO: 300427 - protein, 403 aa, unidentified
MDRTAGIDLASEEHRLVVVEADGRRLEERRFVHDEEGVAALVRRLVALEVARIAIEQPNGLVVDRLLEAGITVVAVHPNQLAASRDRYRSGGGKSDGFDAYVLAELARTDMHRLRVLEPDSDQTRALRSLTRAREDLVEQRVALANQLRAQLEAFWPGAARIFSEIDSPIALAFLERYPSPSDAHTLGEKRLAAFLARNGYCGRRSAAQLLDRLRAAPQGRTGELESEARRQVVLALAAALRPLVEQIRLLTSEIRGLLDNHPDGAIFRSLFRDPKSVVTAAELLAEIGDRRDRHPASSSLEAIAGQAPVAVQSGKKKVACFRWACNKTLRSAVSVLADTSRKHNPWATDIYQRARARGHDHPHAIRILGRAWLRVIWRIWQDQTPYDPARHGSLNRLLTAEG

SEQ ID NO: 300428 - protein, 345 aa, unidentified
MEHYAGIDVSLESASVCVVDATGRIVREAKVASEPDVLIAWFRGLEFRVTRIGLEAGPLSQWLYAGMRDAGLAVELLETRHVRDAFKAMPVKTDRKDARGIAQLMRLGWFRSVHCKSLPAQEVRALLTARKLLQTKNHDVEMSLRGVLRGFGLKVGPTTPRTFAARIRVLVAGHPTLSTVAEALLAARSTLFEQWQQLEKRLRSLAREDHRVRLLITAPGVGAIVGLTYVSAIDDPSRFRSSKAVGAHFGLTPKKYQSGETDVTGRISKIGDGGVRTALYEAANVILTRPVKGSTLKSWGMRLAARAGMRKAKVALARKLAVVLHRMLADGTEFLGDKAAAAVAR

SEQ ID NO: 300429 - protein, 321 aa, unidentified
MYKYTEIYGVDISKVVFDVHGSKTGHVVFSNTEKGFVTFFKSLPKGSLVIMEATGYYHYRLAQFLYKKGITVSVVNPLSVKRFIQMKLAKVKTDKSDAKAICDYGMTQEVPLYTALTETQSECLQLFSLLDAYLKKQTATKNKKHGEEVLGIPSKFVYRSLLRDLKHLKKEIKGIDTRLLELVKQDQQVLLTLLKSIPGIGLKTALFLIVITDGFTKFENASQLCSYVGITPTIRVSGSSVRGRSRISKVGNRKLRNVLFLCAFSACKHNKTCRELYERITAKGKSKKLALIAVSNKLIKQSFAIAKSGLPYDENFLSKLN

SEQ ID NO: 300430 - protein, 458 aa, unidentified
MPARLIVSMRVMTVARKRKMQRLEIVHPRCAGIDVGSREHWVAVDPHGCDQPVRCFSAFTDDLQKLAMWLKSLGVEVVAMEATGVYWIPLYEVLDARGLEVHLVNSRATRQVSGRKSDVLDCQWIWQLMSHGLLKGAFRPADGVCSLRSYVRQRATKVQEQSRCIAHMQKALTQMNIQLDNVVSDLMGKTGTTILRCIVAGERDPQQLARLRDGRLRANEATVARALHGNWRDEHLFALAQALAHYDFLAEQISACDRQIGQALDRLPKLTEEPTPEPGKPLRSAHRTSAEQKQLHQALHRVMGVDLSAIPTLGIDTVLVLAGEVGADLSRFPSGKQFCAWLSLAPPTHLSGGKPLSGKKPKTFNRAGQALRQAAANARRSDSYIGACHRARLARMDTAKAIKATAHQLARLIYAMLTKGQAYVEKGIKAFEADSRHRQLRALQRKARKFGLALTEAA

SEQ ID NO: 300431 - protein, 349 aa, unidentified
MNKRGLNERPAEVTVFAGVDVSARELTVAVWRNGGEEAVFTLPNTAAGHASLKVRLVGKRKIGARVCLEASGNYGLDLCLALQRDTRMELSVVNPRSARRFAESLNQRSKTDPVDARVLCEHARRMPCVPWQAPGKAALQLRTITRALAGLTKMATQEKNRQHALDASAALPEVVGQILHRHQQDIEKARGKLAAQALRVIAANPELKRRFALLQSVRGVGQKSALAILGELATLPATMDARQWVAYCGLDPKHVESGSSVHQKPRMSKAGNRRLRHALYMPALVAVCRDPHVRVFYQRLQGRGKAKLQAIVAVMRKLLHAIHAMFRSNQLYTGAKLCPQLPTITSQAA

SEQ ID NO: 300432 - protein, 414 aa, unidentified
MSVLNSLFVGIDVSKLSNQVYAMTFDQKKLLSFVVSNDTSGAAKIEEKLIDCLVKNSLDKVVIVMESTGMYSFHIATYLSVSEELAKYSVLVYCINPKTSQNYRKSFSEMDKTDPKDSYILADMARVGKVNDLTPVKGPQKLALQRLTRHRKHISEQIVREKLYVLNNVFLKFSAFGAKSPFSDPFSATAQAVLLEYKSPEDIINTSLEDLTSFLATVSKNRFADSKKVAETLTKCARMSYRLDKAAYDPINTAIASSLSILRCLEGQLKHIDKEIVNLTKGFNSDEYNCLISIPGIGPTFAAGILSEIGSIKQFDNEEALAKYAGLTWRRHQSGKDEYEDTPMTKTGNSYLRYYLVEAAGMAVLHNPVYKDYYQKKFAEVKTHQHTRALALTSRKLVRLIYGLLIKNQLYQAN

SEQ ID NO: 300433 - protein, 449 aa, unidentified
MGKRIYRAVDVKSVSADALSHRLSGGRVAVGVDIAKRVVYAALVNAQRETVVTLKWAHPAQTRSFVALLTALCATGIALEVALEPSGTYGDPLRYLLTESGIAVFRVSPKRVSDAAEVFDGVPSIHDAKAAALIARLHLDGASKPWVNPDDAQRTRAAAVATLERVTEQHQSAQGQLEAQLARHFPEVTELLSLGDATLVQLLAELGGPQAIATVPDRARDAMRRFSHGLLLADKVDRVIAAAHTTLGVPMIDAEIHALKTLAAEGHRAYRAHREATRRLVTLTADDPACAGMRPVVGAATAAVIVTTVGDPQRFASAQAYRKAFGLNLRERSSGRKQGKLSITKRGPGRARRFLHLAVLGLIQRNPIVAAYYRQKVAEKGGQHKLIATTAVMRKVALALWHVGRGAPFDAAKLFDTSRLTLPQQVRDHLNRRRVAFVADVSPSSATCT

SEQ ID NO: 300434 - protein, 353 aa, unidentified
MNATTVGVDLAKNRFELAIRVGEDQPLRRERLSRQRFARFFSNFPPSLIVMEACGSAHFWARTLQAQGHEVRLLPAQYVRAYVRRNKTDAADAAALLEAARSPDLRPVPVKTVEQQQLQHLHRVREQLKSTRTGRINLLRGILREFGIAVPVGLARGRTAVREALEIADNGLPDLLRPMIAETLQEITALSERIARIEATLTALTRTDPVVQCLLELPGVGLLGASALRAAVGDIQRFPTGRHFASWLGLTAREHSSAETRRLGRISKQGDTYLRTLLVHGARSALCAAARAHSQGRPLDRLRLWALATEQRRGRNKATVALANKLARIIWATWRYQRPFAGDWPTRLEATPG

SEQ ID NO: 300435 - protein, 423 aa, unidentified
MNNTRNHRLNQVSTSTLIIGIDIAKNTHYACAVDDRGVELSTSFSIHQSHHGFHQFYLKLQNLKAIHQKDDLLIGFEPTGHYWMNLAAFLTQNDIRFVMVNPLHVNRSKELDDNLQTKNDKKDARVIAKLITNGYFSYPRQIEGIEAELREGSSIRWNLKKDISKVKNRIIRWTDRYFPEFKVAFKDLGLNACAILKHTPLPVDLMEKEIEELVLLYLEKEKLKYPARPKIAQLKRVAVQSIGLTEDSNMARIEIYSLITQYELLTKQLEQVNESLKTLAEQQAEYHYLLSIPGIGETTVIDLLAEVGSLKHYKHPRQLIKLAGLTLRENSSGKMIGQKRISKRGRRKLRALLYRAVLPLIRNNETFYDLYQYYISRKEKPLKKKEALVLCNKMLKIFHGLCQQEVLFDKERMRQDLSILQPK

SEQ ID NO: 300436 - protein, 340 aa, unidentified
MKLKTLAIDLAKNTFCLVGFDRDNQPVWRKKQSRRQLEIFIAKQEPHLIAMEACASAHHWARRFSQLGHQVKLLPPQHVKAYLRGQKNDYNDAQAIGEASLHGVTRSVPVKTVEQQDKQAFHRIRRQLMGEQTRIINQLRGLLGEYGIIIDTGIHQANKAIPLILEDAENGLAPKLRELVYRQYQRYLVLREELAWYEQQLEQVAKTDPDVKRLQDVPGFGPVNANVLCSWLGDGTQFSRARDASAALGVVPRQHTTGGHDRLFGITKRGDSYVRSMVVHGARAVVSRAKGKTDALSRWINQLVARRGFNKAAIALTNKMIRIAWVLVTRGERYKPSLSM

SEQ ID NO: 300437 - protein, 347 aa, unidentified
MNYCGLDIAMKSSYIYIMDGRGHKKISGEIDTTYMALSHRLRPYVRKGLKIAIEAGNQTAWIYDCLIQLGADVTVVNPAKVKLIAESRRKTDKIDAKILADLLRLDGLPEAVHMPGRQTRELRGLLIARKQLVQARAKLCNVVRGMLRQEGVRLPVRYLNTFKGWQTLLAGDSFTCEHLPVILSSYYESYISLTRSIQGLEKELSHREHADDRAAQLQTIPKVGRIASLTFLAAVDDVRRFSSSRKLVRYSGLCPTVRSSGERTEYGAISREGRSDLRAVWIQIAHLVAYDTHRNTARLRRWYQQVAKKRGKKTAMVALARKLLTIAYRLLYDESEYRSVLVSRKAA

SEQ ID NO: 300438 - protein, 349 aa, unidentified
MLHVGLDLSRKRVDACLISDQGELIDHFAAPADRDGLYGLTRRVAVYEVPVRGVVESMNGARFVHDELVGHGWEVLVADAQKVKGLAPLACKTDKIDSRVLAELSFRDLEPAIWLPTPELRREREISRWRLHLVKHRSILKNRVHSTLIAFGHQVPMADLFGLAGRRLLAGLDIPEPWLGHVQASIALIDDLDRRIGEIERELKRSGADHRYLPLLMTAPGIGWITGFTIAAEIGDIGRFSSPVKLTGYTGLCPRVKQSGAMDQRGPVSKHGPRYLRWGLMEAAIAASSHPLYKARYQATKRRLGRQRGAKVAQIDLARKLTEAIWYMLTRNQPFTPFTPAGAINRLTA

SEQ ID NO: 300439 - protein, 485 aa, unidentified
MKRKSIFRNESQKLDAAFIEAGLPERVLLVPLDFAKVTHYACFCDGRGTYIRKAFTVKNNQEGIDYLVDQIERTRVARSIKSKRHVIIGGEDSASYTRNFMDRLFELGYLTVRLDSKEVHRQAESVDSSTDKTAVRAIAKTMLNRDARQVGGSDPYTQLRGLTRQRRRIVHLSTAVKNRIHTHADCLFPGFLSKDSAVAAFSMASLELMANKFSAATLARKSEKTITRTLSRQGVRSAPEVAAKLKEQARNAICADDASVQLSSQLIESELRLFQTLQSSLSQLDRESARILLQLPEAFAVSIKGIGITLASSIFAETGSLSQIQRCDQINAYAGIAPRVKQTGGPESPARIGGKRRNFNRILKDYTLQAGNHLYLHGPEELLHDAARRKLAGKAVDTAMARRFLRIARALAKSHSIYLPSHLRTAQAGTDVEAQTRAQYIVKTWSDFLLKWKRLGLHEEAFAPETPLGDWRIIVQEIYEIDLPI

SEQ ID NO: 300440 - protein, 410 aa, unidentified
MDVIVERPSALDVHKATVTACVRVPDEHGVRVPHLAEFQTTVRGLLALRDWLAAHRVSQVVMEATGVYWKPVWAVLEDDFELMLVNARHVKQVPGRKTDMSDAAWLCQLAEAGLLRANFVPPKPIRALRMLTRYRKTQVAERQREANRLHKALEDTGIKLDCVASDILGASGRAMLDALVAGTTDPVMLAELAKGRLRAKIPALREALEGRFDALHSLLIGAILAHLDFLDEQIDSLSDAIEEQLVPFAPAVELLCTIPGVGRRTAQNVLAEIGTDMTVFPTARHLASWAGQCPGNNRSAGKQRSGKTRKGSKWLNEALKDAAIAATRTKGTYLQSQYQRLRPRIGHGRAIGALKHTIICACWHMLSTGETYRDLGADFLARRNPQQATRRLIAQLERLGHNVTIQEAAA

SEQ ID NO: 300441 - protein, 310 aa, unidentified
MEQVYVGIDVAKDRLDVHLRPSGEAFAVARDGKGLEELSVRLGGLEVALVVLEATGGFEITVAAALCATGLPLAVVNPRQVRDFARATGRLAKTDALDAAAIAHFAEAVRPEPRPVPDEQARALGELVTRRRQIVEMMTAERNRRKRLASRRMVKSVDRLLKALQRELSDLETDLDDTIRKTPAWRQAEDLLKTVPGIGDVTARTLIADLPELGTLSRRRIAALVGVAPFNRDSGTMRGRRTVWGGRASVRASLYMAALSASRCNPTLKRFYQRLTEAGKPKKIALTALMRKLLTILNAILRDRKPWLAT

SEQ ID NO: 300442 - protein, 316 aa, unidentified
MIEPIVKCSAGLDVHRDIVVCTILKELSDGSLHKQTREYSTFRQQLKQLAQWLEENEVALAVMESTGIYWKAVYEEIEDVGVRVIVVNAQHIKKVPGRKTDVADSEWLAELARCGLLRASFIPPKDLRELRLLTRYRIKISGYLSSEKNRLHKVLDDSGIRLGSVVSHIDGVSAHRMIDSLIEGKKSPQEIAQLALGQLRSKERDLQLSLDGRLSDRHRDLLRRISRHIKWLNAEIADIDAQVVAAMQPYKQEWQLLQTLPGIDSIGAAMLLAEIGIDMSQFGNKERLCSWAGMSPGNNESAGKKKVAEPPKETST

SEQ ID NO: 300443 - protein, 346 aa, unidentified
MHYIGMDCHITTLDFAVVNEAGRLVKAHRVATGVNGFMEFVKTVPTPRAIYMEESALAAWALETCVRFREKLVITDAKKNHWIGSSGQKDDSIDALKLAQLARGGYIKEIHHPVGQRRRFRELMIAYHDAVRSTTRIKNKIKAKFRQNGIQCTGTTVYSETYREEWKGKIPQEATLLLILDGLWRQLEQSERTEEELLAAAKAQAKHYPEIKLFKDIPGIGFIHAATVSAILETPHRFVDKRKVWMYAGLGIMTRSSGGKTYSEKLSTDYNRLLKYTLKQAAEAAIQAKDNPFRRKYLDMTLLHGIAPHRAKLTIARDMLATMWAMWRKGEKYSPEIREKAAYKQG

SEQ ID NO: 300444 - protein, 386 aa, unidentified
MRTDKKQWRNRKAKKELARQLQSENPGLEVVHPHAAGIDVGNSAHYVAVRPDRDPQPVRRFECFTADLHRLANWLQSCGVQTVALQSTGVYWIPLYDILEERGFEVYLVNARHTKNLPGRKSDVQESQWLLKLHTYGLLNNSFQPLSKIRILRTYWRQRLQHVTGAATCVQRMQKALTQMNIQLANVISDLSGVTGQLIVRAIVGGERDPWKLAELSHPRIQASRGEIAKSLEGNWRQELIFVLQQEMEMYDTYQRRVAECDQELQKHLRAFADTVPPPVKEELPPKKKKKQNKNNPHFHLAEELQRITGVDLTRIDGVDVIVAQTLVSEVGLDMSRWKTEAHFASWLGLCPENRISGDKVLSRGTRHVLNREVWSALRRQRRGIL

SEQ ID NO: 300445 - protein, 337 aa, unidentified
MEHFAGLDVSMAETHVCVMTGNGAVIHSAKMPSTPADIAAELAQVPTCQRVVFETGRMAPVLYHGLSQLGLRIVCIESRQAYQALKLLATHNIDSNDARGLAHLARTGFFKPVHVKSLPAHAVRSLIIARKKLVGQRVTLENQIRGLAVVFGVRLPRALSPAFIRQALQASEGIAGLSAAMRGLAAARAAVLAAIVAIDADIRRMVRASDACRRLMSIPGVGQLTALAFTAAVDDPGRFRRSRDIGAYLGLVPRRYQSGEVDYTGSISKCGDRRVRTLLYEAANVMLTRYKGALKLKDWAFAIAKRSTMRKARIALARRLAIIMHAMLRHGTEFKPA

SEQ ID NO: 300446 - protein, 346 aa, unidentified
MKKIFIGIDFSKEKFDATLIQAEGLKECAPSVHEVFDNKTSGYRRLVKWVKAHAEGFTADMWLFCGENTGGYSIALCNYLYASGYDMWLECAYNIKHSTGIQRVKNDKADSRAIAEYAMRNNDKMIPYKPQSSSLNALREVFLYRHSLVKQKVALQVRRQEKRLTQDKSDIKTFMSFTSKHLVTEVNKAIAKCDEKIKEIIASDDELREVFDIVTSMPGIGVQNATCLMVYTDNFQKFDYDSRKIGCYYGIAPFGRQSGSSINGKPRVSPFANRMIKSLLSQAALAAIKTDIDIYNYYQRLTQRGKHPLLIHNNIKNKMLHRLVAMVRNRQKYNPDYIYRNSKEVA

SEQ ID NO: 300447 - protein, 365 aa, unidentified
MNTTTTATGLVGVDLAKNVFSICEVDGGGRVGRRQDLTRDAFGVWLVQRPAGTVVAMEACSGAHHWARRCEEYGLVPRLIAAQFVTPFRKRRTSKNDRNDAEAIATAARQGNMRFIPVKSVDQQARLSWHRVREGYKVESLAIGNRLRGLLAEFGIAVAKSESALRTALADLARNTGLPLGMKELIGDLTDHWKQIRDRIAACDARIEAHARADERCVRLRSIIGIGPLTADAMVASVGSARDFKNGRQLAAWLGLVPTQHSSGGHTRLGTISCRGDVYLRTLLIQGARSSLQRAKAVSTEKATPEQLWIGQLAARMPFGKVLVAIANKHARQLWTMLARDVDYDPSASLRHTMRSTTQPAIAAM

SEQ ID NO: 300448 - protein, 401 aa, unidentified
MNAVGIDVSKGRSTVSIIRQFGEVVRAPFDVSHTAEDLKELAALIKSLPGETKVLMESTGNFYEPVARTLSAEGIFVCVVNAWLIKQYNVNHMRRAKTDNKDSMKLAAFCIDCWLELVEYRPEEDIRRDLKLLNRQYQLNIKAQTQVRLHLISQLELTFPGIRGQFTSPIRNTDGHEKWVDFVSAFPHRDRVAKLSLSVFKTKYRSFCKKKGYQYTESKAVQIHTFSRSVVCSLNLDDTVGFVIGNLTSQLIMLMENSFEIRRRMTELAVQLPEYDTVLGLFGVGKTTAPQLIAEIGDPRRFHSAKAITAYAWLDTEPDDSGQIVNKGERHITKRGPAFLRKTLFMVMTTYLEMKPQEEPVYQFLDKKRSEGKMYYVYMIAAANKFLRIYYARVRDALKEQ

SEQ ID NO: 300449 - protein, 410 aa, unidentified
MEVLYPHCAGLDVHKETVVACVRHMAEGKINTEVKTFQTTTGGLLELSAWLAGEGTTHIAMEATGVYWKPVWHILSDGEFHLVLANAAHVKNVPGRKTDVKDAEWLADLMAHGLIRPSFVPDEPTQQMRDLLRTRKQLVRERTSHAQRIQKTLEDANIKLDSVISDVLGVSGRSILAELIKGETAPQVLAARASSRIKASSKQLEASLRGRVTKHHRFLLKLHLDHIDALDAAIASIDQEVDGNVESFRQAAQLLSDIPGLGPLAVLIVLSEIGLDMSRFPSAAHLVSWAGLCPRNDESAGKRRSSRMRQGAPWLKTILVQCAWAAARTKGSYFQAQYQRLRSRRGSKKAVCAVAASLLTTIYHMLKNGTLYQDLGPDHFDQRAKQKHVMRLISKLENLGYDVQIAPRAA

SEQ ID NO: 300450 - protein, 315 aa, unidentified
MTVYLGIDIASKKFDVAELCDGNYRCKAFENTSAGFLALYKWLGQSTMPDIHACLEATGDYGTSLATFLYENKIKVSVVNPARIKGFGASELSRTKTDKADSKLIARFCKAAVPDGWKPTPAPVRKLQALVRRISALNGMLRMECNRRENADANIQASLDRIISLLKTEIEVVRQEIKDHVRSDDELKKQDALIQSVPGIGEVSSNLILSFMSGKGFRKAKEVTAYLGLNPRHHQSGSSVRGKTRMSKMGDTRLRSALYMPALVALRYNPDIKAFGQRLLLAGKPRMLVVGAVMRKLIHIVFGVLKSGTESPRII

SEQ ID NO: 300451 - protein, 353 aa, unidentified
MASVEVGRYRERRVLRQARMHKVDPEETPPSEAAHMASFLGIDLSKETFHAFLLSDRGEAKRVFPNTSKGFDQLTAWLKNRRAVDVHICMEATGAYWEALALYLHGLNHRISVVNPARIKAFAQSELLRTKTDAVDAALIARFSKSQDPEPWIPPPPEIRVLQALMRHYEHLKTTRAQQSVYAQSSEATIVTASIAAVIAALDEQIAQVERKIRQHFDDHPDLKRRRDLLTSIPGIGEATAGSILSEIPHLDRFQSAKAVAAFAGLSPRERRSGTSIHGRPRLCKTGNARVRKALYMPAMVALRFNPTLRVFADRLLSAGKHKRLVIGAVMRKLLVLAYGILRSGVAFDPNYA

SEQ ID NO: 300452 - protein, 313 aa, unidentified
MNKDTYIGIDVAKDTLDIHILPHEQRIHCTTSEAEVQNLIEQLETFKPKLIVLEATGGYGTTLAAELQDSDLPVAVVNPRQVRNFARALGKLAKTDRIDAEVLAMFAQRIRPPARGVGDESARKIKALVGRRRQLVDMRTAERNRRHRAMTSVVAASINAILETIDRQLEDTDTMIRQAVEASEVWLEKAEVLKSVPGLGDATTHVLLAELPELGKLNRREIASLVGVAPINRDSGTFRGRRMIGGGRTEVRKALYMATLVATRHNPVIRAYYLRLVESGKKKIVALVAAMRKLLTILNVMLKENQPWKPKIT

SEQ ID NO: 300453 - protein, 424 aa, unidentified
MKVTYQTCCGVDVHKSFLVATIVKTTGGIEPSYQKKRFSTFNSSILEFKQWLLDNDCHDVCMESTGKYWVPVFNLLEDKINVVIANPKWVKAVKGNKDDTKDSKWIGDLFRLGLVKGSYIPCKKVRILREYTRYRYKLVSCRSSEKNRYQNALTVCNVALDSVVSDIFGKSSMSIIDYLLEQSGTSINHEEIASKLLRSLKSKEDAVIESVEGYQMTDAPKYRVRLVRAHMDYITAEINDVDKMIENMIFSNPDFENAVQFLCTIPSVKRDSAITIISEIGTDMSQFGGSKRLCCWAGLTPGSNESAGKKKSVRITRAGVYLKPALVQCAHAAVKSDKSPYYKKKYESLVKRRGKKRAIIAIARMILTAIYQMLSTGEQWNPSDLYKIDMPVALVEKQKAKAIKQAKKLLQREGILPPDEPLAS

SEQ ID NO: 300454 - protein, 341 aa, unidentified
MKQFIRIGVDLAKNYFQVHAVANEGGPAVTRKLKRSKMHEFFAQIEPCLIGMEACGSAHYWARELETMGHEVLLMPPAYTKPYVKRGKNDAVDAEAICEAASRPGMRFVPIKSAEQQATLMLHKTRELLVKQQTMSVNALRSHLSEFGIVVAKGIGRVDELLELAESDTTLPEIAKAAVKILAQHLEGLDKSIDDLEKQIGRVHAHSEMSRLLDQVPGVGKIIASVISASVPDPSVFKSGRDFAAWLGLTPRQNSSGGKQTLGGITKQGNRYVRKSLVLGATSLLRVVGKRKGALRDWVVALLAKKPARLVTVALANKLARIVWAMMKTGERFRAELFAKA

SEQ ID NO: 300455 - protein, 373 aa, unidentified
MKKVRFLGLDVHAETIAVAIAEPDGEVRSLGIIPNREEPIRKLVKKLGPAEQLQACYEAGPTGYVLYWQLTALGLKCEVVAPTLVPVKAGDRVKTDRRDATKLARSYRAGDLTAVWVPNEEHEALRDLVRAREVAKQDQLRARNRLSKFLLRHGRRAPAGIKAWTQKFQEWIKEQVHFEQPAQEYTLLDYLHEVEHVADRIRRLEQAIAEAVKLAPPQMQEVIQSLQALRGIAQISAVTLVAELGEISRFEGARQLMGYSGAVPSEASSGKRIQRGAITKTGNTHLRRIAIEAAWAYRHRPAIGLALRKRQEGLSEEVKEIAWKAQHRLHKRYRTLSAAGKEKQKVITAVGRELLGFIWAIGVQVERKHKRVA

SEQ ID NO: 300456 - protein, 335 aa, unidentified
MYYVGLDVHYRTSTYCILDGHGREVKCETIRGHWPKLLEHLAMIRRPWTICFEATCGYGYLYRELSRMAHRVVVAHPGQLRLIFRAKRKNDRIDARKLAKLLFLDEVPQAYVPNQDVQNWRELIEYRRRTVDRQTTCKNAIRSLLRSHGIIAPKGLWTKKGLAWLCQMEMPTPAACLKRDLLREELTEAKRRVRTVTKGLDQIGERHPAVLLLRTIPGVGIRTAETVAAYIDHASRFVRSSQVAAYFGLIPCQDASAGANRLGHITRQGPGTARKYLVEAAWQGVYRSPTIRAYFQRVLHGRKERRKIALVATAHYLVRCMYAMLISGRPWREAA

SEQ ID NO: 300457 - protein, 382 aa, unidentified
MDTSRNWSRIIGLDLSKATFKGCILYGEGFVQRMNFSGEMKRDESGYVLIRNTIQDGDIVLLEAGSSSFSLARYLQKNSKASEVVVLNPAHLRIIWDSQRKNDKADAMKIACIARDMRPEACPRVTVPSEQEQSERSVIMHWVFLRKQETMLCNRFFALFNSLGYPEIDKGRLKKDSDFRIQTINELLSFNGLAFTDAVMLEQQISIVQQQLTIMEDRLRNICLDHPRQALAWLSIPGIGLINAATLIAYIGDGSRFTKPDQLMNYAGMVPKQNQSGTVDIKGKITKRGCTAIRRSIVQGAQVLIQLPPTCDITRFAYRKKKECPFNGKVAVAVANRMLRTGLALLHHNDLYRPMIEDGFDKLKRKLAGNKLQALVPYLTSK

SEQ ID NO: 300458 - protein, 357 aa, unidentified
MAEGSWVGLDVHARTTLAGVLDAASGELSLQRLQPRSEETSAWLLSLAQPVRVAYEAGPTGYGLARACARAGIACTVAAPSKIPRAPGDRVKTDRRDAERLARLLRLGELVAVRVPDPVGEAARDLVRAREDARGDLMRARHRLSKLLLRHGLVYEGSAWTRAHDTWLRRQRFAGRVLALAFDESYGAVAQAKGRRDALDQAIVELAGEPPFCEVVGRLCCLRGVSTLSALALSVELGEWERFRAESLGPFLGLVPSEDSSGERRRQGAITKTGNTHARRLLVEAAWHQRRPLRTSAALERRRQGQPAPVRARADESARRLHQRWHALEGRGKRRTIVAVAVARELAGHRWALATMK

SEQ ID NO: 300459 - protein, 355 aa, unidentified
MNSEKYIGLDVHQATICVAVMDPKGKVVMESILETKATTILEFLAGLRGTLSVTFEEGTWAAWLYDLLKPHVANLVVCNPRKNALLKHGNKSDKIDARKLADLLRLNDLEPVYHGETGVRMLRELARSYLTIVKDVSRVMSRLKAIYRSWAIPCAGRDVYYTRHRGEWLGKIPEAGSRRRAEQLYQQLDMLQPLRQQARRELLAESRKHTITAKLRQIPSLGPIRSALAVALIQTPHRFRTKRQLWTYSGLGLETRDSGEYHYVEGQVRRRKKQVFIRGLNKDHNHDLKGLFKAAATRASVQPGPFQDFYQRSLAKGIQPTMARLTLARKIAAITLTLWKKGENFDAEKLKAQAA

SEQ ID NO: 300460 - protein, 333 aa, unidentified
MNKITLIGIDTAKQVFHLVGVDGHGHYTWRKQLSRRRLLSSLAQVECCEVVLEACGASHHWARSIQALGHKVRLIAPQHVKAYRRGQKNDYRDAEAIISAALSPGMRFVGIKRVDQQAEQALHRVRSRLMRDRNAAANELRGLLGEYGVVFGRGFKPLREGARCFAETEEAQTLGLVELVNDVLEEISVLQGRMDYYERLIEQRVQADEISRRLREELNGVGKLSASALRVKVADVRDFGGGRQFAAYLGLAPGHSGTGGKVHIGHIKRGHDRYLRQLLIHGARSALCHLGDKQDPQSRWLRGLLERRGFNIASVALAHKNARQAWAIMAREQ

SEQ ID NO: 300461 - protein, 324 aa, unidentified
MQHEPLNDAARPVAGVDVSKDQLDLFIDTVDRRLRVANDDAGVAALVATLLEHRARLVVVEATGRYHRRLAAALLEAGIDVAVVNPQQVRAFARAAGKLEKTDRIDAEVLARFGRALGPRAAVKTPENQAVLSDLVSRRRALVQVRVAETNRAHDQLPKLAAAQSRKLLRLIEQQIEDLDREIARLIEADDDRANTAKLIDSVPGIGPGTANQLVVELPELGKLNRQEIAKLVGVAPLNCDSGRYRGQRKIRGGRGDVRACLYMAAFNARQECDRFRRYFQGLMARGKLYQVAMAACMRKLLVVLNRMVNTNTHWDQNLQGAPA

SEQ ID NO: 300462 - protein, 414 aa, unidentified
MEKERINIYHKRNTCFVGIDMHKDTHCAVVIDCWMNKLGEINFENRLSRYPAFVEDVRKICGTKEIVFGLEDTRGFGRNLAAYLVGRKFEVKHVNPAYTSAVRLANPIIYKDDSYDAYCVARVLRDMVDTLQDAKHEDIFWTIRQIVKRRDLIVKSNVMNKNQLHSQLAYSYPSYRKFFAIIDSKSALCFWENYPSPEYIWNTTPEEIYHTIKPVHQALKIQRIHEIISMIERDGDTRKDYQPERDFIVRNIVKDIRHNKELIAEIDGELRKLIPLTGYKLHTMPGIDLVTEAQIISEIGDINRFPDSDKLARFMGLAPVQFSSAGKGKDQRCRNGNRALNAIFHFLAIQMVAVSASGKPRHSVFREYFEQKVKEGKNKPQALVCVARRLVRIIYGMMKTKTEYRPYEKVDDKN

SEQ ID NO: 300463 - protein, 352 aa, unidentified
MHPQLTVSIRNEAGDVVLRRQVSTEWNRVRAFFDELRRFAEPEGGFVAIVEVCGFNDWLLKMLAEYGCRETILIQVEKRSKKKTDRRDAHQLSGLLWINRTRLLAGQRIEGVRRVQPPTEQQAEDRQLTVLRQRLGQLRTRTINRIKHLLRKHNLEQEQPAKGLATKRTRKWLAALLLEPFDRLEMNLLLAQWTVWDEQIETLETEIKKRQAENATAALVATIPGCAAYGSLALAARIGSIERFPRPASLANYWGLTPGCRNSGEATDRLGSITKQGSAMARFILGQLVMHVLRRDPWMKAWYGRIKRRRGSKIARVAVMRRLATVIWHMVKYNEPYAIDGPPRRRLAVSAA

SEQ ID NO: 300464 - protein, 412 aa, unidentified
MEVVYARCAGLDVHKKKILACVRVANQRGSVERQVKTFGTTTGDLMVMSDWLRSHAVTHVAMESTGIFWKPIYAILEGTFTLLVVNAAHIKAVPGRKTDVRDCEWIADLLAHGLLKGGFIPPVEIRDLRDLTRYRTSLVNERTREVNRLHKLLETANIKLTSVATDVMGVSAQAMLKSLLEGTTDPDVLADLAKGVLRKKLPELRKALEGRFTPHHRLLLGTILAHIDFLDETIIALGKDITAYMAPFQREAELLDEVLGISVRVAETIISEIGVNMDSFPSEKHLASWVAICPGNNESAGKHKSGKTRKGNPYLRRVLTEAANACGNSKNSYLGARYQRLAKRRGRKKAIVAVAHSILIIAYHILKYKTPYYDLGPNYFDKLNKQHLVRYHQKRLQSLGFKVTIETMEEAA

SEQ ID NO: 300465 - protein, 325 aa, unidentified
MIDVDLIYVGIDVSKANLDVCVGVMGSVSRLNNDEAGRDALCRMLKPLKVGLVVLEATGGYEFACAAALQSAGVPVAIINPRQARDFARAMGRLAKTDRIDAQGLAHLAQVWSARPDAAHLVKRLPDAQQQRLAALVSRRRQLVQMRTMEGNHLGVAHRSAHKSIKAVIKSLETQIRRIEADLAAHLKLHHADVSKLLSDVKGIGAATVAILMAELPELGTLTGRQVSALAGVAPYNHDSGRLKGKRCISGGRATLRTALYMATLAATRFNPLIRTFYQRLLAAGKPKKVALVACMRKLLTILNAIVKSGSPWNENLHTQEAKNA

SEQ ID NO: 300466 - protein, 318 aa, unidentified
MNIIGLDISKDTIDATLHKTNGSIHYIKFKNNDDGLKQFRLWIKGNRIRKAYIGMEATGIYYEKAADMLSSYYTVYVINPLKIKDYGKSRFNRTKTNKADSNLIADYIKRHQDTLIPYQIPKNKALQKLINLKNQLQQHQKQIKNRLHSTEEDFIRNIHQDLIDTIQDKMEQVKIAISEQIKKQTDNNHYRNLQTIPSIGKDTASVLYAQLTEKHFKTANQFVSYAGLSPAIIQSGTSVRGRGRLSRYGNRRLKSTLYMPALCAYRFNAFPKLINNLKKAGKPKMVIIVAIMRKLAKLAYYIVKTGQPYDAERHRLNQ

SEQ ID NO: 300467 - protein, 351 aa, unidentified
MSEQYAGRQFVGVDLHRRRSVIVRMAESGERLEMVRIVNDPERLAAVMTRAGEAPEVVLEATYGWYWAADALAELGAHVHLAHPLGVKAFEYRRVKNDERDAADLADLLRMGRLPEAWIAPPATRELHELVRHRAKLVALRAHCKAQVHAVLAKCGVQVPMSDLFGLEGLALLERVTLPAVYRARVTSLRRLIEALEFEIELFAGMARARLARDPGYTAIRVIPGIGGVLAAVFVAEIGEVSRFPGPTQLASWAGLTPRHRESDTHVHRGRITKQGSRLVRWAAVESVQVLPAHTRIGAIRERVAARRGRNIGVVAAAREQLELVYYGLRDHTIRAPLHRPPAAPARTAAA

SEQ ID NO: 300468 - protein, 415 aa, unidentified
MALKIVYKICCGIDVHKTFVVACIASTNDKGITSYESHRFSTYTSGLKTLLQWLLDRNCKDVCMESTSKYWIPVYNILEKGCSIVLAHPKYVKAIRGKKTDKKDAKWIADLFKHDLVAGSFMPPSDIRQLRDLMRYRFKLTCFKSSEKNRLQNCLTVSNIQLGNVVSDTFGKSAQAILDKLLENPADTSFDLEPLVYKSLKKKLPELRDAIDGFITPEQAGKLKIIKDHYDNLESRKAELEELILALAAPYQQELAILQTAPGISSDFTAIGIISEIGTNMEAFPSAKHLCSWAGLTPTNNESAGKKKSVRVSKAGCYIKPLLVQCANAVIKSTKHPEMRNRYLRLKKRRGHKKAIIAIARMLLTALYHMLKNGENYNAELYQKSDLLPVDREITVEQALMIARNQGYKIKSATA

SEQ ID NO: 300469 - protein, 318 aa, unidentified
MNSPSMTVGIDVSKQRLDFARFPQGDTFSVAYTDTGLAKLLKRLRGWSPQIILLEASGGYEYGVVAALVAGGLTPVLINPRQVRDFARSLGILAKTDKIDAKVLAEFAFRLQPEPRPLPTAQQQELNHLLSRRRQLLEMIQMECNRREVSPFLRIRQSIDHTLDSLRRQLTDLEREIDDFFNQSPLWVQQDALLRTVPGIGPQTVLSLQAWLPELGALNRHQIAALVGLAPFNRDSGVLRGRRMIRGGRHKVRQALYMATLSAVRYNPVIKALFERLAGQSGKPGKVALVACMRKLLIMLNAMVKNQTPWRPMTPLTS

SEQ ID NO: 300470 - protein, 358 aa, unidentified
MEAGTSKLLDFSGQNIYVGMDVHQKSWKIHLYSDEFELKAFSQQPGVNQLSSYLHSHYPGASYLLAYEAGFSGFWIQRAFAAKGINCKVVHAADVPTNNREQLRKTDKVDSKKIAKGLKNGELNFIHVPDIELELDRQLIRSRSQIVQDATRIKNRIKSLLKLHGIVIPVIYKEGNWSKGFVSWLLEIDFKNTSGRLAMQTQVDEFRFLEEKKKSLEAAVKDLSLTSRYSTNARLLQTIPSIGLLTSMVLLTEIGDINRFKRIDELCSYCGIVPNCHSSGESENIGSLSRRGNSAIKKMLIECAWIAVKKDPALLQYYKLQLVRMTGQKAIIKVARKLLSRIRYVLMTQNEYVLGVIE

SEQ ID NO: 300471 - protein, 444 aa, unidentified
MVCSGMILIREVADAPVIMGISKPAGLKSPCGEVKIVNPLFVGIDVSSRSNVAYLMKPDGSKHSSFSVQNNLGGAKMLSERIVSALSSMRLSDVVIGLEATSIYGNNLVYALREDGSLSRFQRKIHVLNPKQVKKFKEAYPDLPKNDFVDAFVIADHLRFGRIAKEVYMDDYRYQALRTLTRARFDVIQNLTREKQRFANYLFLKCSGIAQEKDIQNTSATTIALMEHFETVDDLANTDLDELTDFIAQAGRGRFVDPDATARAVRAAAKGSYRLPKTVNDTVNQAMSVSIASMRALKEQVKVLDKAIEQQLEIIPNTLTSIPGIGKVYSAGIIAEIGDIHRFDSQASVAKFAGLVWTQYQSGEFEAEHSRMIKSGNRYLRYYLLEAANSVRRCDSEFRRYYDLKFKEVNKYQHKRALALTARKLVRLVFRLLKDNRLYIPSEG

SEQ ID NO: 300472 - protein, 368 aa, unidentified
MAISMTYVGLDVHQETTRIVILPDQGLLPLDAITLPTRARELTRYLQRWASQYPLQCFYEASSCGYVPYRWLTAAGVPCTVVAPSKIPRAPGDRVKTDQRDARALAVQGRTGGLTAVHVPTPEEEAVRSLARCREARHRDVVAARHRVLRFLQTRGSVYPGPGKRWTQAHWRWLRARTFADLDEWTYQEYLTDLDYRVSREAESMRRLLTVARSDHYLAAVGALCCFRGIAELTAITLLAETIDFRRFGTAPGYMCYLGLTCAEDSSGPRRRLGGITKAGNPRCRRVLVEAAWHARHKPVVSVVLKKRQQGQPPEIVALAWKAQQRLHARYWRVEARAGSRRAAVAVARELSGFVWAAMTLLAERPAA

SEQ ID NO: 300473 - protein, 431 aa, unidentified
MFIVGIDVAKRNHEVTVITSAGQVVCKGFRISNTCTGYNRMMERLGKLTNLKSQFIFAMESTAHYWLALYTRLKKDGHQVVILNPIQTHTMREMFLRKSKTDAKDSLVIAEVIRFGRYAASDVPQEKLLALKELCRNRAYLMDMASDLKRKTVAILDRVFPEYETLFDSVFCKTSLAVLAKYPMPDKLSRAQLGKLTEVLQKSSNGRFGEWKAREIKELAHGSFGVADCEGVYSTLIQLFLEQIHTLLETCSSLERQINELLLQFDTTLTTIPGVGTLLAATILSEIGDISRFSSADKLAAYIGVDPAVNQSGEFVGSHVHMSKRGSPYLRRAVWMASMIAVQRDPMFKAYYEKKASEGLRYMNIIGHVTKKMTAVIYAIMRDNKAYVPVMPVVARNGGALSLCPGPLKVGPAFCTVFHLASIHFTCIFFA

SEQ ID NO: 300474 - protein, 346 aa, unidentified
MFYAGLDLSRKRLDFHLLDAEGATVEVGAAPPDADGLRGLTQRLDRHAAPIRAAIESMNGARFVHDQLERAGWQVEIADAQKVKGLAPLACKTDRIDAWVLAELSRRELVPAIWLPDPHVRAERERARWRLHLVRHRSSLKQRVHAVLLAHGKPCPVSDLFGVSGRELLARLALPEPWCGNVQASLRLIDELDREIDNCESELRQLGADHRYVPLLLTIPGIGWVLAYTIAAELGDIDRFPSPRKLAGYTGLCPRVYQSGETDRRGPLAKQGPKYLRWALVEAATHASTHPAYRERYQRTKARVGKQRGAKVAQVDLARRLAEAIWHMLTRNQPFAPAGATDPLAA

SEQ ID NO: 300475 - protein, 356 aa, unidentified
MTKITANFENQTIYVGLDVHKRSWNAGIFLGDMFVKNIHQQPSPEVLYNYLTKQFPGASYQCAYESGKFGYWIQRQLSSLGITCLVVNPADIPSSHKDEVYKTDSRDSRGIGQALAKGQLRGIYIPPLHQEADRNLVLQRKKIWRDLVRCKNRVKGFLDYNGVDLPEKFDNPNWSRNFITWLLSLAFPFESTSRTLQYQVREVELLRKELLAISNDIRKLMRSAQYKKLYYLLRSVTGIGPLTAASLLTEIGDMRRFPNFYHLNSFIGLMPMEHSSGEKQVRFNLTVRKHRQLRSDLIECAWAAKRNDPALALYYSEQISRGINGKKAIVKVARKLLSRIRYVWLTEQPYKTSIVK

SEQ ID NO: 300476 - protein, 353 aa, unidentified
MTIVSQIIDFVIGVDTHAKTHTFAVTAASGQALAQRPFPVTSAGFTRAQEWVARITSNDPSLLWVVEGASTYGATLVESLHQAGHLVVEAPPVPKGLRAGKGKSDPIDAALIAAATLPLDVSRLRHPRSDNGVRATIQVLITARDQMNTQRTAAVNALTALLRIVGLGVDARSKLSLTQIRHVAAWRTRDEGTYLMIARAQAVRLAKQITSLHTQLDTNEKLIKQLVTLSPAAGLLDMKGIGPITAAVAFTVWSHHGRVRSEAAFASIAGVNPLPASSGNTTRHRLNRGGDRRLNHALHMATVTRMRVHPETIAYVARRKAEGLTKPEIRRCLKRYLARHIYRALNAAAAATI

SEQ ID NO: 300477 - protein, 356 aa, unidentified
MEKAYDGRQIVGMDLHRRRSVLVRMTEDGRRLGTARITNSPQELRKEIARAGKHPKVVLEATYGWYWAADTLAAAGAEVHLAHPLGVRAFSYRRVKNDERDSADLADLLRMGRLPEAWIAPHEVRELRELTRYRIKLVRLRTSCKDQVHGVLAKLGVPVTCSDIFGTAGSAWLDALRLPQPYAGKVTSLRHLAGELTAEITMLSQVIASLLASDRGCQVIQQLPGIGPVLAAVIVAEIGDVTRFKNAGQLCSWAGLTPRHRESDVKVARGHVTKQGSRLLRWALIEAIQRIPRDCVIGGVKDAIIARRGKQARNIAKVAAARRLLTLVFYGMRDGQIRCLSSPPAGPAATQAAQEA

SEQ ID NO: 300478 - protein, 467 aa, unidentified
MARKSQNFKRKHRKRQPRSLKTVQPNAAGIDLGSREHWVAGPPLPNATPNVKSFGTTTPQLLRLADWLEQQQIVTVAMESTGVYWIPLFEILDSRGFEVHLVNARQLSRVPGRKTDMIDCQWLQLLHACGLLRGSFRPGDSICRLRALIRERNTVVEQRSDWVRRMQKSLDQMNVCVHHAVSDITGVTGMAIIRAIVDGERDPQALASLRDRRCRKSKEQIVEELTGNWRPEHLFNLKQSLKVYDQLCAVVADYDAEILNYIESLQPPEDIDSSAPPPSSKAKASKFITKGQEPLRQALYRMSGFDLTMIDGIGVDTAAVVISELGPDFSTFTDESHFVSYLRLAPNISISSGKKVAGKFKSTTCTRVGAALRMAASTLRNSKTALGAYYRRISWRKGASVAVFATARKLAQLIYRLVRYGHSYIDVGADAYEARFTQRRLTSYARALKDMGFKIEPLTASMTVGAL

SEQ ID NO: 300479 - protein, 338 aa, unidentified
MKLKRVGVDLAKQVFQIHGVDSHEQVKCRKQLKRGQMLSFFRQLEPCLVAMEACGSSHYWAREFSALGHQVKLIAPQFVKPYVKSGKNDANDAEAICEAASRPNMRFVPIKSAEQQAGLSLHRIRSRLIRARTALANEIRGLLAEFGLIEPVRGVTATRRLLQASLETADNGLPGKMRRLLRELQNELQEHDARLSRLDELLQQEAREDERVKRLLQIEGVGVISATALVSAVGDARHFNSARQFAAWLGLVPSQHSSGGKTRLGSISKRGDTYLRTLLIHGARAALNACKDKTDKRSCWVQQLQCRRNTNIATVALANKNARIVWAILSRGERYQLG

SEQ ID NO: 300480 - protein, 448 aa, unidentified
MVSINSTTSLSPHLCVILCSLKTKRARPWLAGKRQHEQEYTPMEENRKRYIGLDVHKHYLVALGVDADLNVVLPMRRVELSRLESWMKKNLTKQDEVALEMTTNTWQLYDELMEYAGKVTVVHPPHVALITRSQVMNDKIAASILARLLAKGLLVGIWAPPQEVRELRGLVAQRQKMTRLATQAKNRLHAVIQRHHLKPPAGNPFAKTNNDWWQALKLGKLEKLNIQSDLETLQFAGQQEARAEKEMTLIAAEDENIGRLMHMPGFGVITAVTVYAAIGDIRRFEDADHLVGYAGMGARVHESGMSSRSGKITKAGRRDLRVAMVEAAHVVANSHPHWKAELARLQPRIGYNRAIVAIARKLLITVWFVLQGKADKYAEPKAVAQKMLKFAYSVGKANRAGKTAAQFARERLDKLQMGEELASIPWGAKKPIPLPPSKLKQRSDVPNR

SEQ ID NO: 300481 - protein, 372 aa, unidentified
MTSIIYVGMDVHTTNYTLCCYSMEDDRFFAEAQVEPDAKNILKYLARIEKQQSRDCRIVCGYEAGCLGYSLYHQLHAHGIDCVILAPTTMMTKPGKRIKTDRRDARLISKCLAFHTYSPVYIPTEVDDAVKEYIRMRDDANSALARVKQQIIAFCIRHGKIHDGKSYWTNKHLEWLSNLDLGNKILSEVLQEYLIRYYQLREQVDMYDMRINELAQAEPYRQKVEKLGCFRGIAAHTALSFCVEVGDFRRFATAQQFASYLGLVPGECSSGDKQQYTGITKAGNSHLRKLLVETAQVFGRSATKSGKSAALKERQAKCDSLTVAYADKANARLKKKYFKIAMRSKVNIAKTAVAREMACFIWGMMTDNISCA

SEQ ID NO: 300482 - protein, 407 aa, unidentified
MDVLHPRCAGLDVHAANVVACVRIAAGATVTYEHRTVSTTTRGLLELADWLKARGCTHVAMEATGVYWKPVWHVLEGHFTLTLANAMHIRNIPGRKSDKNDATWIADLLALGLIRSSFVPPSPIQDLRDLTRTRKQLVREIARHTQRIQKTLEDANLKLTEVVSDILGVSGRAILTALVAGETDPERLTDLTHGRLKASRSALVDALHGRITAHHRFMIQLHLTQIAALETAVTHLEVRIGVALEPFRAAVSLLTTMPALKATSAAVVVAEIGDDMSKFPSAGHLLSWAGLCPRLDESAGKRRSTRTRQGAPWLKTTLVQIAWAAARKKDSYFHAQFLRLKSRRGPKKAIVAVAASMLTDAYYMLRDGVEFHDLGDQYFVQRDKERLTKRLLQRLHELGVEVEVKAA

SEQ ID NO: 300483 - protein, 442 aa, unidentified
MSTIHPDAAGLDVGSTFHVVAVPSDRDDQPVRTFRTFTGDLHHLAEWLQQVGITTVAMESTGVYWIPVFEILEACGFEVLLVNARHVKNVPGRKTDVNDAQWLQQLHQYGLLRGSFRPREGVVRLRAYLRHRERLVDDAASHIQRMQKALMQMNVQLHHVVSDITGLTGLRIIRAIVSGNHTPEALAAFRDIRCHASEATIREALIGNYRPEHVFALRHALEFYDVLQTKIGECDVEIEAVLKMLNDARPAPTDPLPSVRHAKARNEPRFEARPALYTLLGADLTQIHGFGPYTVLRLVGECGDDMRKWPTDKHFTSRLSLAPGNKISGGHLLSSKTRRSANRAAALLRIAAVNVGRTETALGAFYRRLAARIGKAKAVTATARKLAVLFYRALRFGLAYVDPGVSHYEARYRQRVIHNLRRRARDFGFSLVADTAPSVGVS

SEQ ID NO: 300484 - protein, 412 aa, unidentified
MQVIHRVCCGIDVHAKMLVACLILANGEKQKRTFSTMTAELLQLRDWLVAVQCTQVAIESTGVYWKPVFNILEDALTVILINPEHAQALRGRKTDVKDAEWLADLLRHGLLQPSFIPPPVIRELRELTRYRDSVVREQSSVANRIQKLLESGNLKLGQVASDALGVSGRMILKALAKGESDPRKLAALARGKLKEKSLSLEQALQGRLTVNQRFVLGELLSRWEQLEAADARVTGEIDKYVQANPKLARAREQLDTIPGIGPRVAEVIMAEIGIEMAAVFADAAHLASWAGICPGNKATGGKRLSGRTRKGNTYLRSALVQAAWGASLKKHCYLSSQFQRLVKRLGRKKALVAVGHSLLVIIFHVLQNDQSYTELGGDYFDRRHVEQQRDYYVRRLQMLGLKVTLEELPQAA

SEQ ID NO: 300485 - protein, 372 aa, unidentified
MNETTTVYVGLDVDAKFIFVAMQKPDGSKPIEWRIAHETRAIKKLAKRLLKASDGCGLHVCYEAGPTGYALQRMLQEAGVLCDVIAPSLIPKKPGERVKTDRRDAIKLVEYLKTGHLTVVHPPTEADESVRDLVRAREAGVEDRTRCRHRVGKFLLRQGVRWTIGRRAWTQVHRTWLHGLSFEQPESQLVFDSYMLALAQTEDRVEDLEAALESVAATDPYREPVGWLCCFRGIKTVTAMTIITELHGFERFHSPTQLMSYLGLTPSESTTGGRQHQGSITKAGNAHVRRVLVESAWHYRHKPITGRALRKRREGQPGWAVAIADKAQRRLCKRFAHLAGRGKELNKVTVAVGRELVGFIWVMLSHSKAETA

SEQ ID NO: 300486 - protein, 328 aa, unidentified
MFYLGMDVAKAKLDCCLLLDEISGKRKTKVVSNTQSGCVDLLAWIAKQNISPEALHVVMEATGVYHEQAARALADAGVTVSIVNPSQVKDFGRGLAVRTKTDGVDSFVLARYGALLKPAAWTPPSPEARMLQALLARREAIAQDLQRERNRQEKAEATDTPAQIRQSLADSIVFLVKQLEQLQQDIDGHIDRNSGLKDDLALLQTIPAVGPQVGSNMLSVMHSHEFGSAEQLAAYLGLVPVERQSGSSVLGRARLSKAGPARIRAILYMAAIVATRYNPHVKAVYVRLLAQGKSKMSALGAAMRKLVHLCYGVIKTRKPYRPDYAKIT

SEQ ID NO: 300487 - protein, 370 aa, unidentified
MVEKTVVQLGSSHPFLQEPEQVARASSPDVQEWVNMEVGDPMMANGEAVQGQTAKGDLGGYVGIDISKVNLDVVHRPSRKVWQFTNDQPGLLLLVARLQELQPELIVMEATGGIEVPVSAVLAEAGLPIAIVNPRQVRNFARAIGKMAKTDRIDAEVIARFAEVVHPERRALPEEAARDLGVLLARRRQLVEMLVAEKNRLHSAVVRVRQPILEHIAWLGSAIKSLDQQIDELIKSSPIWRGKDDLLRSVPGIGPTVSTTLLIELPELGTLTRQEIAALAGVAPFNRDSGRYRGKRKIVGGRAPVRSALYMAALVGTRYNPAIQQFYQRLIAAGKLKKVALVACMRKLLTILNAMLKSEQTWNADYASTH

SEQ ID NO: 300488 - protein, 374 aa, unidentified
MENTITYVAMDTHKKEHKVALSSPDGKQPVEFVIKNTVVDIRKLVNKVKKLASEEVRFCYEAGVCGFTLKRRIEALGCQCAVIAPSLTPRKPGEKIKTDRRDAKKLLNLFKAGLLTEVHAPDPQQEAARELTRCRQTAQENLKRISHQLVKLLVRHGYVYADGNHWTQKHFRWLRSLEFDQPLLRDTFDNYLTEMQHCIQRRESLDRDVEKLALSEPYKEIVGMLCCIHGIDTLTSITTITEIFDFGRFSSPSELMSYLGLTPSEDSSGETQHRGPITRTGNKRVRRLLVEASWHYRHPYNVAGKALKRRRKNQPQWAINIADKAGRRLRKRYWYLVNHGKSPCKANVAIARELAGFIWAIFKEYRLRSETKAA

SEQ ID NO: 300489 - protein, 423 aa, unidentified
MKLECPSKHKFSAYIGLDWADAKHDICLQAADSESIEVTVLKHRPEAIETWARALRQRFKGKPIAIALELFKGPIVYALRKYDFFVLFPVNPSTLAKYREIWTHSGAKDDPTDAEFALELLIKHFEKLKPLNPQSAEMRALEQLVESRRCLVNDQTRITNRLTSTLKNYFPQPLEWFNDKDTDLFCDFLERWPTLKSVQLARRSTLERFFREHNVRYPDVIEQRIQAIKSATALTADEGVIAPNALFVQSLVTQLRVTLRAIETFDKEIGQRAQAHPDFAIFDSFPAAGPVFASRLLTAFGEQRERYTAPEEIQKYAGIAPVTERSGNSCWIHWRWQCPTFLRQTFVEWAALTIPRSFWARAYYEQQREKGKSHQAAVRGLAFKWMRILYRCWQNRTQYNESVYLNNLKKRGSPLIHRLANSP

SEQ ID NO: 300490 - protein, 339 aa, unidentified
MDTLYGGIDLHSNNNVVVVTNGADRVLYRKRLRNDLDEVLRALSPFADDLSGLVVESTYNWYWLVDGLMAHDYRVHLANTGAIQQYSGLKYGDDASDARWLATLLRLGILPEGYIYPKEERPVRDLLRKRAYLVRQRTSNILSIKNLFARNTGYQFSAAGVKRLTDADVDELLPNADLALAVKSSVAVMQCLDTQIKALEKVALRRVRLREDFKNLLTVSGIGKVLGLTIMLETGDIHRFADASHFASYARCVGSARMSNGKKKGKGNTKNGNKYLGWAFIEAATFAVRYNDTIERYYQRKKAKVHLMVAKKTVAHKLARACYCMLRDQTTFDADKAFT

SEQ ID NO: 300491 - protein, 375 aa, unidentified
MSTVVIGIDPHKASHTAVAVDEHEHPLGQLRVRASAVQAEQLLDWARQWPQHSWAIENASGLGYLLAQQLAGAGEHVVDVQPKLAARVRLLATAASTKNDPNDARSVAIVALRSTGLPQVSSDDHAAVMKVWVRRRRHLSRTRTKLANQLHAVLCELVPGGFPRQISAPQAAVVLESLQPTTAAELARTELAHDILQDLRRVDSQLHEVGKRLAAIVLASRTSLTAIFGVGPVVAATVIAITGDVHRFPTADRFAAYAGTAPIEVSSGPHKVFRLSRRGNRQLNSAIHTAAVSQIRYRHSEGRAYYDRKIAEGKSPRMALRALKRRITNTVYNAMIADAGHRDQHTSQGAPDRRRTAPPAAEVKAGRRPPAGQRP

SEQ ID NO: 300492 - protein, 377 aa, unidentified
MITHYIGIDAHTTNYTLSTASDFEEKPYNTNKYDAKLHYILKYANALCKKDKIQKENILLGYEAGCLGFKLQRDLNKEGFNCVVIAPSSIPGTEMNRKRNKKTDYRDAEAIAKALRNNDYSAVATPDEQDEAIRDYIHEREAQKKTLKAIKQRIGALCNRQGFHYEDGGYWTKKHLDWLKNLAFPNEFFREVLDSLLLEYEHVTEKIETMDKRIEKFAEMDKYRESVQKLVCFKGIKTLTALAVIVEVGDFARFMKAKNFVAFLGLSVGEQSSSTDHNQGGITKQGNCFIRRLLTEAAQCFSRVTSSKSKALKERQEGNSEEVIAYADKGNERLRKRYYHLIIHNMKNPNKAKTAVARELACFIWGMMTGNIHTVLS

SEQ ID NO: 300493 - protein, 318 aa, unidentified
MSNETCVGIDVSKEKLDVAIGSSGEVWPVTNDEAGHAELRARLAAASARLVVLEASGGYEAIVAGTLWDAGFQVAVVNPRQVRDFARGMGKLAKTDQIDARVLALFGEKVPLEVRAPVDAEAKELQGMVLRRRQLVEMLTMERNRRGLVAAGRARKSLDKHIAWLEEAVRRASDDIDQTVRKSPLWREQEDLLRSFKGIGPVSARTILVELPELGKLNRRKIAALVGVAPFNRDSGKFRGKRMIAGGRSQVRTVLYMAAVTAARSNPVIRSMYQRLLAAGKAKKVALIACLRKLLSILSAMVRDNARFAPRPAARTLA

SEQ ID NO: 300494 - protein, 351 aa, unidentified
MLIIGCDYHPDFQQIAWVDAETGECGERRLRHSDGEAERFYRDLKLKGVPVRVGMEATGHARWFERLLAELQQEIWVGDPGQIKATRVRKQKTDRRDAEHILKLMLENRFPRVWVPSPENHDLRQLLWHRHRLVQIRTRVMNQLQAVALNEGVRRKKGLWSGAGRAQLESFRLAPWATRRRRDLLELVDRLSPRISELSRAAEQEAERRPEVQRLMTHPGVGPLMALANVLIIGSPERFRCGKQIGSYLGFIPCEDSSAGHQRLGHISKQGNAPMRFLLVEAAQAAVRSDPDWRLRFVHLAMRRDHRIAKVAMARKLAVRLYWMWRKGWNYQELMKFGSHAGQPGYVDGLK

SEQ ID NO: 300495 - protein, 318 aa, unidentified
MNTKTKQNINVGVDTGKYQLDIYIRPLDIYFTVPNDDKGIKEAVKTIKKYKPERIVIEATGRLEMPFILACANANLPFTIANPIHVKRFAGAIGQRAKTDKLDAQLIAHYSEAIKPKLSQLKPDTMQAMSDLVTRRNQLLTMQTMEKNRLQIMPKALAMTIKPVLTLFNNQIKKIEEKIVKLIESCPEYQAKNTILQSMTGIGKIAAASIISNLPELGYINSKQVSSLIGVAPMNRESGRYKGHRKIQGGRPQVRTVLYMAMMSAMQSNPVFKVTYQRLLAAGKPKKVAIIACIRKMIVILNSMLRDGVMREAPKVNN

SEQ ID NO: 300496 - protein, 362 aa, unidentified
MLQVTRVEELWVAIDLAKSVLQVHVETQAGRVVTAKALRRERVLGWCRSSLPAGTVIAMEACGAAHHWARQLRALGFAPRILAAHLVEPFRRQGKRGKNDANDAAAICEASRRARIHTVPIKSAAQQGVLVVHRLRERYKSERTALINSMRGLCAEFGVVFPQGPEELRRRITDALEDASNELTALARQALQRAHEHWLHIEAQLAWCDERIAAHARDDERARAISRIPGIGPVTASALVATVEDFGQFRSAAQFGAWLGMTPSQDSSGGKTRLGRITKRGDVYLRTLLIQAAKSAVMTAHRRGDPISRWAAGLKDRLGWQKACVALGHKHARIVWAMLVRGRPFDAAHQSSFPAPCAAAAS

SEQ ID NO: 300497 - protein, 386 aa, unidentified
MMTMTRTIESTATAPSCSTCLLLAFELGERVWKLGFTTGLGQRPRMRQVPAGATDRVLDEIVRAKRRLKRPADTPVTSCYEAGREGWWLHRWLVAQGVTNHVVDSSSIEVNRRARRAKTDRLDLGGLLNLLARFVLGDARVWRVVREPSVAEEDARQLHRSWESVQQDRSRLINRLKGLLTTQGVRLRIDEEFPQRLAAARLWDGTPVPPELQQRALRVWAQLALLNQQRDELEGGRAALVPDANTPMDRYVRTLPTLRGIGPVGTWVLATEIFGWRAIRNRRELGALVGLVPAPYQSGDTNRDQGITRAGNRHVRRLMVQLAWSWVHYQPTSALTQWYRRRFGGGSKRLRRIGIVALARKLLIALWRYVEHGEIPEGAIVQSHAT

SEQ ID NO: 300498 - protein, 416 aa, unidentified
MTIFLEADTMSEFKNLVFVGIDPHKAEHVAIMIDHWGEVFFELTFPNQASGFETLLNHVNIHIPEGKTVVFGIEDTGGLGRSCAQWLTVRDKLVKGINPIMSSNKRNRQPHRSKTDQIDALAVAKVLITDYNQLPTVTVDEYYHALRQLANRREQLVKTSTRCKNQLHKLLHELYPNYKDFFSDPFGLTALAFWANYSHPSMLQGVGIKRLASFLKKHARNMSTAKAEEILSAVDKHQPLTIDDKMAIVVVKQIIEQLQQLQNHIVEMEQMIDEALLQSNSKLQTMPGVGPVVEITILSRVGPIEKFSSADKLARHAGIAPVDNSSGGTKRQRRSKSGDRRLNAAIHRIALNQISVDRNGVPKCPVALEYYERKISEGKTKLSALTCLKRRLCDIIYAMLRDKTAYREPDCRFPAA

SEQ ID NO: 300499 - protein, 344 aa, unidentified
MKYMGIDLHKQYFIATLMNQQGKVISKDRVSTDRLAISEYLKGVNGDGELKVAVEACYSLGYFYDEIKNKADEVKVAHPLKTRAIAEARIKTDSIDSEVLAHLLRADLIPEAYVPDFKTRDKKHLLRYRSSLTKMRTMLKNMVHVVLTRNHIEEPYFNKISDKFGKMGKAYMREFKLRGSDTEILNHYLDLIEDIGEKIKHVEQRIRETCRKDKTCKLLESIPGIGEILAVLIRYEIDNIERFLTAKKLCSYAGLVPSTYSSGGKTYQGKITKHGNKWLRWALTEAAQRAIINDLWLRGHYERVAKRRGKKKARIAVARKLLEIIYKVWMEKRPYYEKPVAVAL

SEQ ID NO: 300500 - protein, 347 aa, unidentified
MRFYTQQHQFYCGIDLHARTMYLCIMNRDGEILVHRNMPAGPAPFLKAIAPYREDVVVCVECIFTWYWLADLCAREGLPFVLGHALYMKAIHGGKAKNDKIDSQKIAVLLRGGMLPQAYVYPAAMRATRDLLRRRLHLTRKRAELLAHIQNTNRQYNLPEIGQKIAYKANRGGVAERFPDPAVHKSVEVDLALIDFYDQLLRDVELTIVQTAKQHDAQALYRLQSVPGIGKILSLVLLYEIHDITRFSRGQDFVSYCRLVKCAKESAGKRYGTSGTKIGNAYLKWAFSEAAVLFLRNHPAGQKYLARLEKKHGKGKALTVLAHKLARAVYYMLKRDTVFDMQKFLNG

SEQ ID NO: 300501 - protein, 364 aa, unidentified
MENVRFVGLDVHADSIAIAVAEARGGEPSGLATIPNDTALLLKRLRRLGEVRCCYEAGPTGFGLHRDLVAAGIECVVVAPSLVPARAGDRVKTDRRDAVKLARFLRSGDLTEVYVPDEATEAIRDLERARDDAKRAERAARHQLGKFLLRHGRRSPVKTAWCRKHLEWIRTQHFEHPAQEAVLVDYLKAVEDLGERVARLTNSIGEMVEQWDRRPLVKALQTLRGVSAISAAIVVAELGDLSRFQTAPQLMGYLGLVPSESSSGETRKQGRITRTGNGHVRRILVESAWAYRFRPSVSDAIRLRSQGVSEEVKRIAWRAQERLCGRYRKLTARGKNKNRTVVAVARELAGFIWAIGRQPVLLAN

SEQ ID NO: 300502 - protein, 418 aa, unidentified
MQTELSQYTAIIGIDWADKKHDVCVQDMATGRRRSSQVRHRPEELDAWARSLHRRYGGPIAVALELSKGPIVSVLQKYDFFVLYPIDPSTLAYHRRTFTPSGAKDDPTDAECALKLLLTHSEHFKPLRPQSVEMRTLMVLVEHRRKLMHERVRLTNRLRNALKQYYPQALEWFDHIDTRLFCDFIQRWPSLEQVRRARRTTLEKFFREHNMNRKALLERRIEAIKSAMSLTDDAAVIVPYRMQALTLVTQLTVMLESIRQYDDEIAALAPQHPDYALFDALPGAGPSLAPRLLVGFGEQRQRFASAAEVQKCTGIAPVTERSGQSTWVHWRWQCPTFLRQTFVEWSAQTINKSYWAGLYYYQQRAKGSSHRAAVRALAFKWIRILYRCWKTRTPYDEARYLKALQERGSPLLKMAEAA

SEQ ID NO: 300503 - protein, 312 aa, unidentified
MTNQVFAGIDVGKEKLFVNLYPDTQVRDFPNTHSGLERLSRFLTKKGVGLVVMEASGGYERQPATELRACALSVAVVNPTYIRRFAQGMGTLAKTDTIDARLIAHFAFVKQPKPQAAKTAEEEELAALVERREQLVSLLSMEKNRLSHASDYSKSSIQNSIQFLAGQIDAIETNIKALVAKSPERQEKLRCMSSFIGVGDITAVTLLTEMPELGIESREHIAALAGVAPINRDSGKMKGRRRTYGGRARVRRTLYLAALSASKHNPIISVFYERLLAAGKEKKVALVACMHKILTILNAMLKKGEHFNPVSS

SEQ ID NO: 300504 - protein, 320 aa, unidentified
MICGVDISSASLAARIGHEGAAASFPNTASGIGALAAFCQAHQVELVAMEATGGYEKQSFALLSEQGLPVAIVNPRAVRQFASSMGRSEKTDAIDAGMIAWFAEVKKSRPLCLSPASQQHLRALVTRLRQLTEVRTAQLNQQRLITEPVVEASFKDLLSLIAKQVRDLEQKIAALIEADPLWRQLDQAFRTIKGVADRTVARLMAEMPEIGTLSNKTISKLAGVAPLANDSGKHQGKRRVRGGRATVREILFIVASVVARHEPDFIAFQQRLKAAGKPPKVIRIALAHKLLVRLNAKAREVRTKFQTSKPNHTIQEPITA

SEQ ID NO: 300505 - protein, 457 aa, unidentified
MKTIRLKKAKVNKSNDKMITMPTVNPHAAGIDLGSKSHFVCVAQDNVKEFGVFTSDLHAIAAHLKSYGVKTVAIESTGFYWRSIYLILLDYGFEVFLVNAAHLKNVKGHKTDVVDSRWLQLLHSIGLLSNSFQPDALTHELRTYTRHRKNMITDASHLISKMNKVLVLMNIQLHGVLRNITGVSGLKVIRAILQGERDPKVLSSLVSLRAKASREDIEKALTGDIRKEYLFELDQCFQLYNFYWQKIEEADKQIEAWLKDHVSNMPPNDGYKKPKNKNKGTNDPTFNVGKYVHRLTGGIELLDINGVGSNTILTLASETGLDMSKFPTAKHFASWLGFVPNRKITGGREISSHTRKKTNPLAKVIRDAANSTGNSKSKLGDFFRHLAYRKGRTAAIGATSRKIAVIIYKMLTEGKPYSYEYAQEQTEYMKVSKMKTILKTMDKFNISRDDLQLAWSM

SEQ ID NO: 300506 - protein, 354 aa, unidentified
MQEPLQHNSIDVFVGVDVGKGQHHAVALDRSGKRLYNKALPNDEAKLRALINELKAYGQLLFVVDQPATIGALPMAVARDEGVLVAYLPGLAMRRIADLHAGEAKTDARDAAIIAEAARSMPHTLRSLRLADEPLAELTMLCGFDDDLAAQVTQTSNRIRGLLTQIHPALERVLGPRLDHPAVLDLLERYPSPAALAETSEKTLANRLTKLAPRMGKRLAAEIVQALGEQTVVVPGTQAATVVMPRLAKQLAALLQQRDEVASEVERLVHAHPLYSVLTSMPGVGVRTAARLLTEVAHKTFASAAHLAAYAGLAPVTRRSGSSIRGEHPSRRGNKVLKRKAPQPSTHRAGTATL

SEQ ID NO: 300507 - protein, 338 aa, unidentified
MQFYAGIDLHSSNNYLAVIDADGKRVSKQKMPNEPGTILSKLDNFKKEVVGVVVESTFNWYWLVDLLGEAGYRVHLANPAAIQKYSGLKHVDDKHDAFWLAEMLRLRILPEGYIYPKEERPIRDLLRKRGHLVRLRTSLILSLQNIVSRNCGVRLSVNDAKRLKEDVIAPLLETNEDLALAGAISKETIDFLTRKIRSVESIVEQKVKLKEEYCHLLTIPGIGKILALTIMLETGPISRFPKVGNYVSYCRKVNSKWTSNDKAKGNKKNGNKYLAWAFSEGAELARRYDTQCRSWYNRKMQKTNFMVAHQALAHKLARAAYCIMKKEVAFTPENLFAI

SEQ ID NO: 300508 - protein, 387 aa, unidentified
MTVQSQVSAFIPRNYEIFAGLDVDKHSIAVTFTDHTKLLKSLRLPYSSEHLLNYARKHFPDRRLAFVYEAGPTGFGLYDDLMADGHPCLVVAPSMVPTAPGQRVKTNRLDSKKLSEGLRGGQLRSIHVPSPTYRQLRHLVQLRDTHVRQLTATKCRIKALLLYEGIAFPEAPAGGQWSARVLRQLEALPGAEAVRFKLNHLIGTLHFHFLSAAAVQKQIRRFCQNDPELRQVIGLLTSLPGVGWIVAAHLIARLGDWREITNVRQIAAFLGLVSSEHSTGDQENRGAITRSGDSRLRNKLIQSAWTTIGKDPELRAFYRRIYQRHPKKVAARKAIVAVARKLTTRIYAVLKQQRPFVLRPDSSSAPLTAEETAGPRGRLDAAQNEQP

SEQ ID NO: 300509 - protein, 399 aa, unidentified
MSMAELRVALDIGSKRHRVGIGSADGRILDEFEISHDRAGFEEFFRRVAAFEKRFELPVVVAMEGQGGWARPLDRMIQQKGYELLNVNNVKLARFKEIFPAPAKSDKIDTRKILQLIHMREVLPLAQTVLHRVGSTPVENEQLKRFTRRRRQLVDEKVRVVNRLQSDLYAVSPGLLEITGEVDNLWFLNLLTCGRDLAKLAGLRHATLLKIPGVGKAYAAKIKAWQQTATFADETAWVSEMVIADAQRILDLIAQIHAMEQRIEAIAASSEIASRIRSIVGFGPICSATLAGEFGNLDRFKAETSLALYSGMTRLNNSSGNSIGTKNTRQVNTHVKAAMMTATARHIDNVPESRAYYDKKRAEGKTHNQAVRALGRHLIRVIWSMITHQRDYVPSNQAA

SEQ ID NO: 300510 - protein, 413 aa, unidentified
MVLGIDVGSETHYARAFDYRGIEYSKKPFKFSNTEVGFATFKEWILDLKERHEKDKVVPGMEPTGHYWFNLGKFLQDNEMKPVLVNPHHVKKSKELDDNNPTKNDRKDPKVIAGLVREGRYMIPYLPDGVYADLRTASNIRFQLQAELTRIQNRISRWFNIYFPEYKTVYGKPDAKSGMLILKAAPLPEDILTLGIDGVNQIWRDAKLRAVGKARAKTLIEAAEHSIGSKEGTVSARMEIRMLLEDYESKNMRLQEVMVLIEELVKEIPMAEKLLEIKGVGIRTVSGFLAEVGDISRFNNPKELQKLAGLALVENSSGKHKGKTTISRRGRKRLRYLLFEVAMSLVAKNPEFRELHNYYTARRLNPLKKMQSLMAIAAKLIRVFYAMLTKDVDYDPKKMISDIKRPTVYLQAA

SEQ ID NO: 300511 - protein, 379 aa, unidentified
MKKTYYIGLDVHKESIAIAWTENGSRKTPTYWGECGGSNLAAERTLRKVAKKLGVKLQDLKVCYEAGPSGFVLARRLLQLGVECVVMSPSKTQRKPNEKIKTDKRDAINIAKLFRNGDITEVRIPPALDEAVRDVCRARTDASDDLARSKQRLNSFLLRNGIRYSGKARWTPAHLRYLRHLTLPDPVQNLVLEEYLQAIDSGYERVERLVERMKELLVDWEWEPVVRALMACKGFQEVAAMTLISELGDLRRFAHPRKLMAFLGLVPGEYTSGDKRRQNSITKCGNSHARWMLVECSQHYRKAPKIGAALSKRQDAQPKKVKELSWRMQHRLHRRYVKLKARGKRENKAIVAIARELSAFIWELQNKLNLPIPETTEAR

SEQ ID NO: 300512 - protein, 340 aa, unidentified
MVHVGVDLHKRVSQIAVLSANGEVTQHRLENDRLGVQRFFEQVPAPARVAIEASGTWWWLVDLLEQLGHQPVLSHPKQTRAIAAARLKNDRVDAERLALLLRGDLLPTVWIPSTAVREARELIRHRVSLVWERTGVKNRLLALLARRNLQPTSGQSWLTVRGQRELHALPLTPTPTAIVEDCLALRRLLDEQIRRLDQALIERWGDDARVRRLATIPGIGPFLAILVVLELGDIHRFPTAKHVASYIGLTPRVRASAERVRVGHISKEGNRLLRWALVVAATQAARRPGPLRTWARLVQRRKGAKVARVALARRLAEIIYQVWKEETDFFAVLRRGGVRG

SEQ ID NO: 300513 - protein, 381 aa, unidentified
MAEPILTAGGRAVGHCSEIFVGIDVAKARNAIAVADGERGGEVRFIGEVDASEESMRRVVKRLVAGCERAHFCYEAGPTGYGLHRLITTLGHSCIVVAPSLIPRKPGDRVKTNRRDAVGLARLLRAGELTAVWVPDEGHEAMRDLVRARAAAVETQRVHRQQVSSFMLKHSRVFPRPRAWTMRYLIWLQEQKFDHPAHQIALQEMVEAVRISKERVARLEAAIEEFLPQWSLAPVVHALQALRGVSLIVAVTFATEIGDLNRFESPRQLMAYLGLVPSERSTGDTVRRGSITKAGNGRVRHMLVESAWTYRHPPKVGKLKLYKLEQTSPKVREIAWKAQTRLTARYRTLSAKGKKTTVVCTAIARELVGFMWSIGRETRPA

SEQ ID NO: 300514 - protein, 342 aa, unidentified
MKIASIGIDIGKTTFHLVALDEHGSIVIRKKFSRKALLVYCANLPSSLIGMEACGGAHCLARLLRDQGHEVRLIPGQFVKAYRPANKNDYLDAEAIAEAVTRKKLRFVPIKTEDQLDLQGLHRVRERLVHNRTEVINQIRGFLLERGMTFHRGPQSLRKGMPDLLEDAEQNLTPQLRQLLAQLWQEWQYLDSQIEQISDAIAAVAESDARCRRLRTIPGIGPLVSTATVAAIGNGAAFRRGRDFAAWLGLVPKQRSTGGKARLLGITKRGNRYVRKLFVHGARAVLLRVKYDTGFGHWVQQLAARAPRNKVIVAIANKLARIAWVVLSSGNEYQHPPIAAVA

SEQ ID NO: 300515 - protein, 350 aa, unidentified
MVVVGADVHKRTHTFVAVDEVGRKLAEKTVTAITAGHAEMVMWARQRFGDDVVWAIEDCRHLSARLERDLLALGQKVVRVPPKLMAQSRASARTRGKSDPIDALAVARGFLREPDLPIASHDEISRELKLLVDRREVLVAQRTATINRLLWRVHELDPGHAPKPRSLDLAKHRRLLGQWLDTQTGIVAELARDELADITRLTETINTLATRIGARVRAVAPALLAMPGCGELTAAKLVGETAGVTRFKSEAAFARHAGVAPVPVWSGNTRGRVRMTRSGNRQLNAALHRIAVTQIRLDGVGQTYYRRRLTTGDSTPEALRCLKRRLARVVYGHLHTDHNNHHKPCQTAAA

SEQ ID NO: 300516 - protein, 384 aa, unidentified
MDSIMQEQSRVVVGGVDAHADAHHAAVLDERGVLWGSSAFPATSVGYRGLLGWLESFGMVAAVAVESTSSYAVGLTRYLCERGVRVVEVNQPHAYTRRRRGKSDPIDAEMAARRFLSGEAIGLPKQTDGVVESIRMLRVARNGAVKARTAALLQARDLIRTAPQDLREQLTVRKTLRAQLNLCGRWRPTSKLGCPTQAAKFALRTIARRVSDLEREIAGLDGQLAVLVKRTAPRTTSLLGVSTHNGGQLLVTAGQNIDRLTKESSFAALCAASPIKASSGKTHRHRCNPGGDRQGNRALHLIAVYRLKCCPRTQAYAHRRTQQGKSKAEIIRCLKRAIAREVYHALRADLADLTTPTPPPPKPPRYSTTIHCGNPGHGITRHRT

SEQ ID NO: 300517 - protein, 343 aa, unidentified
MEYYVGLDVSLKLTSICVVNQTGSIVQEGVVDSDPEAIASFVRSRAPGAARIGIETGPTTTWLWTELNRLGLPVICIDARHAKAVLKMQINKSDRNDAAGIARIMQTGWFKVVRVKDLDSHAVKALLASRALLVKIKRDLENQVRGLLKNLGLVIGRAKFNVFAVRAEELIDGRPELVAAVRPLLEARKAIEHQVDDLDCKVRKLARNDAQVRRFMTVPGVGPITALCFKATIDDPTRFKRSRSVGAYIGLTTRRHASGEIDWSGRISKCGDAMLRMYLFEAAGVLLTRVPKWSGLKAWGAKLTKRNGLRKAKVAVARKLAVILHRMWIDGTEFNWSTKKAAA

SEQ ID NO: 300518 - protein, 430 aa, unidentified
MTKPQLTPTQGILVAIDIGKTRNEVLIEIPGQARRRRLTVLNTRADYDRLIDLLSGLGQPVTCAFEATGNYHRPLAWRLLQAGFTVRLISSLALARTREALHNGWDKNDPKDAQVALHMLRIGASQHYHDPLAAGLNDIQEVSKTHEAISKAKTEVLHRILTHHLPLYFPEIGRFRHNSRSDWFFAFLDRFPTPGSITALSKEAFIAAAWGVVGRKVAKERLLGDIYETARASIGLPIPIDAPAVRLFRLVIAEARSLIEQRNALEAMAIELLHESPDYKLLCRIPGVGPITALTILAEAGDLRRFGHHRQFLKFCGLDLATHQSGAFRGQTKLSKYGNARLRRALWLAGQVAIRQKENSFRDKFERYIARDRHNADLRRKALTAITAKMARVVHAIIKSGADYRPFVEGPVPGGRTSLSMGREGATATL

SEQ ID NO: 300519 - protein, 416 aa, unidentified
MKKGQNTRGYERYMALDIHREYILVGAQNEEQDWVLTPRRVSLEKFPEWAKKNIHSGDIVVLETTTNVWTTYDIVAPLASRVLVANAAEVGEIVKARVKTDKEDIKRLLKLLIGGIVPEVWVPPMAVRELRAFVSYRGRLVTTSTAIRNRLQSLLHKHNLQLSETGLQDQAWWEAQKNVSSLEKLQIRQELALLQEVEKLKAAVDEELQRQSTSSTWGKPALQIMQLPGVGFVVAMTVLSAIGDISRFEHAKQLVGYAGIGAGVHDSGKTHKEKKITKKGRRELRWAMVEAGWRAIRMSPFWKAEYEKHLRRMRKPNQAIVVIARKLLIAIWHVLSKEETDIHASEEELAYKMLLLSWSLSEEVRRGLTYKQFAKYALMKLGVETDITRFVRRNVPRRLAPREEVLARMNELGLTA

SEQ ID NO: 300520 - protein, 370 aa, unidentified
MEHQHRQSDVKIKHYVAMDLHSDNVCVVIEDQDRRCVLKRKFPTRIKIILANLKPYSKSIEAIVVEATATWYWIVDGLKPVGYNVHLAHPAAIEDRSGKKRTNDFDDCFNLIRLLRNGDLRESYIYPKEERPIRDLMRKRSFFVKSRTQHMLNFMNMVSRNKGFKLSGNQIKQLTEKNLEDLFDHHFLLLSAEASISTLNHFTQQIGVLEKAILKVGRLKPEFNRVMAFPGIGKTIGLTIAYELGTLSRFAGKGDYLSYCRCVDSKRLSNGKKKGENNRKNGNKYLSWAYVEAANFAKRYCPYARAYFNHKLKESGIYTVAIKALASKIARATYYMMTREANYDPEKVFGNYKAQAQAFIKKSKSRDSKP

SEQ ID NO: 300521 - protein, 350 aa, unidentified
MSIVDAGVVTAVTGGVDTHVDFHVAAALDQIGGLLGVESFEVSEAGYSGLLDWLESFGRVAKVGVEGTGSYGAGLFRFLHRGGVEVVEVDRPDRQLRHREGKSDPTDAVAAARAALSGKATGRPKLRNGPVEQMRILTVARRSARDQRIQTLNQIRHLVFCAPETIRERFIGRYQVTMLQEMAALRPRPGGDRVVHVTLTTLRDLARRIRQLDTETKRISGQLKTLVSEVAPSLLDVHGLGPDGAAVLLVAAGDNPDRIRSEAAWAHLCGVAPIPASSGKTIRHRLNRGGNRQANSVLYQIVICRMSTDPRTRAYVQRRRAEGCTTGEIVRILKRYVAREIYKHLPRDTT

SEQ ID NO: 300522 - protein, 456 aa, unidentified
MKRKQISLEVVNPNAAGIDIGSRSHWVAVGQNAQDVKEFGVYSQDHQELCEWLKKHEVTTIAMESTGTYWQNIFSSLIVYGFEVILVNGRQTKNIKGKKTDIKDCQWIQKLHTLGLLSSSFLPDSTTAIIRTYSRHRQNIIKQASSTVLKMQKYLRLMNMRLDVVVKDIVGLTGTKIITAFIEGEKSGKKLAENRHYNCRKSTLEIGKALQYNGRGDYFFALKQEWETYLHLHKQKDEVDVQIKKYLENIIDSDDDKKQHIASNKPYKRKNKNAIKGVDMNQLSYQYFEGIDLMAIEGVNDATILTIISEIGLEGIKKFESAKQFSSWLRLAPNNKISGGKVLSRHLPKGSSRLKRAFRLAANTIGNLKEGHLNDFFKRINYKKGRATAISATARKLAVIVWNMLAKGQDYNPPKEYLYLDQKRKLKLVNRIKRNIAKFEIKPEDVGFSNHLNLST

SEQ ID NO: 300523 - protein, 346 aa, unidentified
MCSLPVFVGLDYHDSSVRVCVLDSDGSELANADRANDWKAIANFADRFGRPVRAAIESCCGAADLAEELVSCAGWSVDLAHPGYVQRMKQNPDKTDCQDAQLVADLERVGYLPRVWLAPQYIRELRQVTRYRLQLTEQRRATKLRLRALLREQRCRAPEGLNAWTKAWQQWVRDSAELSEQGRWLAKEHFRELARLAMAIRKVEKRLQRLTAQDVEVQRLQQQPGIGPVTAWTIRAEIGHFDRFRTGKQLARFCGLSPRNASSGQRQADAGLIRAANPALRTVLIEAAHRLVHYDSSWQKFAQRLRARGKPGSVVAAAVANRWIRRLYHEMKTPSGELAIAVGPAR

SEQ ID NO: 300524 - protein, 373 aa, unidentified
MKRLVATNVVAQGPHKQTNAVKSRKWRPAVEHIGMDVHKRESQLCIVTEQGEVLEQRIRTERGRLAEVLGGRERAKILLEASTESEWVARCLEQMGHEVVVADPNFAPMYGVRNRRVKTDKRDARALADACMTGTYRKAHRTTESRRQLKAQLAVRDALVRGRAKQIVLIGALVRQQGLRVTTGSADTFLARLTKVDLSEEVRNVVAPLVAVMRTLNEQIQVVDAKLERLASDDEQVARLCTMPSVGPVTAVAFVANVDDAKRFAGAHQLEAYLGLVPSEMSCGEKQRRGRITKVGSPRMRALLVQVALSTMRLRKATTAGLWEWAGRIEVRRGRKVAAVALARKVAGVLYAMMRDGSHFKPYASREPMTNAA

SEQ ID NO: 300525 - protein, 408 aa, unidentified
MDKLFVGIDVGSRDNAAFIMLPNGDKHSAFPIQNNLGGAMTVSKRVVSALMELGLPGASIGIEATSVYGENLIYFLREDGALARFERKLFILNPKQVKKFKDSYSDLPKNDPVDAFVIADSLRFGRIGNPIYNLDDYRYVALQKLTRARFYAVQNLTREKQRFMNHLFMKCSGLAQEKVFSDSYGTTALAVFEGFESPDDIVNVDIVELADFISEKGKNRFPHPEEIAKAVQAAARGSYRLPKTVNDSVNQVLSISISSMRAMQAQIKALNKEIERQFVNIPNTLTSIPGIGPVLSAGIIAEIGDINRFDNQACLAKYAGLAWKENKSGMFEGQITRQIKSGNRFLKYYLGEAAFSLVRCDTEYKRFYDLKYKEVNKYQHNRALALTARKLVRLVFRLLKDNRLYIPA

SEQ ID NO: 300526 - protein, 341 aa, unidentified
MRIVGGLDIHRRQITFDYLDERSGQFRRGRIAPADRMLLRRWLEANIDGAPAAFAVEACTGWRFVVEELQRAGIEAHLAEPADTAAARGPKRRAKTDRTDARHLRELLTAGRLPESWIPPEQVLEMRARLQLFKDLREEHTAWVQRVHAILLHHGAPAIAGDLLGADNRRRLEAADQLSAAGREAVAAALRILDALDAELVPLRRQIAAFARRQPGCKALQAQYGVGEITAVALWAELGDTRRFSSSRKAVRHTGLDITVYSSDGKRPPGKLSRQGSPLLRWALFEAAKCAARPSSPDYAYYRQVADRLGGNRAALSVARKIARRAHHTLRALGEEALAPV

SEQ ID NO: 300527 - protein, 372 aa, unidentified
MQQNLRVFVGLDTSKNKISVALAEDGRRGEVRFFGDIDNSPDVVRRLVSKLSGKYQQLLFCYEAGPTGYGLHRQITALGHDCSVIAPSLIPKRPGEHVKTNHRDAVTLARLHRAGELTTIWVPDLGHEAIRDLVRAREAAMEDLREKRQHLQSFLLRHGQRYPGLRPWTLVHARWLSNLTFEHPAQYLVLREYRQAIEDAEARLERLTQQVTEVVSTWSMASVVEAYQAMRGVAFLTAVTFVAEIGDVRRFETPRQLMAYLGLVPSERSTGEQVRRGSITKAGNPRARRVLIEGAWTYRYPARLSRPLQLRQESLPKVVKAIAWKAQVRLCARYRRLMAAGKRQTLITTAIAREMAAFLWAIGHEVQPRSAV

SEQ ID NO: 300528 - protein, 317 aa, unidentified
MSALPVFVGVDVAKTELVAGLRPTGEVWTVSNDETGIQELLQRLRPHGPVLVVIEATGGYERGVVAALAAADIPLVVANPRQVRDFARSTGQLAKTDRIDAQILALFAERVRPEPRPLPDEATRTLSALLARRRQILEMLTAERNRLEHAVPAVRRDLVQHIRWLERRLRDVDHDLDRTVQSSPVWRAKENLLRSLPGVGPVTSRTLIGSLPELGSLNRKQIAALVGVAPLARDSGTLKGKRLVWGGRAPVRAALYMAALVASRRNPALRAFYARLVAAGKPKKLALTACMRKLLTILNAMVKTNSVWQRIDHPKTA

SEQ ID NO: 300529 - protein, 353 aa, unidentified
MEKDNRLDFTGQHIYVGLDVHKKSWSVSLRTKQFEHKTFTQPPEVEKLTNYLVKTFPKATYHAVYEAGFSGFWLHDRLKEKGVDCMVVNPADVPTKDKERTGKTDRIDCRKLARGLCNGELKGIYVPSRNQVEDRSLVRTRQSMVRKQTRCKNQIKSILFFYGIIIPEESRWSKQFLNWLESIKMVRTSGDFTLKTHLEELKHLRQLIANLSRAILSLSRTEEYRERVILLKSIPGISTLTAMILLTEIGDILRFSSLDKLASYAGMVPDIRSSGETEYSKGITYRRNPALRALLIESAWVAVRKDPDLMMVFNKLSLRMKKTQAIVHIARKLLNRIRFVLKNQRQYVLAKVN

SEQ ID NO: 300530 - protein, 352 aa, unidentified
MPRTTRFHSVTTTIGIDMGKNTLHMIGLDSNGAIVLREKVWRGRIASRLANLPPCLIGIEAGMATHYVARELAALGHNVKQVPPTYAKPFRQGHKNDFRDAHAVAEAVQRPTTRFVPAKTAEQLDLQALHRVRSRLVSERTAVINEIRGFLLERGIIVRQGLRFLRQSLPDFLAKRTDVLSLRMVRIVADLADDWRRLDQRIETVTDEIETVVKSDDNCRRVMTVPGIGPIISSAMVAAIGNGVAFARGRDFSAWLGLVPKQMSTGDRTILGHISKRGNGYLRMLFVQAARVILQRPTNWSKHNFGGWLVCAAQRLHPNVLAAALANKLARIAWTVLAQQRCYEARVTKAAA

SEQ ID NO: 300531 - protein, 316 aa, unidentified
MEAPQPFIGIDVSAQRLDVDMLPTSHPFSEPNTDDGISSLVLRLQALKPEIILLEATGGYEVHAAYALCDAGLPVVVMNPKALRHFAKAIGRLAKTDKLDAQVLALYAQSIRPPVRPLKEPEQLELANLMTRRRQLQGMIVMEENRRRTSTPKVRGNVERSLAHLRQLLKDLDRDTQDFIRRTPLWHDKAAKLKEVTGIGPVVSSELIAHLPELGTISHKKIAALAGVAPMNRDSGQWRGQRRIQGGRPAVRRALYMAALVASRHNPVIRAFYQRLRLAGKPAKVALTACMRKLLVILNAMLKHRTHWNQQLPLAA

SEQ ID NO: 300532 - protein, 387 aa, unidentified
MRKPNDMSKCLAAFDQDSTLVAVIELGLKSWLVAGIVPGIERHPLKKMEINEPALIEVLYRWRDQARKAGHPIKRICVAFEAGRDGFWLARWLRSQGIECYVIHPTSVCVSREHRRAKTDRLDTEILKRAFIGWLRGETDHCSMAAIPTLEEEDAKRPSRERETLVGERTRIINRVKACFVRLGIRGLKLNWRKAADVLAKLRTPEGRPIPPNTLDELKRDLARLLFVSDQIKEIEKMRLARLRTAPKRGPGAMVRILANVLGIGVETADMLVHEVLSRKLRDHRAVARYAGLTGSPDESGRKRREKGLAKSGNARVRRGMIQLAWRFLWFQPTSDLAKWYEARTSDGRKDTRKRMIVALARKLLISLWRLVTHGEIPTGVVLRAAA

SEQ ID NO: 300533 - protein, 321 aa, unidentified
MEEEKVYVGIDVAKASLDMAVHQCEQRWHFTNEDEGISQAVSCVKELCPVLVVLEATGGIELPLTAALAAAGLPVAVVNPRQIRDFARATGKLAKTDAIDARVIAHFAAAVKITPRPLPDAEAREFSALLTRRRQVMGMITAERNRLRPTCSKVVRDLIKAHIASLEREVAKLDDSLRDSVRGSSVWREKDDLLQSVPGVGPVLSATLLAGLPELGTLNRKQVAALVGVAPLNRDSGNFRGKRTVWGGRAKVRSTLYMATLAATQHNAVIRAFYQRLCAAGKENKVALTACMRKLLTILNAIIKHRTPWRYAHSNIIGPCS

SEQ ID NO: 300534 - protein, 351 aa, unidentified
MDRYIGIDAHSESCTVVAMGPSGKRLRQQVVDTEAKVLIAFLKGVSGDKYVCIEEGQLAEWLVEVLGPHVKEVAVVQPPEHGGRKSDLDDAWALAERIRVRADGTYVFKPTTQYRALREAVRAHLTAVKEQTRAKNRFRALLRSRGVPSLDETIYELESREHWIAQLPPAYRRRAEWLGQQVDATSEAHVLAEKWLKEEGKKLAEVQRLKTAPGLGDVRAAQIVAAIVTPHRFRTKRQFWSYCGLGIVTRASGEWKRSNNGQWQHVQGKVQMRGLNLNRQPLLKAVFKGAAISALSKNNHLRKHYDQLVANGTAPHLARLTIARQIAAASLAIWKKKEEYEPTKHYPTEAA

SEQ ID NO: 300535 - protein, 379 aa, unidentified
MYDAITGMPAETILHGALELSKNGWLLAVQFPDRAQPSLHPIRGGDTEGLMAKLMAARDRWAKLSGKTPSIVLCYEAGYDAFWLARFLKAHGIECLVVDAASMQVNRRARRAKTDRIDVGMLLRALIAWGQGDRHVWSVVRVPSVDEEDLRRSHRERDRLVRERTAHINRIKGLLFGQGIRGINVKNKYKTLQIDKLVTGDGCPLPPRLASEITREIARLALIQEQIATLESERDQAPTPCKATERKRVQLMCLTGIGPAIAAVMTREVYYRQFDNRRQVAGFLGLATSPHDSGNVERSQGISRAGRGQVRGTIIQAAWLWLKHQPKSAITRWFVQRTAGQSGRIRRIMIVAVARKLAIALWRFLEQGLVPQGAMLANR

SEQ ID NO: 300536 - protein, 341 aa, unidentified
MNSSKTVVGIDIAKRVFQLHWIDMETGEIVSLQLKREQFLEHFANRQKCLIGMEACGGAQHWARKLTAMGHQVKLLPGKAVKGFVIGNKNDRQDARAIWTAVQQPHVKAVAIKTEAQQAILALHRMRSQLVKFRTAQINGLRGLLTEYGEVMPQGKAGVRKGISDALGKLADRLPAMVIDTLREQWARIEKMNEEIATIEQRIKHWLKQDDACKRIAEIPGVGPLTATAAVAMMGDPKAFKSGREFAAFAGLVPRQVGTGGRVKLLGISKRGDTYLRTLLIHGARSVLTHAKDPGPWVTELRRRRPLNVAIVALANKMARTIWAVLAHERTYQKGFVSRPA

SEQ ID NO: 300537 - protein, 422 aa, unidentified
MQVIYERCAGIDVGKDVIAVAVRKPGNGPDGRVTVKRTYKTFHGVLAEAARWLVSQGVTHVAMEATGIYSMPVYHALLEHGDFERVLVCNAGHVKNVPGRKTGLADAEWLAQLLECGLLAGSFIPPAEVKAVRDVIRYRAKIAQQRVSEIARLGNVLQDAGIKIDSVASSIATKSGRAMIEALIDGERRGAVLADLAKGKMRSKIPDLSMALEGRFGEHHAMLCRLHLDHLDHLDGMIAALDAQVEKMMQPFRAARDLLVTIPGLGPLSAAAVIAEIGADVRQFFPDAAHLASWAGLCPGNHESAGRRHSGKRRPGNQHLQPVVVECAWAAVRHEGYLKALYHRHVMKWGGYRSPIAKNKAIIVVAHAILVIIWHVLATGKPYGDLGSDYFTRRQDPDRETRRLIAKLEALGHHVTIKDTAA

SEQ ID NO: 300538 - protein, 412 aa, unidentified
MEVLYPQCCGLDVHKSSITACVLIAQSGKPLKHIRRFGCTTRELRELVVWLQEFGVEHVAMESTGVYWKPVWNVLESHFQIVLANAQHIKAVPGRKTDTKDCQWIAELLQHGLLRGSFIPPLVIRDLRDLTRARTSLSQEHSRIASRIQKVLEDANLKLASVASNTLGKSGRAILAAIIGGEESCERLADLALGHLRAKIPQLQAALEGQVRDHHRFLLQSLLRQLYFIETEIELLDARLDQLGQQHPDLAEALNRWVTVPGVDRVAAWSFIAEMGADVSQFPTAAHLASWAGVCPGNNESAGKRISSKIRKGSPWLRRMACQSAWAAARTKNTYLSAQFKKLAARRGRKCAIIAVAHSILVIGYHLQRKRCAYTDLGGNYFDRLHAEGLKRYLVKRLESLGHSVTLQPRIA

SEQ ID NO: 300539 - protein, 365 aa, unidentified
MPSLPQASWTRLGMDVHRDSIWICTLRPDGSDDVERIFNDEASIRRFMHRFEGPHHVTACYEAGPTGYELQRLLEQRLGIPCIVVAPSLIPKAPGDRVKTDRRDCRRLARLYRAGELTPIRVPSVDEEAVRDLCRARADAMEDLHRARRRLGAFLLRHGEIWRGGSTWSLKHEDWLLSRRFEDPALASTFAHYRATVEERRTRLHTMEMDLLTYCDKDPFADCVRRLRAYRGVSDLGALTLAAEVCDWRRFPRASTFMGFVGLVASESSSGDRTYRGHITKAGNVHIRTQLIESAWAYQHMASVGVRLRQRHEGCPPDTVARAWRAQVRLCGRFRRLSARKNVKSVVATAVARELSGFLWAEMTA

SEQ ID NO: 300540 - protein, 412 aa, unidentified
MNPVVGLDVSKGESRVQGFMSKGKPFRKGFSILHNLEGLRALVEFLKEVEECTGQRPPVVLESTGHYHVPVVQFLENRHYVLIIVNPLISYRGKSSSLRKVKTDAIDAYHLCELYYKEELEPYKKRGVQLLNLRNLTRQHENLTEMFVQMKLQFQAVVDQVFPEYRGVFFELYSNVSLRTLSEFPSSEDIMEVKEAELAHKIAEYCPSRSEKWAKEKATRLKEAAARNPFTKVLYQSHILSIRMYIEMLLQYKEHLSKLEAEIDALAKEFEEYTIIKSIPGIGDKIAATIISEIGEIDRFSHPKKLVAFAGIDPSVFESGKFSATTTRITKRGSSRLRRALFSAARCAIQDRRNKKAAPNELLARNKKLREYYDKKRLEGKAYKVTLIACVNKLLHWIFALLNNKTFFQDIA

SEQ ID NO: 300541 - protein, 361 aa, unidentified
MSESMALVGLDVHKSRTVAAVLDPATGELRMERLRGEPERVVPVFLEELDRPVAAVYEAGPTGFVLVREADRRGLDIRVVAPGSIPRAPGDRVKTDRRDAKRLVRLFAAGELRFAFVPSEPDERFRDLVRCLDDVRRDLMRARHRLSKFLLRRGVRFSGKTWTQQHERWLCTLAFEDPLSQAVFVDYLSAVQGLAQRRKTLIGVLEAAVPHSSHAETIGRLRCFRSIDTLTAAGLCAEVGDFTRFRTPALLSGFLGIVPSEYTSDEKRTHGQITKAGPANARRLLVEAAHNYRHRPRVGENLKARQSGQDPRVAQIAWRCQRRLHGRWMHLAAKRGKPTGTVAIAVARELAAFCWEAATLD

SEQ ID NO: 300542 - protein, 346 aa, unidentified
MEHYAGIDVSLERSSVCVVDAQGKIVKEAKVASEPEAVVAFFETLGIAVKRIGLEAGPLSQWLHAGLKRAGFETVLLETRHVKAALSAMTVKTDRKDARGLAQLIRMGWFRPVHAKSMASQEVRALLVARKQLLRRLIDVELSIRGILRGFGLKVGPVTRKGFEARIRELVTGQAMLERIAAAMLSARATLKTEYDKLHKTVLAIVREDAVCRRLMTVPSVGPLVAITYKSAMDDPNRIVKSKAAGALFGLTPKKYQSGEKDVTGGITRAGDEMVRTALYEAANVLLARITRFSKLKRWGMDVAKRRGSKRAKVALARKIAVILHRMWVDGTTYRWTDAQLTAAQV

SEQ ID NO: 300543 - protein, 346 aa, unidentified
MSSSNVHIYGIDLGKNWFHIVAMDRQGHILWRKKLNRNQLKTFVINTPPSIVAVEACPGSQYWGRLFNDAGFSVKIIPAQFVKPYLKSNKNDFNDAAAIAEAGSRGTMRCVSLKTHEQLALQATHRVRQRFIVERTATVNQMRALLLEYGITVPVGRKVFERNLPSILEDVENGLPDFIRALVFRLRERWQHLDVQIDDMSEQLQQASIASEKCQLISSVPGIGPIIATGLIAAVGSGTQFKRGRDMSAWLGLVPRQYSTGGKSNLGGISKRGNVYLRRQVIQGAKALKIHMKRDKSALGLWIAKLEATHHHHVVLIALANKIMRICWKVLTSGQEYQLYPASAAN

SEQ ID NO: 300544 - protein, 344 aa, unidentified
MKYFAGLDVSLDETAICVVDEDGIVVTEGKAASEPDDLVRWLVATGLTITRVGLEAGPLSPWLHTELRAAGLPAICIETRRMKGATAAMAVKTDRNDARAIAHAMRVGWFTVVHVKTAESQELRLLLNNRRTLLEKRVAIDNEIRGTLKAFGLKLGAVTVAAFEVRVLELLAKRSRLLAMVRPMLAARAALRQQCDVLHRMVLKAVRASAVCRRLLSVPGVGPIVALTYATGVDDPARFIHSRDIGPHFGLTPRKYASGEIDRNGSITKGGDGAVREVLVQAALTLLTRVQRWSALKAWGMAVAKRRGLRRAIVAVARKLAIILHRMWADSTMFNWKRETVALA

SEQ ID NO: 300545 - protein, 331 aa, unidentified
MKFKSFIGIDVSKSTLDVYLKTNQCHAIFENNEQGHLELVEWVMENSGLVLAKELLFGFESTGIYSSELALFLEKYSLPFYIISGLELKRSLGIRRGKSDKADSKDIAEYLYEKQEKLVPTVLPSQTIQDLKKLFNYREGLVKDRAAYITRIKEYETVVSKNKLKVYQKSHTTVIACLDKQIETVEREIDRLLHKEELLLNQYNLINSVKGIGPQTAVALIVLTEGFTLFNSWRKFASYAGTAPFPNQSGTFRGTTRTSKLANKRIKTLLTLCAGTAIQYSPEMKIYYQKRVSEGKSKMSTLNVIRNKLLSRAFAVVNRNTNYVDIVKYIN

SEQ ID NO: 300546 - protein, 395 aa, unidentified
MQVMHPVCCGIDVHQKSIVCCILDGPLTSNEPKKYQTTFGTTTKELKAALDWLLEHQVTHVFFESTGQYWIPLFNIFSDSNLELVLANPQHIKNVPGRKTDVKDAEWIAQLGRCGLINQSYIPSQEVLQLRYLTRYHLSVKQRLTQIKNHIHVILQRANIKLTSYLTDIFCKTGQALLTLFIDGEVINEDNVESCIHGRIKASTRQLIEAMDGKLSTVDRFLIKECMEEYKLQKKISEELNIKIKAYILEHFPEEYQLLLTIPGISDNCCATILAEIGPNVDSFKTDKNLASWAGMCPGSNESAGVKKSSHTTQGNKYLKQALVMSVLSVQRAKEETFSLFYQRISSRGSKMKAIIACGHKMLRIIYKILQSHKPYDSQKALGLRQQTNALSLTI

SEQ ID NO: 300547 - protein, 394 aa, unidentified
MKLVGIDIGKNSHHFCVMDKETGEFNVTPSSFSNNKEGFDFLINSLKPYSKKSILLGMEDTGHYHVALLKFLLSNGYTVALINPKTTELTRKMEGGITKNDKLDTITICDVLDTPERKKQYRITKVDRFDLYEQRQLTRHHHNLKEELNIYCNRLQKSIDLVFPEFNTLFGSKYGVVYMNLLKTFGSAEAIASTDIRTIRKCFEIKGRGGRISLTPEKLKECAKNSIGISSEVETIQIKHLVSQITLIKEQIAEIDKKIEEFSITNNSPILSIPGISHFSGTSILAELGDIGNYSKPSQIIKFAGVAPYHYESSQYNAQHTAITKKGSKYLRKTLYQIILPVINNNPVFKKYYRLKISQGKGHRCAQGHCIRKLLRIIYHLLETGQSFDPALLR

SEQ ID NO: 300548 - protein, 352 aa, unidentified
MQCIAFDAHKQYTWALVEDEGGKVLREQRIAHRKGALIEFLAGCEAGSAVAVETVGNWYWIADEIEAAGMVPRLVHAGKAKAMSGSINKTDKLDVRGINRLQRSGTLPTVWIPPRQLRDARELPRTRMVLVGQRTRLKNRIHANLAKYGATSREATDLFGVRGRVVLGERIRELPSQTRYATERLVEELEHLQLQIEGFEERMAELFRDTEDLELVETLPGVGFILGVVILMEVGDVRRFPSASQLAAYSGMTPRVHASGGRVRYGHTRSDVNHYLKWAYAEAANATAIHRRRHAQWHVSRLYERVRHRSGHQKAIGAVGRHLAEATYWILRKGEPYRDPTLDSVVKSKGEA

SEQ ID NO: 300549 - protein, 459 aa, unidentified
MAKAKARKSGKNELQVINSHAAGIDIGSKFHIVAVSPEHDPNPVRKFNSFTTDLHRLADWLKAVGITTIAMESTGVYWIPVFEILESKGFDVILVNAREAKRVPGRKTDIKDAQWIQQLHQYGLLSASFHPSEKIASLRSYLRHRERLTEYAAAHIQHMQKALMQMNLQLQHVISDITGETGMRIIRAIIEGERSATKLASYRHYCCKESETTIAAALTGNYRAEHVFTLKQAVALYDFYQEQIKECDQEIEKALDALNVDRQAPLGPLPEARRKRKQKKEPGIPIREKLFTLTGVDPTQIYGIGPHMALRLVAECGTDMTKWPTSKHFASWLTLSPGNKISGGKILSSRTRRTKNRATALLRIAAVNIGKTQTALGAFYRRLAARVGKAKAVTATARKLAVLFYTLMRYGKEYVEPGAEYYEEQYKKRLLRALSRKAASLGYSLVLKQQDSPAMGNVS

SEQ ID NO: 300550 - protein, 410 aa, unidentified
MGYETLIRRAHVMTRKNTLKSLPTDTEFRVVGLDLAKSDVSVAAIPVDDNTPSLVNRMTYADLLDWAGKISPTLFAMEPCNGYSLLCLQLENLGHEIKVISGWTVSMWINTHLSEQKTDLNDAIALARLAVSDAELTPIRHKSITEIRIQTVQAVRQQLMSQRSKSIVSFKALAQQWGIPCAAGHRNLKKLRESIEAKVDLITRPVANAMLFLLDAVKSLDRQIGQLNQTLQELVMSDERGRLLQSVLGVGTQISARVITVVGNIERFNSPRSLVAYVEVAPRNFITGHKNLTKKKHGNCPDLSHKGQGKISRRGDKLLRSLFIQGAACLYMQFCKDQLPECQLKRWILKQLASQKPYGKLIVSLAAKLIRIVWAVLTYGEKFNIQKAGMTRSMWSEMALETPLNKEVPA

SEQ ID NO: 300551 - protein, 384 aa, unidentified
MVNNSITFIGLDTHKEFFEVAYIEDKRDAKPVSLGRIHGTKLALQKLVRQFESKHPGSTLHFVYEAGPCGYWIYRFLTSLGHCCFVVAPSLIPKKAGERIKTDKRDALKLALLLRSGDMDPIYVPEPEDEAMRDLSRARETAMKDLKDAKYQLKAMLLRNNIRCDIQDNWSAQHLRWLTELVLPHPSQQIVLQEAIQTISERIRRLERLDNELTYHVKNWRYYPVVKAIQAMRGVRLLVAVGVIAELGDLSRFDHPRKLMSYLGLVPSEHSSGGKRKQGGITRTGNTRARRLLVEGAHSYRYAANVSTELQKRQENLSKEIIDIAWQAQLRLCKRYQRLIKRGKNYNLVVTAIAREMIAYIWAISREIVLTPVNPAKRLARVPA

SEQ ID NO: 300552 - protein, 347 aa, unidentified
MQFTATLPVIGMDIAKHVFQLHVVDAQTGEVTRHKLRRDRVTAFFANRQKSLVAMEACGGAHHWARTLQTLGHEVKLLPAKHVRAFVLRDKTDARDAQAIWVAAQQPHIKAVPVKNEQQQACLTLHRMRAQLMKVRIMQTNALRGLLYEFGIVLPEGHRALLKLVQDALAKAQEQQLPEVVVVSIQDQLRRIDSLQCDIDQLDKRLASMVKQNQHMLALQAIPGIGPLTATALVSTATDLSSFESGRQFAAWLGLTPRQTGTGGKTRQLGISKRGDPYVRTMLMHGARAVIARSQRSGWIERLLLRRPYSVVVAALANKLARTVWAVLVKGKAFDQVRWNPVDLAAA

SEQ ID NO: 300553 - protein, 404 aa, unidentified
MYSVGIDASKGKSTVCILKETGECILTPRDFNHTKDDLEVLDQTIQKLTGKNDVRIVMEATGIYHWPVLLFLKKNGYFVSVINPLRMKLFAKSYNFRGIKTDKYDSTIIAAYGCEKWFSLQDYSFADNTRDELKRLARSYVSYQKPKIAVKQALDLKLEKCMPGIKKILTDDQKMYDFILYFRHYDKITSLSQKKFLERFDKWAKKKGYRFHSSTVTKIYELASSGIPTVPFDDSCVLIIENLVNTLITIDKGLNDILTRMHQLASSLPEYDVVLNMSGVGYTLAPLIIAEIGDVRLYRSKKSLVCAAGIDVPPYESGQFKASHRVITKKGNSNIRRHLYLVMNSLYVTKPKKDSAVYEFMIRKKAEGKLHKQVIVAGMRKFLHIYYARVKERYQDIGLWQILS

SEQ ID NO: 300554 - protein, 343 aa, unidentified
MKLSRIGVDLAKNVYQLHGVDRSGKAVWRRRLRRRQWLNALMEAADTSCVIGMEACTGAHHWARQLQAHGYTVRLIPPQFVKPYVKSNKNDANDAEAICEAMSRPHMRFVTVKSVEQQDIQATHRIRAELKDQRNAKANQIRGLVAEYGLVAPQTLLALRRAIPDWLEDAENGLTDYFRSLLHGLWCDLITLDDRITELDKEIEQLANNSEVTRRLQQLRGVGPMVATALVATVGTGEQYRKGRQMAAALGLTPRQCSSGDKHRLFGISKRGDAYLRTLLIHGARAVVSQARHRDDRLSRWVTDIARRSHPNVAAVALANKTARMAWAMLQNETDYNPALAVS

SEQ ID NO: 300555 - protein, 346 aa, unidentified
MHYSTTVGVDLAKNVIQISVVSGRGKELLNRSLTRKKFAEFLGKQKPSLVAFESCATAHYWARAALRHGHEARIIPAKAVAPFRQGHKTDSNDALAVAEAARRPNIKEAPIKTVEQQGSQAVLRARDRLIQECIAQSNHLRGILLEFGIAIPQGFAALLRTLPEVLEDGDNELPDFYRPSLHRMYRRMLELRQDIDEMTREVTELVKNHPVCSRLTAIEGIGPIGAMSLHATLGSGKAFSKGREASAYVGLTPRQYSSGGKTNIVGLSKRVGNRKLRSVLIQGALAYVYRMKEPRSGKDLWLQALIERAGPRRAAVALANKNVRTAWALVAQGTEYQRRPRLEMAA

SEQ ID NO: 300556 - protein, 351 aa, unidentified
MTQQSATEAIATIGIDLGKNTFHLIGMNARGRIVLRRKVSRGQLQSCLANLPACVIGLEACAGAHHVGRQLAALGHDVRLLPAQYVKPFLKGHKNDYRDAEAIAEAAQRPTMRPVPLKSAEQLDLQALHRVRSRRIGQRTAIINQIRGFLLECGIAVRQSPAGLREALPTLLARRTDVLSPRMIHLIEDLAEDWRQLDGRIAAISRDIAALAGQEAGCRRLMTIPGVGVITASAMVAAVGTGAAFARGRDFAAWLGLVPKQISTGDRTILGGLSKRGNRYLRTLFVSGAQALLRYQGRWQSHGFGRWLQAAEVRLHRNVLAAALANKLARIAWSVLFRGCGYEMEFATHRA

SEQ ID NO: 300557 - protein, 425 aa, unidentified
MNESTLSVGTDVHQETLRIYLLDRLSGQPVDTPFTVPNNRFGAEQAIAMLQSALSQHGYKRLEVGEEATGLLWFHFHTTLQRSPTLAPFLSRLVLFNPKLVAKFKESLDLRQDKDDDRDARAVAERLRFGRLPVTYVPGPFWQGLRRLTRYRYHLAHTLAQEKTRFQTYLFLKLSAWQQIQPFSDPLGATSAALLTQYTTQQLAQLPLVELTRLIAQHGRHHFDDPAATARKVRQALDTSYPIDPELDEALTFALTVMYDHITYLGKLLKRLDREIAHAIQRVPHPLLTVPGLGPVISAGLLAEIVDITRFPHHAQLAAYAGLTWKHTKSGTFEAEDTYLTKGGNPVLRYYFIQGAQTMSQHNLDYKAHYARKFQESRKHKHKRALVFTARKLVRLVHTLLAENKPYAMPQTALKQNQEATGSPD

SEQ ID NO: 300558 - protein, 437 aa, unidentified
MSTLPILDPRAAFVDVGSEQMHVSIAGGPPEVFGTVTAQLHALRDWLLAQAVRSVAMEATGVYWLPLYGVLEAARLDVVMVNGRQTRNLPGRKTDMKDCQWGATLHAHGLLRAGFVPAAHIRRLQDYLRLRADHISLAAAHVQHMQKALERMNIKVHDVISSLTGASGLAVVRAVLDGERDPERLLALCDVQIRRAKAERVIESLHGTWAEEHLFALKQALRSWEHYQQQISECDRQVEALLHEMSDHEGPPKVSRPRKRPGVNAPDIANLRDILAQMCGGQDLTTLPAHTEYSVLQIVAEVGTDLTPWATEKHFTAWMGLAPGSRQSGKRKGSVKRNRNRAGRLFCVIARSLARSNDLALGGFYRRMAARRGGLIANIALARKLAILFWRVMVKGLDYVEQGLEQYEAKVMETKQRALRRLAKQLGQQIIPMAIKT

SEQ ID NO: 300559 - protein, 345 aa, unidentified
MHYVGVDLHKKTISVCVVIQEGGKRRVVQRRSFRCIEVDTIQQFFTNLGHYQVVVEATASYEWFVQLVESTAERVVLAHPGKLRVIAESTRKTDKLDAQVLAEFLALDMIPEAWRPTPRVREHRTLVRQRHYVQKRITSVKNKLRHILANYNADRPELFTPKGRAYLAELQLTDADRFTVDMLLAEFDQHGERRNQVKAKLQEFARQAGVAEREARTILESIPYVGPVTIDVILAEVGDIRRFGSQRKATAHAGLAPGIRESAGRGRQLGITKAGSPLLRWALTEAAWRMVGRTRRWGFLYDRLKKRCGVKKAIIAVARRLWCVMVSMLHSGEKYCMASEARAKP

SEQ ID NO: 300560 - protein, 424 aa, unidentified
MNLTQNAKLNQVTADTLIVGVDIGSTLHYARCFDWRGVELTKRVFKFSNDHLGFMTFMKWLNEMLERTGLKTPIVGCEPTGCYWLTFQNFLNKQKIKLVIVNPFSVKRVKELDDNSPEKSDLKDPKTIAGLVKDGRYSTAYIPEGVYAEIREASVCREQIMKQHVRLANQIQGWLQKYFPEYLECYENYDSTSGLMLLQHAPLPQDIIKLGAGGINEIWRNAKLRGVGLKRAKILVEAASNSVGLQGGEAARLEIWILVGDYISKKQQIERLDEYLEEQVNKVPNVEKLFAIKGVGKSTVIGFIAEVGDIGRFTDPKQIQKLAGLEITKCASGKKKGQPCISKRGRRKLRRIMYESARSLINWNPAFQDVFLYYRNRERKPLGGMQAKIAVSCKAIRIFYTILATGCDFDEERFRRDIIRPEVA

SEQ ID NO: 300561 - protein, 320 aa, unidentified
MRNAVGLDISKTTFDATSIIGGIEKSAKFDNDSKGFEQFKHWLTELGCTDAHICMEATGNYYEGIADYIGSLYKVSVVNPLKISKYAESRFTRTKTDKQDAKLIAEYCQTAKAQDLVIRKPVIDDGYKLKRLSALYAQLTADSTAQKNRLEAAKDTFVVKICQSNIKHLQRQIKAVKKELEKLTKQPALKDQTDRLATIPAIGRLTAVMLLNYLSGTDFPTSNKFAAFAGLTPQIKDSGTSVRGKQSLTKYGNRRLRAMLFMPAMVAYRIKAFPDFIARLEAKNKPKKVIIAAIMRKLAVIAYHVHKKGEDYDPTRYKAA

SEQ ID NO: 300562 - protein, 463 aa, unidentified
MKTKAKHPPKKHGVKKEKEPDNMISVPVVNPHAAGIDVGSTSHFVCVAQDNVQEFSVFTSDLHLIAQHLLKHGVKTIAMESTGFYWKPLFVMLQSYGFEVYLVNARHLKNVKGHKTDVVDARWLQFLHSIGLLTNSFQPDVFTHQLRTYVRHRKSLIEDASKYITKMNKVLVLMNIQLKAVLRDISGASGVRVIEAILCGERDAKKLEPLLSSLCQSDRKDIEKALTGDFRKEYLFELRDCYDLYNYYWEKIDKTDKEIEELLTIHTRDKEKGSKQKTIPGKRKQRSKNDPKPDVLSYAYRMADGVDLSQIPGVSVGTLLTMMSETGFDLSMFKSAKHFVSWLGLTPNRKITGGKVFSSKTRKQTSPLAKILREAANAAGNSKTRLGDFFRRLAFRKGRLVAIIATARKIGVIIYNMLKNKQPYSYEYSQDDTKHIRSAKIKQIIKTVRNYDITKEELEAVLA

SEQ ID NO: 300563 - protein, 406 aa, unidentified
MLNAVGIDVSKGKSTVAILRPAGEVVRKPFSVSHSVKDLSDLVSYVGSLDGETKVVMEATGHYHEPVLKAFLDAGIFVSAVNPSLIKRHDSDENPLRKVKSDPADARKIGKYALDKWEYLRQHSAMDTTREQLKTLNTQFHFLMQQKVALKNNLISLLDLTYPGANDLFASPVRSDGSEKWIDYVHSFWHVDCVRKIGLKAFTERYRNFCLHHGYIFQPDKPEELFNAAKELVAVVPKDPVYKQLILGDIEQLNTVSKQIEAFRQTMNELASTLPEYDTVMSMHGVGTTYGPQLMAEIGDISRFDHRSAITAFAGVDPGVNQSGTMNQQSNRASKHGDPRLRKTLFQIMSTLLQLAPSDDPVYLFMMKKKSEEKPYQVYMTAGANKFLRIYYGKVKECITAQTSAQ

SEQ ID NO: 300564 - protein, 439 aa, unidentified
MKGYLGIDVSKGYADFILLSEELAELESCFQLDDSSKGHAALIDWITVSLKKHQLTELRCGLESTGGFEDNWFSLLLRLGDQLPVRVARLNPSVVKHGAKASLRHTKTDAISAENIASYLIRFDEQVRYQVADNKYRSYRSLYNHISLLNRQKTQLINELKQLLYTSFPELQRFCKSSIPGWVLELLKQYPSASALSKARPEKLCKIKAITAAKASQLIERATLSVASRHQSTDSFLVKNMATGILQAQQQLALYKEHLEQTCQGPEVDLLATIKGVGRYSAAAIIIQIEDIRRFPSPKHLAGFFGLHPTVDQSGDKKVKSRMSKKGRPALRAALFMCANSAVLFDPHLKSIYARHRAKGNNHKAALVVIMHKLLRIIWGVLSHKKAYNSDIDLKNQQKVKEVVPDKNEIEEKRRLQDYDEQAPISRIETKKRKAYQSS

SEQ ID NO: 300565 - protein, 373 aa, unidentified
MPRYSTAFGMDVHLRSTTVCALDAETGETVTRRFRGNPWGEVAEWMSGFPGPSLAAYESGYLGFAPQRELSGLGVDCVVAAVSKVPRSAADFSSKNDRNDAARMAKAILSHDISPVWVPSPEIEGLGDLAGAHDAATARLAAAKQRLLAFLARRGYAYGGTTPAGNPRRYWTYDFLRWLDKVRPADDGGIRALAALRSEVEAASETRDDLLAEYRAAVAAGPLSAEVEALQSIKGCGFALAAAFASEVGDFSRFRSGRQVTSYFGLAPKQRSSADSVRLGGISGAGNALVRRLAVEGSWSYVQASHQPKLMPKGSGVPLEVRMHGRKGSERLLRRREEMLARGMPQAKANAATAAELVRWLWALGAMCREATE

SEQ ID NO: 300566 - protein, 297 aa, unidentified
MRLFIGLDVSLEKTAICVISEHGKIVKEAQVASEPEALLRRISDQGGAVAAIGLEAGPLSQWLHRGLSEVGQPVVLMETRQVKGALKAMPIKTDRRDAEGIARLLHLGWFRPVHCKSVSAQEVRAVLTARKAVQQGFITLEMSLRGLLRNFGLKVGTISRGRFEQRIRELAAGNPMLKAATEPMLRARSALRRELAGLERHVRQLAQQDPVCLRLMSMPGIGAVVGLTYRSAVDDPARFTSSKKVGPWVGLTPSRNQSGERDISGGITKAGDVKLRRALCQAATVMMHRGRASWLRT

SEQ ID NO: 300567 - protein, 462 aa, unidentified
MTPTKKGNRKSETPLPTSLPTIRPLVAGLDVGSSQHWVCGPAARADGKPNVRLFGTTTDQLNELADWLAHQGVESVAMESTSVYWIPIYEVLEARGIEVRLVNARQLHHVPGRKTDVSDCQWLQLLHSCGLLRGSFRPGEAITRLRALHRQLANLVAERTRCVQWMQKALDQMNVQVHRAVTDLTGVTGMAIVRAIVGGERDPARLAQHRDPRCRKSAEEVARHLTGTWRDEHLFNLASALRLFDALGTEIAAYEAQLLTAIEALEPPDRQAEPVPPHPNPAKEKALKTRGEQPARTTLWRFAGVDLTRIDGIRAGAAQVVLTEVGPNLAAFPSEDHFVSWLRLCPRTPISGGKPLKKRRNGLGANRIAGVLRMAATSLQRSKTALGASFRRIARHKGGAVAVFATARQLARLIYRMLRYGHDYVDVGEQAYDRRFQIRRLAGLTETAKSLGYTLVRNVAAG

SEQ ID NO: 300568 - protein, 365 aa, unidentified
MNPIYIGVDFHARQQTICYLKIETGELVFCELKHQDKPAVRAFYSQFQGRVIVGLEASGYSPWFERLLEELGCEVWLGHATEIRRRARWRQKNDRRDAELILELMLHDEFPRLHRPALQSREVLRMLRYRQKLIKIRTMSKNSLQALALQAGLAKGSRLFTSAGKQELGTAVMSPVMHWQREHWLQLLEPLNHQLLETMVWCKAQSQGDVGITRLRTHPGIGLLTSLCLVHTLQPVSRFRNTRKVAAYVGFDPVERSSAERKCFLGISKAGSRVLRYLLVEAAHTAIRKDEDLKRFYQRLAERRGRPKAKVAAARKLLIRAYIMLRDEIDYAEFRHRAVAARLARRGQRPNMPEVLIGQPASPAQ

SEQ ID NO: 300569 - protein, 442 aa, unidentified
MKQKKVLKKVVRGLPRNLQHINVHAAGIDIGSRSHFVAVPEGIDEMPVREFSSFTGDLEQMAAWLISCGVTTVAMESTGIYWIPAFEILERHGIEVKLVNARHVKNVPGRKSDVLDCQWLQQLHTYGLLRGAFRPDAQVCTLRAYVRQRAMMVRSAASYIQRMQKALSQMNLQLHNVVTDITGLTGMRIIKAILSGERKPEVLAAMRDRRCKNSVATIARSLQGSYRPEHLFSLRQAVEFYEFHQEKISACDLQILEQLKSFDSQNDKPPKNVAEALQLMSGVDLTSIDGIDTNTALKILAEIGTDMSRWKSAKHFASWLGLSPGTKVSGGKVLSSATKPVANKAAAALRIAAFTLLNSKSALGAYLRRQKARLGAPKAITATAHKLARLVYMMLKQGTAYVDAGQEYYEKRYRGRVVQNLKRKAQELGFELVAIQEAMTPA

SEQ ID NO: 300570 - protein, 353 aa, unidentified
MVHVGVDLHRRISQIAVLSEDGELSQRRLANDPRRLEEFFTQFPPQTPVAIEATGTWWWLVDILDRLGHQPVLSHPKATKAIAAARLKNDKVDAQRLALLLRGDLLPTVWIPPAALREARELVRHRIMPVWLRSAVRTRLLAMLARRNLRPTRAKSWLAQRGQHELRALPLAASPATIREDCLALLPVLDAQIRRLDQEVVARWGDDPRVQRLTTIPGIGPFIAIVLVLELGEIRRFPSAKHLASYIGLTPRTRASADHVRTGHITKEGNRLLRWVLVLAATQAARRPGPLRAWFRTVQQRKGQKTARVALARRLAEIVYHCWKDELDYWTMLRRGVRAGVSSDVDMVPRPRS

SEQ ID NO: 300571 - protein, 411 aa, unidentified
MATSAVQSVRFMGLDMHKHYVMVGAVNKEQEVLLRPRKFTWPEFDRWQKQHIGPGDAIVIEASGNAWHVYDQLTGQGALVHVANPLLVKWIGSAPVKTDPHDTLKLAKLLAAGLLPTVWVPPAPVRALRTLVGQRQRWIKQRTQARNRLQGLLQDHNLRPPEGDLFAPEQRAWWLALDVSAAEHLLVAQDLLALDQLAPLVAQVETAIQLQSTCEPWASEVPYLIQQTGVGLLTAMTLLAAIGDISRFEHPSQLVGYAGLGARVHASGETHTTGGITKQGRRELRAAMVEAAWVAVEHNAFWKAKFAHLARRIGDAKAIVAIARQMLVSVWYLWHNRTVDRHSDAVAIARKLWTWAEQGGKAMRHGLSCSHFVRFQLDQLGIGQELTELRYGSHVYRLPPTGSDVHLPAAN

SEQ ID NO: 300572 - protein, 389 aa, unidentified
MITIGIDVGKFNHCACVFDNQSGELLVEPFFFKNNLDGFNELFGSIKPYKSSLVGLEDTGHYGDNLILHLLEKKYNVGLINPLTTEHKRKSKLKSAKNDKKDSILIAQTLLYKDEYRLVTLKHYKLRELKKLTRHHHDLKEEINAAKNRLQKSIDLVFPEYNKLFNSKYGKVYNALLKQFPSAKVIANTDIRTLRKVFNYKGKGNRIKLTPEHLKLVAKNSVGEESYASIIQIKHTIAIIEMLEDQVIEVDKKIEELSSQLNSPITSIPGIAIFSGMSILSEYGDISRFDSPAKLISYAGVDPYVVESGTYKAPVTAITKKGSPYLRKTLYQIALPVINNNPVFHKYYTLKIKQGKSYRCALGHVVRKLLRIIHHLVTNDLQFDVNHLR

SEQ ID NO: 300573 - protein, 412 aa, unidentified
MTAINQFAAHVGLDWADKKHDVCVQFKTGERVFHVIDHTPEALDIWLNDLHKQVKGRIAFALELKKGPVVYALQKYPFVTVFPVHALSLARYRQAFSPSGAKDDPQDAELALDLMLRYPQKIKAIEPDNAQIRLLQQLVEQRRLLVEDKRRFVNRLINTLKQYYPQPLEWFSHRDSSLFCELIIRWPSLQQLKRARGDTVRHFMNAKGGRAIALTEQRVASIANAIPLTTDESVIEANALMATALATQIKVVSEIIGTYDARIESLFDTLPDAGLFKSLPGIGPCMGPRMLAALGDNRNRFNSAEEIQNYAGIAPVTERSGQKSWVHWRWQCSKFVRQTFVEWAAKTVNSSYWAKLYYQGLREKGKSHQSAIRALAFKWIRIIYRCWKARTCYDEAKYLLSLKERNSPLLKS

SEQ ID NO: 300574 - protein, 327 aa, unidentified
MEQSVIGIDVAKDSLDVFLLSGSQQAYKQFANDLDGYRHLLAWLKHKRADRVHACLEATGQYSDGVAAYLYEQGLAVSVINPARIKAYGRSKLQRNKTDKADAELIARFCAEQNPALWTPPPACFKELQALVRRLDDLQINLTQEQNRLHSGTQSETVIAGLKTHIAFLEEQIKQLQRAIQDHINQCPELKQQQELLISIPGVGKLTAAKLLGEINHITQFEDARQLAAYAGLTPKNFFSGSSVRKKSILTKTGNANLRKLLYMPAISAKRWNPIIKAFCERLLASGHSPMQVIAAAMRKLLHLAYGILKSGRPFDPNYLVNVQAFS

SEQ ID NO: 300575 - protein, 315 aa, unidentified
MDARYIGIDVAKDSFEVASDPADLKWSLPNDPPGRRQLLKALQNQTVALIVMEATGGYERSLAVDLLQAGYAVVVANPRQVRDFARGMGERAKTDPIDAAVLARFGRIVQPKPRPRPSGQTDDLGELVTRRRQVSDLLTQESNRVPLARHPKVQKSLQKIVRALEHQIADLDKLIRDHIESDDGLRRKDEIVQSVKGVGPGTSAMLLGQLPELGTLNREKIAALVGVAPWDDKSGKSAAKSHIGGGRTPVRNMLYMAALSATRSNPVIREFNQRLESYGKVFKVRITACMRKLLVILNSIVKKDCLWVPPAPKKA

SEQ ID NO: 300576 - protein, 337 aa, unidentified
MTLYCGIDLHANNSVVAVLDEDDRTVYEKRLPNDLAMITGVLSTYQSDLAACVVESTYNWYWLVDGLMAAGFPVQLAHTSALPQYQGLKYTNDFSDARQLAHLLRLGILPTGYIYPKAERALRDLLRRRLLLVRQKTMHHLSLQSLIARHSGQRLNAYQIKTLSQPQIADYLSGLALLSGEITHQAWAWLDGAIRRIEQELQQQIQPRQDYQLLQSISGVGPVLGTTIALETGTIERFASAGNYASYARCVKSEKISNGKRKGQGHKKNGSKYLAWAFMEAGHYSAIWNPRIKRYYQRKKARVHILVAKKAVANKLARACYHMLKRGEKFDVARAFS

SEQ ID NO: 300577 - protein, 405 aa, unidentified
MIFVGIDWSENQHEVEVMSESGQRLRSLRIGHGVAGLAKLQETIAEFVSDPGEVMVGVESDHGLLVNALVGSGYQVFPINPLTAARSRDRHSLARAKSDRQDAVMLANVVRTDHQQLRPLKGDSEPALEIRARARAHWRAIQLQSRLRNQLRSGLLEFYPAVVPLLAADDIRDALAVLSVAPTPAQGRRLSRSQLEATLRRQGRQRNVASRAQEIQALLRAPQLDLRQPRLIAAHGAEVASLTRILIQVRQELAQLEADLAAAFRVHPDAQILLSFTGLADVLGARVLGESGDDPARYADASARRNYSGNAPVTRASGKWREVTRRLARNRRLATAAFCWAESAVRHSPGARRCYQRLRSRGQTHNEATRVIANKLVGLLHACLRDRTRYEEQRAWSMALTQSAA

SEQ ID NO: 300578 - protein, 393 aa, unidentified
MTIVEAARGITGGVDTHRDVHVAAALDPLGGLLGSESFPTDPAGYKALLGWLESFGEVTKIGVEGTGSYGSGLARYLKRVGVEVIEVDRPDRQKRRRAGKSDPLDAIEAARAALSGRAKGKPKSRDGAVEAIRVLVVAKRSARQARVKALIQMRHLGYSAPEQLRCRLKGLSVPALVAEGKGLRPSRSPDPVTAATKASLSSLAHRIEALGRELAELDERIEALLVATVPDLLELFGVGPDTAAALVMTAGDNPERLHSEAAWAHLCGVSPIPKGSGKNSGRVKAHDGGDRQANSALWRIVMVRIAHDPETQLYYERRIKEGKTSHEVIRILKRYVAREVYRYLPRGQIPGLWVWPFPVLSSFWADFPAIRRPSVRATISNTRDPIRACPRLE

SEQ ID NO: 300579 - protein, 261 aa, unidentified
MKRVQSNELDFSGQNIYVGIDVHLKSWSVAILSEHSVLKRFSQSSEPEALHKYLVSNYPGANYFSVYEAGFCGFWIHERLTDLGITNIVVNPADVPTMSKEKLRKTDSVDCNKPARELRSGSLVGIYVPGVETLELRSLIRMRNLIVKDSTRAKNRIKSLLRFKNADHLASFIGLVPMCHSSGESNGTGDITVRRHFMLRCLLIEAAWIAIRKDPAMTVAYAEYRKRMNPQKSIVKIAGRLVNRIYYVLKHEREYIPCVVK

SEQ ID NO: 300580 - protein, 409 aa, unidentified
MQVVHERCAGLDVHKRTVVVCVLVPEGREVRTFGTMTRELMEMVDWLLGKGVTHVAMESSGVYWRPLFNLLEGRGVELLVVNARHVKAVPGRKTDVKDAEWLADLLRHGLLRASFVPDRSQRELRELVRYRKTLVEERARMVTRIQKVLEGANIKLSSVASNVVGKSGKAMLEQLAAGNEDAEAMAELALSNLRSKRGQLREALFGSMGEHQRFMLKSHLHLVEEMDAEIEAVNAQLWERMRPFESQIALLDQIPGIGPTSAQQILAEIGVDMSRFPTADHLASWARVCPGMNESGGKRHPASTGAGNPWLRSTLIEVALAAVKAGRRQPNFFSARYHRLSTRRGPKRAAMAVAHSLLIAIYNMLRNGSYFVDLGPTHYDQRRRDLIAKRSVRRLEDLGYKVSIEEAVA

SEQ ID NO: 300581 - protein, 353 aa, unidentified
MKQTLEFNGQDIYVGFDVHKKDWKVTIMSDKLVHKTFSQPPKPEVLVQYLTKNFPGAHYHTAYEAGFCGFWIHHQLKQRGINSIIVNPADIPTTQKEKVQKEDQRDSRKIARQLAKGELTAIHVPEIYSIENRALIRTRTDFVGDVTRYKSRIKSFLMFHGIDIPKEFEKNNWSKKFLGWLKEVKLTQTAGNQSLNALIITYITLRDQVATSTREIRQLSKSEFYAKNMELMFSIPGFGLINSMTVLTEVEQISRFKNNDHFASFIGLTPGTHSSGDNDIDTGITVRGHGSLRKAFIEAAWVAVAKDPALMHSFHKYCKRMEKNKAIIRIAKKLACRVQYVLRTGMPYINLKQ

SEQ ID NO: 300582 - protein, 404 aa, unidentified
MTEATSLQYCLEGDEMFYCGIDVAKRKHAVLVVDDKGQVVKPAFMFENNRQGFDELLSMLSALSGSVTIGLEATGHYWLALFDTLTGQGYEVIVLNPLQVAAYRRSGVRKVKTDRTDAFWVADFIRIANPSPTRQDLPTILQLRELSRFRFCLTEQIGDIKRKIISILDRVFPEYETLFSNVFLNSSRELLKEAATAHEIADFDLTELSSLLHSGSRGRFGQQKAEAIQNAARQSVGVSFLADAVRLEMRCLLAQIELLQDQRAQVDQVLATLMSQIPQHITSIPGIGLPTGAAILAEIRDVHRFESVEKLVAYAGIDPTVYQTGQFQASEAHMSKRGSPYLRHALWQAASMAIQHDPELKAYYQERRAQGMPHGTVLGAICRKLLARVFVILKEQRPYVIRDC

SEQ ID NO: 300583 - protein, 373 aa, unidentified
MPRYSTAFGMDVHLRSTTVCALDAETGEAVTRRFRGNPWGEVAEWMSGFPGPSLAAYESGYLGFAPQRELSGLGVDCVVAAVSKVPRSAADLSSKNDRNDAARMAKAILSHDVTPVWVPSPEIEGLRDLAAAHDAATARLAAAKQRLLAFLARRGYAYGGTTPAGNPRRYWTYDFLRWLDKVRPADDGGIRALAALRSEVEAAAETRDDLLAEYRAAVAAGPLSAEVEALQSIKGCGFALAAAFASEVGDFSRFRSGRQVTSYFGLAPKQRSSADSVRLGGISGAGNALVRRLAVEGSWSYVQASHQPKLMPKGSGVPLEVRMHGRKGSERLLRRREEMLARGMPQAKANAATAAELVRWLWALGAMCREATE

SEQ ID NO: 300584 - protein, 351 aa, unidentified
MKKVFVGIDVSKKTLDASVIAPSLTEDKPVIISYGKFDNRPCGYRKIVSMARKAAKAVDDAEILFCCETTGGYDHALCDYMSDKHLDIWREHAARIAKTRPDHGKDDRKDSILIAEYAWRNRDRAQMYVPSSRSVRDLRQLLLYRRQLVEMRKQLNVRMTDLKATMQSDPTMSFIYSESEKQVKRLTDCIEKCESMIRETIDSDNEMLKNFGHIMTIKGIGLVSAVAIIAYTGNFKTIDVYKSFACYCGTVPFYEDSGTSIHKREYIGHKSNRMVRSYLIQAAHIATIYNEEMVAYKQRMQSKGKPAGIIVNNVANKLLRLVFSLVANDCDYEREHEFKREERLKKKTMSA

SEQ ID NO: 300585 - protein, 364 aa, unidentified
MNKCHLNTELSSLEGTRFEFNRSTGAIKLGIDVHQDYYVVVKQEDGSNPKPAQRFRKEVFLLWAAKLSKSGSKVHAVYEACGFGFSLQRQLSALGIHCHVVCPQKLDERNKRVKTDGLDAKALCLKLDRFVQGNRDALALARVPTEAEEQKRAIHRQREQLVKTRKRLEAQGRSLMVNYGVEPVSNWWKARTFAQLQVPYWMKELLSNTQPILLALQEKIRALTAQLQAAANSKQPRGLGLLSSVVIDREIGSWDRFKNRRQVGSYTGLCPGEYSSGDTRVQSCVTKHGNPRLRAALVETAWRLVRFQPTYRPVIKWRKILAKGALATGAARKKAIVALARQLAVDLWRIRTGRLSAKKLGLIN

SEQ ID NO: 300586 - protein, 315 aa, unidentified
MTSPSGTPITLGIDVSKEWIDAHLLPQGTSWRIANDAKDLDAWADQLPEGVTLAVVEATGGLETQTAIALAQARIPTAIVNPKQTRAFAQAVGQRAKSDPIDAELIARFGEKIQPEAKTLPDEDQAALKELMARKRQLVADKVAEQNRLGSMRSKEAQKSIKAHIQWLTKQIERIDQQIDDTIKKSPLWLVKEQLLTSIPGIGPHTARTMLANMPELGQLNRREIASLAGLAPYIRESGKWKGKRFIGGGRSEIRAALYMAALSSTRRDSAFSKFYRSLRDQGKPHKVAITACMRKMLTVMNAVIRDQKIWSECG

SEQ ID NO: 300587 - protein, 385 aa, unidentified
MQKHHDDSKACLTAFVQDNTAIAVIEMSLASWVVAGLIPGVNREPLKKIAADPEELLRLLYRWRDQAIKAGKDITRIAVAYETGRDSFWLARWLRDRGIDAHVIHATSVAISREHRRAKTDRIDTAMLRRGFLGWLRGERGHCSMAVVPTIAEEDAKRPHRERESLLKERTSTINRMKAILAQFGVRNFKPSLRKAAEKIDAVRTPEGVPLPPNAAAALRRQIERFRLINEQIKTVEKTRMQRLRQNPTGKYNTMVFLLVRIIGLGVETAEQLVHEMLSRNLRDRKAVARYAGVTGSPDESGLSRREKGLSRSGNGRVRKILVQLSWRMLQFQPDSGLVRWFKNRTANSQRSRKPMIVALARKLIIALWNYVNTGVAPDGFKLAK

SEQ ID NO: 300588 - protein, 384 aa, unidentified
MRTDQANVTHSEALVLAVSLELAAAKWKVALHDGRRDSPAVHTVAEPQAASRLHAVLTLIGQQRAKWALPADARVVVSYEAGQDSFWIYRALQARGIECHVVDPASIPVERHKRRAKTDRLDAIKLVISLRAWLRGERDRMRVIRVPSAQDEASRHLMRDRGQLQKEVLQHRDRMRKLLITLGCWDEVDSRKFAGRLARGEPRCHDGAPLPAELHERLVRECERLTLVEQQLATLEKTRETSLPEPARERIDRLTRLNGIGPVGGSRLALELFWRQFSNRRQVGACVGLAPQPFDSGESRVDQGISKQGNRRVRALLIEMAWSWLRYQPDSALTLWFHRRTQGTPSSRRIRRVAIVAVARRLAIALWRYLTDGVLPEGAQLKSA

SEQ ID NO: 300589 - protein, 286 aa, unidentified
MQSWSVCSAVPIIRAPYQPGEFQEKRLPHCEEAEKFYRAVAASGQKVRVGMEASGHARWFERLLAELQMELWIGDAAEIRAKRVRKQKTDRQDAQLILRLLVEDRFPQIWVPNWENRDLRQLLWHRHRMVQARTRIMNQLQAVALNEGLRCKKRLWRERGRQQLEAFRLAPWASRRRRDLLELVDRLNPTIAELSQAIEQKVEQCPEAQRLMTHPGVGPLTALAFVLIIGEANRFQCGKQVASYLGLVPLEDSSGNRRRLGHGDVSPATGANPGLRPQGLFQTEQL

SEQ ID NO: 300590 - protein, 345 aa, unidentified
MTISKTNKNNHESKPSLQAGIDVGSEELVLVIRKNNKPFDPQKFTNTPADRARLVKKLVKLPGIIVCLEATGIYHFDLAVALHDAGVLLMVVNPKASHNFAKVLMRNSKTDAVDANTLAEYAARMDFVAWTRPTNETIALRCFSRRINSLTGQKAAAKNHLHALTATQETPKAVLRDAKLAIIQLQKRIDLLMAEALVLIGKYPELERVLELLTGITGIANTSAIALMGELLLLPPDLSHREWVKFAGLDPKAFDSGKSVHKKTRVSKAGNRYIRAALYMPALSAKQHDPHVSAYFQHLVVTNGKEKMQALCAVMRKLLHAIHGMLKHDVPFDNTRFYAIPASVG

SEQ ID NO: 300591 - protein, 440 aa, unidentified
MKREAYRSIDVKQVFVESFVADKAGIAAVVGLDVAKSEFMATVRWSDGRFERPWRAKNPEEIPDMIHRLQRLAEGRLLTIAMESTGTYGDAMRQALTDVKLTVHRVSGKAVHDYAEIFDGVPSQHDGKDAAMVAELSAMGKSSPWPYEPLTEFDQELRYLVERMDIQQRIGMLWTGRLESLLARHWPEATRYLELNSETLLQVLVEYGGPAALTADAKAAKRLKAWGGSFLKSEKIERFLQVSASSVGVRQTAVDQRRIQECAQALLLAKHEVQKASKTLEKLAQGNAIIARQAAVVGWATACVLWVYLGNPANYHCAEAYRKAMGLNLKERSSGRYQGQLKITKRGPGAVRRWLYFAAMRLVQHSHVVEWHEVKKGQRAKGGKRALIAVMRKLTLGLYVVGVGEEPFDARRLFSPTVGKRSRSGIRQAKKDEKKQRRGV

SEQ ID NO: 300592 - protein, 377 aa, unidentified
MKKVRFLGLDVHAETITVAIAEPDGEVRSLGTIPNREESVRKLVKKLSPAEQLQACYEAGPTGYVLYWQLTGLGVKCEVVAPTLVPVKAGDRVKTDRRDATKLARSYRAGDLTAVWVPDAAQEALRDLVRARESAKQDQLRARHRLSKFLLRHGRRAPLGVRAWTLRYMKWVREQVQFEQPAQDYTRLDYVHEVEHANDRVRRLEEAIGEAVKLVPVTMREVIQALQALRGIAQISAVTIVSELGQISRFAGARQLMAYSGAVPSEESTGQRIRRGAITKSGNAHLRRVVIEAAWAYRHRPAIGATLHKRQQGVCAEVKEIAWKAQHRLHKRYRSLAAVGKNQPKLVTALGRELLGFIWAIGAQVECHPSQAHRLAA

SEQ ID NO: 300593 - protein, 346 aa, unidentified
MVIVGCDFHPSWQQVSFFDSATGEVQERKLVHGDGEAEQFYRSLPAGSLVGLESCGNSQWFVELVERLGHQVWVGDATQIRASYVRKQKTDKRDAAHILKLLLEGRFPRLWVPDAEVRNLRQLLIHRHRLVEIRTRVKNGLQHLALNRGMQKKSRLWSEAGQKAFGELRLEGWAGCRREDLQRLRRMLEEQIGKLDAAVEQAASADEQARLLMTQPGVGPVTALAFVLTIGDVSRFPRGKQVASYLGLIPSEHSSGGKQRLGAISKQGNSLMRMLLVEAAQTACRLDEGFRKQYQHRCHGKPKGVAKVAAARRLAVRLYWMLRGKVPYPEIVHVESSSRCPMAGAS

SEQ ID NO: 300594 - protein, 310 aa, unidentified
MDKYFVGIDVSKDWLDVHILPSGESFRVANSSSALEPLAKRLSELSPERVGLEATGGFETVAVAELSTVGLAVVVLNPAQVRSFANALGKRAKTDPIDAAVIAAFVAAVRPELRALPDAETRLLADLVARRRQIIAMIVAEEHRARTASGQQLAKSIRRLLAALRRELESLDQDMDGHIRKSPLWLVKQDLLTSMPGVGPAVARTLLGELPELGSLDRRQIASLAGLAPFTRQSGKWRGKSFIGGGRSGVRSALFMAALVASRHNPTLKAFRDRLVAAGKPKIVALIATMRKLLTILNAIIRDQQPWQTA

SEQ ID NO: 300595 - protein, 428 aa, unidentified
MEVVAVTRRCIGLDVHRDFAQVAIWQDGLVRHAGQIATTPESLRLFADSLASSDEVALEATGNTHAIVRLLESHVARVVVSNPQKTRAIAEAKVKTDKVDAEILAQLLAADYLPGVWVADEDTQARRRQVARRAHLVRQRTRLKNQVQAILHRNLVPRRPAADLFGKKGRAWLACQELPADERQAVGALLRQLDFHAEELALIDAALAKIALGCEDTKRLMTIPGVDVAVAMSITAAVGDFSRFSEPNKLVRYLGLNPRVKQSGGQPASHGRITKQGRSHARGMLVEAAWVAVKTPGPLRAFYERIRARRGMQIAVVATARKLAVLCWHMINRGEDYTFARPSLTAKKLRALELKAGRPARRGQKGSAAAYSLKEVRAREKRMAEQAERAYAQMVADWQAKAPKKGVAATNGARLSRPSTGQAARQGS

SEQ ID NO: 300596 - protein, 370 aa, unidentified
MQTVRSFVGMDVHKETISISVAEDGRNGPVRFIGVIPNQPDDIAKMSKRLAKHGELDFCYEAGGCGYNIYRQLTALGHSCTVAATSMIPRKPGERIKTDRRDSQKLAILHRSGDLTKVWVPDATHEALRDLVRARVDASMHLMRARQQLLAFLLRHGRSYPTGKHWTQRHRSWLAGQTFQQEVHRIVFQDYVETVWTAQERRDALIERIGAMTASWSLGPLVEALRGLRGIDLLSAATFICTTGDLSRFESPRMLMGYLGLVPSEHSSGGSIRRGGITKTGNREARRMLIEAAWSYRYPARVAKEKAEILVRLPKNIRDIAWKAQTRLCARYRTMIARGKKPTVVVAALARELAGFIWAIGQEMRTPMMT

SEQ ID NO: 300597 - protein, 348 aa, unidentified
MTMSMIGLDTAKAVFQVHGVDERGRVALKRQLRRGELIPFFEQQPRCTVILEACGAGHHWARLLSGLGHEVKLIAPEAVRPFVKKGKKNDAADAAALCVAGSRPEMRFVPIKSVEQQAVLALHTARSLLVKQQTMLANALRGLAAEFGLTVAKGMGKLAELIALVSMDKSLPAAGRRAMAELYAHGREVADRLVALEAKITSHARHDETARRLATIPGIGPITASLIAATVGDNIGAFRSARHFAAWLGLVPRQYSTGGKVRLGRITKAGNAEIRKLLVLGATSMVWRAAHWNSRAGLWVQGVLARRPVRLVTVALANKMARIVWALMTRAEVYRAQGHALPTVEAAA

SEQ ID NO: 300598 - protein, 427 aa, unidentified
MKTEDIRLEEFRNLKKEVRGSVGHLLVGIDIAKEKHNAFFGSATGKTFLKRFVFDNNREGFEKLLAETDALKQKYGLSQTVFGLEPTANYHKPLGEYLIYRDHEVVLVAGSAVRKNRELLDGRWDKHDVKDAANVADLMAQGKFLYYENPGIEVRELRGLLSLKRKLKKQAQGLHLRIRNNLLAQYFPEMDQYYGTCEKDNLAMVSSCLSPAVIGGMEYNEFFKTVVSRKNGLRQHKHLYRIWQLAKGSIGCEAEEGAACEAGVLVALLKQTRQAIEQVEQEILKLCYTFSEYEFVISIPGFGPDVTAKVLAYIGDQYRFETARQVLKMAGFDLCAARSGKPSEKAVPVISKKGKADLRYALYQAAHVASIRSAHFKQYFAQKIRGREREKGIKTKMKVKLAAKMLVIAWTLMKNKEPFNPDYLTTN

SEQ ID NO: 300599 - protein, 328 aa, unidentified
MPNQPTPTIIGCDVSSKEIVIAYANANQAVKTIANTQKAIVAWLKQLPEDTVIGMEATGRYHDTLADCAASSGRRVYVINPKQLSLYAKGVGQRGKTDPLDAGVIARYVAREGDQLPPYTVPTPTQRMIRNLLSQRAGIVKHCGAIRQCLRDTDSNGSCVLKRAHQKALQSLQALLAEIDSQLKACVKTEAALEQKRALLQTITGVGLLNSLTLTHRFDRTPFANSDAVVAAYGLDPRPKDSGNKIGQRRLTKQGNAEDRRLIYLAAQSAAKTKTFKPMYSALREKGFATAESIVIIARKLLRIAFAVWNSNKPFDPQKISFQPCAKP

SEQ ID NO: 300600 - protein, 455 aa, unidentified
MPRKTSGDRPELKPVNVGAAAIDIGSKMHMAAVNPACTDVPVRTFATFTQDLHDLADWFKACGVTSVAMESTGVYWIPVYEILEQRGFEVILVNARYAKNVPGRKSDVSDAAWLRQLHSYGLLRGSFRPDAEIATLRAYLRQRERLVEYAAAHIQHMQKALMEMNLQLHHVVSDITGATGMRIIRAIVAGERNPDVLATYRDVRCHSSIETIRAALVGNNRHEHVFALTQSLELYDVYQAKMLDCDRKLEALIAALNNKGVKSVGKLSKPRIKTKQVNTPTFDVRAALYGVLGVDLTEIHGLGPSLALKLIGECGTDLRAWPSAKHFTSWLCLAPGNKISGGKVLSSRTRRSSSRAAALLRLAATTVGRSDTALGAFYRRLSSRAGKSKAVTATARKIAVLFYNTLRHGMSYRDPGADQYEQQYRSRVLANLQRRAKSLGFVLQAIPGDANPAVS

SEQ ID NO: 300601 - protein, 356 aa, unidentified
MYNAKYIGLDVHQATISVAVMDSTGKVVMESILETKATTILEFIQGLRGSLYVTFEEGTSAAWLYDLLVPHVSKVVVCDPRKNATLKVGNKSDRIDARKLAELLRGGHLSPVYHGENGVRTLKELARSYLAITKDLTRVMNRLKAVYRSWAIPCAGTRVYAAHCRAEWLKQLPETGVRRRAERLYQQLDMLQPLRQEARRDLLAESRKHRANRLLRQIPCIGPIRAALLIALIQTPHRFRTKRQLWAYCGLALETRTSAEYRIVAGQLRRSKKLLAIRGLNRNHNHDLKYLFKSTATLASSRCSGPFREFYDALLAKGLKPPMARLTVARKIAAITLTIWKKGERFDAEYLKRQAA

SEQ ID NO: 300602 - protein, 412 aa, unidentified
MEVMYARCAGLDVHKETVVACVRIVEGGEVSRSVRTFATTTASLIELGEWLEVNGCTHVAMEATGVYWKPVWQVLADSSFELVLANAAQVKNVPGRKTDVNDAAWLSELLAHGLVRASFVPEPAIQELRGLLRTRKQLVREKASHVQRLQKTLEEANIKLETVLSDVMGRSGRAMIQALIDGETDPAKLAALAHWKVRASAATLREALHGRIKRHHRFLLRLHLQQVDALDAAIAEIDREADAGLACFRDAVKQLSTIPGVSELSAQVILSEIGTDMGRFATAAHLRSWAGLCPRNDESAGKRRSTRLRRGVPWLKAMLVQCAWAAARTKATYLHAQFVRLRGRRGPKKAICAVAASILTAAYHMLKDGTFYEDLGAVHFDRRRPETQARRLVKRLAELGFSVELKPVAAVS

SEQ ID NO: 300603 - protein, 313 aa, unidentified
MAKFSNHPSGHKALIAHLLRGSRRVRVCLEASGNYTLDLALTLQAHRQVEISVINPRRARRFAESLGQRSKTDPVDARVLGEYAARMPWVAWQPPSSVALHLRAVARAIADLGVIHTQQNNRAHASAASQALPVLVVKEMQRHQKYLEQRMTRLRREALRIIAGDPELDRRFRLMLTTTGIAETSALLILGELAVLPDMLDARQWVAFSGLDPRLFKSGKSVEKRPRISRGGSRHLRRALYMPALVALRRDPYLRCFYQNLLARGKARLQAVVAVMRKLLHALFAMFRTNQRYDGSKLCCAFEMAGHAIATRA

SEQ ID NO: 300604 - protein, 373 aa, unidentified
MKEKLRFLGLDVHAETIAVAIAEPDGEVRSLGTIPNRTESIRKLIKKLGPTEKLRACYEAGPTGYVVYWQLAKLGIQCEVVAPTLVPVKAGDRVKTDRRDAEKLARCYRSGDLTAVWVPDDGSEALRDLVRAREAAKQDQMRARHRLSKFLLRSGQRPPSGVRPWTRPYLIWVAQLRFTQIAQEATRQDYLHEVEHMRERVARLEQAITEAVKLASPALQQVINDLQALRGIADISAVTIAAELGQVSRFESARQLMGYCGAVPSEDSSGKRTRRGSITKTGNAHLRRIVVEAAWSYRRPPCIWYGLRRRQESISQEAKEIAWKAQHRLHKRYMRLGAAGKDRRKITTAVARELLGFIWPLEPEQRLSPTSTL

SEQ ID NO: 300605 - protein, 411 aa, unidentified
MEVVHARCAGLDISKKDAKVCVRIAGAGRRKTVETVTTWSSMTSQILALREHLIAERITCAVMEATSDYWKPFYYLLEDAGFDVLLVNSRHVKNLPGRKTDVADATWLAQLGAHGLVRASFVPPEPIRQLRDLTRTRTALTRERSREVQRLEKLLEDAGIKLSAVASDIVGVSGRAMLESLIVGNRDPAALADLAKRRLRSKIPALTEALSGRFTDHHAFLARVHLDLIDQHTAAIDEITIRIEEMIAPFHGFRDLICTIPGISTLTADVIIAETGADMTRFPTAAQLASWAGTTPGNNASAGKVKSSRTRPGNPYLQGALGAAAMSCAQNPRTYLGARYRRIASRRGPQKANVAIQHSILIAIWHMGTNGCLYDDPGADYFNRLHPDRAKKRAINQLQAMGYQVTLTHAS

SEQ ID NO: 300606 - protein, 321 aa, unidentified
MNPVSCVGIDVAKAKFDVALLKPNGKYRSKVFSNNSEGFRQFLDWLEKQEALKAHLCMETTGAYGRSLARFLAQQQLVISVMNPALIHAFGKTELSRAKTDKADARLIARYCQMHRPAPWVPPAEAIVTLQALVQRLDDLLGMQNMENNRLEMAEPAARASIEALLLTIHQQIDAVRRQIQDHMDDHPDLKSQKALLLSIPGIGEATAAMLLAFLSPLTRFHSAKQVVAYAGLNPRIRESGQWAGKSHIAKAGNVLLRKALYLPAVVAKRYNPAIAAFCDRLLSRGKCPMQVIIAAMRKLLHITYGVLKSGQPFDPEKALA

SEQ ID NO: 300607 - protein, 336 aa, unidentified
MNPSSCLGPSPNYCKIGSSEAMSQFNVFVGIDVSKDHLDVHVLPEDRSWRVANDEAGCTELSERLSGLSGVLVVMEATNVFWRLAATRLASAGVSAAVVNPRQVRDFARATGQLAKTDAIDAQVLALFAQRIEPPVRALPSEQCQVAAELLARRAQLMGMRVAEKNRLATARAAKVRKDITATIAFLDKRIGALDEEIDQWLKSTPIDQSRANLLKSFSGIGEHTAKSLLITLPELGSLSAKQIGALAGLVPFARDSGNKRGQRQIRGGRSTVRAALYMPAITAIRCNAVIRALYQRLIGAGKHHYVAITACMRKMLVILNAMLKSNQPWKNPQEV

SEQ ID NO: 300608 - protein, 370 aa, unidentified
MNRLFVGMDVHKEKIVVVGLPEEGSHPVVREEFGGGDLPRLTKRIQTLSRSWQVESCYEAGPSGYGLARIFLEAGIPCRVVAPSLIPRRPGNRVKTDSRDAKELALALRAGTLTFVRIPALEEEEARGLIRCREDVARQVRLFKTTVSHWLLNRGHRVPAGRKRWTPAYWKWVRALPLSPMDRTTLDHYLDVVSLLENRRKQVEEQICALAKEDPYRERVRRLTVLRGFSPLAAMRLIAEVIEFKRFRSAPSFMKFTGLTPSEYSSGDRTRRGRITKAGNSHLRHVLVEAVQKAHFSAQPGRALLRRWQEVSGPVRQIAVDCLKRLHHKFWSLTQRGVPAGKTRVAMARELAGFVWALMTYPAGETPAAV

SEQ ID NO: 300609 - protein, 322 aa, unidentified
MAMLSFGGIDVSKDRLDITVLPDEQCSSVSNDAAGWAELVEQLRGSSITAIGVEASGGYERGVVRALLAAGMSVRQINPFKLRQFAKASGTLAKNDRLDARMIASFVAVMPTRPAQRQAPMIEQLAAMLTVRRQLSEQKVATENASRLLEGAMLQRLSRRRVAGLTADIDLLDQRLVEIVTADAALAHRFRLLTSMPGVGAVLACTLIALLPELGQMSRKQVAALVGLAPYDFDSGKLKGRRCIWGGRARVRHVLYMAALSASNWNPALKAFHDRLAATGKKPKVVIVAVMRKMITTLNAMLRDGTAWVDRYSGRRSATTAR

SEQ ID NO: 300610 - protein, 337 aa, unidentified
MEHIAIDLGGRNSQVCIRNAAGQVVHEKRCPTSALKAFLADRPESRVVVETCAEAFSIADAALAHGHEVRVVPATLVRSLGVGARRTKTDKRDAQVLSEVSSRIDLPSVHVPSQEARQRKTLCGMREGLVQARTPLRVRIHFKQASLQLPRCVERQLTVVEQLSSSIQEATDELEAAAKKDETCRRLMTVPGVGPTTAVRFVAAIDNVGRFPDAHKLESYLGLVPGEDSSSERQRRVGITKAGPSALRWALVQSAWSARRCSQKDPMHEWANEVEKRRGKRVAVLALARKIAGILYALWRDGGTYVPERGSRSLSPMEEALTGHQPRRARIQSRYRK

SEQ ID NO: 300611 - protein, 355 aa, unidentified
MNTAGIDVSAKTVTVVISREGRSGKPREFKNMPQGHTALSNVLRKAQVTRVCLEATGSYHLDLAVALDDAGLEVMVINPKAAKEFAGAMQTRSKTDAVDATLLAEFAQRMPFKPWQRPDDLALGIRACARRITALGKQRTQTKNQLHAARQTALTPDFLLANLQHNIEYLDAQIEHLRQRVLDLIAADAHLQQSFDLLTSITGIAAASAIQLLGELLVLPPDMKAKQWVALAGLDPQVHDSGSSVHKKPRLSKAGNRYLRIALYMPALSAASHNPRQGLLPPPHRGPRSQEDPGRLRRDAETPDGYPRHAQDPLNLRQPPLLFLDRNDCLINLVYGREANWSCIGTEYLPELFCW

SEQ ID NO: 300612 - protein, 389 aa, unidentified
MSSESTAVTALAAVARSIIYLGLDVHKDSITTAVLPKGAATPTRVERLPNDLPRLKRFLDRLARDGDLRACYEASGAGYVLQRAMREWGYACEVIAPSLIPKRPGVNRKHDKRDATELARLYRAGELTPVRIPSEAEERVRDVVRCRETFQREILKSRHYILKFLARRGLVFREGTNWCTPHLRWLKHLTTEQSPLSPADRLVFREYHALLEYKLQRRDDLDREVARLAELPTLAPAVQRLQCFRGIALQAAMVLVTEIVDWRRFERPTQLAAYLGLVSREDSSGDREWRGSITKAGNSHCRHVLIQAAWSYHHRPAVSMDLKRRQAGQPPSVIAHAWKAQQRLHQRYNHLSYRKQRQIAVVAVARELVGFLWAVMQDCASPAIGESAA

SEQ ID NO: 300613 - protein, 361 aa, unidentified
MEGANLSRISSFVLGFEKRRFWIGVDVHKNSYSIALRRSDNAHLTWTSPASPKLLVDQVRRFGIDVSTVAYEAGPTGFTLVRELKSAGLNVIVAAPSRIPRPVRAGAKCDRLDCIKLSDYAARGMLKSIAVPSIDEEARRALLRRRHALVDSTRRCKQRIKSQLLYMGVKAPKEITHWSKASARALKKVPMRPCARLVMDSLLRELDFLNSELRQVERELFRAVKDRVSGSSISYLKSVPGVGPIVATSFALELFRPERFTKADQVSSYLGLAPMVRQSGQSRSSGRLVPVGQSRLRSLLIEAAWSWKSKDPYAAALYNRFVSRMGIAQKAICAVARKLAIILWRLIVEKGFYRSQLAATG

SEQ ID NO: 300614 - protein, 494 aa, unidentified
MKTSNQTKTTSVYRNQNVLLRAVFERAGDTRKVLCVALDYAKRKHVALICDGNGDILRAAFPVENNPAGIDFLIKEVSATARRRKIPRNQIFLGGEDEAAYVANFTAALRDKGYLVVRVNASEAKENRENLTASTDALDLLGIAKTLLARRARLTGDPDRADPAYHHLREINRCRRGLVRQKTAASNRIHALVDQLFPGFLNDSKSGLCAFTGASLELMKERFSAPEVSRRRPAALANLLRRHHVHHPDETAAKIITLARGALPPAPHRVATLQRTLAATVDLYGCLERNASELRNEAALTLATTPYAMLTSIPGIGFVLAAGVAGELGEPKQLARVDSLCGYAGIVPHTFQSGGPDSAAVQGHASKRCNHILKDWVVQSAQKLHLYGPPELKDRITRWNANGQHGIFAAARRYLRLVRTLVLNEIPYLGPEGRARSADPDRLAASALHTWAVLQRKWRLIPGGLDLIADEAHPIGFWRRVIKETHGIDLPARP

SEQ ID NO: 300615 - protein, 357 aa, unidentified
MDKFIGNSGVVTRVGLDLGKNAFQVHAVSAKGEIVIARKLARGRLVAFFAQLPPCLVAMEACGSAHHWGRQLAALGHEVRLIPPAHVKPYVRRNKSDAADAAAICEAAGRPGQRFVPLRSIDNQAALMRHRARELLAGQRTALLNALRGHMAEIGLVAPQGAQHAYELKRLAADGFDENGEIVVPDCVRGALSRLVDHIDALDEAILAIDKELAASVKADATARRLTTIPGVGPVTASAIVATIQDMSAFASGRDFAAFLGLTPRQSSTGGKPRLGRITKMGDRYLRKLLVVGACAVLGRRKGHKDALRLWASALLDRKTVKYKFKLTAVALANKLARVVYVLMTRGGEYDGRPVAA

SEQ ID NO: 300616 - protein, 324 aa, unidentified
MSSHEIVGIDVAARKLVVIGERLTLAEYENTAAGRSKLVNALCRNQRPVRVVLEATGIYFLDLACALAAAEIAVMVANPKATHHFAEAILQRRKNDPVDAAMLREFGRRMDFVSWQPPRHELFGFRTLTREVQALSKTVAAARNRLHAITATQLAPTAVIGALERQIAHNQALIDELVAAAVAQTESDPELARLLARTDSVPGFAAKAAVLVIGELAVLPPMTARQWVAQAGLDVREECSGTSLARRPRLSKRGNKRLRVALFYPALTAARCCPAAQAFVERLVTHGKTRLQAIVALMRKLLHGLHAMWRNDEDFDAEKLFAPA

SEQ ID NO: 300617 - protein, 386 aa, unidentified
MQKLKDLSRCLTPLEPDGTLIAVIEMSRSSWLVAGIVPGVERQPLKKLAVDESVLLKLLHRWREEAEKAGYMIKRIAVAFEAGRDGFWLARWLRARDIEVHVIHTSSVAVSREHRRAKTDRLDTELLKRAFLGWLRGERDHCKMVAIPTIMDEDGKRPNRERENLVGEQSRIINRIKATLVRLGIRGFNPKLKKAAERLQGLRTPEGEPIPPNTLSELRRNMERRRLVRDQIRQIESARRDRLEHAPGEGAHAMVRLLARVMGIGIETADMLVQEVLSRNLRDRRAIARYAGLTGSPDESGRKRREKGLARCGNPRVRRGMIQLAWRFLLFQKDSALAQWFQARTQNARGTRKTMIVALARKLLIALWRLVRDGVVPDGVILRPAQ

SEQ ID NO: 300618 - protein, 379 aa, unidentified
MAAIWAGIDAGKTHHHCVAIDESGRRLLSRRVTNDEPELLELLADVLALGDKATWGIDLADGGAALAIAILLNHDQPVHSISGRAIHRASESYRGEGKTDAKDAAVIADQVRVRRDRHPLRAGDETVVDLKILTGRRMDLVADHTRTVNRLRAQFSGTFPGLERALDLTNTGPLTLVSGYQTPAAVRRLGAKRLETWLRNRHVVRADKLAETAVQAAERQHTSLPGEKLTAEMVHTLAMEVMGLNQQVAELDKLIEARFRDYHDFEVITSMPGLGIILGAEFLAATGGDMIAFGTPDRLAGFGGVAPVPRDSGKPSGNLRRPQRYNRRLQRVFYTSALFSIRHCEESRRFYDRKRAEGKRHTQAVLALARRRVNVLIPL

SEQ ID NO: 300619 - protein, 412 aa, unidentified
MDLLYPHCAGCDVHKDTVVVCVRHQQAGGRVRKEVRTFGTVTRDLLALLDWLIAEGVTHVAMESTGVYWQPIYAVLEEHVTILLVNAQHLKQVPGRKTDVRDCEWIAQLLQHGLLRASFVPPRPIRELRELTRQRTQLVAQKASVANRIQKILEDANVKLGSVASDILGKSGRAMIEALIAGETDPAKLADLALRRMRPKIPQLQLALTGRVTPHHRFLLKLLSDEVTALEGFIERLNLHIEAVMVPFVEAQKRLTTIPGVDRCVAEKVVAEMGVSMDVFASAHHLASWVGLSPGNNESAGKQRSGRITRGNRWLRSVLVQAAWATTRQRNCYLAAQYRRLAGRRGKKRALIAVAHSLVVIIYHVLKRGTTYQELGADFFDRTNKERLTRHLIRRLESLGNEVKVQPVVVAV

SEQ ID NO: 300620 - protein, 316 aa, unidentified
MQSILDLGADVDSRFVVVACAAGSFRPQRIANERKALLAWLRTVPGGSRLGMEATGGYHELLAELACKARLQVFVINPRDLRRYAEGIARRGKTDRIDAEVIARYVAREHSDLHAYVPPSKAQRRLTQLMARRAKLVQIKGSIEQSLRGVAALRGEAKRLSTSINRLIKRLERMMQDTLQQMPAAREAAEHIATITGFGPLGSTCLGHSFTRLPYANSDAVVASSGLDPRPEDSGQKHGRRRLSKRGPAEQRRILFNCARSAALTKLWRPYYEAQLAKGLSATAATVILARKMLRVAFAVYKHRQPFNPALLGRQA

SEQ ID NO: 300621 - protein, 370 aa, unidentified
MAPASTLFVGLDVHKETIAVAYVGEEREAEVVSLGTIGTRQKDIDALVRKLQGKGKRLHFVYEAGPCGYWLYRYLTKQNLKCWVVAPSQIPKKAGDRVKTDRRDAVQLARLLRSGDLSPVYIPSVEAEAIRDVVRAREDVLKDLKAAKVRLKAFLLRQDIRYEGRANWTAAHLRWLANVVCPTPAQQIVFQEYVRAVSEQTERLQRLEAELLPLVQTWRGAPVVAALQALRGVQFLAAVTLIAELGDLTRFETPRQLMSYLGLVPSEHSRGERRRQGSITKTGNSHARRVLVEGAWAYRYPAKVSRHLQLRLEKVPKAIQDISWKAQVRLCKRYRRLVARGKNVNQVVVAIAREMAAFVWAIARAVQVAH

SEQ ID NO: 300622 - protein, 410 aa, unidentified
MEPILISCAGMDVHEKKVDVCIAQGPLDKPPIFEIRAFSTMTSDLEVLKLWLKKYEVTTIAMESTGVYWKPIFNIMEDEFDVVLANPQHIKALRMNKTDIKDCKRIANLLRHGLVPRSFIPPREIRELRDLNRTRRKLVGIMASEKNRVVKVLEDANIKLSSVVTKIYGVSSLSMIQALLEKDKLSREEINEMAKGKLKKKVDQLEKALNGRLTGHHRFLLRMHLENIQYLAGQIKKLDDEIQQKMVPFHEESKLIQTLPGISEISASAILAEIGIDMSQFPDEAHLCSWAGVCPGNNESAGKRKSGKTRKGNSFLKGTLTEAAWAASRTKGSAYYAIYHNLAKRIGKKKALVAVAHRMLIDIYRVLKTGEPYQEIGAEATHERAVARRERSMIRLLERAGYSVTRAATA

SEQ ID NO: 300623 - protein, 354 aa, unidentified
MPSKVTKPNTSAYPKLMSIGLDIGKDVFHLVGFDHNGKVVLRRKFRRLALDAVFEKLPRCIVGMEACLSAHFVSRRLRALGFEPRIIPAIYVRPFLKGQKNDYNDAEAIAEAALRPNLKLVKEKTQEQLDLQACHRVRSRLVSRRTATINQIRAFLIEHGITIRTGANNLRRSLPEILLQRADELSPRMRVLIEELHGDWLRLDARIEALNEEIEEISRQEKSCQNLMTIPGVGPLISTATVAAIGNGEAFERGRDFGAWLGLVPRQYSTGGKPILGRISKRGSKYLRTLFIQAANVILMRPQNWPRYSFGGWLVTAATRLHRNKLATALANKLARIAWSVLRYNERFDDAQTI

SEQ ID NO: 300624 - protein, 385 aa, unidentified
MSQPNDLSRSLTSLEQDSTIIAVIEMSQSSWLVAGIVPGIERHPMKKIEPSQEELICLLMRWRAEATKHGRTITRIAVAFEAGRDGFWLARWLRARDIEIYVIHPTSVAVSREHRRAKTDRLDTGLLKRVFIGWLRGEPDHCHMAAIPTLAEEDAKRPNRERERLVRERTRIVNRMKSCLVRFGVRNFKPTLRKAPERLETLQTPEGVPLPPNTLLELRRDMARLRFVMDQIKQVEEARAQRLEQAPQEKSHAMVRLLARVIGVGIETADMLVHEVLARNLRDRRAVARYAGLTGAPDESGSKRREKGLAKAGNARVRRGMIQLAWRFLIFQKDSALAQWYQTRTASVGKKRKTMIVALARKLLIALWRLVTTGEVPAGVVLRAA

SEQ ID NO: 300625 - protein, 405 aa, unidentified
MNMLPQLQVAVDIGSREHYVAIGLIDGCILDEFAIAHTPAGFDLFFHRIEQQERLYALPVAVAMEGYNGWARPLDSQVLQRGYQLFNVNNLKLARFKEIFPAPAKSDVIDARKILELFQLQSHLPLAKGVLQAVEPVPEANRRLKRIARRRRQLVNEKIRVQNRLQSDLQAVCPSLLDITKSVDNLWFLHFLTCRELLPKLQRLHIKSLLEIPGVGLNYASLIRDWQSQARFSDEAEYVCPMILEDARRLLALMTTIKALESEIDQQMTDSVCAQHIDTIPGFGRVCSAELAGEIGTLDRFPKQSSFSLYLGMAPLDNQSGAHKGAKPPKHVNTRARRAMMTAACRHMACVPESRAYYDKKRAEGKTHNKAVRALGRHLSRVIWSMLRDDRDYVEPNLAGEKKVA

SEQ ID NO: 300626 - protein, 379 aa, unidentified
MRHVCGLDVHKDSVFVCILNEKGVVFQEKFGVLTPELERMVGVIMEHGVTEVGMESTSVYWMPVWRVIDPYVEQKLVNPYFIRQLPGKKSDVKDAEWIATCILKGLVRGSYVPEERIQRLRQYDRRIFDLNDDIVHKLTRLDAALQRCNIRLSNYVSTTDCKSYGDVVDAIARGETSPDALLRCVHGRIVNRHGADVIRSALTGVVTPVDVDVIRQLREEIELASRHRDECQRRMDGLCSEWFPEQYANLQTIPGVKARSATAIIAELGTDMSSFEDAAHLVSWAGLRPRNDESAGRIKARGITHGNKYLRKTLIECAWGASRTRGCFYSRFSHHQTVVRRKSRMKVQVAIARKMLSAIWFILHDGVAYRDFEGDANAA

SEQ ID NO: 300627 - protein, 346 aa, unidentified
MTIVEDTRAITGGVDTHADMHVAAALDPIGGLLGAGEFPATTAGYARLLGWLGGFGTVALVGIEGTGSYGAGLARHVTTAGIRVVEVDRSDRQDRRRQGKSDPLDAVSAARAAQSGRARGAPKGRDGAVEAIRALMADGRSARSERTQTISQARALVLTGPDDLRARFARHTAAGLVPELASLRPRPGDTVGYATRIALRELGRRAEFPGGQLGRLDELIVPLVTARAPGLLALYGVGPDTAALLLVAAGDHPHRLRSEAAWAHLCAAAPIPASSGKRTRHRLNPGGDRQANHALWRIVITRMSSHAPTRAYVERRTAEGMPEKEIIRCLKRYVAREVYRHLRAAG

SEQ ID NO: 300628 - protein, 337 aa, unidentified
MEVYAGLDLHSTNTYVAMIDEENKVLYKQRHRNELPSILSALDPFKKDIKGVVVESTFNWYWLVDGLAAQGYPVRLANPSAIKQYEGLKQVDDKRSSLWLANLLRLGILPTGYIYPKEERPTRDLLRKRLHLVRHRTSHILSVKNILARSLGIGMRSKDVKELTDAHVKALFPDKEMRLAVMASVDLIRHLQENIDDIEKVVKKKVKLKEEFAKLLTMPGIGEILTLTIMLEVGHIDRFPTVGDYSSYCRLVKSTRSSNGKVTGHGNRKSGNKYLCWAYIEAAQFARRYHDTVRSYYERKMAQTNRIVATKAVSNKLARASYFVMRDRVDYDQARLF

SEQ ID NO: 300629 - protein, 419 aa, unidentified
MSFKILKFNCCGLDVHKTWIYACIGITDSNNRTEYKQSRFSSFSKGLHELCNWLAKYNCKDVCMESTGKYWIPVFNILEQHDIWVTLSHPKYTKPMKGNKTDRKDAKWICDLYMCGMVKPSFIPPADIRDLRDLVRYRFKLTCMITGEKNRAQNCLTVSNLKLDDVFSDVFGKSSRSITEQILQHPGEKFDVSPYVDSRCKTPIAEIQAAVDGAISKEQAVKLRQCLDHIDELQKHISEVEQEILRLSDKYEAALNLIRTVPGFDKNPMTSIQVLSEIGGDMSVFPTAKHLVSWAGCCPRNDKSDRKIKSTRISRAGSYFKPVLVQVANALIKSKKHLEFTTRYKRIKARRGHKKAIIAICRMILTAIWHILTDLKPYTPDGFLESHPVVKEKVLTTSQALNLLKQRGYFIKDDPLSVS

SEQ ID NO: 300630 - protein, 402 aa, unidentified
MNCVGIDVSKGKSMIAVMRPFGEVVVSPFEVRHTASELSELARLLKNLDGETRVVMESTGNYHAPVAWLLHGAGFYVSVVNAMLVHDYGNNSLRRGKTDKKDAVKLANYGLDHWLTLPRYVPEEDTRLMLKTCYRQYQQYSKVQTMLKNNLISLLDTAFPDANRLFTSPPRTDGSEKWVDFVATFWHCECVCGLSKKAFTAKYQKWCRKHGYNFSQDKALDIYASACGRFGVMPKTNTAKLLVEQAISQLQTTSAALAALKQEMQSLAASLPEYPVVMEMFGVGPTLGPQLIAEIGDVRRFHSKKALVAFAGIDAPPYQSGQIDVRSRSISKRGSASLRRTLFLVMGVLLQCAPMDEPVYQFMNKKRSEGKPYRVYMMASANKFLRIYYASVKAYLDSLEHD

SEQ ID NO: 300631 - protein, 439 aa, unidentified
MPTPFLPVLDATAAAIDIGSEQLHVSIAGGPPKVFGTTTGQLHALRDYFLAQGVRSVAMEATGIYWLCPYEVLEKAGLQVVVVNGKYVKNLPGRKTDMSDCQWQATLHAHGLLRPGFVPPEHIRRLQDYLRLRSDHIVMAGSHEQHMQKALERMNLKIHDVISDLTGVSGLKMVEAIVAGERNPEVLLALCDPQIQKKKAGRLRAALEGTWKDEHLFALRQAYELWQFYQKKIAECDQTIEGVLKALVGPEDPANPTPPATKRGGVNAPQIAGLHGLLLRLCGGKDPTQLPGIADYVLLQLLSEVGTDLAKNWRTEKHFTAWLGLAPGSRNSGKRRASQRRSRNRAGRLLCVIARSVGRSVDKALGGFYRRIKGRKGGLVANLALARKLAELFWRLMVHGITYVEKGLRKYEEKVAQTEQHLLQKLARKYNMMLQPAIG

SEQ ID NO: 300632 - protein, 366 aa, unidentified
MKIIHWVGIDDHADKWTIAQYKGNESKPAKEFELVPDESGYRKLIKFLKELDGEARVVYEAGPCGFDLYRRLKKAGLWCEVAAPSLTPRKPGDRVKTNRRDAAKLGDYLRSGLLTLISVPDERRESLRDLIRARQAVQKDLISIRHQIVKFILRYGLRYREGKTAWSQRFWAWVSKIKLEGEYGQFVLDEMIRTHKQRLEQRARYDEAIEAAAKRPEYAMYVAAFSVLRGIDRLSAMTILSELGDLRRFPTAPQLMGAVGLVPAESSTGDTTTRLPITKTGNAHVRHIAVEAAWQYQRRTTNGPTIKRRRKDQPQALIDIAERCDLRLNRKFYRMTSRGKRSTVAAVAVARELMGFIWAIGQIVHP

SEQ ID NO: 300633 - protein, 343 aa, unidentified
MGRKIGVDLHKNSFRVCYYASDKKYDFATYLMSVKGLEGFKKGLKKTDELAVESTGNTGHFVRAIEGAVKRVRVINPIQFKVISESVKKTDDEDALKIARFLSKDMIPEVRMKSKSESQLGSLIGTRDKLVKLRTALKNKVHNILNANGIVTKTELLTSDKSLDKVLGKGLDASYQFELEIIVGEIRHLNEAIAKIDEQIKDKGQKLKGYKNVTSITGVGDLSGTILLNAIGDVKYFRDEKALASYFGIVPRIHASNETVRMGRITKMGNKIARTALVQSTLIAIRYSPYLRAFYDRLKAKKGSGKAIIATARKLLGIIYNTLKNDWIFEDFASYKLAPKGAY

SEQ ID NO: 300634 - protein, 341 aa, unidentified
MGEVCTIGLDLAKRVFQAHGADASGAVLFRKKLRRHQLLAFFSSQPPCTVAMEACGSAHHWAREIGRLGHAVRLIPPAYVKPFVKRQKNDAADAEAICEAAQRPTMRFVAPKSEQTQAAALVFRARDLLVKQRTQIINSLRGHLAEFGIVAAKGPARVPQLVQAVEDPDEPLPEIARPILQMLIETLRGLDEQVTRLDDEIAQLAKENDAARRLMTIPGVGPVIAVALPALAPPAETFRRGRDFAAWVGLTPLQRSTGGKQKLGATSKMGERTLRRLLIIGANSVLLQVARYGAPAGSWIARMVARKPPMLVRVALANKMARIVWALLARGEVYRAPAAVA

SEQ ID NO: 300635 - protein, 360 aa, unidentified
MKIIKQNLGIDVDSKELKISFQVLTADLSIKIKGRRTFKNTVKGFKDLEQWAEKKRVKDLALDLTMEATGVYYENVAYYFQEQSSYLVHVVLANTSNAYLKSLNFKSKTDEIDAQGLGQMGLERKLAIWKPVSVQMRDLKKLARERLRLLKEKTMVINQLHAEQASYDPSSTAFRRYKKRIDFLVEQVNEIEKELEQIVDKDPSLRQKIDHVCTAKGIGFITAIGVVAELNGFILFNNRNQIVSFCGYDVIKNESGTSIRGKTKMSKKGNSYVRQMLYMSAMSAAVHDEHHKAYYLRIVSKTGINMKANVAIQRKLLLLIYTLFTNNVPYDPLHFLKAQKRVQPKKNVSVNKKTVKELAP

SEQ ID NO: 300636 - protein, 349 aa, unidentified
MTIVEDRPVITGGVDTHADLHVAAALDPLGGLLGVQEFPATAAGYASLLGWLGGFGDIALVGVEGTGSYGAGLARHLAAAGIRVVEVDRADRQDRHRAGKSDPLDAVSAARAAQSGRASGAPKGRDGTVEAIRALMVAKRSARAERTQAINQARALIVTGPDELRARFAGSRPAQLVEAIAALRPRPGDVPGYATRVALRELGRRAQFLDAQLDRLDELIGPLVTARAPGLLALHGVGPDTAALLLIAAGDHPERLRSESSRAHLCGAAPIPASSGKVSRHRLNRGGDRQANHALWRIVITRLGSRPGHPATRAYVERRTKEGLSKKEIIRCLKRYVAREVYHQLRAGA

SEQ ID NO: 300637 - protein, 394 aa, unidentified
MFFIGIDVAKRSHQAAVTDISGNVIVKPFNFKNSSDGFTKFLSIVESTAIEKNDCTIGLESTGHYWYPLYFFLIENGFDVKVFNPIQTAAFREITIRKVKNDNLDSLLIADFTRFGRYSETYIPDENMLALKNLTRFRLSISDICGSLKKKVIAILDQVFPEYTGVFSDVFGKTSKQLLEQFSTPDEFMDISTTKLTNLLLKVSRGRNGREKAELIKTAAQSSIGISYALDAFSFELKQLLAQIEFMENQLSDVDAEMEKLLSQSEYAVITTISGIGPMLGSVIVSEIGDINRFENSSKLVAYAGLDASVKQSGEFNSSKNKISKRGSPYLRRALWMAAFMSLQCDPALYDYYSKLRARGKTHRCATTAVARKLCIIVWAIMKSKKPYSPVLKN

SEQ ID NO: 300638 - protein, 376 aa, unidentified
MSHHSPAVRRSGPIPSTSSPGKESTHGYAGRPRRARHRVDTHKHTHTAAVVVAATGALLKQATVPATPAGYQQLLRLAGRQDGRRVWAIEGTGGYGAGLTRFLAAHAEQVVELDRPKRAARRHGAKSDPLDAIRAAREALGRNRLAQPRAAGHRAALAVRLAARRSAVQATSDAQRQLHALVVAAPETLRGRLRGLTTPRLVSTCGRMRQQTGWDVETAATAASLRALARRIQLLEVEIAEHTRAITTLVRAWRPDLLTRTGVGPIVAAIVLCAWSHPGRCGSDAAFAMLGGAAPIPASSGQTVRVRLNRSGDRHLNQALHLVVLTRLRYDPATRAYAQRRRAQGKTNREIRRCLVRYVARQLYRLLEANPAIDPT

SEQ ID NO: 300639 - protein, 369 aa, unidentified
MKIAGIDVHKKVLMVVVIDATMPEEKPERRRFATMPSEMRRLSVWLREQGVEEAVMESTAQYWRSVWLELEPYMRLHLAHAFSNRAPRGRKHDFKDAERLVRRLIAKELILSFVPDGEQRIWRSMTRMKLQLTRDRVRLQNQMECLLEEMRIKLSIVVSNLLGASGLRILGALAKGETDAHRLAQLGDERLQCTEEQLVDALTGRVHPMHREMLALQLQRLQMIDQQIVELNGLIAQAMKLHQDAVQRLAEVPGLGVDSAQQIIAEVGAQASTFPSAAELASWVGTCPGKDESAEQNHSSRYAKGNKYLRRVLNQAAHAAVTVWFGRSCTRGCDLSSKAANLILRPRRNALRCWLERFASLATKSQSHP

SEQ ID NO: 300640 - protein, 443 aa, unidentified
MSKFKKTFDLTYSNAAGIDIGASSHFVAVPVDRDEQPVREFASFTEDLHAIADWLTACGIDTVAMESTGVYWIPLFELLESRGFTVFLVNSRHVKNVPGRKSDVLDCQWLQQLMSFGLLSGAFRPQGDYAALRVVARLREMLLRYQATHVQHIQKALLLMNILLTEVLSDVMGETGQKIIRAILAGERDGETLARYRNGHVKASEEEITKALQGSWRDEHLFSLKVAVELYDFYAEQLVACDQQIEQLMKDLARYDLKPEKPKRRGGKPKNAPKFDARLLLMQMCGVDLTRIDGIDVTTAFKVLSEIGADMSKFKSAKHFASWLGLCPGTKISGGKVLSAATKRTANKAAQALKMAAVNLRNSQSALGAYYRRLCGRMDKGKAVTACAHKLARLIYAMMTKGEEYVDQGQTYYEEKYRERVIKNLTKRAEALGFQLAPAPEMA

SEQ ID NO: 300641 - protein, 338 aa, unidentified
MKLYGGIDLHSNNNVIALLDDTDDVIYRNRLPNDLDCVLQALAPLQERIEALVVESTYNWYWLVDGLMTAGYRVCLANTAAIDQYAGLKYADDDSDARWLAHLLRLGVLPQGYIYPKERRAIRDLFRKRSQLVRQRTSNVHAIQNLMSRNRGHGMSANAVKRLSEEQLDDLLADPYVALALKSNLTVMQCLDKQIQELEKVVKGQIKLEPGFSGLLTVSGIGDILGLTIMLETGEIGRFSKVGNYASYCRCVGSEWLSNGKRKGKGNTKNGNKYLAWAYVEAANFAVRYNPQIKRYYQRKLARSNGVVAIKTVAHKLARACYYIMRDRVPFDVNKAFA

SEQ ID NO: 300642 - protein, 367 aa, unidentified
MRKSSKVFVGMDVHKESIDITLAEAPGEVRRWGQIGGDRAALEKGVRKLESLGKTLHFVYEAGPCGFWIERWIRARGHECWVVSPSLIPQKSADRIKTDRRDSEKIARMARAGELTPIYVPEVADEALRDLVRARDDAIIAQRRARQQLKALLLRNEVRYVGKSSWTIAHRQWISSLKLPQPAQQIAFEEYVDAVEVATHRVERLTGSIERSTEGWRFEPVVHALQALRGVQFVHAVTIISELGDLARFTEPRCLMAYLGLVPTENSTGERRRQGAITKSGNRFARRALIEAAWAYQHPARVTPIIARRQRGLTKAARDIAWKAQLRLCPRFKKLCARRLNKNKVVVAIARELSGFVWAIARDVKLA

SEQ ID NO: 300643 - protein, 415 aa, unidentified
MKVVFPTCCGVDVHKTFLVATIITTPADSLQPNYQKKRFSTFNSDLNRFADWLLEHNCLDVCMESTGKYWVPVFNILEKRGIRVVIANPKWVKAVKGNKDDTKDSKWIGDLFRIGLVKSSFIPDLNIRILREFTRYRYKLVSMKSSEKNRFQNAFTVCNVALDSVVSDMFGKSATAITDYLTSDESFDPEHCVSLLQRSLKKKAEQVLESIEGFSIADEQKARIKIIREHYDFIEKLIAKVDTCVSEMVEKYEGEINLLCTIPGIDRRSAITIISEIGTDMSQFGSSKRLCCWAGLTPGNNESAGKKKSVRISRAGVYLKPALVQVAHAAVKDNHHPYYKLKYERIAKRRGKKRAIIAIARMILTAVYSMFCTGEVWNPVDLYKVDMPEHLKEQQLAKAIKQATRFLEKQGLSVA

SEQ ID NO: 300644 - protein, 359 aa, unidentified
MREQRNKISFRGQKIYVGIDVHLKSWSVTVLSETSVLKKFSQHPSPEALYGFLTRSYPGAEYHSVYEAGFCGFWIHERLTALGIDNIVVNPADVPTKSSEKLRKTDTVDSGKLARSLRANELKGIYTPDSVSLEMRSLIRLKNSITKDTTRQKNRIKSQLRCLGIGIPQEFLTPFSNWSKRFFAWLKEIETLTPSGRQALDIHIRHLEELRRQKLEMTRALRTLAKTDRFREPLRLIMSVPGFGQATGMAFLSERCDIPRFRNAEQLAAYIGMIPMCHSSGEKDGTGDITIRKHAVMRCNLIEAAWVAVRQDPAMNLFYTEQCKRMPKSKAIVKVARKLVNRLFFVLKHQTEYVNSIVS

SEQ ID NO: 300645 - protein, 337 aa, unidentified
MEYFAGLDVSMAETHVCVMDRDGAVAYEVKVPSTPVDIAAALARAPACRRVVFETGRMAPMLYHGLSQLGLPIVCIESRQAYQALKSLATHKTDRNDARGLAHLARTGFFKPVHVKSLAAHALRSLIIARKKLVGQRVTLENQIRGLAVVFGVRLPRALTAAFVRQALRASEGIVGLSAAMRGLVAARVAVLDAVAAIDADIRQLVRASAACRRLMTIPGVGQLTALAFTAAIDDPSRFRRSRDIGAYLGLVPRRYQSGEVDYTGSISKCGDRRVRTLLYEAANVMLTRYKPALKLKDWAFAIAKRSTMRKARIALARRLAIIMHAMLRDGTEFNPA

SEQ ID NO: 300646 - protein, 344 aa, unidentified
MKDVRILGVDLGKNSCSIVGLDGEGRVLLRRRTRREGVIALAAKLPGCVVAMEACCGAHHLGRLLVEQGHEVRLMSPEYVRPYVKAQKNDDRDAEAIAEAATRPTMRFVALKSEAQLDVQVLHRVRDRLVGQRTSLTNQIRSILLERGIVVPQGRRSLLEALAVLSSEPDGRQVGTRVQRLLDDMLDQWRALDARIKALDDEFAEMARNDPAARRLATIPGIGVLNATALVAAIGDGRTFSRGRDLSAWLGLVPHQAITGGRPKLLGITKRGSKYLRKLVIQGARAALPSLARTATPLGGWLRGLLARAHGNTVVVALASKLIRIAWALLRNETRFVAGGAAVA

SEQ ID NO: 300647 - protein, 429 aa, unidentified
MNYTQNEKIEQVTDETLVVGVDIGSQTHYARAFDNRGRELTRKVFVFHNDLEGFNSFNFWTETLKADNKKTKVLVGCEPTGHYWFSLAKYLKDHQKKLVMVNPFSVKKIKELDDNSPKKTDAKDPKTIAKLVIDGRYSEPYIPEGIYAEIRDLVYSRDRIMKQHNISANRIQRWLAIHFPEYLGLYKRYDAVCGLMILEKAPLPQDIITLGVDGVKQIWKDAKKRGRGVSKDRAETLVEAAHNSIGLEGGIGAKSEFFMLLEEHRLWASQLEAINKVLEEAIRKVSNVEKLLAIKGVGVVTIAGFIAEVGDIRRFKSPKQIQKYAGLELVERSSGKHKGKTRISKRGRRKLRRILYQVMVPLLARNHEFREIYDYYVTRVKNPLKRRQAMMAVSCKLIRVFHAVLTKGMDYDRFKMMTDIHRNSELIAA

SEQ ID NO: 300648 - protein, 337 aa, unidentified
MNYTGIDLHSNNCMIVVSDETVRVLSKRRVPNDLAAVLAQLEPYRAKLAGVAVESTFIWYWLGDGLQAAGYRVHLVNTSAIKQYDGLKHSGDDTDAAHLAHLLRLGILPTGYICPREERALRDLTRKRMPLTRTRTAYLLAVDNIVAHQTGARISGEAVKRLTLEELEKLGQLEDVTLALGANVTVIQTLNVQIKKLEARLRSQVKPRAQFKLLTTTPGIGEILATTIMLETGSIERFAEVGHFASYARCVDSKRVSNGKIKGAGNVKNGNKYLAWAFIEAANCARRYCPQAERFYERKKARTNMIVATKALAHKLVRACYHRLNDEKPFDVKRCFA

SEQ ID NO: 300649 - protein, 402 aa, unidentified
MNCVGIDVSKGKSMIAVMRPFGEVVVSPFEVRHTANELSELAGLLKSLDGETRVVMESTGNYHAPVAWLLHDAGLYVSVVNAMLVHDYGNNSLRRAKTDKKDAVKLANYGLDHWLTLPRYIPEEDTRLMLKICYRQYQQYSKVQTMLKNNLISLLDTTFPDANRLFTSPPRADGSEKWVDFVATFWHCECVCGRSEKAFTTQYQKWCRKHGYNFSEDKALDIYASACRHFGVIPKTDTAKLLVEQAISQLQTTSSALAALKQEMQSLAASLPEYPVVMGMFGVGPTLGPQLLAEIGDVRRFHSKKALVAFAGIDAPPYQSGQIDVRSRSISKRGSASLRRTLFLVMSVILQCAPIDEPVYQFMDKKRSEGKPYRVYMMASANKFLRIYYASVKAYLDSLGHD

SEQ ID NO: 300650 - protein, 347 aa, unidentified
MAKSITDLSSVTTVGLDLAKHVFQVHGVDAAGRVIVARALRRRDVLAFFAQVPKCLVGIEACGSAHHWARELMALGHDARLMPPAYVKPYVRRQKNDAADAAGICEAVTRPSMRFVGVRTLENQAALMHHKARDMLVSQRTQLINALRGHLAEIGVIAAQGLKNARELADLIMAEGNETLPACVRGALAPLVRQLHALDEEIARSDRTIAMMARTDAMARRLMSIPGFGPVTASAMAASVQDISSFSGLREFAAFLGLTPRQSSSGGKERLGRVSKMGNRYLRKLLVVGAHAVLYHRKPHEDALRSWAKKLMQTKPFKLVAVALANKLARIAFAIMRGETIYSAAPA

SEQ ID NO: 300651 - protein, 428 aa, unidentified
MAIPEGNGEVVAWIGLDWADQRHEVRLQAVGREQIEARTVEQKPEALHAGVAEWRARFPQGRIALALEQSRGAVIYALMNYDFLWLYPVPPQGLARYRQAFFTRGAKSDVVDADLLLEMVRDHRDRLRAWQPDEALTRQLRLLVEHRRETVADRTRLTNRWGALLKSYFPQALEGAGERRDPAACEFLGTWPSLQAWQAAGRSTQRKIFRRHRRLPAEELEKLLDAIAQAQPLTRDRALLEASVLMTQTLVEQLRAVHTALARLDAAQAKLFAQHPDQDRFRRLPGAGEAWAPRLAAAFGTDRQRYQSAEEIQQFSGIAPVTEASGKLRWVHWRMACPKFLRQTFHEFADASRKKSLWAQAYYQQRRQQGASHHSAVRALAYKWIRILYRCWQSHTPYDEAVYLAALRRRHSPLWLAVASLSSREAQA

SEQ ID NO: 300652 - protein, 411 aa, unidentified
MEVLYDRVAGLDIGKASLTVSVRTPGTRRGSRHQETRTFKTTTGSLRVMRDWLLEQGVTIAAMESTSTYWKPPFYCLEEAMEVWLLNAAHMKAVPGRKTDVRDAEWIAQLLEHGLLTPSFVPPPEIRRLRMMTRYRIQLHGDRTREIVRLELMLEDASIKLSTVASSLKTVSARAILGAMIDGQTDPRVLAEMAKGRMRKKIPDLAQALEGHFDVHHAQLARSILDRIDRVEHAMAELDIAIEAACAPWAHQIELLQTIPGVGPKVAQVIIAETGGDMSKFPTAAHLASWAGLAPAIYESAGKRTPAGRRRGNKWLSAMLVEAAGSVGRMHGKNYLAVQHARLTRRRGMSRAQIAVAHSILTTAYYMLKRDEPYRDLGPEWLAKRNEEAHTRRLVAQLEKLGHTVVIDPAA

SEQ ID NO: 300653 - protein, 344 aa, unidentified
MDHFVGLDVSVRETSVCVIDETGKLLKETRVPTEPEAIASLLAKGGFACKRVGLEAGPMSQWLYAGLAAAGLPVICVEAQHMRAALSAQRNKTDRNDARGIAQMMRVGLYRPVHVKTLASQERRLLLTARKLLQSKLLDIEADLRGTLKNFGLRVGVVGKGGFRQRVRELIEGNEALSMVMTALLEAHAALQTQYDVLHKRLLDTVRDDPLCRRLMTVPGIGPVISLTFQATVDIPERFPKSRLVGAHFGLTPKRYASGETDHSGRVSKCGDAMIRTALFEGAQVLLCCTKKWSSLKAWGMAIARRRGLQRAIVAVARKLAVILHRMWLDGTEFRWGKEPAIAA

SEQ ID NO: 300654 - protein, 404 aa, unidentified
MYNAVGIDVSKGKSTVTVLQPGGTVIRKPFDVSHTSQNLNELADYLSSLDGTTKIVMECTGRYHEPMVKALSEAGLFVSIVNPHLIKNFGNNSLRKLKSDPADARKIARYTLDNWTELRQYSGMDNTRTQLKTLNSQFSFFMKQKVAAKANLIALLDNTYPGVNKLFDSPTREDGSEKWVDYAYSFWHADCVRKIGLKAFTERYKSFCKKHHYIFQQDKPEKLFNASKELVAVFPKEKTYKLLIQQSIQQSNLASEHVERLRREMNELASTLPEYSTVMGIYGVGKTYGPQLIAEIGDVSRFTHREALTAFAGVDPGVDESGQHKSNSNRASKVGSARLRKTLFQIMTTLLQNAPEDDPVYRFLDKKRSQGKPYYVYMTAGANKFLRIYYGKVKECLRNLEQES

SEQ ID NO: 300655 - protein, 350 aa, unidentified
MSLRNAPRPAAIYGIDIGKNVFHVVGLDSGGEPVQRARFRRDTLLRFFERAAPAIVGMESCAGSQWIARRLQALGHKVRLIPAQFVKPYVKSNKSDIIDAEAIAEAATRPTMRFAAIKSEEQADLQALHRVRDQMIGTRTRLINQMRAFCLEYGIALRQGAGLFKLDLPMVLDDLSNDLSPAMRKLLTDLFADLRRLEQRISDVTREIAAIADREDVARRLMTIPGIGALGATALLAAVGNGRQFRKARDLAAWLGLVPREYSTGGKQKLLGISKRGNRYVRKLLVHGARSCFRHLDRTRDRLGSWLDGLQSRMHPNKAVVALAAKMARIVWVVLTKPGALYERRDPAFA

SEQ ID NO: 300656 - protein, 319 aa, unidentified
MNSETIYAGLDVAKATLDVGLRPTGEAWQVANDESGISELVARLRRLTPALLVCEATGGFERPVVAALAAAGIPVVVANPRQVRDFAKATGQLAKTDRIDAAILALFAERVRPTPRPLADEAAQLLDALLTRRRQLLEMVVAEKNRLGFAPRPLHRGIQQHIRWLEHQVDDITGELAAQIEASPVWRAQDDLLQSVPGIGPIVSAVLLGELPELGTLSHKQIATLVGVAPLARDSGTLRGKRMIWGGRAPVRTALYLAALCGRRWNPQLKVFYDRLIAAGKPTKVALIACARKLLTVLNAMVRDNQRWAVPVPSVQHSC

SEQ ID NO: 300657 - protein, 354 aa, unidentified
MHYVGVDYHKKSSYVTVVDERGKVVKEGQIANTQEALAALLDGKAQGASAVLEAGRNWPVMYDWLDELVDEVTLAHPAKVRVIAEAKVKTDRIDSRMLAQLLRADLIPAAYVPPPLTRQQRRRLRQRMFLVRLSTMVKNRIHTLIDRHPELSRQAGGWSDLFGVAGRAWLEQLALPADEADLLRTDLDLLAAIEGHIKRSNRWVSQLARKDPRAKLLTTLPGIGEFFAVLLAVEIDDVGRFLRPEKLTAYAGLVPSTYASGGYVHHGRITKRGNKWIRWACIEAVYPAIRQDRDLAALYERLKAAKGANVAKVAVAKRLLTIAYRVLSERRAYRLAQEQHRLRRRNSPAALIAS

SEQ ID NO: 300658 - protein, 374 aa, unidentified
MNGSLTSFMLNPITALTEQVIDNKAQGTKKAKRIVLGIDVHLRGYQVASKEDNQAIGAVHNFGNQSEVWLWIEKLKRRVEPIEVVYEAGPLGYSLYRELSAQGISCRVCAPDSSVQKRTRRKTNAIDARELAGRLFNYLNGNQQALQLVRIPSIEQERRRLKSRQHDQLVKERKRLAAQGNSILLSQGWGGMKNWWRPRIFERLSQVVVPEITELLEVWLELLHKLDEKIQQAKAQQKRSQKGPRPKGLGAGSLEQLESELLDWKRFSNARKIACIAGMVPSEWSTGEGQRLGSITKVGLPAVRRILVEAVWQMQRLQPDYEPFKKWRAALEGKNAASKKKAVVAIARQLIVDLWRLKTGRVSAQELKLVMVGG

SEQ ID NO: 300659 - protein, 345 aa, unidentified
MKITTIGIDLAKNVFQVHGVDEHGKAVFNKPLKREQMAAFFVNLPPCLIGMEACGSAHHWARKLQGMGHTVRLMAPQFVKPYVKTNKNDAADAAAICEAVTRPSMRFVPIKNVEQQGVLALHRVRQGFVKARTAQANQIRGLLAEFGVIVPQGIGHITQRVPMLIEDAANELPGVFRLLIQRLLDHLKQLDRQVQELEAQIVAWHRQSDLSRKLGQIPGIGPITACALVASLGDAKNFKDGRQVAAWLGLVPRQHSSGGKQNLLGISKRGDTYLRTLLIHGARSVIYHAQNKGQGSAQCGWLHGVLQRRNKNVAAVALANKNARIVWALLAHDRSYEPGYVRESV

SEQ ID NO: 300660 - protein, 352 aa, unidentified
MLRPLLFDLAKDVFELAFADANHRVVERKRLTRNAFARVLENREPLHVVVEACGSAHYWGRRFERLGHRVTLLPAHQVRPYVLRRKTDRTDADGLLEAMRCSQIRAVPIKTPEQQGVQGLHRIREHHKAQRTAAINLIRGLLREFGITIPAGADKVRPAVLTALEDGENELPMALRDGLAEMLDQVTHAEAAMTAIEAHLNDFLRRDARSQRLQQAGGVGLITATAMSASVGDLNRFASGRHLPSALGVTPREHSSGNQRRLGRITKRGDVYLRTLLIHGARSMLVTAKAARKKGASLDRTQQWALDLADRPGHNKAAVALANKTARRLWAAEHHGSRFDPNHQSSRVVTTH

SEQ ID NO: 300661 - protein, 340 aa, unidentified
MIRTDLSTLFAGVDVGSKENVLVVRVDGGALPADRFANDLGGRKALVKRLRSFKRPVYACLEATGSYFLGIAIALSKEKDMRVMVANPRIIKDFARAMNRRSKTDAVDAGVIALYAEKAEFVSWEPPSERLLELRNISRRIDSLTETKAAEKCRLHAHLASGAKRSVVERDIVDHIKSIEKRIAVLRKEALLIIKSDAALCERYRLLLSIPGVGEITAVRLIAELALMPACLSVRQWVAYAGLDPAAHESGTSIRRPGRTSKAGNVRLRGALFIAALVAARCNPVVRAFASNLESRNKKRIQALVAVMRKLLHAIWGMFRHNSVFNAAILFPNIAIALDS

SEQ ID NO: 300662 - protein, 323 aa, unidentified
MSAFVGVDMAKNTFDVATPLDNGKHRTKGKLSNDAKGFAEFESWLQKHATADALIVIEATGNYHEALADFLFQKGYRLHIANPATTAAHAKSELSRNKTDKTDAKLISDFAMQKHRKLRLWVPEPQSRRRLRALVRRLEDLNEIRQMEKNRLEVASPNVVTSIESVIAHVSEEITETEKAIKQHIDDDPDLRGKSELMTSIDGIGEKTAALILAELGDPLDYEGPKKLSAFAGLSPRQDRSGGYVGATRISRTGSSRLRGGLYMPAIVGIQHNEVLSEFAKRLKANGKAPKQVICAVMRKMLHLIYGVLKSKKPFDPGIALAA

SEQ ID NO: 300663 - protein, 429 aa, unidentified
MIMGFTKPIEHFNSQRKKVITMNTLYVGIDVSSKSNVVYLMLPNGDKHSNFSVANSHEGSTQLVKRILSALTSHSLDTVLIGLEATSVYGDNLVYFLREDATLAPFNRKIHVLNPKQVKKFHDAYNDLPKNDYVDSFVIADCLRFGRINKEVYIGDYRYKALQNLTRARFFAVQNLVKEKQRFMNVLFKKYSTMTQEKVFSDTFSTTALAVYDEFESAEALANMDLHELTDFVMEKGKNRFPNPDAVAKAIQKAARSSYRLPKTVNDSVNQVLSISITSMKALESQIKEFDKAIKAQVELIPNVLISIPGIGPVYSAGIMAEIGDINRFNSQAALAKYAGLAWKQHQSGGFESEVTRLIPSGNRFLKYYLCEAAFSLVRCDKEYSDFYHLKYKEVNRCQHKRALALTARKFVRLVFRLLKDNRLYCPAK

SEQ ID NO: 300664 - protein, 399 aa, unidentified
MLNDTSTPVTASLSNDLSGATEIKNHILDFNHTYHFERIVIGMEATSLYSFHPAMFFHEDSQLKELHVEIMVEQPNKIKKYREAFEDNKNDTIDAFYIADYFRIERFSPSFLKEEKYMALQHLTRTRLQIIEQLTRTKQHFIENIYYKCNTLAYQFKKEELSTNLWSSTMMTLMTDEMTLDELANMPLQELADWLQQMGKGHFKDSEKLAQTIQAAIRGSYRLSKLQQNSVNVILGLLAREIRNLEKMIKEIDKAIEDMVETIPEYQCLTSIPGVGKVYAAGIIAEIGQIERFKDHPQVAKFAGLNWREKQSGNSNSQHTSLVNRGNRYLRYYLVEAANSVRRYDDEYKDFYKKKYHEVPKHQHKRAIVLTARKFVRLVDVLLRNHQLYTPPRRLMEDK

SEQ ID NO: 300665 - protein, 339 aa, unidentified
MVADGLIVGVDTHKDVHVAVVLDRLGRRLAARDFSSTDAGNAQLAGWLAGFGPVTDAGVEGTGSYGYRLARLLADRGLRVWEVNCPDRSRRRRNGKSDPVDAENAARAVLAGEATAVPKDRRGVIGELRLLVLTRRSAVKARTQAANQIKAFLIDADDELRARLHGLRKARFGRACAALEPADGLRRALAALGRRWLALDTEARQLEAQITALISTHAPKLLARHGVGAVTAAQLLVTAGANADRLHSDAALAALCGTSPVDASSGKTSRHRLNSGGDRAANNALWVIAHVRTLSDPRTRAFVAKRSATGNSGREIMRMLQRYIARELYPVIIEALRPS

SEQ ID NO: 300666 - protein, 402 aa, unidentified
MNCVGIDVSKGKSMIAVMRPFGEVVISPFEVQHTASELSELAKLLKSLDGETRVVMESTGNYHTPVAWLLHDAGLYVSVVNAMLVHDYGNNSLRRAKTDKKDAVKLANYGLDHWLTLPRYVPEEDTRLLLKNCYRQYQQYSKVQTMLKNNLISLLDAVFPEVNRLFNSSPRADGSEKWVDFVSTFWHCRCVSTLSLKSFSARYLKWCRKHGYYFSQEKAFEIHSKAQSCIGVMPRNETTKLLVQQAIAQLKATSAALAALKQEMQSLAASLPEYPVVMEMFGVGSTLGPQLMAEIGDVRRFHSKKALVAFAGIDAPPCQSGQMDIHSRSISKRGSAALRRTLFLVMGIYLQSAPLDEPVYQFMDKKRSEGKPYKVYMMASANKFLRIYYASVTAYLNTLARI

SEQ ID NO: 300667 - protein, 345 aa, unidentified
MQQITTIGLDLAKQVFQVHGAEADGSPVVSRKLRRADVLGFFKKLSPCLVGMEACRGAHFWAREIAKLGHDVRLIPPSYVKPFVKRGKTDAADAEAICEAVIRKTMRFVPVKSANQQAAAMVLKTRELLVRQRTQVINALRAHLSELGIIAGTGPAKTATLIEIVRDEEDARLPPAARFALSELANQIEWTRKRIDKLERAIVIEAKRDEDMRRLVTIPGVGVIIAASIKALVPDPNGFKSGRHFAAWLGLTPRSHSSGGRERLGRISKMGNSTLRSLLILGATSVLKHARHRTDASTWLAAILARRPFKVVATALANKMARIIWALLTKGGTYKSGLAIGTANA

SEQ ID NO: 300668 - protein, 323 aa, unidentified
MQGQKSPERSAQMGVYVGIDVCKDWLDVYLHPIGQAFRVSNSSDGLKALKRRIAAVQVELIVMEATGKFHRQAHRTLHAAGFAVAVVNPLRARLFAEAVGQLAKTDRLDARLLALMAQTLEPSALAPTPEALEALQELARARAAAIIDQTALSNQRGASQTAFLKAELGRRLKTLAGHIERLDAEIERRIRADPMLKRRYDILITIPGVGPVAAVALVVGLPELGACSAKAATLLAGLAPLACDSGEKTGERHIKGGRAFVRTSIYLAAVAAARFNPQLSDDYKRLRDAGKKAKVAITAIMRKLVVLANVLIKEDRPWTPIHA

SEQ ID NO: 300669 - protein, 343 aa, unidentified
MQVVTTVGLDIAKSVFQVHGVDAAGQVVIRRQLKRRYVLAFFQKLPPCLVGIEACASSHHWSRELKALGHTVRLMPPAYVKPYVKRQKNDAADAEAICEAVTRANMRFVATKTPEQQSGLMLHRTRHLFIRQQTAVINVIRAHLAEFGIVAPVGRKGVEELLNVVTDSSDKRVPVVARMCLAALGAQLRRLKEQILEFDRMIMAWHRSNEASKRLAAIPGVGPILATALVASVADPKAFRSGRSFSAWIGLVPKQHSSGGKDRLGSISKQGDRYLRSLFMAGALAVIRYAKIHGSRHRPWLTALLARRPSKVAAIALANKIARMVWAMMARGERYKEPVALAA

SEQ ID NO: 300670 - protein, 403 aa, unidentified
MTATRKQHATTQTPVQATPARTAVLYLAFELSNGDWKLASGTGPADNPRLRNIGARNTQSLLQEIAKAKKRFGLPTDAAVVSCYEAGRDGFWLHRYLSSQGISNCVVDSSSIEVKRRGRRRKTDDLDASKLLSMLIRWHQGEKSVWSVLQVPSVADEDRRQLHRDLLELKAEATQHTNRIRGLLASCGLSVTQIGEDFALVLAQLRTWDGQPLPEGMQQRLLREHERWRFVHRQILDVENERARKIRTSTEEPLVKVRKLLQVRGIGVNSAWLYVMEFFGWRRIRNRRQLAALAGLTPTPYDSGDSSREQGISKAGNRRLRTMAVEIAWCWLRYQPDSALSRWFQQRFGSGNSRQRRIGIVALARKLLVALWRYLETGAAPAGAEITTGTSKKTGGKQVPVPA

SEQ ID NO: 300671 - protein, 390 aa, unidentified
MSDRRLVGIDLGIASAHTVRVLDGNGNVVAKRKAWPTVESLGEVEQAALAGCPAGTRLEVVVEPTGPAWQPIAVFFTRRGHVVHRVSSAKAADLRRFLSRHAKTNGIDADTLARLPLVDPGGLRPLVLPGAEQAALDRRVRATDRLARMAAQHKVRLKDLARQLMPMSPLTGPLGTADLAVLERWADPRQLVRVGIKRLTAVIAKASQNHQGAERATEWLAAARAALDLYGDDPAVAFSDLAAEVASEVRLLRAAQAELTGHAREREACYRWVDPGALARSLPGVAEVGGPALVAAMGDPHRFASGKQFRSFTGLAPKASETGDSDRKGQAMSKAGSSLLRTTLVRSADAARRQDPQLARIYWTQMVERGKDHLGAVCVVAATWPTGPGP

SEQ ID NO: 300672 - protein, 345 aa, unidentified
MENMYYIGLDVHKKTISYCVKDGSGRIYAEAEIPATRLDLDRWMKTLPQPWTAAMEATIFTAWIYDHLKPHAAAVKVAHPLMLRAIAAAKKKNDRIDAHKIADCLRCDFLPECYMASTEIRERRRTLRYRNLLVRQAVQMKNKIAVLLMEAGVSYNKQKLHKVGYFRELLATNQDIDEGLKPLLRLCRETVVRLGKTESALVRSLQRDSLLMERVERLMTIPAVGPITALTWALEVGDVQRFSSIKKAISYCGLCGAENSSANIIKRTPLSKQRNKHLQTILIEAAKMAPRNSPDLAMLYDREKQKGNANRATLAVARKLVAYLVAVDRRQKDFLIVERENRTAA

SEQ ID NO: 300673 - protein, 334 aa, unidentified
MENIALIGIDLGKNSFHIHCQDRRGKAVYRKKFTRPKLIEFLATCPATTIAMEACGGSHFMARKLEELGHFPKLISPQFVRPFVKSNKNDFVDAEAICEAASRPSMRFVQPRTESQQAMRALHRVRESLVQDKVKTTNQMHAFLLEFGISVPRGAAVISRLSTLLEDNSLPLYLSQLLLKLQQHYHYLVEQIKDLESQLKRKLDEDEIGQRLLSIPCVGTLTASTISTEIGDGKQYASSRDFAAATGLVPRQYSTGGRTTLLGISKRGNKKIRTLFVQCARVFIQKLEHQSGKLADWVRDLLCRKSNFVVTCALANKLARIAWALTARQQTYVA

SEQ ID NO: 300674 - protein, 354 aa, unidentified
MMTSTGADVVGGVDTHGRTHHAAAIDCAGRLLGDAEFPASAVGYRALLAWLVGFGRLVKVGVEGTGTYGAGLARHLAAQGIEVVEVDRPDRRTRRRQGKSDPIDAIAAARAVLAGTASGAPKTRTGPVEAIRALRVARRGAVKARTAALNQLHGLVVSAPELLRAELGGLTAAELVPRCAGFRIDPALLLEPSTGTKAALRAISRRVQALDEEIALADARLRPAVVATAPRTAAIFGAGPEVAGQLLVSAGDNPDRLRSDAALAHLAGISPLPASSGRIDRHRLNRGGDRAANSAVHRIVLVRMRHHEPTRAYVARRTTQGLSKREIMRCLKRYVIREVHTALLADFENLTQAA

SEQ ID NO: 300675 - protein, 408 aa, unidentified
MKTYRFYVGIDGADQKHLVSVREAGVERIEERSFDHSGSGVRAMIEWLTRRCDGRTDEVAVAIEVTRGAVVEALLERGFEVFAINPKQLDRFRDRHTVAGAKDDRRDAYVLLHSLSTDGQAFRRLDVEHPSIMRLREHSRMYEDLKQDLRRLTNQLRAQLHRYYPQVLELSSGADEPWVWDLLERAPLPRRGARLKEAAVERILGKHRIRRVSAPEIVEILKAPPLPVAPGAAEAACDHVAMLLPRLRVTQEQLHGVQVTLERLLDEMESAEAQIGGHHDVAIIRSWAGLGKIVAAMMLAEAWRPLESRDYHWLRALCGSAPVTRQSGKSRQVVMRRACNERLRTAVHWWAGSAIHADPKAKALYESQKAKGHTHGRSLRTVGDRLLRDLVVCLSRQEHYRPELRHVA

SEQ ID NO: 300676 - protein, 455 aa, unidentified
MKHEPEEIPDAEHELEIERVAAIDVAKASGKVCVRVPGKAGRRVSRVWDVAATTAAVTELAEDLVELGVERVTVESTSDYWRIWYYLLEAAGLEVQLVNARDVKNVPGRAKTDKLDAVWLAKLTEKGLLRPSFVPPTEIRRLRDYTRLRADLTHDRSRQVQRLEKLLEDALVKLSTVATDIMGVSGRAMIEALIAGQRDAKVLAGLARGRMKTKRAALIEALSGRFDDHHAELARMLLDQIDALTAQIDTLTARIEQLLAAMPEAQPVDPRRDGPTSGHPVGVTADTLAECARLTTVERLDEIAGIGEHNAQVIIAEIGLDMSRFPTPAHLVSWAKLCPRTIQSGPVTRGGRTGKGNPYLKGVLGDAAAAAAKTNTFLGQRYRRIVKRRGKLKALVAVARSILVIVWNLLNDPTARFHDLGPDYHTNRIATERRMRNHIAQLTAMGYRVTLEPAA

SEQ ID NO: 300677 - protein, 362 aa, unidentified
MRIIGCDLHARQQTLAMLDTTTGEVVEMTLKHEGDNVREFYSSLPRPVRVGIEATGSMQWFVNLMEELGIECLVGHPAEIRAAEPRKQKHDRRDADLILKLLVENRFPAIWLPSKELQDLRSLLRHRHQWVRMRTRIQNALQSIALANGLRRGPSLWSHDGQNTIASLPLAPHTAYRRSELQTLYAKFDAEIEKLNQRVEEQACERAGARLLMTHPGVGPVTALATEVFLGDPARFADSKALASYVGMIPREYSSGGRQRLGGLTKQGNPLLRFLWGEAGAHAVRRDPELQRFYRRKVIQKGFGKASVAVARKLGIRLWIMLRDQIEYNEFCRRGQKQQKSSDACAGMPETRYGAKSHRPVD

SEQ ID NO: 300678 - protein, 482 aa, unidentified
MKHKQQEKTKEATCGPTQGHWQQMNRKQRREMTRKIQSEDISLEVIHPDAAGIDIGNESHYVAVPPARDSQPIRRFGCTTAELKEMALWLKQCAIRTVAMQSTGVYWIAVYDILEEAGLEVYLVNARDTKNLPGRKSDVQESQWLMKLHTYGLLRNSFRPSQEIRTMRTYWRQRNDLVQSAGRHIQRIQKAMTQMNIQLANVLSDVSGMTGQAIIKAILSGERDPHKLAAFRDPRVKASEEEIARSLEGNWQGDLLFVLQQEQDGYEFCQKQMAECDQRLEQYLQQREDRSAGAQLPEEKRKDRLKKKKGNKPLFDLRSGLFRMTGTDLTRIDGVDVMTAITILSEAGWDMSKWETEDHFVSWLRLCPDNRISGDKIIGKGRLPTNNRVSTALKMAASTLRLSKTYLGAQFRRLRSRLDTPVAIKAMAAKLARLVYRMLRYGMKYVDRGAEFYEAQHRRLQIKHLKSKAAKLGFQVIQVPAA

SEQ ID NO: 300679 - protein, 429 aa, unidentified
MQKTIQERLQRITATTIIVGVDTGKESHWARITDYRGVDLMKPVKVTNDIKGFSGLMARIEKVRAAQGCDQVIIGTEPSGHYWRAFGWYLKLHPSQPVLVGVNPYHTKQAKELDDNSQTKSDKKDALVIAHLIRDGRYFDTYLPEAVYAELRVFNTERQRLVKQISRASNTIIALMDEFFPEYRAVFKNLICPTSCEILRTVPFPTDVLSMGRDDLIALIRQASGGTEGQKMADELILIATNSVGVLEGKTAVRFRLNQLLEELAFHQKQKAAVEEQLTVELKKLGLGEILQSMPGIGPIIAAAFIGETGDIDRFDAWKQLRKLAGLNLTENSSGKRKGKTTISKRGRPYLRHMLFMAGEACILHNDELRQLYYYFRRRSINPLKYNQAVVAVGLKAMRILFYMAKNKTKYDPSKALGDVRKAQFAQIA

SEQ ID NO: 300680 - protein, 312 aa, unidentified
MTKLNVIGVDLAKNVIQVSVLSPSNQELRNSALTRRKFSEFLGRQRPSLVAFEACATSHYWARVAQRQGHEVKILPAKAVFPFRQGHKTDENDALAVAEAARRPNVKLAPLKTVEQQGMQAIQRSRELLVHERVSLANHLRGLLMEFGIVIPQGFASLYRLLPEILEDGENELPDLYRPTLNLLYGRLCDLREDLERLNREIEVLVQANPVCRRLTALEGVGPIGSVLLYATLGTGEAFTNGRQFSAYLGLTPKQFSSGGKVNLVGISKRVANRRLRAVLITGARAYVYHMKEPKTAKDRWLWAIVERSGKC

SEQ ID NO: 300681 - protein, 348 aa, unidentified
MNYTQNSKIAQVTERTLVVGVDIGSETNFARAFNWRGQELSKKVYRFSNILEGSQGFLEYLGRYQDMASAEQIIVGCEPTGHYWFNLARYLNAQHINLVLVNPYHVKQIKELDDNSPKKTDLKDPKTIAKLAVDGRYSYPYLPEGIYAELREAVSSRNRIVMELNAATNRMKRWLKIYFPEYLTVYKNFSAESGLTVLETAPLPKDVVKLGTEGVNRLWRDKKLRAVGMKRAQTLVEAAHNSIGLDGGACARMEMQMLLEDYRAKQVQPAKVTAVLEAETLEVPYAEKLPFIQGVGLITVAGFLSEVGDIRRFDSPKQIQKLAGLELKENSSGKHHGRSFISKRAEKS

SEQ ID NO: 300682 - protein, 411 aa, unidentified
MSAGVITAVGIDVSKYKSTVAARRPGGEVALLPFDVGHDVTGIKNLLEKLHGLDDEGSEIRVVMEHTGMYWRPVALALQQAGFFVSVVNAILIHNFSDNSLRKVKTDKADALKIANYGLTFWMDLREYSAEDETRQMLKIQNRLYERTTTTGTMLRNGLISLLDQTFPGANKLFLNEGRNSKGHVKWVDFVIRFWHKECVAALSLHTFADTFQKWCKRTGYRFSTSDAERIHTAARNAVATLPKNDSTKLLITQAAISLNTVYDSLHAFRTEMNRLASLLPEYELVMGMEGVGKITGPQLMAEVGDVRRFSHKGALVAYAGVDAPPYQSGTFDAKNRHVSKRGSPHLRKVLFEIASMILVHGNPDNSVFCFMDKKRAEGKHFYVYTVAGAAKFLRIYYARVKEYLNTQETA

SEQ ID NO: 300683 - protein, 349 aa, unidentified
MTVTIVEEARPVTGGVDTHADTHVAAALDSVGGLLGVREFPATAAGYASLLGWLGGFGTVCLAGIEGTGSYGAGLARHVTAAGVRVVEAVRSDRQDRRRQGKSDPLDAVSAARAAQSGRARGAPKGRDGAVEAIRTLMVARRSAAGERTRTINQARALVLTGPDDLRTRFARHTPAALITGLASLRPRPGSTVGYATRIALRELGRRAQFLDGQLTRLDEPIVPLVTARAPGLLALYGIGPRTAALLLIAAGDHPGRLHSEAAWAHLCGAAPIPASSGKVTRHRLNPGGDRQADHALWRIVFTRLGSHPATRAYAERRTAEGKSKAEIIRCLKRYVAREVYRHLRPAGG

SEQ ID NO: 300684 - protein, 402 aa, unidentified
MNCVGIDVSKGKSMIAVMRPFGEVVVSPFEVRHTANELSELAGLLKSLDGETRVVMESTGNYHASVAWLLHDAGLYVSVVNAMLVHDYGNNSLRRAKTDKKDAIKLANYGLDHWLTLPRYVPEEDTRLMLKACYRQYQQYSKVQTMLKNNLISLLDTTFPDANRLFTSPPRDDGREKWIDFVATFWHRECVCDLSEKAFAAKYQKWCKKYGYNFSEGKALDIYAAARGHFGVMPKTDTAKLLVKQAISQLRATSSALAALKQEMQSLAASLPEYPVVMEMFGVGPTLGPQLMAEIGDVRRFHSKKALVAFAGIDAPPYQSGQMDVRSRSISKRGSASLRRTLFLVMSVILQHAPMNEPVYQFMNKKRSEGKPYRVYMMASANKFLRIYYASVKSYLDSLEHD

SEQ ID NO: 300685 - protein, 343 aa, unidentified
MQIHSVGIDLGKTTFHLVALGAAGKVIVRKKFDRKQLLVYTANVPASLIGLEACSGAHFLGRALREQGHDVRLIPAQFVKPFVKSNKNDFIDAEAIAEAVERRNMRFVPIKTDDQLDLQGIHRVRDRLICRRTAVINQLRAFLLERGMVFANRPANLKAAMADILENAEADLTPQMRSLINMLWDEWKLVEEQIKKLDLELERISAADAGCTRIRQIPGIGPVVATAIVAAIGNGAAFHKGRDFAAWLGIVPRQYSTGGKAKLLGISKRGNVYLRKILIHGARAAVLRIKRDRAPIGPWLDALDARAPKNVVVVAMANKLARIAWAVLSSGEDYRPMGNTIAA

SEQ ID NO: 300686 - protein, 391 aa, unidentified
MTKPKTKTVNDFSRCLDPLDMDATLIAVIEMSQSSWLVAGIVPGVERQPLKKLAIDEDALLSLLNRWRAEAEKNGHPITRIAVAFEAGHDGFWLARWLAAQGVEAHVIHASSVAVTREHRRAKTDRLDTELLKRGFLGWLRGESGHCKMVAVPTLAEEDAKRPSRERETLVGEASRIITRVKSAFVRLGIRGFNPKLKTAAARLETLRTPECEPIPPNTLAALQRDLERHQIVKKQIRELEQTRLENLAQAPAKGPNVMVLLLARVIGIGVETADMLVREVLSRTLRDRRAVARYAGLTGSPDESGAKRRDKGLARSGNARVRHGMIQLAWRFLLFQKDSALAQWYRQRTGNAPSMRKPLIVALARKLLIALWRFACDGVVPEGVRLRPAA

SEQ ID NO: 300687 - protein, 367 aa, unidentified
MKKVSTVAADQSSNFSQPQLTIGLDLGDRSSWYCVLDPRGELQWERKVSTTATAMREAFQRMPRSRIALETGTHSPWVSRLLSELGHEVIVAHARNVRLIGESRRKDDRMDARTLARLARIDPQLLSPVKHRSAQAQADLTLIRARAGLVRARTALVNTVRSLAKSYGERLRSCNVRNMDPEKAEGLSPELQTALEPLLSAIQSLSEGIREYNERIEALAEQSYPEVALLKQVKGVGTLIALTFLLTLDDPHRFRKSRDVGCYLGLQPGRRNSGQSEPQMHISKEGDPYLRTLLVQGAQHILGPFGPDCDLRRWGLKLAERGGKSGKKRAIIATARKLAVLLHRLWVTGEVYEPLRNSNRRAVAAAA

SEQ ID NO: 300688 - protein, 345 aa, unidentified
MKIVGCDLHTRYQQIAMLDDETGELVERRLEHARGEAKQFYESLSGSVRVGIEATGHTRWFERLLAELGHELWVGDAARIRASAVRKQKTDARDAALLLELLLSGRFPRLWRPSSEDRDLRQLLWHRQQLVWMRTSIANQLHALAMGEGLCKKKQLFTKQGRAELEALNLDPWASRRRQELLRMLDQLDVSLKQFDEAVNEQAAQSAEAVRLMTHPGVGPVTSLAFVLMVGPVTRFQRSKQLVSYLGLNPREHSSGGKQKLGSISKQGNPMLRGLLVEAGHTAARLDPELRRDYQRLRLRRGGSVAKVAIARKLAVRMYWMLRRQENYTQLVRMQGSSRGTLVQS

SEQ ID NO: 300689 - protein, 387 aa, unidentified
MEVRVVNTPSAGRNNDPVHCFVAIELSKSNWVVGFQTPLTDKASRHQVKAGDAKGLIELIERVRMRVGRQLSRPVEIVSCYEAGYDGFWLHRVLEAYGIHNHVLDPASLQVSRRARRPKTDRIDAERMVRALICHLRGEPEACSVVCVPNVEQEDAKRLHRERRRLIAERVQHVNRIKGLCATQGIYDYSPLRKDRLARLDGLRTGDGRALPTRLKAEIVRELKRLELVIEMIATVEAERDAILTNPASTHVNAGKIKMLAKLRAIGPEFATNLVGEVFYREFANRRKLGSYVGLGSSPFCSGSVDRDQGISKAGNSTARSMMIELAWTWLRYQPGSALSVWFRERVGNLKGRPRRIAIVAMARKLLVALWRYLQTGLVPTGALLKA

SEQ ID NO: 300690 - protein, 368 aa, unidentified
MKHYIGLDVSLKTTSICVLNEQEKIIKEACVATDPKEIAEEIAGFGVSVEIVGVETGGISHWLVKELKKHKLPVICIDARKMAAAISIRTNKTDKNDAREIANALRAGYYKEVHQKLDTTVDTKTLLTVRRALVDQRTQTINCMRGILRAQGKLDCGSSQNKRKFIEQVKMATQELSEEVKMSINALLHAFEVMCNEIDKIEEKIESLTKDDEDIKLFKTIPGVGSITALTYKLEIDDPKRFKKSRSVGAFAGMTPRQYSSGDTQKQGCISKTGSNELRMLLSESAMRIIYKTKLWSRLKLFGMKIRKKHGHKKAVVALGRKLAVVMHRMWIDRKPFEYGKVEEKEAKKVLQPKKRERKSGSKIYSEV

SEQ ID NO: 300691 - protein, 462 aa, unidentified
MKAEAVSAPRSKRGLRPVVQVAEPQVVGLTPQTTMMTERTDTMKTYLLREPKSVEPQSARGVLRTRPATASEVLGQAVQTKHGPVLFIGLDVHTDSIAVSLAAADGTEVRRYGLIGGTHDDVLPLAKKLLAAHPDTELRFCYEAGPHGYPLARCLQAHGYECILVAPSKIPRSPGDRVKTNRRDADQLARLYRAGELTAIYVPDPQDEAVRDLIRARYQVLKQQHRARQQLKMFLLRHNFRYAGTKAWTQKHLNYLATVKLPFPEQQFLFQEMVNVISEAGERLERYDAQLPRVIPGWRWEPVVKALMSLRGMAVLTAATLVAELGDLRRFASARQLMGYLGLVPSEDSTGDKRQQGGITKMGNGIARRALIEAAWNYRAPARLSRELLKRQEGLSKAVKDLSWAAQTRLHHRYQHLTRVKHKKSTVAAAALGRELSGFVWALGQLVQPYARKVEAVKPVAA

SEQ ID NO: 300692 - protein, 410 aa, unidentified
MEVLHPRCCGLDVHKETVVACVRLVIDRKPVKEVRTFFTTTADLIALSEWLAENKCTHVAMEATGVYWKPVWHILADGGFQLVLANAAHIKNVPGRKSDVKDSDWISDLLAHGLIRPSFVPDGPTQEMRTFLRTRKQFVHEKGSHTLRIQKTLEDANIKLDSVITDIIGVSGRKMIEALIAGERDPAKLASFADRRLKASQQTLRQVLRGRVTAQHRFLLRLHLDQIDALDAAIARIDREVEASIEPFRTAVEQVSTVPGVKSLAAQTILSEIGIDMSRFPSSGHLISWACICPRSDESAGKRRSARIRKGSPWLKTTLVQCTWAASRRKDSYLNAQYHRIRARRGPKKAIVAVAASILTAIYHMLRDGTMYQDLGPNHFDAHAKERQKNRLLKRLADLGYAVELMPLPG

SEQ ID NO: 300693 - protein, 415 aa, unidentified
MKNWTERNHFAGLDWATDHHDVLIVDRAGQILEQFRFNHDASGWELFRNKIKVFAELAVAIETSSGAAVEQLLQSGCMVYPVNPKSAKAYRHRKAASGAKSDLLDAWSLAEALRVDGQQWKALAVQDPLLQELRLLCRDEVSLIEQRTALILQLEQALAEYYPAALEAFDDWTTESSWEFIQAFPTSQALSKAGKRRWEKFLHTHRLARPQTYQNRLSIFAKAEEFCGTEAVSRAKSRLALALVATLKTVQKQLREYRQAIEELFEQHPDKDLFGSLPGTGPKLAPRLLSELGSDRSVFETPQSLQCVAGTAPVSFQSGQIFKVYLRRHCNRHLRATIHLWANLSRSQVPWAQQYYQAHRDKGQSHACALRCLGQRWLKILWKMWQTGATYDADLHARNQQKHGSWLLTLNPKTA

SEQ ID NO: 300694 - protein, 353 aa, unidentified
MVYSPNEYDIFIGIDVDQKSFSFTVKNHDTMNNAYKIPASPENLYQHIRNRYNSKRVICAYEVGVTGYYLHDYLTSKNIRCLMVPPPSVPKASNDRTKNNRLDSERISQHLKNGDMSPIRVPDYDCRELRQLLRSREEYVNMRKVTKQRIKSLLLFAHLHTLLKDTTQYWSYLHIKRLKELPCSPATRQRLDLLLKDLDHARSQTVIILKELKTFSEQNASLKRNIHYLRSIPGIGFITAITILASIGDIEQLRNPRELAAFTGLVPSEYSTGERISRGRITHLGNSILRSLLVEAAWANISKDARLRQFYDRIRAKHHPQVGARKAIVAVARKLTLIIYRVLKEQREYIANI

SEQ ID NO: 300695 - protein, 280 aa, unidentified
MEVYAGLDLHSTNTYVAMIDNDNKVLYKQRHGNDVPTILSALDPFKQDIQGVVVESTYNWYWLVDALMDAGYRVHLANVSAIKQYEGLKQIDDRRSSLWLANLLRLNILPTGYIYPKEERPTRDLLRKRLHLVRHRTSHILSVKNILARNLGIRMKSEEVKKLSTSEIKTLFPDPEMRVAVAASVGLITHLENEIKGIEAMITRKLKIRKEFIKLLTMPGIGQILGLTIMLEVGHIDRFPTVGDYSSYCRCVRSIRTSNGKITGYGNRKSGNKYLSLSLR

SEQ ID NO: 300696 - protein, 425 aa, unidentified
MNYKQNEKINQVKESTLVVGIDIGSTTQYARAFDWRGIELGKVFTFSNSREGFESFKAWMRHLQDKYRKSDVIVGIEPTGHYWFDLGAYLEDEGILLVMVNPYAVKQTKELDDNSQSKNDRKDPKVIAKLVTEGRYSAPYTPDGVYADLRIMVTNRKRLIREMTQIKNRFARWFAIYFPEYTDVFGDYEAQSSMLLLKKVCTPEAIVELGAEKINQIWRDAKLRAVGMKRATILCETAKRSIGLKKGSSAARYEMKLLLEDYEYKKAQLDAVMEEIEKLCRKIPESEQMLAIKGIGVITVAGFLAEVGDVRRFESPRQIQKLAGLSLRENSSGKHKGQTTISKRGRSKLRAVLFNAAIPLIATNPEFKSLHEYYTTRANNPLKKKQSVIAISCKLIRVFYAILANGVTYDAQKMLSDIHRQPQAA

SEQ ID NO: 300697 - protein, 351 aa, unidentified
MYTLGIDLHKKTSVWVLIDEERTELWKENVLCHPEYINIAMEKIPISPKEIQVAIEPVAGYRWVSQQLKEAGMDVHIAHPRKMQLIAKSTKKTDEEDSRTLANLLQSGYFPEAHLAGEDVYQLRLLLRERTFIVRQRTSVKNQLHGIATTQGLHLIPSGNPLFKRGKESIMAGDNFVMKELHRLEEELGERIKPFDERLKKEAFKYEEVALLQSMPGVGIITALTIISEVDDFKRFKTGQKLTSFAGLVPRQRSSGETIRYGSITHAGSKPLRTAVVETAMRIRESNAPELFAFVKRLTPICGAKKARVALARKILVIMWKMVTTNTPYNPSILSSSCITNVSDLDTGSDV

SEQ ID NO: 300698 - protein, 358 aa, unidentified
MDTAAERIHVAIFRGEEATPSEEFEVKADAQGIGRLKKKLEKETGPVKCVYEAGPCGYGLYRTLNGSGYPCQVIAPSLTPRKPGERVKTNRLDARRLGNYYRGGQLTPVRIPDEQQEALRDLVRGRDDVRRNLQQSRQRLSGFLLRHGYHFKEGSRWTRKHWAWVKAIQFKQELAQMVVEEYITGVETQIEQMKRFDQKLHEISQRPEYAAKVSAYSVLRGIQTTGAMTIIAEGGDLRQYGWAPQFMASIGIVPGEESTGERRKPRSITKTGNAYLRRILIEAGWSYQKRLHAGAGIQKRRRNQPEALLAIARKADHRLHGKFSKLQYRYNKPSAVANVAVARELAGFVWAIGQFLEQ

SEQ ID NO: 300699 - protein, 336 aa, unidentified
MNGSIERWVGIDVAKSKLDVAMLDEHGKLKSHVFVNDAKGHAALMAWLRQRGNSQQQIRVCMEATGCYGEALAISLVDAGWCVSVVNPARIKGFAQSELVRNKTDRADAALLARFGQALRPEPWVAPSLEVRQLRALVDRLHSLKEMHQQEANRLEAAMNQTGMRESIESHMKWLQADIKQLERQIDDHIDGHPQLREDAKLITSIPGVGNTTAAKVMAYLGDVRRFKNAKALAAFIGVTPRLKLSGSSVRGRSMISRSGHAAIRHALYMPALVALKHNPIVKTFGERLKNAGMAPKAVVAACMHKLVHLIYGILKSGTAFNANFVVVQLDSKDGI

SEQ ID NO: 300700 - protein, 369 aa, unidentified
MNERTRFVGLDVHKASIAVAVAEAFGDPEEHGHIANDPSAVRRLMQRLGGQDLHLEVAYEAGPTGYALHRQLTAMGIACVVVAPSLIPVKPGDRIKTDQRDAAKLARLLRSGDLTPVWVPDEAHEALRDLVRARDDAKVDLLRAKHRLSKFLLRRAIHPPVGVRAWSRAHDAWLAGLTFEHAADGVVIEHYHAVVREAAERVRRLETALAQCAAASPHAELLAALQAIRGIGFLTAVTIVAEAGDLRRFPTARQFMAYVGLVPSEYSSGASRPRGHITKTGNRLIRHVLGQAAHNARYRPNVSTSLRARQRGVAPAVVELDRRAQARLHARYRHLAGRIGTNKAIIAVARELAGFVWATGQLVPMAQAA

SEQ ID NO: 300701 - protein, 438 aa, unidentified
MSNKVIFNLDDLFISVGIDVGADFSWMSIALPNQQFVGKPYKILHNSIDSLTTAVSKIKEAEELYSLESRIFLESTGIYHYPLFCYLRDKGFNCSVINPIITKNSTNINIRKVHNDRFDSKKAALVGLKPDLKVSLMPSDLALNCRNLCREYYDLMDNRSAYVNKLQGELRMAFPQYLGIFSKVTINTSLTLLETYTSPSAFLKADKQEIIDIIKSTARFGLTYAQNKYNAIIQAATDANQFGYIIDSNIKRIRLYISFIRKYDEEINNILESLHELVDANEDADFVKQIHLIETFKGAGFLSAVSIMGEIGDFSAFSKPKQLFAYFGLDPAVKQSGKFEGTKVQMSKRGSAVARRVIHTLTLQSISISRNGEAKNPVLREYYLKKCDSKPKLVAMGAVSHKVCNMIFAILRDNKSFEIITPQEHIKQYNSAKCDIAA

SEQ ID NO: 300702 - protein, 363 aa, unidentified
MPMKKPTQHLIAEVPRSNSRVGMTIGIDLGDVWSHYCTLNEDGEVVDRGRFRTTPAGVEKWFTDLPRIRIAMEAGTHSIWVSEQLQELGHEVIVANVRELRAISHSDRKSDQVDAEKIARYARLDPKILRPIAHRTVAQQEALTLIRARNLVVRLRTAAVNAVRGLAKPCGYRLPASSTLCFAKRCMAVLPPALAEALGPVLEQIAAMTVKIKQYDRTIKRLTETEYPETQALLQVYGVGQLTALTYVLTLGSKERFQRSRDVGCYLGLRPRRSQSGDSDPQLGITKAGNIYLRSLLVECANHVLGPHGRDSTLRQWGLHLASRGGKQSRNRAIVAVARKLAVLLHRIWVTQEPYIPFYVVAA

SEQ ID NO: 300703 - protein, 362 aa, unidentified
MKKDNRFRFANVSKMTIGIDLGDRYSYFYTLDAAGENTESGRVQTTKSALEKRFRGGEAARVVIEAGTHSPWVSRLLTECGHEVLVANPRKLALITKNERKDDPVDAELLARLGRVEPQLLSPIAHRGAEAQADLAVIRARDAVVAARTQLVNHVRGAVKSWGSRMPRCSPRSFAQKGESEVPEPLRGALQPLLEVIEGMTEQIKGYDRQIEEACRENYPETELLRQVKGVGAVTSLAFVLTLEDANRFGRSRSVGGFLGLHPGRDKSGAQDPELRITKAGDQLLRRLLVGSAQYILGPFGPDCDLRRWGLKLASRGRKNAKKRAVVAVARKLAVLLHRLWAGGEVYEPLRLAAPTALSTPA

SEQ ID NO: 300704 - protein, 348 aa, unidentified
MWIIGVDYHPSVQQIAFVNTDTGECGERRLNHSDGEAEKFYRELKAADCCLRVGMEATGHARWFERLLAELGFELWIGDPTKIKAKRVRKQKTDRLDAELLLQLLLEDRFPRVWVPSPENRDLRQLLWHRHRLVQMRTRIMNQLQAVAMNEGVRRKQALWSKSGRAQLESLPLAPWAARRRHDLLELLDRLSPTIEELSAVVEQEAKQRPEVLRLMTHPGVGPTTALAFVLIIDSAERFACGKQIASYVGLIPCEDSSAERRRLGHITKQGNSLLRFLLVEAAQAAVQRDPDWRRRYIHLAMRRERRIAKVAMARKLAVSLYWMWRTQRVRTRESPTTSMVCSKSPPT

SEQ ID NO: 300705 - protein, 337 aa, unidentified
MKDYDCVGVDVSKMTLDVALYQGEVDWKEGHIKVNNNKAGYKDLMRWLRSKGVKKRRLRVCMEYTGLYAHYFRMWLESESIAYYMVDPGRMHNFEPPLSIKGIRQTKTDKADAFRIAIFCALFHESMLPSHLPPPAYFKLKRLLAERLQYVKQSTMYKQQRHDVSAYDTVSARIRKEEELKSLRRCIRQTEADILAIIESDASIKRNYDLLTSITGIGLVVAVTAIVLTENFTAITDPRKYASYISIAPFPHESGTSVKGATRVSKEGFKQAKADLSISLLPVISLDPGIRAYWLRKKAEGKHTGVIMNAIKFKLVLRMFAVVKRGTPYVDTMKYKT

SEQ ID NO: 300706 - protein, 413 aa, unidentified
MELLVERCAGMDIGKDEIVACVRTPGPGGKGRAKQTRVFSSFTSGLEAMAEWFSAEGVTEVVMEATGSYWKAPWYMLEERERFELKLVNANHVKILPGRKSDIADAEWLAELLEHGLLRGSFVPPAAIRELRDLTRYRKRLVQAHTAECQRIQKTLEDAGIKLDSVASDVLGVSGRAMLAALVAGERDPEVLAELAKGRLRKKIPALREALRGRFKDHHALLLRLVLDHTAYLEAAIAELDTEIDKVMAPFAEARDHLDTITGVGKRAAEVIIAEIGTDMSRFPTAGHLASWAGMAPGNNITGGKRHSGKTTKGDVWLADILTQCAWTAARSRDTYLSAQFWRLAGRLGKRRAAVAVGHSILVIAWHLLTNDANYDDLGGNYFARRGDTARHQERLVQQLQDLGYAVTLRKVA

SEQ ID NO: 300707 - protein, 466 aa, unidentified
MKDNRRRRLGKPRVSSSVLDRINPHAAGIDCGAAEHYVAVPPDRSPSPVQCFKTFTTDLMRLAEWLVACGVTSVAMEATGVYWIPVYEILEGRGLEVLLVNARHIKHVPGRKSDVSDCEWLRDLHSVGLLRGSFRPTEGIVALRAYMRHRQTLVESAGTYVQRMQKALVQMNVQLPLVVSDITGVTGLKILRDIVAGRHDPAHLASHRDYRCRASRTEIIAALTGHYRPEHLFVLQQNLELFDTCQIQLAACDRALEAHVQILTATQDAPATPLPAPRVHRRIIDNDPHFEIRTPLHHLTGGVDLTQIDGIGPYTALKLIAEIGTDMHRWPTDKHFTSWLTLAPKNKVSGGRLLSSRTEPSANRAAMILRMAAMTLGRGSTALGAFYRRLAGRIGKPQAITATARKLAILVYRALKGELVYRDPGAAAYDVQQRTRVLRRLRQTATTLGFDLVNRETGEILHAAPA

SEQ ID NO: 300708 - protein, 433 aa, unidentified
MNTPHPYDLVIGLDRSDKKADLRLITTATGQRRSAIIDTAPEALWEWLLALRQEHPQARVALCLEQPAVHLVAFLESYEWITLYPINPITLQKYREAFVTSRAKDDAKDADYLADLLLTHHAKLKPWAPEDSATRAVGQLVYHRRAVVDERTGLTNRLIALLKQYFPQALVLCGDDLWRPLATRFLLQWSSLQAVQKAKPASVKQFYYLNGSRSAKLLEQRLALVQKAVPVTDETALIQSFVLRVQLICRQLQLVQQTLQSYEKQMASAYAAHPDREIFASLPGAGAVLGPRLLASMGAQRERFGAAADLQQYSGVAPVTKKSGGSCYIHRRYLGPKFHKQSFHEYAKESILWSRWAAAYYLQQRTKGSPYHTAVRALAYKWQRVIFRCWQNRTPYQEAIYEAALRKSGSPLVALFDKVELGKSPFKNPANKS

SEQ ID NO: 300709 - protein, 312 aa, unidentified
MPDNNPPYYVGLDIAKDQLDYCVTETQEGRCPNTPEGRAELIRILKALPSPRVIAEASGGYEKVVMAELFAAGIEACLVQPGRVRALAYAEGLLVKTDRIDARLLRRYGQKVEPRLAVPIAPAAATLRELLEHRRQLLTQRVEVQGRLPLAGRTLGPLLKLQERSLLSQIEKVEQRIKQLFDEHPELASKSERLQLVKGVGPILAATLIAYVPELGTIESDQLSALIGVVPYAKDSGPKRSPRHIRAGRTQVRNVLYMAAVCASKCNPILKAFYERLIAKGKPAKVCIVAVMRKMVCLLNRLIQDPNFVLAN

SEQ ID NO: 300710 - protein, 449 aa, unidentified
MKTTKAQRHGLPVIHDRAAGIDIGSRFHVVAVPADITEEAVQTFNAFTADLERMAAWLVDLGITTVAMESTGVYWIPVYEILESHGLQVVLANARDARAVPGRKTDVNDAQWIQRLHACGLLRASFHPDREIAALRSYLRLRERHLDYAAAHIQHMQKALTHMNLQLHHVVTDITGATGMRIIRAIVAGERDALILARMRDTRCKSSLEIIRSALVGNYQPEHVFALAQALAMYDAYQMQLELCDQQIARSLHQLAQQKPLPGEPLPKARHPTRQPNALNFDVRTLLYQLVGVDLTQIHGIGPYLALRLVAECGTDLSRWRTAQHFTSWLTLAPGCRISGGKVLSAHTRKTKNRVTAHLRLAAVTIGKTNTALGAFYRRLSARIGKAKAVTATARKIAILFYNAMRFGMAYEDPGADHYEQKYRERVVKGLHRRAAEFGFTLQAVEGAS

SEQ ID NO: 300711 - protein, 350 aa, unidentified
MRRPKEKLIAGLDLHSNNVMIGVINQDGKRITHRKLDCDLKQVTEFLKPLKPQLQSLAVESTFNWYWLVDGLRGQGYSIDLANPAKIEQYNGIKHVDDKDDAFHLADLQRLNILPKAHVYDPELRPVRDLLRRRAGLVHQRTALLLSFKSLYARTTGKALDLADAKKMEPKEAPKLYKHPANQLIAQVQAEHIQALDKSISRIEKAVLACAREIPLYEKLLTIPGIGKFLGMTITMEVGDIKRFKTDGDFASYCRTVDARRLSNGKCKAENNQKCGNKYLSWAFVEAANFARRYCEHCRRWYDRKAAKTSKVIATKALACKLAKAAWHVMDGETDYDATRMFPELATKKK

SEQ ID NO: 300712 - protein, 401 aa, unidentified
MHAVIGIDVSKATSQVAVAVDGKVVQNFKITHDVFGFNQLNTVIMQFNTFPDIVFEATGVYSRRLKTFLEAHNYPHTYLNPLTAKKQLDQLRPNKNDRNDAKHLAETQFILKRAKSYVQNPIYIELQDMSRFDQQLNHDIVSAKNRLHRLLQLTFPEIETLFSTTDSQQYWEIVSLIPHATMAKHSRQTLSDTIQSSVSRQIGVARLTRLVDKLVALGSLSAPAVAVASYNVTEVRYYAQRLIALSQSKANVLATMVDQTKDLPEYDIYQSIPGFSDKTVVSLIAELGDLHRFATSNKLNAFVGIDLRFNDSGDYKSSGFITKRGNTIARKVLFKAISNIASTATYGHQNHINDWYQKKKQSSMSKGTKKIAIGAMSRLLRTMHYLVLNNQLYDYDTASKR

SEQ ID NO: 300713 - protein, 405 aa, unidentified
MDIIVERGAGLDVHKGTVVACVMGTGIKKEIRTYRTMTNDLFRLKEWLKENRVTHVAMESTGVYWKPVFNVLEDSFKVMLVNARHVKNVPGRKTDVQDSEWLCKLLRSGLVRGSFIPPKPVRELRDLTRYKRKLIQTITSEKQRVEKILEDANIKLSTIASDTFGASGARIIQELLKGELEPEEMAELSKGRLRKRKEELKEALVGNVEEHHKRMIRTSLGHIKAMEEILFTVEQKIQENIERHFKEEYELLKTLPPMKDSASVIIAEMGVDMDLFPTDGHLSSWAGMSPGNNESAGKKKPGTTTHGNKHLKTILTEFAWIASKMKGTYLWAKYQSLVGRRGKKKTLVAVGHKILIMCYHILKYKVPYKELGSNYLDVRKKDRIAKSYIKRLTNLGYAVTLKEVA

SEQ ID NO: 300714 - protein, 340 aa, unidentified
MNEITTVGLDLAKNVFQVHGVDAEGTTVLRKQLRRAQVLAFFSRLPRCLVGMEACATAHYWARELRALGHEVRLMPAQYVKAYVKRNKNDAADAEAICEAVVRPTMRFVPAKTAEQQAAVLLHRGRERLVRQRTMLVNALRGHLAEFGVIAPQGLRNVGRLIAIIRDEEDARLPGLARQVLQVLAVQIEQLEAAIAALEKQLMGWHKSNPVSQRLATIPGIGPIIATAIAAMVAEPSGFRSGREFAAWLGLVPRQNSTGGKNRLGGISKRGNQYLRRLLINGASANLLRSKATNADPWVIGLRRRRPSLVVAVALANKTARIAWAVMHRQENYQRMATAA

SEQ ID NO: 300715 - protein, 349 aa, unidentified
MRHFQPPANTRFYGGVDLHARSLFLAILDHDGQERFARNLPAAPEPFLRAVQPFREGLVVGCECMHCWYWLADTCREHQIAFALGHAWAMRAVHGQKTKCDRHDAQAIARLLKGGNFPLAYAYPKERRGLRDLLRARLRLVRQRAELYGHVHTARRQANLPPVSSDVKYKSKRAGLTTDITDPFVRRRVETHLALLEPLDVTIRRLEAEIEDAAREIFPTELAVLQSTPGVGPVLSLTILLEIDTIDRFETRQQFCSYARLCGAVQESAGQRTGAGNRKAGNAWLKWAFSEAAVLSAQKDERIGRLLERLASKLGKAKALSALAHKLGRAFYHVLHTKEVFDVNRFVRR

SEQ ID NO: 300716 - protein, 353 aa, unidentified
MFPKPGEATVKDITTVGVDLAKNVIQVHGVDQQGKAVLKKQLARRRFVEFFANLAPCLVGMEACGSAHHWARQLEKLGHDARLMAPQFVKPYVKTNKNDAADAEAICEAVSRPNMRFVPIKTGEQQAVLALHRARAGFVKARTAQGNQIRGLLGEYGIVIPQGISHITKRLPAILEDGENELPSTFRQLLLRLGEHLKEFNRQVGELEAQIQDWHRENEASKRLAQIPGVGPLTASALVAMIGDAKSFQNARQLAAWLGLVPRQHSSGGKTLLLGISKRGDAYLRTLLIHGARSMVRIAERKGGDTPTWLTQLIGRRHKNVAAVALANKNARIAWALLAHDRDYQAGYAPAVA

SEQ ID NO: 300717 - protein, 351 aa, unidentified
MFRSVNGNISYLITNVMETVYFLGIDISKKKFDGALTIDGKNFYPVDSGNTTKDIRPFFKTLTKKFGMSYSQLIVCMEHTGIYCLPLLEFLVENQIRVCLESSLQIKKSQGIVRGKNDKVDARRIALYAYKNREDLTFWRPQRLIIQKLKALLVTRERLVKVKVELQVPISECEEFIQESIHQMLAKSCRNTISTLERDIEKIEKMISDLVKEDTQLKEQYQLVTSVSGIGNITALNVIVSTGEFTRINESKKFASYSGVAPFEHSSGSSIRGKTRVSRIANITLKCLLHMAAMSAIQCDDEIKHYYQRKVAEGKNKMSVINAVRNKLISRIFSCVREKRTYQKKYEYVLA

SEQ ID NO: 300718 - protein, 323 aa, unidentified
MDSHMKIYVGVDVGKFNLDVYYLNKHFQITNDSTGIASLLEDFKNNIPTSDNIVVICEATGGYEQLLIKTLLKHAISFHIAHPNKVRAFAKTQGILAKTDRIDAIILRDYGELIHPQPSKNLLSESANTIRSLIKRRDQLLDDQRREQARLDKLTLPDVKNSVQSHITWITQEINNINAKIEKASMEDTIKQQVELLTSVPSVGNFTALMLISYLPELGNANGAQISALVGVAPFNKDSGRYKGKRFIQGGRSMIRKSLYMSAVSSIRWNPDMKSFYTRLRKSGKPAKVALVAVMRKLLILLNNIIKRQTPWEINNPKKLFMA

SEQ ID NO: 300719 - protein, 419 aa, unidentified
MKITKTKKHQTVNEKTLIVAIDIGKTVHYGYFRGPQGHDIKPFPFCNTQRHFKDFWNKIVRYKTENKLEDIVIGFESTGSYAEPLAHYLGQKPAQLVQINPMHTKRIKELTGNSPNKTDRKDPRVIADIIALGHALTVVIPEGSAAELRRLIQARERAIKIRTIMMNQLHHLVYLVFPEFTQVIKNIKTKSALYLLKNYPTPESIVSLGLKSLSLLLKKVSHGKMQGERAVQLFETAQHSVGIHEGRQGMLLEIEHLVSDIENKNRFIDQLEEKLTYHLDCIPYSQSMLSVKGVGPVTIAGLIGEAGDFGKFKTVSEIMKLAGFNLYEVSSGKHSGQRHISKRGRSLMRKLLFFAAIRTVRSNGIMHRKYHDMLDRGMPKVKALVAIARKLLCILFALARDNMVYRDDYNEVHKVALAA

SEQ ID NO: 300720 - protein, 414 aa, unidentified
MDEHSTSAGIDWAKDEHALCVIEASGRMIAMEGRFAHDERGIAKLCRTLEDMGVERVAIERPEGVLVERVLECGITVLAIHPNQLKASRPRFRASGYRAKSDSFDAFCLAELARTDHHRLRALTPDSEETRALKVLTRAREDLVGTRVALANQLRAELEAFWPGAAILFSEIDSAISLAFLKRYPSPIDASRLAEKRLESFLSKNHYSGGKSAHQLLERLRKAPCGRAGKAEIEARREAVLALVGTLGALVERIKHLEERIARAVRAHPDGEIFLSLFLSPNSTLTAASLVAQIGDRRERYPTNESLAAAAGMSPVAVESGKRKVASFRRACDKHLRRAFATLAESTRHHNRWAKDIYRRARNRGCDYAHAIRILGRAWVRVIFRMWREGQPYDPARHGGLQRLRSAEGLPQGV

SEQ ID NO: 300721 - protein, 326 aa, unidentified
MAKRITVCAGIDTGKRKLDVALDGSAEQLQVDNTAEGYKTLLQWLRQHRVKRVGIEASGGYEQAVVAELRRKRFVVVVFQPAQVRAYAKFHLQRAKNDKIDAALIAACTAAVKEIHPAPDPRLLPFAEHLTLIDQIGEDIARLKNRLETCRNARLRALWKENIAHLVKLEKGELKTLVAAIRKHPDLAKRLDLINSIDSIGLPTAVAILVRMPEIGQITRQQAAALAGLAPYDDDSGDKVGARHIQGGRERLRRALYTAALPGAFRWNRQLIALYQRLRAAGKEHKHALIACARKLLVFANAVVARGTPWQDKPQTGAAVTSPSVA

SEQ ID NO: 300722 - protein, 418 aa, unidentified
MKVVFPTCCGVDIHKSFLVATIIKTPQDSLQPIYQKKRFSMFNSDLNRFADWLHENDCMDVCIESTGKYWIPAFNILEKRGVRVIIANPKWVKAVKGNKDDTKDSKWIGDLFRIGLVKSSFIPDKDIRILRELTRYRYKLISMRSSEKNRFQNAFTVCNVALDSVVSDMFGKSAAAITDYLTSDEDFDPQHCVSLLQRSLKKKADDVLESIEGDEITQEQKTRIGIVRDHLHYIGSLVERVDTCIDTMVNRYEGYIILLCTIPGVDRSSAITILSEIGIDMTQFGSSKRLCCWAGLTPGNNESAGKKKSVRISRAGVYLKPALVQVAHAAVKDKASPYYALKYERIAKRRGKKRAIIAIARMILTAVYVMLSNLEEWNPVDLYKVDMPEHLKEKQLAKAVKQAVRFLEAQGLTVLDSA

SEQ ID NO: 300723 - protein, 341 aa, unidentified
MKKFIRTAIDLGKTYFQVHGLESEGGQSISRKMKRSKMREFYEQIEPCRVGMEACGSGHYWARELVAMGHEVVLIPPAYIKPYIKRGKNDAVDAAAICEAMSRPGMRFVPIKSADQQAVLMLHKTREMFVKQRTMSVNALRGHLAEFGIIVAKGIGRVDELLALAQSDAELPQIAKSAVAGLAQHLEGLDQSIEAVGDEIARAHKKNPTSRLLDEIPGIGVLIASVIASSVPDPSVFKTGRDFAAWLGLTPRQNSSGGKEKLGSITKQGNRYIRKMLVVGATSVMRVAGKRKGALADWINALQAKKPKRVAAVALANKLARICWAIMTTGEGFRVDTYVKA

SEQ ID NO: 300724 - protein, 452 aa, unidentified
MLTSLILNDQREGMEMNQADRPSSPVDASSFQIVVGIDIGSQTCSMCTLTPDKRQVIKPTEFANAPAGFGVLQEQLEQLGVPPEQVLIGLEATSRYGENLYHFLESRGYQLCLLHPRQTHQFAQQRGLRAKTDKLDATTIARVLLSGEARRGYVPSDLIATYRELVRLHTQLSDEVARYKNEIQALLTVLFPEFSQVFADPCRATALALLKLYPSAQAIATAGVEAIAAKLHELAPRNYGRSTAEHLVQLAQHSVSRGFAVAARSTSLKILCDQLEHTQANMAQLEREIDTLLETDAGAKGLISVPEFGHKTVAVLRAELGDVTRFQRTDQVVAYAGLDIEVKESGKWKGQAKLSKRGSGRLRRILYMATVRCIRLPGSAFGAYYHRLVARGMKKCDAMMAVMRKMLIVAYRLLRTEETYDPTKVCAVVVTQPVELPPLHTPSSTKVVAAKA

SEQ ID NO: 300725 - protein, 339 aa, unidentified
MRTFVALDVSLEKTAICIMSADGSIAAEVTAASDPEAIAAELARHEAVGPDALIGLEAGPLSEWIARGLANLGASVTLMETRQVRAALSSMVVKTDRNDARGMAHLLRMGWFRPVHLKSMDACEQRALLAARETLARRLKDVENSVRGLLRGFGLKLGAVGRARWAERVREVVGGHATLAAIFEPLVAARAALLEQLGVLDGRLLATVRDDPACRLLMTAPGVGAVVALTFRAAVDDPSRFASSKAVGPCFGLTPRRYQSGETDRSLGISKAGDASVRRALFTAAHVIMNQVKRSFALKTWASALAARAGMRRAKVALARRLGVVLHRMWVDGTEFRFA

SEQ ID NO: 300726 - protein, 419 aa, unidentified
MNQQPAQPGLFIGMDWADQKHDIYVIDRNGKGFHRELEHSAENIDAWVGDMLKIAGGQPIAIMLEQSRGALIYALMFREDVLLYPINPKQLARYRESYPGGGKNDPTDAMYLARMLSERITTLKAWQPDDENTRLIANLSQQRRKIVDGQTKLRLQLKALLKSYFPVVLELFGKQHQLPLLLSVLCRWPDPRKLRRADRQLIRRIMGEHSMRNEEQQNEIIERIRAAQLLTRDDALITPSALSVKLLANQIQQAQKTIEEFDARIAEAMKHHPDAHLFTNLRGAGSALAPRLLCAFGSQRDRWEDADSLASFSGIAPVTYQSGKSRGVRRRFACPKYLRQTFHEFADCARRYCPWSKARYRMLRDKGMKHHAALRKIARSWIRILFRVWKTRVPFDCDRYIAKLQQRCPEITPYLTQEN

SEQ ID NO: 300727 - protein, 439 aa, unidentified
MPQIWAGIDAGKGHHHCVVIDADGAKLHSARVANDETALLALIATVTDLAVGDECLWAIDLSSGGASLLLGLLAAHGLPVVYIPGHAVHHAAKAYRGDGKTDAKDAAIIADQARMRRDLQLLSVEDETRIELRALTGHRKDLVCDRTRAINRLRGHLLEYFPALERAFNYSASRASLILLTGYATPEAIRRMGESRLARWLGAQGCRTAVATAATAVAAAKSQQSVLPGQAIAAELARRLALDVITLESRIAEIDQRIAARVETSRAAELLRSMPGFGPLLSAEFLASTGADLSVYVSADRLAGVAGLAPAPRDSGRISCNHHRPRRYDRRLLRACYLAAMVSVQQKTESRGFYDRKRAEGKSHKQAILALARRRLNVIWAMFRDDRPYDPPSLSDGAFEESAAPSLAPKARQTVAATAALAVDHMGLGLVVASYAARE

SEQ ID NO: 300728 - protein, 370 aa, unidentified
MKQPSTLYVGLDVHKDSMAVAYVVQDHGAEVVSLGNIGTRQCDIDQLIRRLQSKSPHLVLVYEAGPCGYWLYRYLTQKGHVCWVVAPALIPQKPGDRVKTNRRDAIKLARLMRSGDLTPVYVPTVEDEAMRDLCRAREEAIRDLKTAKCRLKAFLLRQDIRYTGRATWGPAHLRWLSEVVCPTPAQPIVFQEYVRAVTEHTARLQRLEQALHEHVNTWRLQPVVEALQSLRGVQFTVAVTLVAELGDLTRFDNPRQLMSYLGLIPSEYSSGDRRRQGGITKAGNTHARRVLSEGAWAYRYPAQVSRHLQWRLETPPKPLQDSSWKAQVRLCQRYRRLIGRGKNPNQVVVAIARELSAFIWAIAREVPLTP

SEQ ID NO: 300729 - protein, 371 aa, unidentified
MKKLAWVGLDVHQESIEIAVVDRKDRILYQGGCSADIEAVVKVLKKFRGYQLYCCYEASGAGYILQRGLEKRGYDCEVIAPSLIPKQPGVRVKTDKRDALKLARFSRGGILTAVHIPTEQEETDRSLVRGREQIVGDVKRVKLQILSVFRHRGWNYRTAVKKENASYWTGLHRKWIRLKLLEITDRGLKFMLDEQLSRLEYLEGRLERYDEEILTLAREKRYHKKVSSLSCLRGVDVLTGMVLATELGDTRRFEHPRPLMSYLGLGVKESSSGKKRNQTQLTKTGNSRVRRVLMEAAQYARNPVRVSKALKQRRVGCDTKLVDIADKCMDRLNRKYWRLAHRGKHTNKIKGAVAREMVGFIWDILKTVQAA

SEQ ID NO: 300730 - protein, 410 aa, unidentified
MRRVIGMDIHRTFAEVVFWEAGQLHRAGRVDMTRAGLEGFGRTLHKEDEVVVEATGNAMAVVRALEPHVARVIVANPLQVKTIAHAHVKTDKIDAGVLASLRAANFLPEIWLPDADTERLRRQVARRDQVVRHRTRIKNEVHAILHAHLIPRCPHDLFGQRGRHWLERQKLPDDERAAIGRHLRELDRLGEDLDALDRDIAQAVMNNPSVKRLLTITGVNLTVAAGLVAAIGDVRRFASSEKLVSYLGLNPRVWQSGLGLAQYGRISKQGCSHARAMLVEAAWVAATAPGPLRSFFLRIRARRGHQVAAVAVARKLAVLCWHLLTNDVDYQWARPALVANKVRAMELQAGQPARKGNKRGSTYTYNVKELRHREIDMARQAEQAYEQFVRGWQRRRPVKRRTGAATEERR

SEQ ID NO: 300731 - protein, 371 aa, unidentified
MRKNVKFIGLDVHKKTIAVAIAQGGRDEEVRYYGQVPNTMTALDGLVSKLCDGDTVKLRFVYEAGPCGYGIYRHLKRTGQDCCVVAPSLIPKKSGDRIKNDRRDARNLARLHRAGELTPVYVPTIEDEAIRDLTRAREDARIVCRKAKQRLNSFLLRNGYDYSGKTRWSQAFFGWLSDLKMPHPAQQITLQEYIDAVHEALGRIGRLEDQIASLASQWRLASVVDAMQACRGVSLITAVTFVAELGDIQRFKSPRMLMAYLGLTPSEYSSGDRVKRGSITKAGNSHVRRVLVEAAWAYRFPARQSRYLLRRQKGLPDKIRQIGWDAQVRLCGRYRSLRARGKLVQTVTVAIARELTGFLWAIWNQVLQPAR

SEQ ID NO: 300732 - protein, 316 aa, unidentified
MSISETFIGIDVSKEQLDCASRPNGTTSSFKNSVTGIDALIKQLQEQRPRLVVLEATGGLERALVAALVVAQIPVVIVNPRQVRDFARAVGQLAKTDRIDAAVIAHFAEAVKPEVRTLPDQLTQEMDALMKRRGQLVAMLSVERNHLVSATSPVSNHVKEHISHLEELIKRLDQEIDQMIGKSPIWKAKDELFQSVKGVGPVLSRTLLAELPEIGQLSRQKLSKLVGVAPLNNDSGKRKGKRSCWGGRSGVRAILYMSALSATRFNPAIKEFYQRLLAKGKTKKVALVACMRKLLTILNSMVKNNTPWDPSFAQRG

SEQ ID NO: 300733 - protein, 465 aa, unidentified
MPKKNVTRKSRKRQSHLLKTVQPDAAGIDLGSREHWVAAPPLPDGSPSVERFGTTTPELLRLCQWLKQQHVTTVAMESTGVYWIPLFEILDSHGFEVHLVNARQISHVPGRKTDMLDCQWLQLLHACGLLRGSFRPGDEICRLRALIRERNGIVEQRSDWVRRMQKSLDQMNVCVHHAVSDITGVTGMAILRAIVDGERDPRVLARLRDRRCLKSEEQIVAELTGNWRPEHLFNLGQALKIYDQLNGVISDYDTEILRCIDSLQSAVCEDSSAPPPASKAKASKISQRGQESLRQALYRMSGFDLTTIDGIGVDTAAVVLSELGPDLSTFADEGRFVSYLRLAPNMSISAGKKVPGKFKAVSSTRVSNALRMAATTLRTSKTALGAYYRRIAWRKGASVAVFATARKLAQLVYRLIHYGQSYVDVGAKAYEARCAQRRLSSYARALNELAYKIEPLTDQKSLAAI

SEQ ID NO: 300734 - protein, 352 aa, unidentified
MNATTVAVDVAKNVFELAVADASWKVISSARLTRGQFERWFDNREVKLVIMEACGSAHHWARWLQGRGIEVRLLPAQYVRAYVKRNKTDAADARALLEAARASDMKPVGVKSVEQQGLQALHRTRSAWKATRTQRINALRGFCREFGLVVPEGALKGLARIGQVLADEDSAIPTLLRGTMRFMLEEIRLLEARMGQLERELAEIATASAPCQRLLSVPGIGLITSTAMVGAIADPKSFASGRRYASFLGLTPREHSSGDRRVLGGISKRGDRYLRTLLTHGARSVLRAATVARRYGRPLSRLQSWALEVQARTNHNKAACALANKLARIAWAVWVKHEHYRSSSVEPVPAAL

SEQ ID NO: 300735 - protein, 347 aa, unidentified
MVHVGLDLSRTRLDVHVVDESGAPLAVTTALPEAGGLAALVGRIGAEFGGPVYAAIESMNGARFVHDQLELAGWQVEIADAQKVKGLAPLACKTDKIDSWVLAELSRRDLVPAIWLPTPTVRAERERARWRLHLVRHRTALKNRIHATLLAFGHPCPVSDLFGTGGRELLARLALPEPWAADTTAALHLIDELDHEIAECERVLRQVGADHRYVPLLMTTPGIGWVLGYTIAAEIGDISRFASPAKLAGYTGLCPRVYQSGGKDHRGPLAKNGPKYLRWALIEAATHACRHPVYAERYRRTKTRLGRQRGPKVAPVDLARRLAEAIWHMLTRNQPFAPAGASRILAA

SEQ ID NO: 300736 - protein, 429 aa, unidentified
MKYNTQNAKIKSITEKTLIVGIDVGSETHFARAFDWRNYEYSKKPLEFSNTEAGFMTLKAWMADFAEKYGKNVVIPGMEPTGHYWFNLGAYLQDNGMKPVHVNPHHVKKSKELDDNNPNKNDRKDPKTIAGLVNEGRFSYPYIPTGIYAEIRNLSNLRIQTQEEITRIKNRIARWFSIYFPEIKDVYRNPDAVSGLMVIKQAPLPCDIKELGVNGVNKIWRDARLKGAGIKRATTLVTAAEHSIGNTEAPRSARKEIRNLLNDYETYKNRMDELMQEIKETLSEIPYIDKLMEINGIGIKTVSCFIAEVGDIGRFDNPKQVQKLAGYAIVADSSGKHNGESRISHRGRKRLRYALYEAAISVIGKNKEFKEIHSYYRTREKNPLKKMQSVIAVACKLIRIFYTILTKGVDYDSQKMLNDIVRPEIQLAA

SEQ ID NO: 300737 - protein, 368 aa, unidentified
MTLYIGVDFHPHQQTLSWCDTETGETKTLDMLHDVKRVREFYSSLPEPAIIGIEASSRAVWFENMLFETGHKLLVGNPVLIRKRATSRHKNDRRDAELILDLLLRGEFPSLWRRPPESDRILEMLRLRSSLVRQRTQGYNRLQALAHSAGLPRGRMRTAAFQAVIKALDLDETDDLRRMHLFKLVENFNEQITQLDIWLKAKAEADPKVRLLETQKGVGFLTALTTVHTLGDVTRFARLSKQVVSFAGLDPLEDSSAGRIRFGHVSKAGSRLLRFQLGQAAQIAARSDMKLKSFYKRLAKKKPKAVAKTATARRLLVKLAIMLRDNINAQEFDRRGKHSWQCPSGTRSEMTAALIGPSQPFGDRGREF

SEQ ID NO: 300738 - protein, 394 aa, unidentified
MFFIGIDVAKRSHQAAVTDISGNVIVKPFNFKNSSDGFTKFLSVVESNAIEKNDCIIGLESTGHYWYPLYFFLIENGFDVKVFNPIQTAAFREITIRKVKNDNLDSLLIADFTRFGRYSETYIPDENMLALKNLTRFRLSISDICGSLKKKVIAILDQVFPEYTGIFSDVFGKTSKQLLEQFSTPDEFMDISTTKLTNLLLKVSRGRNGREKAELIKTAAQSSIGISYALDAFSFELKQLLAQIEFMENQLSDVDAEMEKLLSQSEYGVITTISGIGPMLGSVIVSEIGDINRFENSSKLVAYAGLDASVKQSGEFNSSKNKISKRGSPYLRRALWMAAFMSLQCDPALYDYYSKLRARGKTHRCATTAVARKLCIIVWAIMKSKKPYSPVLKN

SEQ ID NO: 300739 - protein, 391 aa, unidentified
MYYIGFDIAKENHYASIANSNGEIIEEAFLVKNSINGFNFFMDKVKAKHINISDCLVGMESTGHYGENLIQFLHNNGFNIGIINPIQTDALRNSNIRKTKNDKIDTYLIIQSLMLKHYTPFVAKDIKILELRSLCRHRDDVLKYRTKLKVRLVGFVDQLFPELNLIFNSIHLKSCYALLSKYPSPKDIASTRVNALSSLLSKASKGHFSLEKAQKLKELAKSSIGVNNSSLSIQIKHSLKQIELLDSQIKEIDLKIKEIMDELNSVILTIPGISYTLGAIILSEIGNIDKFASPTKLLAFEGLDPSVKQSGNFNATIIKMSKRGSKLLRYAMLKASGIIIWNSETYNAYYNRKLSQGKSHNNAVCHVAHKLTRVIFHMLKENVEFKEQLEN

SEQ ID NO: 300740 - protein, 411 aa, unidentified
MEVIYKRCCGLDVHKEIVVACLLIWEGGKVHKEIRTFLTMTSGLVVLHDWLQAHRVTHVAMESTGIYWRPVFNLLEGSFTVLLVNAAHIKTVPGRKADVKDCEWIADLLSHGLLKGSFVPPEPIRDLRDLTRYRKSLTDERVREVNRLQKLLEGANIKLSSVATDVMGVSGKAMMEALISGSTDPEVLANLAKGRLRQKLPQLKEALQGRFRPHHRFLLEEILKHLDYLDEAIERLSQEVLSRVVPFSALIELMDLIPGIDQRVAEGILSEIGPDMNWFPSDRHLSSWAGACPGNNESAGKRKSGKTRKGNRWLYRYLIEAAWAASRSKGTYFNALYHRLVARRGKKKAIVAVAHSLLVVVYHVLKNQVPYRELGANHFDKLNLTHIKHHHVRRLESLGFKVTLEPLQKAA

SEQ ID NO: 300741 - protein, 350 aa, unidentified
MQVITIGIDLAKHVFQVHGVDANDKVVFNKPLRRSQVLPFFAKLAPCLIGMEACASAHYWARELKKLGHDVRLMPAKDVKAYVKRNKNDSVDAAACCEAVRRPTVRSVPVKTPEQQAQLMQHRVRDLLVRQRTQAINGLRSHLAELGIVAAQGYDGLKMLLAIIADNSDARLPENARASLSALVAQIASCQAEIGAIEKRLLTQHRKNADSKRLETIPGIGVLGASAIVATVPDASIFKTGRDFAAWIGIVSREDSTGGKQRLGPISKQGDRYLRRILVVGAFAVIKQARAHPQKYPWLTQLLTRKPAKVAAVALANKMARIAWAVLTKKEIYRVRLTAETCASAPAMGR

SEQ ID NO: 300742 - protein, 361 aa, unidentified
MNATTVAVDLAKSVFQLAVADDRWRVVETHRLSRTQFERWFANRDVRLVIMEACGSAHHWARWLIGLGIEVKLLPAQYVRAYVKRNKTDAADAAALLEAARASDIRPVRVKSVEQQALQGLHRIRSLWMGTRTSRINALRGFCREFGIPVPVGARTGLEAIGRVLADPHTAVPELIRGTASLLMEEIRLLEARIAQLERELTHMARLSPACKTLLSVPGIGLLTATAMVAATSGDVSHFKDARHFASWFGLTPKEYSSGSTRHLGRISKRGDRYLRMLLTHGARSVLRAAKVASGAGREVCGLRRWALDVQGRSNHNKAACALANKLARICYATLRDKEPFAEGTVPLAKKINRQAFVMPA

SEQ ID NO: 300743 - protein, 335 aa, unidentified
MHYLYYVGLDVSKETFDASLVAFEDANEMAHRKFANSRKGICSCLHWVEKRHGIRLDDVIFCAEDMGSYISEMAVCASDRTLNFNFSLISPLVIKYSMGIARGKTDRVDARRIAEYAITHYRKIALYLPAEKELCQLRTWLILRAHLAKQRVAKLVLLEKLDYKEKFADVSIQRSMLQEEIAYAEIHMKTIEREMKELIAADSNICRNYKLLTSIKGVGPITAIVMLCSTLNFTKITDHRKFACYCGLAPFEHSSGTSVRGGCHTSSMANRDIKVQLNRSALIAIRCDPQLKAYYERKVAEGKHKFSVLNAVRAKIAARCFAVVRRGTPYVALQI

SEQ ID NO: 300744 - protein, 341 aa, unidentified
MAESPYTLFVGIDISAKSASVALATSRRQVAEPFDIRQTQKGFEQLKRRMLKREDCPEQILVVMEATSTYWMQLATSLYSEGFVVSVINPSQAHYFAQALLKRSKTDKIDAQTLAQLGTTLKPKPWSPPPPVYHELHQRLRQREQLARMLTQQKNRLHALERRSEVIPAVRDRMQATIDFLSRQVDELNEELSQALRHNPEWYVNAKRIMSIPGLGLISTAWILTATQNFTTCEEPGQLVSYAGLAPRSRQSGAWKGRAFIGHSGHSGLRRSLYMSAVNAIGFNPHLRQFHKRLKDGGKPGKVAICAVARKLLLISWALVAKETVYDPDYHKRLQTVPETA

SEQ ID NO: 300745 - protein, 338 aa, unidentified
MKLYGGIDLHSNNSVVALLEEGDHVVYRQRLPNEAQVILAALAPYREEIEGLVVESTYNWYWLVDALMDAGYRVHLANTAAIVQYSGLKYSDDDSDAAWLAKLLRLGLLPEGYIYPKRQRAVRDLLRRRSRLVQQHTANVLAVQNLLSRNRGRSLSANEIKRLTPERVSELLPDVNLALAVQSTLLAMRGQEAAIDLLEREACAQVRWQPAYRHLLTASGIGQVLGLTILLETGPVGRFAGVGNYASYSRCVGAERLSNGKRKGRGNTKSGNKYLAWAYLEAANFAVRYNPTIKRYYQRKKARTNGVVAIKTVAHKLARACYWMLRDGTDFEVGRAFA

SEQ ID NO: 300746 - protein, 410 aa, unidentified
MEQVIERCAGLDVHKATVAACVRVATAGRTRRQEIRTFGTNTADLLAMRDWLSTHGVTHIAMEATGVYWKPIYYVLEDDFTLLLVNAAHVKQVPGRKTDVADCAWLAQLLEHGLLRSSFVPPRPIRDLRDLTRLRKCLIQERTRVANRLHKVLQDSGIKLSSVATDILGMSGRAMLSALMGGTTDPNLLAELARGRLRSKLPALRQALVGRFRTHHAFLVGRLLAHIDYLEESIIEISGRIAESLSPFATMLERLVSIPGVGRRTAEVLIAETGADMSRFPTAAHLSSWAGMCPGNDESAGKRRSGKTRRGNPWLRDALVEAGNAASHTKTTALAARYRRLMHRRGHRKAIVAVGRSILEISYYIFSRATTYQELGRDYFDAQHSERLKRHSLALLQRLGYRVTLVAAPA

SEQ ID NO: 300747 - protein, 357 aa, unidentified
MQNKNTEVDFSNQKIFLGIDVHKKNWKITIRTSQMELKTFSMNPQPGELVNYLQRNYPNGEFRSVYETGFCGYWIDKQLRQHGVQNIIVNAADVPSKGKERVNKDDIIDSKKLARELENGTINGIYIPDDYYEGIRSLCRLRYSVTKEQTRIKTRIKSLLTYYGKEYPENFELKNWSGRFINYLEGIEFNQITAKQTLNHLIEELKDKKQRLAKIIKDLRDSTNTAGLGNKIKQLMSIPGVSFITAITFYTEIMDMRRFKRLDELCSFIGLVPSTYSSGDRERVLGLSNRQNKYLRNLLLESSWVAVRNDPALTIKFGELIQKMAKQKAILRIAKKLLNRMRHVWLNDVEYVKAVVK

SEQ ID NO: 300748 - protein, 305 aa, unidentified
MKTYIGIDIAKLHLDIHRNDKVVRILNNEKSITVFLKSLPEHSIIVCESSGGYEASLISLAHSLHRSIARINARQVRDFAKAKGRLAKSDAIDAQILTEFGQAFHPAPLSVSEPLHQQLAALVKLRSHLLTQITQNNNLTETISDKLILAIIEKTVSGLKKQADNLQKLIAEKIKSSPSLQSKVSRLQEVQGIGEITASSLLGLMPELGSLSDTQAASLAGVAPFNHDSGQFRGQRHIRGGRSQVRSVLYMSALVASRHNPILKALYQRLLAAGKPKKLALTALMRKLIILANRLLKNPNFSLAN

SEQ ID NO: 300749 - protein, 365 aa, unidentified
MISVSQDSTLLGLDVHKLTISAAVLAPGSDRPVVDRISSDPEAVRRLIGRFDDHKTLVACYEAGPTGYELARQLRAMGVRCEVIAPSLIPVAPGDRVKTDKRDARRLALLLRGGQLSAVRVPDVVEEAVRDLCRARVDMVIDRTRARHRLGKFLLRHGRVWRDGENWTLKHQSWIGAQCFDEPALDIALAHYRATLTAREAAVDAIDAELALWFERAPFAHAVRRLCAYRGVTELGALTLASEVCDWRRFPTAGMFAGFCGLVPSENSSGERISRGGITHAGNTHLRTQLVESAWAYKARAQVGPTLRRRHEGLDPEVVARAWAAQLRLCGRFSRLDARKSSRKTVVTAIARELACFMWAEMTAA

SEQ ID NO: 300750 - protein, 378 aa, unidentified
MHSMTPENALVVSGVDAHADTHHAAALDQRGALLGTKSFPTTTPGYRQLLDWLSSFGEIDIVAVASTGSYAAALVRYLREHDIAVVEVNLPHAHTRRRVGKSDPIDAEMAARLFQAGKAKAVPKQTNGIVESIRLLRVARDSAVKSRSAALVQIRDLLITAPQELRDQLSCRKTLRGKVTVCARFRPSGQDLRAPCQAAKFALRSTAQRIEALDLEITALDRELGQLVAAAPPRTIGLLAISTGHAGQLFVTAGQNIDRLRGEGSFSMLCGARPIPASSGKTTRHRLNYGGDRQANRALHLIAVCRLRYGQRTRAYVKRRTAEGKTQREIMRCLKRYIAREVYNTLRADLGDGQPQPRPVATTIMCGAPGFGITRKRT

SEQ ID NO: 300751 - protein, 370 aa, unidentified
MNRLFVAMDVHKENIVVVGLPEEGPHAVIREEFGGGDVSRVVKRFKPLSRTYQVETCYEAGPSGYGLARALSKAGIPCRVVAPTLIPRRPGNRVKTDARDARELALALRAGQLEFVRIPTLEEEEVRALVRCREDIAKQVRVFKMTISHWLLCRDHRVPSGMKRWSPTYWKWVRALPLSPMDRRTLDHYLDVLSLLEDHRRQVEEQIRELATEEPFRDRVKRLCVLRGFSPLAAMRLIAEVMVFERFGSAPSFMKFTGLIPSEHSSGDRIRRGKITKAGNSHIRHVLVEAVQRAHLSVRPGIAILRRWQEVSGPLRQIAGDCLKRLHHKFWSLTRRGVSAGKTRVAMARELAGFVWALMTYREAQVVATA

SEQ ID NO: 300752 - protein, 466 aa, unidentified
MAYKRKNVKSKERKRSPRSLKAIQPNAAGIDLGSREHWVAGPPQEDGTPNVQCFATTTPELLRLADWLKEQGVETVAMESTGVYWIPLFEILDSRGFEVVLANARQISNVPGRKTDMIDCQWVQLLHACGLLRGSFRPSDGICQLRALIRERNTMVEQRSDWIRRMQKYLDQMNVCVHQAVSDITGVTGMAIIRAIVDGERDPHVLSRLRHPCCRKSEEQIAEHLTGNWRSEHLFNLRQALKMYDQLCAVIADYDSEILSYIKTLQPADTRDASAPPPTSNTKAKNLVKRGQEPMRQALYGLCGVDMTTIDGIGVDTATVIVSELGMDYTVFPNESHFISYLRLAPNLSISAGKKVPKKFKASTSTRVATALRMAALTLRNSKTALGGFYRRVAWRKGASVAVFATARKLAQLIYRLVRYGQAYVDTGVEAYEARFNQRRLKSYTKALNAMGYNVEPLKTEEAILA

SEQ ID NO: 300753 - protein, 369 aa, unidentified
MSHATAIGLDVHARSIAAVALSRDTGEVAAKTFGYDPASVAEWILSFEDPKAVYESGVTGFHLVRALRSLGVDCVVGAVSKMQRPAADRRRKNDRNDAEFLARQLLAHNVVEVFVPDEGTEGARCLSRALEDLREDLTRAKHRLTHLLIRWGHVWNELTPEGRRKGTWTRAHWEWIRSIDLPDACAQEALDYYVSEVRHIESQKKAVEGRIARHAAEERWRARVEALRCLKGVEAATAFAIVVEAGVFSRFDSARSFSSWLGLVPSERSSGERVRRGGITKAGNSHLRKLLVEASWHYARATKERKRGLCGGAVPSRISNHAAKGVERLVGRRRGFAARRMRPVVANVATARELSCWVWALGRMCEGTL

SEQ ID NO: 300754 - protein, 354 aa, unidentified
MKYIGMDVHKTSIMVSSVDQDSYVIPPFRVSNTPEHIVKLAQAIERPARVAMEATRNHAFIHDLLEAQGLDVVVSHPKATEAITKSKKKSDRHDAITLAKLLRADMLVESYVPPLQTRLLRELVRECRRLTAASTRTKNRIRATIAQEGMVCHYSDISGKHARSCLASLALNPARKRSVERSLDMIALAQDQIKAVREQIVSLVGEDPDVKLLMSIPGVGYLTAAAMLAEIGDISRFSSDRHLASYAGLVTTTRESAGIVRHGHITKQGSSTLRWALVMATTHLIRRHGPLRSFYERLADKHGKKSARTAAARKLLRYIYAILNSRKEYDPGMSVRRGIECALGRPPVRVGQAR

SEQ ID NO: 300755 - protein, 337 aa, unidentified
MNVTCIGLDIAKTIFQVHGVDGRGKATLRKTLKREKVTEFFANLPPCVVGIEACGSAHHWARTLGRLGHTVRLMAGQFVAPYRKGSKNDGNDAEAICEAVGRPTMRFVPTKSEEQQAVLAVHRARSLAVENRTAQANQIRGLLAEFGLVVPQGIATLRAQLPTLLQATGQTLPPLAREVLEDLSAELRHWDDRIAGYDRRIAQLAVASEPAQRLMQVAGIGPLTATALVASVGDAKVFNSGRQFAAWLGMVPRQHSSGGRFRLGSITKRGDGYLRRLLIHGARSVIATLSRRDDAKSQWARALQERSGANVAAVALAAKHARIVWAMLTKGEAYQPA

SEQ ID NO: 300756 - protein, 347 aa, unidentified
MFYSGIDQHKLFSYITTVNSDGIVIKEAKLINNDFEIINYFNSIGKDHSATVETTGGWYWMNDLLSSQGINLKLAHAKYVKAIAYAKVKTDKVDSHILAQLLRLNFIPEAYKISDDIRTLRDTLRARLRLSVKRTSCINFMHRMLEKFNISDPSLLNDFYKLQYQQFDIQAKLLKEQMLTLEKSIYPSLIPNQDIQRLLWIPGIGKMNAFTILLEIDDINRFADVKHFFSYCRLVPSARNSGGKSKQRSSKDGSRYLKMAFSDSAIHAVQHYPGIRSIHQSLARRKNKHVAKSIIAKEIAAIVFYILKHKCAFNNMFMGRELAQTKSLQWPRVVSPVCLTGCLDSSK

SEQ ID NO: 300757 - protein, 345 aa, unidentified
MTIVEARAITGGVDTHADVHVAAALDPIGGLLGVQEFPATAGGYARLLGWLGGFGTVALVGIEGTGSYGAGLARHMATAGVRVVEVDRSDRQDRRRQGKSDPLDAVSAARAAQSGRARGAPKGRDGAVEAIRALMVARRSAAGERTRTINQARALILTGPDDLRARFARHTAAALIAGLASLRPRPGDVAGHATRVAVRELGRRAVFLDGQLERLDELMIPLVSARAPGLLALYGIGPHTAALLLIAAGDHPGRLRSEAAWAHLCGAAPISASSGKVTRYRLNSGGDRQANHALWRIAFTRMGSDPATRAYAERRTAEGKSKAEIIRCLKRYVAREVYPYLRPAG

SEQ ID NO: 300758 - protein, 351 aa, unidentified
MDTQQTATPKLFIGIDIHKRSWKVHCSSDLFGGKTFSMGPYPEQLQAYVLKHFTGYEVTTAYEAGCCGYNAHRCFESYGWDSLVVNPADIHRKGRERHTKTDRIDAQLIARELKDGRLESIHIPDMEREQLRSLFRRRNDLVKNYRTIKNLIKSQILFLGIEVPPEFDNSHWSHNFRHWLDTLDFKYSGARLSLDSRLRHFRFIDQDLRDVSTQLRRQCKTYYKKDYMLLRSIPGIGGIVACGILCELGDLRRFRSLKHLAGYVGIAPGIHQSGDNLRTTGISRRAHRLIRSYFIEASWQAIRTDPVMQTYYRKHQGKNVKSIIVKVARKLLSRTLAVIKTETPYVVGVIE

SEQ ID NO: 300759 - protein, 311 aa, unidentified
MSTPANHYVGVDVAQDTLALAGLTPAHVSNQLAALRVWLTTLRCAQPTVHLICEATGRHHHALQLVAAECGVPLSVINPRQARHFAQSLGRLEKTDPVDAAMLQRLGQSLQPAPTSPPPGSLRQLQDLLVVRQALVEEQTAWANRQALLSAVAARLCVRRQRTLAKELIEVETQIHALLATPVAEPLLLRVQTLCLVCGVGERIAWSLVAGLAELGQGNRRQVAKLAGLAPLNADSGQWRGARHIAHGRAPVRRALYQAAVVAARHNEHLRPFYQRLRANGKPAKVAYVAVARKLLVFLNRLLRDAPPLSA

SEQ ID NO: 300760 - protein, 359 aa, unidentified
MEYIAFDAHKHYTLASVAQADGQLLREERIEHERGALQAFLARCERGSPVAVETVGNWYWIVDEIDAAGCRPKLVHARKAKLMMGQINKTDKLDARGLNLLQRNGTLPTVWIPPGELRDQRELPRTRMVLVRQRTRLKNRIHATLAKYALRCDEVSDLFGVRGRALLRRHLEALPPHTAFATRVLLEQVEHLDRQVRALEDRMRSVFEPTPMVQWLMTLPGVGFILAVVIALELGDIRRFPDAERFAGYAGTTPRVHASAGKTRHGPLRPDVNRYLKGAFMEAANVTNMQRRHDPRRHVTRLYARLARRKGHSKAIGAVARHLAEATYWMVTKQEAYREPIASRPTRLGPSRGASAVSP

SEQ ID NO: 300761 - protein, 390 aa, unidentified
MLNIGIDIASKKHDCCIMNEKGTVLAPVFTFENNAEGFDILLKNIRTFCRDFSQAKVGLESTGHYGSNLISFLKAQGFEITVFNPLQVDLYRKAGTLRKTKTDKADAKFIAQMLLTTENSTRADISPLIVELKALVRHRSRIKAMRTKLRVSVTRLVSILFPELPTVVGKVHQASTYALLLELPCAKDIADCHLTRLSNLLAESSKKRLGKERALEIKSLASKSIGLNSRAVGFELQQNIRLIQSVCSEVDILEKEIKALMLKINSPILTIPGISYNLGSVILSEIGNIENFASPSKLLAFAGLEPSTHQSGNYYGSNASMVKRGSPHLRWAILQAARLIAQNDPTFKAYARKKEGEGKHFFVVLNHTGKKLLRVMFHMLKNNQEFIAAA

SEQ ID NO: 300762 - protein, 414 aa, unidentified
MESGYRLLVGIDWATQAHQVCVLDGQGRLLEQRRVEHRAEAIAATIDRLIGLAGGDPASIAVAIEVPRGAVVEALVERGLHVFAINPKQLDRFRDRHTVAGAKDDRRDAFVLADSLRTDLPAYRRVHLDDAWTIQIRELTRIQEDLNTEITRLANQLRDLLLRFYPQLLRLCPAADQPWLLALLKLAPTPAKAQRLRRSSIERLLHQYRIRKWTVDQVRTELKTAPLSVAPGVAEATSAHIALLLPRMELLMAQLKLCSKAVQTALNEKIAEEEQRREHRDAEIILSLPGVGRVVAATMLAEASQLLAQRNYHALRTLGGVAPVTRQSGKRWAVRRRYGCNHRLSNAFYHWARVSSQCDPRAKHHYQSLRQIGHSHGRALRGVADRLLALLVAMLRDQTLYDTTRTHAPKPIAA

SEQ ID NO: 300763 - protein, 337 aa, unidentified
MKRYLGVDLHRTQFVVCTRWENGEQEIRQWRIGELPKFVEQLRSEDQIAVEAMGTTARFYDTVAGRVARVVVVNPHQFKVISESVKKTDRKDAQALALYLEKDLLPEVRMKPKQNRELMHLAETRDLLVKQRSALKGKINNLLAMQGIELKREALSSKIALERVLALPVSGMVQLELRVLVGQIRTLSESIAELDQRLEEEGQQLPGYENLTSIKGIGSLSATVLLTVIGKINDFADENKLAAYLGLVPRIANSNESEHSGRITKQGNKLARTALVQCGLSAKRYSPYLQRFYERIKQRRGGGKAKIALARKLVKIVYDTLKNQWVFEDFPSFTLAA

SEQ ID NO: 300764 - protein, 391 aa, unidentified
MVCVGIDVAKDKHACCILDSDGMVRADCFTIPNNMDGFKQLLQTIRNCTKKSDKIKVGLEATGHYSYNILGFLLDNGLPTYVINPLHTNLYRKSLSLRKTKTDRVDARTIATMLLSDVDLKSYTDTAYHNEELKSLTRYRFDKVRERAKLKQSVSRLVTILFPELEKLVPSLHIASVYALLSEYPGAKQISEIHLTKLTNLLATASKGRYGKDKAIQIRDAARTSIGSVMPAKFLELKHTIKLIRELTSEIDEIEVSIQKIMDELNPPILSIPGVGIQSAAMILAEIGDFSNFESPDKILAYAGCSPSTYQSGKLTNCYAHMEKRGSRYLRYALYNATKYVCHWNPVFAEYLAKKRAEGKHYNVALSHATKKLVRLIYALQKSGKAYLVAA

SEQ ID NO: 300765 - protein, 403 aa, unidentified
MEAHRVESKQIVEVFCGIDWAEDHHDVALVDATGNVVGKRRIGDDTAGFTQLLQLLADAGDSAEDLIPVAIETSRGLLVACLRATGRAVYAINPKAVDRYRDRHGVTGKKSDAGDALVLAHILRTDRAAHRPLPADSELAQAIAVLARAQQDAVWDRTCAHNKLRSLLREYYPALLAAFAAKRGGILRPEARALLAAAPTPRAAARLTHAELCELLVQAGRQRGVEAEAHRLQQVLQASYLHHPPLVEDAFGAQARALLRHLEVACANADELAAAAVAHFDQHPDAEIITSLPGLGSLTGARVLAEIGDDRSRFADARSLKAYAGSAPVTRASGKSLTVMHRRVKNQRLACGCPKLRGDRHTAAQRNLFNRLLGCLHHCLRTRQTYNEHAAFPSAQPTTEEAV

SEQ ID NO: 300766 - protein, 344 aa, unidentified
MDHFAGLDVSVKETSICIVDDAGKIVREVKVASDPEALLAVLKNPAYHFKRIGLEAGPLSQWLFSALAEAGLPVICVETRHMQAVLKAQINKTDRNDARGIAQMMRAGLYRPVHVKTLRSQKLRMLLTHRKLLQSKAIAIENDLRGTLRNFGLKVGMVGKVKFEARIKELVENLPDLAELVEPLLIVRRVLREQIVILHRRLLAIVRDDEVCRRLMTTPGVGPVVALTYRATVDVPARFRKSKAVGAVFGLTCSKYQSGEVDRNCRISRCGDEMMRVMLYEAAQSMLHSKKWSWLKAWAMQIARRRGMKKAIVALARRLAVIMHRIWVDGTEFRWTRERATAAA

SEQ ID NO: 300767 - protein, 349 aa, unidentified
MEKDSMIGIDTSKNLFELHGRNDRGEVVLRRRLKRAQVESFFAEHPAATIGMEACGAAHHWARVLSGLGHQVRLMSPAYVKPYVKRNKNDALDAEACCEAMSRPGMRFVPIKTVEQQAALALHRSRELLVRQRTQISNALRALLAELGFVGAKGREGLGRLIADLRADVLGVPPAVQSAALVLADRRAELEAGIDALERHIVAEAKADPAARLLQTAPGVGPLTAHALLATVPDPARFDCGRDFAAWLGLTPKDHSTAGKQRLGVITRAGDETLRSVLVVGATALLRQVRLGRSHHSRWLADLLRRKPPKLVAVALANKTARIAWKLMVSGESYDRTRVGIAAREAAPA

SEQ ID NO: 300768 - protein, 323 aa, unidentified
MRKSIGIDVSKTKLDVSIFDGDEHRQISGGNTESGLKELLGRMGRLQGKELVITMEATGTYHLRAAMGLHEAGYRVSVVNPLIIKRYSEMKMLRAKTDPVDARLIAEYGYYERPAEYRPNNKECQELVYLLKTIEGLYRVRGQNRNRIEAFTQSPVCVSVAIESIQRINTAIDDEIKLLERRIRQLIGETYQEEYRRLLGIPGIGKRLGAAIIGYFQEFEHFEKAKQVASYIGVNPAPRNSGSSVRGRGAISRKGNTYLRKLFYMASLAASRHNHECSKLYNRLLSEGKKKKVALIAVSNKLIRQVFAIVKNQREYSPLYQAV

SEQ ID NO: 300769 - protein, 324 aa, unidentified
MYKINHFVGVDVSKDKFDVWDNLAGHRSFPNDRKGFRQFAKQLPTNSFCVMEATASYYQQLALYLYEHDIELAVVNPISVRRFIQMKLQQNKTDKSDARMIALYGQEQPGLSPWIPAPEYITKCKQLQRVIVIYLKQNTSLKNHIQSLESRGVKSGVLIRSLKRQLKQVRQEIELLEAEMQSLIQQYDADLFINLSSIPGIGKKTAAFLIILTNGFRDFDNYRQVSSFCGLSPTEHSSGTSVKGRSRISKRGNPYIRNQLFMCSFTASQCNPQCRSLYQRLVNKGKSKKLALIAVCNKLIKQAFAISKSGVPYDPAYRSSIVVQ

SEQ ID NO: 300770 - protein, 340 aa, unidentified
MNTTQIAVDLAKSVFEVAVSHRPGQVDERKRLTRQRFRSFFEERPPVEVLLEACGTAHYWGRELQAMGHRVALLPPGDVSRYRDGNKTDRADAKALLEARRNRAIDLVPVKSIDQQAIAALHRLRSGYLQTRTARINAVRGHLREFGVTIPTGARHVIPHARRVLEEVAVPSYLAKASNEVLDEIETLTGKADQLRRSLERLCNHMPQAALLTTVPGIGVLTATALFAFVGDIHRFPSGRHFAAYLGLTPREFSSGSTRRLGRITKRGNSYLRTMLVHGARSALRAGKTATVPDDLRTWALKLERRKGHNIAAVALANKLARVAWRVWRDQRPSENRTAA

SEQ ID NO: 300771 - protein, 349 aa, unidentified
MDRAWVGIDVGKEFHWVHVLDASGRELLSRKLENDEADISKLVGKALSLAEEVVWAVDQPGGSAALLLALLWERDQRVLYIPGLTVNRASDAYRGESKTDARDARVIADQARMRPDLSELEPGEEEVAQLRILLGRRRDLVIDQNRTITRLGGALLLLSPALERALDLNRRGPLTLLTHYQSPAQLRRAGHKRIVAYLRNRGVKGFDSVASKALTAAKSQSITLPGESIAARIVAELAAEVLALKDHIELIDEEIEQRFFDRPEAEILASLPGMGSLLGAEFLVAVGNLSAFDSADHLAAYSGLVPAANDSGKRVGNNRRMRGGNKNLKRVFYQAAFQLAQLTGVQGLL

SEQ ID NO: 300772 - protein, 366 aa, unidentified
MRKPSTTALRRRGKLQGEQLTIGLDLGDRSSFYCVLNGAGEVILEAKVATNPAAMRKTFEKMPSSRIALETGTHSPWLSRLLTELGHEAVVAHARNVRLIGESRRKDDRLDAQALARLARIDPKLLSPIQHRSAQAQADLSVIRARYALVRARTALVCAARGLTKSFGERIRGRNPKGFSVATSEALSPPLQVALAPLLSALEAITARIRDYDAQIEKLAEESYPETALLKQVKGVGTLIALTYVLTLEDPRRFRKSRDAGCFVGLQPGRRNSGQSEPQMHITREGDSYLRMVLVQGAQHIIGPFGEDSDLRRWGLKLAERGGKRGKRRAIIAVARKLAVLLHHLWISCEAYEPLHNTRKRRLAAA

SEQ ID NO: 300773 - protein, 320 aa, unidentified
MTSKGAEKMQNDTIGVDVSKDHLDAHRLADGASRRFANDKCGRKAFVKWFAQTPVRRVVFEPTGPYHRAFERALGAAGVPFVKVNPRQARRFAEAIGKLAKTDRLDAATLARMGAMLELKARPPQSEALLKLKELRLAREALVKDRTAAKNRAKILTASLLKRHNAQRLEQIKRHIAAIEMEILKQVQADPDLAQRFAILTSIPGLSVITAFALLIEMPELGAIEPGQAASLAGLAPMARQSGRWTGRAFIRGGRAEIRQALYMPALVAARFNPDLKAKYKKLTSAGKPAKVALTAVMRKLIVLANALLKANRSWTPKYA

SEQ ID NO: 300774 - protein, 348 aa, unidentified
MKSADNRAGTAWAGIDVAKGSFEAAVHPAWVPGRPVPLADLPKAGFPRTGEGVAKFLDWLDGATPPAGVRAVMEATGRYSAELAELLAAARPSLAPAVADPKTVCHFARSLRLRNKTDRADAAALARFGAERCPEPWRPPAPEYAALREMVRQRTFLVGELTAARNRLAEIDGMPAVAKVQQRVVAALEKALANTEGLMRGHVAKHPAMAEAVAHLDSMPGVAFVTAATVLGELGDITRFPASRALAAFAGLSPRRFESGTSVQGRTRLCKQGSPEVRRVLYMAAMTAVGRPGNRFARGYDAMVAAGKPRMVALGATMRKMLVAMRAMLVAGADYRDETAPKKPGKTA

SEQ ID NO: 300775 - protein, 357 aa, unidentified
MTKVLQKAGFVGETIYVGIDVHLKSWNVSLYYGSQYLRSFHQSPHPDILVSFLQREFPGANYSCAYEAGFSGYWIKRAFDRQGVSCIVVNPADIPQTDKGNKSKTDRNDSKRIGSSLQAGMLCPIYIPSQETEADRQLVRTNEKLTRDLTRSKNRIKGMLYQVGIEIPERFGSGNWSNIFINWLKDLPISFGTLRTALNHQIKMMENIRVEKNLVLKDIRKLAVSEKYAPIASRLKTVPGVGTITAITLITEIEDMNRFKSFEKLNAFVGFYPSEFSSGEHIRTGHIISRHHKRLRSLILEAAWIGIRRDPAMTQYYNNTKLKVGGKRAIIKVSRKLLNRIRSIWLNKIDYEIGILK

SEQ ID NO: 300776 - protein, 368 aa, unidentified
MKDTIRYIGLDVHKDSIAIAVAEQGGGEPEILATIPNELNIFLKHLRKLGSTKSLRCCYEAGPTGYGLYRELDRRGISCVVVAPSLVPVQAGNRVKTDPRDARKLARFLRSGDLTAVHVPEEATEAMRDLERAREDAKKAEQVARHQLQKFLLRHGRRYDGGCSWTQKHLDWIRGQRFEEAAQQRVLVDYLHTVEEGGSRVERLSQDIGELVEAWKEAPLVKALQGLRGVSLVAAVIIVAELGDMRRFEHPRQLMGYLGLVPSEHSSGESTKRGRITKTGNAHARRMLVESAWSYRFPPQMSAALRRRNEGLAPVIREIAWKAQLRLHKRYTRLLARGKNKQRTITAVARELAGFIWAISREQKLLAG

SEQ ID NO: 300777 - protein, 357 aa, unidentified
MNYGVYCGVDFHARQQTICCLTTEDGVIATYELKHDNKEAVRNFYAQLPGPVLVGLEAGGYSLWFEQLLEKLGHEIWLGDASEIRRCARRRQKNDRRDAALILDLLVRGEFPRIHRQAPRSREILRMLRYRHRLVKIRTIIKNCLQAVAIQSGLALKSQLFTEAGMQQLASLAMSPVMQCQREQWLQLLPTLDQRISACEKWLSQQAAADQRVRRLRTHPGLGLLTSLAVVHTLDPVARFPNQRTVAAYGGFDPCEDSSADRKRYLGISKAGSKLLRFLLIEAGQAAVKEDAELKRFYRRLQQRRNKPKAKVAVARKLLIRSYILLRDEIDYAEFQRRAVAARLARENARLPCLSSD

SEQ ID NO: 300778 - protein, 354 aa, unidentified
MTSNQSKDTVPGARAGVIKLGLDIHASLIVVVRQVDGQASQPPQRFSEDAFIGFVHRQLAAAEAVHSCYEAGPFGYVLHRRLTTLGVHNLVVRPRDWSTYGERVKTDARDAGALCSSLDRHLAGNRGALAIVRVPTEAEESARGVSRQRQSLVRDRVRFTLRGKGIARLRGIALPPEWWRERAFGCLELPADLREQLSALRRVILSIDAEAVTLTTQIEAAAPAALPAYLGPLTWEILRREVGDWSRFANRRQVASYTGLCPSEHSSGSSRLQGSINRHGNPRLRHILVEAAWRLLRYQPAYRPVAKWREAFLDQGRPGRRKKIVVAIARQLAVDLWRLATGRATADQLGLMVP

SEQ ID NO: 300779 - protein, 409 aa, unidentified
MRYYLGVDWADQTHAVWVVDESGTKIAARTVTHTAEGLDAWGRELDEWRAQGSELWAAIERPDGRVVDLLLDHGVVVYPVNPKALDRARDRFRQSGAKSDPFDARVLADFLRTDHTHLRALQPSSEAAQELKLLTEDCQRHIRQQTRLVNQLTATLKAYYPRALEVAELTSALAREFLLAYPTPAALTALTERQWPRWARAHRLTEARTGELWAVLRRPQLPVPAHVVRAKARLMRALLEQLMPVMAAVAQYRKAIDDFFARMPAAQWARTLPIGKHGITAPTLWARLGDAPGRWESFRHLQAHAGTVPVTKRSGKQQRVVQFRFACDKALRYVVDQVAFLSLLSSAWARAYYDQQRTRGHSHRQALRALGAKWLKIIFVMWERHVPYDEQYHLATMTRQQLRRQNQIA

SEQ ID NO: 300780 - protein, 449 aa, unidentified
MSKGSKVMGMPVINARAAAIDIGARIQVVAVPPEMCDQPVQTFQAFTADIDRMADWLVSLGIKTVAMESTGVYWVPVYEVLEDRGLEVILANARECKAVPGRKSDVNDAQWLQRLHACGLLRASFRPGRDIAALRSYMRVRDRHVEYAAAHIQHMQKALAFMNLQLHHVVSDITGVTGMKLIRAIVGGERDASVLAAMRDVRCKESSETIRAALVGNYQPEHVFALTQGLLLYDSYQTRIQECDAQIEQALTALIADKAPPQEPMGDPRGRTRQTNSVNFDVRPLLYQLTGVDLTQIHGIGPSLALEMVAECGTDLSRWPTEKHFTSWLTLSPGCKISGGKVLSSHTRKSSNRIAARLRLVATAVGRTDTALGAFYRRLAMRIGRAKALTATARKIAILFYRAMRFGMRYQDPGADQYECRYKERVIKQLHRRAAQFGFSLQPAEVGVS

SEQ ID NO: 300781 - protein, 409 aa, unidentified
MKKLYVGVDVHLKQHIVSIVPITMFQDNKTVWKKTKSITIGNNRHDFEYLDLLLKSQDISAEQVSIAVDHTGGHYSEPISYFLKSKGYEVYYLGSASVKAAKEKLLGEENKTDKIDSATLAYLLYLRDFYKVSFHISAMSVNFESQSSLLRLILLQSRYYSKLGTQTTNRLRQYVHAVFPEGEERYFNKLIKILPHHPTPAEIISDPDAFNKSRIPLNSRKILRELAKKTVGVPGETYKYIIQDLALLRVSNEEKMVAIDDTIRALVIKHPYASILMSFPGVKEKSAAIIISTVKDINNWPTKNKFKKGLGVYGTIRETGEKHVNFRRGLSGDRMCRQGLYMVCFTAIRLKSNNDFHDFYERQVRKGKPRRKALVATMGKLAEIMYHCLKFNEPYKYQSLYHVKPKGED

SEQ ID NO: 300782 - protein, 320 aa, unidentified
MASRESLFIGIDVSKQTLDVAFGADPHAPLETIPSTDEGVQLLVTRLQRLQPTLIVLEATGGLERMVFAQLLQAGVPTARVQPRRVRALAHAEGRQAKTDRLDARLLARFAERVRPPHHQATDEQRASLRDLLVRREQVIQMRTAEINRLTAAAPNLRPGIQKHIDWLDQEIRALEQERDNEAERTDEVRRKRELRESVPGIGAITARNLLLRLPELGTINRKEAAAVVGVAPYANQSGAQHKPRHSSGGRRDVRSVLYMATLAATRRRLVRRAFDQRLCQAGKPRKVAIVAAMRKLLTILGAILRQQKPWDPAVHTSAP

SEQ ID NO: 300783 - protein, 416 aa, unidentified
MERLYAVCCGIDVHKKILVACLRTKQSTEIRSFGASTQDLLDLVDWLTANQCEAVAMESTASYWKPVFNILEGYDLNPMVVNAQHMKQVPGRKTDVKDAEWISDLLMNGLLKPSFIPNRRQRELRELCRYRKSFIVDLGAEKNRLQKMLEGANIKLSGTISDINGKSGKALLDYIVSGEIFDDEAYERLLAEKLISKRLKAPKKQLIKDMQGCISPIQAKMIKVIRTHISELEAHIKELNDDISNHLNEEEENAVELIKDIPGISDTSAQTIVSIIGTDMSRFPTSGALCSWGGLCPGNHESAGKRKNGRTNKGNKLLRSTLVVCAHSAVLKKDSYFGEMYKRIASHRGRKRAIVAVAHAILQIIWQLLKKNERYEDLGSDYFEKKNHKNKLVSTLKKLENFGITLMPEQLAQVAF

SEQ ID NO: 300784 - protein, 341 aa, unidentified
MRKTLFCGVDLHPNNAMYVITDEKDKQLLRQRLPNELPVVLKTLTPFRARLKVVAVESTYNWYWLIEGLIEKEYPVVLAHPAEMEQYDGIKEADDLTDAAFLARLARLNILPTGYLYPKEDRPVRDLLRRRMLVVQHRTGVILSLENMAQRQTGQNVGWRALRKLSKEERAELLGEHDCLAFVAAEQVDLIELLNEKIKRFEKKVLEHVQLRPAYACLQTLPGVDPILALTIMLETGNIGRFATVGDYTSYCRCVQATHTSNGKKKTHNNGKNGNPYLAWAFVEAVHHAPRTCPQAKSFYEKKRAKRNGALATKALAAKWSKAAYYMMKRQEAFDLTRVFG

SEQ ID NO: 300785 - protein, 317 aa, unidentified
MTSEILFGIDVAKDELVIDSELGSLTVSNTAEAIDTWLKSLPSVSYLGLEATGTYHQLLADRAVSMGKIVYVLNPRDMRHYALGLGRRGKTDRVDAQMIRRFITAERQHLRPYQPATMVQHQLALLQRRRATVVKHRQALQKALRSVSELAEPLQETLVALDALLTRIDHQLNDLLELEPVLKAEARRLESIPGIGRQTSTQLAVLFDRVALTRSDAAVAFVGLDPRASDSGQKRGRRRVSKRGPGELRRLLYNCAQAAAKTAVWKPYYQSLRAREFSATQALVILARKLLRIAFSLWQQADAKFDAQKIGCLKNAA

SEQ ID NO: 300786 - protein, 419 aa, unidentified
MKRTKTKKLKVVNEKTLIVAIDIGKVVHYGYFRGPQGHDIKPFPFCNTQRHFKDFWNKIVRYKTENKLEDIVIGFESTGSYAEPLAHYLAQKPARLVQINPMHTKRIKELTGNSPSKTDRKDPRVIADVIALGHALTVVIPEGSAAELRRLIQARERVIKIRTIMINQLHHLIYLVFPEFTQVIKNIKTKSALYFLKNYPTPESVVSLGLEPLVLLLRKISRGKMQKDRAVQLFETAQYSVGIHEGRQGMLLEIEHLVSDIENKNRFIDQLEEKLTYHLDCIPYSRSMLSVKGVGPVTIAGLIGEVGDFGKFKTVSEIMKLAGFNLYEVSSGKHSGQRHISKRGRSMIRKLLYFAAIGTVRSNGIMHRKYQEMLGRGMPRVKALVAIARKLLCILFALARDNMVYRDDYNEVHKITLAA

SEQ ID NO: 300787 - protein, 404 aa, unidentified
MQVVYLRSCGLDVHKKKVVACVITPEGRETRTFGTVTHDVLGLTDWLVEKGITHVAMESSGVFWKPIYNVMEGLGLTVLVVNAQHIKAVPGRKTDVKDAEWIAELMQHGLLRGSYIPDRFQRELREIVRYRRSLIEQRAQVVNRIQKVLEGANIKLSGVATNVVGVSGRAILEAMVAGINDPSLLSELAKGRLRKKLPELNDALEGLMGHHQRLLLSSQLRHLDFLELEISGLSKDILERMRPFAEAIQRLDSIPGMGQRTAEEVLAEIGPDMSRFPTKAHLASWAKLCPGNNESAGKRMSGRTGHGNRWLRASLVEAVWGAAHTRDTYLSSQYHRIASRRGRKRAIVAVAHTILVTVYFLLRDGISYDDLGGNYFDERDRQRSIHRAVHRIERLGFKVVLEAV

SEQ ID NO: 300788 - protein, 497 aa, unidentified
MPNKTTIYSRCNPQLLKLFERAGHPAKVLCVALDYAKAQHTALICNGLGDLLKSSFAVENTAPGAAQLLREVRVCAQARKVRCEHVFFGGEDCPSYAENFVRQLRQEQFLVVRVNAWEAKQQRDNFQASSDSLDLLGIARCCLHRRGESVRDLPQAYPNLRIATRDRDQLVRMRTAVSNRIHSYVDRLFPGFLSADQSGLEPFGRASLELMEDRFSPAQLRRRPRPALAQWLGRRGVTPAPEKADQLKQLAKRVLPPAPEQTAMLQQSLAQLVGLYRNLEQSIGRIDREVAYWLARTPGAWLTSIAGFGITLAAGWTAELGPPSQWHSVRQLCSYSGVVPKSKQTGGPDKEPVVGAVQQRCNKRLKNVVLQAAEKVIQYGPEELRQSAQQLEARGAHTAFAIAKRLVRLGKYLAVTGTVYRPKALMDPDTPQATLAAHYQQVWEKLLPKWKDKADLRDVFAPEHPLGQWRKMVQDLYALELRLPQQRAAQKSSALTP

SEQ ID NO: 300789 - protein, 427 aa, unidentified
MTQELAAFVGIDWADEKHAACLIPAAGGIAQQTEIEQTPEAITAWAADLRVRFDGRPIGVCLEQSRGALVYALMQYDFLVLYPINPKQLAAYREALYPSGAKNDPNDAELVARFLRDHSDKLRARHPDDEATRALRLFTEQRRKWVEDRVALTNELRQRLKESYPLALELSGDNLASESFLALLEKFPSQRELQRSSPKQLQEWLPRRRRVADDPPTAELLRQRIAAIRKVPLITTDRPVLEHSRLAISHLVLLLKAINHSISECEQKISEQFAKHPDAELFASFPGAGPALAPRLASAYGSDRDKLQDARDMQQLSGIAPVMRTSGKSKIVLMRWACPKFLRQTFHEHARCSTSKSRWARAYVVMRTQRGDSYQQILRGLAFKWQRIIFRCWKTNQPYDEERYIRRLHATGSELVKFISENPPKNA

SEQ ID NO: 300790 - protein, 368 aa, unidentified
MSNRREPASQNTTIIVGVDTHKYVHVAVAIDVMGTRIATCSASANRAGYAELLGWARTLGAIEAFGIEGTGSYGVGLASFVRRHAVRVVEVNHCDRRKRRNLGKSDTIDAETAARSVLAGIATAVPKSADGAAEMVRQIKVARDTAVKARSAAIITLKSLIINAPGELREALESLTDRKLIDRCANFEAEVMNSPADSTKHALRALATRWLLLSKEIDAHDEALDAVTSKAAPALREAFGIGPDSAAEMMIVAGDNPTRVRSEAAFAKLCGACPIPASSGVTNRHRLFRGGHRQANAALYRIVTVRMRWHQPTIDYVARWRAQGLTNKDIIRCLKRFVAREIYGALMKDHRARSAVASTAADHRQAHS

SEQ ID NO: 300791 - protein, 411 aa, unidentified
MLEVKEERCAGIDVGKKFLAVCVMIGPANQKPAVEVRRFGTTVKELERLRTWLQETRCTEAVMESTGSYWKPVFNVLEGQLKIILANPEQVKALRGKKTDPNDSRWLASLLRHGLVQGSFIPPRDIRELRDLTRRRRTLLSDGASERNRVQKILEDANVKIGDVLSDVFGVSGQAMLEALLENKRSAAEIAELVHWRLAPKIPRIVEALEGHRMRDHHRLLIRQSLDHMQYIEKMISELDAEIAKRLRPYQKQIELACTVPGIGATAAASILAETGMDMSPEGPFLDCHHLASWAAICPGNNESAGVRKSGRTRRGNRWLRATMQQTAWAGVAKKNSAFQFRYQKLKLRRGPQRAVTAVAHAQLIAIYWTLRNGTPYQEQIRQIEEDRRKAQIRHHLHQLTKLGHELGEVI

SEQ ID NO: 300792 - protein, 303 aa, unidentified
MRFYTQQHRYTCGIDLHARSLYVCILDDTGESIIHKQIKAKPEPLFHLIQPYQDDLIIGVECMFSWYWVADFCAENDIKFVLGHALYMKAIHGGKAKNDKIDSDKIARLLKGGMFPMAYVYPRPWRSTRDLMRRRMRLMHQRAELIAHIHNTLSQYNLPPNTDNLRYSKNRDQFRELFPDTSAQRSIDLDLDRIDFYDEQLGKLEWYLKKTARSIDPNTIIRLKSIHGVGDILSLVILYEIHDINRFERVQDFVCYCRLVKCQRESAGKIYGTAGKKIGNAYLRWAFGEAAVLFLRGNPDAKH

SEQ ID NO: 300793 - protein, 350 aa, unidentified
MNILALDIGKFNTVYCDYICETGEHEFGKVKTNPQAIHDLIVDKEPERVVMEVCEIAGWIVDVASALGKETETANTSHDAWRWKNVKKKNDKEDALKLAKLSAMNQLPTVHIPAKPVREMRSLIKYRQRLVKNRRSIQLAIRAIFSAQGITDVPKGKSAWTKEGLGWLRKHAQPLEEVADVEQLWRGRLHVELETFEAVSKSLKRVEDKLNNLGSVDARIKRLQTIPGVGPRLAETVVAFIDDPKRFENGKQVGSYAGLTPKQYQSGQMERQGRISGQGNKLLRNLLVEVCWVSLRYNPWARDTYNRLLRGSPSRKKIAITALARMLVVRCWAMLRDEEDWKYDVREDAA

SEQ ID NO: 300794 - protein, 348 aa, unidentified
MQEFKTIGLDTAKNMFHLVGCDQSGKIVIKKILRRAKLLEFFANIKPCLVGMEACSGSHHWAREMVKLGHNVKLIPAQHVKPYLRGNKNDYNDALAIAEAVVRPEMRFATIKTVEQQDQILVNHKRQQVIDSRTQQCNRIRAILTERGVVIHKGINKLKQALPGLLENIEQRLSETFIQVLSQDYAYLRHLDDRLAAYDDQIKVINSTSVTCKRLRAIPGYGPVLSSYFSSEMGDGRQFSKGRDASASLGIVPAQHSSGGKEMLLGISKRGNRRLRCLLVHGARSVVSNVGNKQDPLSQWIRQLIHRVGIHKATVAYANKMARTGWSVLRYETQYQVDYAMKHLAQAA

SEQ ID NO: 300795 - protein, 348 aa, unidentified
MTMVGGFDVHRKQITFDYVDDDGLVRWGQIRPATRTTLRRWLGEHCPAGDAEFALEGCTGWRYVSEELAAADVGVHLGDPAEIATLRGPKKRAKTDRADARLLRTLVLEGRFPESWIPPAHVLETRTLGRLYCTLMDERRAWQQRIHAQLFHQGCPPIRALLSEAGREALVRAELSAVGRQYVDTALRRIDGLSAEIEPLRTQLVNAARRQAGCRALQAHFGIGWLCAAIIWAEIGDARRFSSSDQLVRFAGLDVTVYSSDAKRSPGHLSRQGSPQLRWATFEAAKCAARRGSPDHAYYHQLAAKHDGHNGKNPTLAVERKILRRCYHRLRELGDAALALPIPEEVAA

SEQ ID NO: 300796 - protein, 308 aa, unidentified
MSQSLCHLGVDVSKATLDLHHLGKSWQVPNNPQGFAKLIAYLKKHPARVVCEASGPYHLPLVLALQKTHREVCVVNPRQVRDFAKSRGILAKTDILDARVLTLYADSKPPRTTAALPPEQLLLAAWVDRRQQLVDQHTAESNRTEPCLPKAVAKHLRDSIRLLERRIAQVEKKIQQLLAACPQLNQKVQRLQSVKGVGAITAVAVVAAIPELGSLNRGQVAALTGTAPFNRDSGTLKGKRTTWGGRSKVRSALFMAAFCASRHNPVLKALYQRLRLNGKPHKVALTALMRRLAVHLNSLLKHPQPALP

SEQ ID NO: 300797 - protein, 353 aa, unidentified
MKKNSHSKGWTIGLDLGDRFSQVCVLDAKGEVEARVRVATTVKGLEAALRRYAGARVVLEVGTHSPWVSHWLEEKGYEAIVANPRRLRSITQSDRKDDRTDAEQLARLGRADPRLLSPIRHRGLGAQRDRSLLLVRDGLVRSRVALVNQARGLAKPLGMRLPRCTPEGFAGRLRREGLVEAFPGLSALVAMVDELTRKIRQLEGEIEAVSRERYPETQLVRQVSGVGPVTGLAFVLEDPRRFRRSRSVGAYLGLRPRRRQSGEQDPMLRITKAGDPYLRRLLVQSAHYILGPFGPDTDLRRFGERLRARGGRAGRKKALVAVARKLAVLLHRLWVTGEVYEPLRGAGAQATAA

SEQ ID NO: 300798 - protein, 345 aa, unidentified
MKYYSSTTQFNCGIDLHAHQMYVCLMDRQGHKLLHTNIWNNDFEYFLSRIGPWRDDLTVCCECMFGWYWLSDACQAAGLEFVLAHALYLKAIHGGKNKNDRIDSEKLAHLLRTNLIPPAYVYPADKRPLRALLRQRIYYVWSRADLLARIQSHQLAHNRPALRQTRPNRDPWEQQLLAQEPDPVRQLALQNDLAMIRHYDTQITALEEHLNGLTKQTAPREYALLQTVPGIGEHLGMTILYEIGDIERFPTVKDFLSYCRLVKGTVASAGKIKGLRGAKLGNPYLRWAFGEAAIIAKRDPQIIGPLAQQLEARMNGNKFKANTVLAIKLARAVYFMLRQHTVFDQ

SEQ ID NO: 300799 - protein, 514 aa, unidentified
MRRVGIDLALKAHHRATVFEDAVQVGKPFSVRRTAAGIDALVRRATSGTDQPCEFIMEPTGLAWLGLAAELERRGHHTYVPKAQKTHLLRKFLAQFAKTDTADAKAQALVRHVDPDGVYRLHVPSAAETTLRLCVKQRARLVVDVGRAKRRVLSWLILANPHLGDALGDDAFNQPGTAFLRRYIDPFAVQTLGIAKLRKDWATHARGVDGKRVAAVWEACEATCALYAELRAAGRLPFDYAVMQELVRQELERIEYLENQVAALDERIRATYRLVDPDRLLETEVPGIGAAIAPTIEAFVSDIDRFGSAKRFAAYFGIVPRTRQTGGQDGKPGQRLTKGGPGLLRQYMFLAAEVARRCDPALAAAYEKARARGKHHYHAVIIVAHKLLRKIYAVLKLRAAAQRAKLEGRTPPRVAYDYCDPETGQVLTKAEARAVVEARYPSKAEKVRRADKKRAVQTLPQPGPAAQTGSSEDATKEVSGTPPEPGIAGTAACEKPVKKPVLKSEKDGAKKPLL

SEQ ID NO: 300800 - protein, 360 aa, unidentified
MQRQMQVKTIDYSGQNIYAGIDVHKKSWNVSIFSEELHHKTFNQPPKPEALLQYLEKHFPNGTYYSTYEAGFCGFWIHEQLQSFGINNIVINPADVPTTDKEKKQKADPVDSRKLAKHLRDGNLEPIYTHRREILEDRGLLRLRRSLSRDIARYKNRIKSMLSFYGIEIPDHLKKAGSYWSNRFINWLSNLEFISSSGTNAFRVLVGQLKILRNELLAVTRKVRILSKDKYYQKRVYLLTSLPGIGLITAMIILTEIDNINRFKNQGKLASYIGLTPTRHSSGDKDIHGEMINRGNKYLKSALIESAWTAARVDPGLHLDYIKYCQRMKKNKAIVRIARKLLNRIEFVLKNKVQYNKEVN

SEQ ID NO: 300801 - protein, 424 aa, unidentified
MSYRIAGIDVHKKMLAVVVSDVEVDGECQFERVRYSSSPEHLRFLAQWLIAQRVEEVVMESTAQYWKPVWGALERYWKPICRERADAGPKSGTLHLAQAQSNRGRRGRKKDFPDAERLVKRLVADELVLSFVPDTEQRLWRTVTRRKYQLTRNHVRLQNQLEGLLEECHIKLSSLVSDLLGASARRMLKALAEGETNPVALAAMADRNLRATQAQLCDALGACAELTPIYRRLLKMFLEELQFNEQQISQLDQELASLLSRHHDAVVHLAEIPGLGVDSAQQIIAEVGAGATTFPSAKQLSSWVGACPGEEESAEVSKSHRSPKGNRHMRRILNQAANAAAKSKGTIFEIVYHRLVSRLGHNQTIGAIAHRLCRLIWIILHRGVRYQERGPLVNAKTRRHRTNRMIRELRNLGYRVEPSVTTAV

SEQ ID NO: 300802 - protein, 342 aa, unidentified
MQITTIGLDIAKNVFQVHGIDAAEKVVVRKQLRRSQVLAFFKALPPCLVGMEACATSHYWARELTKLGHQVRLMPAKDVKAYVKRNKNDAADAEAICEAVRRPTMRFVHVKPAEQQGRLMLHRIRDLLMRQRTQVINALRAHLAELGIVAAQGREGLKELLTIIASEEDARLPADAHASLIVLAAELAAMQTLIGSIEKRIMAQHRSNAESQRLESVPGIGVIGATAIAATVTDPHAFRSGRDFAAWIGLVPRQDSTGGKQKLGPISKQGDRYLRRILVVGAHAVLRRAKLNPQKYPWLTQLLARRPFKVVAVALANKMARIAWALLAKGSAYRAPAFAAAA

SEQ ID NO: 300803 - protein, 416 aa, unidentified
MKIVRPICCGMDVHKNIIVATIGITNKKTRITEYIQETFSTLNPDLLNLKQWLINHKCFDACMESTGKYWIPIFNILEDEINIYLTHPKYVKAIKGKKTDKKDSKWICDLFKHDLIKFSFIPPKEIRALREISRYRYKLVGMRSSERNRYQNCMTVSNIGIGSVFSDPFGKSAQAIMKEVLESDIIEDEKILKCIHGSCKNKDKILDSIKHCNIETDQRFKMNESMIHMEELQVHIDNCEIEIMKRSAPMFDQFMHITQLPGISTLSAILIISEIGVDMKQFESDKQLTCWAGLAPANNESANKKKSVRISKAGQYLKPLLVQCALGAIKDKEGYFGIKYSRIKKRRGHKKAIIAIARMMLVSIYHMILTGEIFNPSDYESFRNPKPPIKQQDLTEESAIEFLKKSGFDVSKLTKQ

SEQ ID NO: 300804 - protein, 408 aa, unidentified
MKTLYHRVAGIDVHRLKHVATILIEQADGSTEQHTREFGGFKRDLRALVAWLRRYQVELVVMESTGIYWKSLYAHIERAGIESWVVNAHHIKHVPGRKTDMADSHWLAELGRFGLVRGSFIPPQDLRELRLITRYRKKLSGTLAGEKNRLHKVLDDAGIKLGAVVSDINGVSAQAMLAGLLGGEEPSDLIELAKGRLRSKREELLLALDGELSARHLFVLQSLQEHIRYLEGQLAALDSYLIEAMEPYRWAWELLQTIPGIDAITAAMILVEIGTDMSRFGSADRLASWAALCPGNHESAGKRKSGKTRKGNSIVRYLLCEAANAARRTKSVFASKYQSLVIRRGHKKAIVALAHKLIRTIYVILARREPYRDSGIDYRAAAVSKNAPRWIRALKQFGYWPTQTPVTA

SEQ ID NO: 300805 - protein, 353 aa, unidentified
MEGMFYVGVDLHKTQFTICILISGAVLEEGTKFEMNKQGYQAFISLMRGLSSSDTYDDIILAIESTANSRFFRDMMTGCGFKVVVVNTLRFKVVNLSTKKTDKNDARTLAEFLSKDILPVSHLCSAESESLRRILKSRNLMVQDMVALKNQAHAVLLAYGHITKTAQFQSKRERNKILEKLPTQIARTVGIIFETIDVVENQKKVLEGKLRTLTSKDPTVNLLMTIPGIGIVNACTIRAYIDDIDRFESYKHFSAYCGLVPWVQTSNESIYYGRITKRGPQELRTALVQCVVAMVRMEDKTSNYKMMHQYHELKNDKSSGKAIIATARKLSRIIYIMLKTNTPFDSKKLTEKN

SEQ ID NO: 300806 - protein, 353 aa, unidentified
MAMSIMVEAAAGVVGGVDTHRDEHVAVVVDTTGRVRGTEAFPNDRRGHRALHRWMQAHGELVRVGVEGTGSYGAGLNRFLTDARVEVVEVPRPDRRRRRLRGKSDPVDAEAAARAALAEDLVATPKRADGRIEAIRALKVPRNSAVKARTQCINQMRSLIDTAPDRLREQLRPLTTRHLIETTARFRPGRIDDPTEAARHSLKRLARRCQQLNIEITEIDTHLHQLVTQTAPQLLDVFGVGTETAATVLIAAGDNPDRITTEAGFAALTGVSPVDRSSGRQHHHSLNRGGNRDANRALWRIAIVRLSHDPRTKTYLDKRTSDGKTKRETIRCLKRYIARELHPIIHTAVLDHT

SEQ ID NO: 300807 - protein, 359 aa, unidentified
MDAQEGAVRHIVGGVDTHKDLHVAAVVDEQDRVLGTRSFASTRQGYRQMLAWMRCFAQIQRVGVESTGSYGAGLLRFLQQAGIAVLEVTTPDRQDRRRRGKNDDFDAQNAAHAAFAGIRTVTPKSRDGMIEALRVLSACRKTAVAARRIALQMIQNTIVCAPESLREGLRRMTRMQLVRTLAAWRPDLTAYRDVEVAYRISLKSLARRYLELHDEIADLDAMIAAIVNELAPNLVARNSLGHVGAAQLLLTAGDNPERLRSEAGFAALCGVSPVPASSGKTARHRLNRGGDRAANSALHIIAIGRLRTDARTQAYVAKRIGEGHSKMEAIRCLKRYIAREVFILIKQRQREINQTRIAA

SEQ ID NO: 300808 - protein, 445 aa, unidentified
MGRVVIGVDPDKLSVTIEARDNREMLRATGRFGTDARSHRQLPGVARQWPGRIWAVEGANGIGRPLAQRLLAEGERVLDVPARLAARARVSGTGQGRKTDPADACAIVMVALRDKGLREVSTDPGLMVLRMLCDRRDVLSRARTQALNRMHRLFLGLLPGGAPVKKPVSQYQALLAPVRPRDLAGKTCRRMAAEELEDLHRLDAKLKAMKAELKAAVLATGSHLMDIHGIGPAGAARILAGVGDVARFPDRNHFASWTGTAPIDASSGQHIRHRLSRAGNRRPGHVLCIAGIVQLRHDTAGRACYRRKRAAGKTPMEAMRCLRRRLPDAVYRQLAADALVQEEASPGGHPGASLTSSAAGLSPDTGTSDQPLPGPAHPTLPPPPSKTPQPMAPAAAVPQQRRGHALDKRPSYKGARSGRRGAGIRRPDHAMRRGFGVAVANTCPA

SEQ ID NO: 300809 - protein, 339 aa, unidentified
MLIIGCDYHPSFQQIAWLNKETGEGGNGRLEHNDEAAAFYRSLRGQAVVVGMEATGGTGWFRQLLSECGHGLQVADAAQVRARATRRQKTDARDAELLRELLLDAKFVWLSLPTAEQRDRRQLLLHRHRLVQMRTRVKNQLQSLAMDQGVRQQKKLWSAKGRTQLQALSLPPWTALRRGDLLQLLDDLDQRLVGLDREVRQQAFGSAEVRRLMTHPGVGPVVGLAFQLTILDPARFASSRKLTSYLGFNPSERSSGGKQRLGHISKQGNALLRGWLVEAAQVAVRRDAQWGRQFRRLAMRKNRSIAIVATARKLAVRLWWMWKRGLDYGQMVQSGSHVE

SEQ ID NO: 300810 - protein, 445 aa, unidentified
MDWKLLEVVHPYAAGIDIGGREHWVAISPERDPEPVRRFGCFTADLQEMARWLVNAGVRSVALQSTGVYWMPAFEVLEQHGLEVFLVNAQHTKNLPGRKSDIQECQWLLKLHTFGLLNNSFQPRDEIRTARTLWRHRGSLIGEASSSIQRMQKALVEMNVQLSNVLSDLSGVSGMAILDAILQGERDPQMLAALVQPGVKAAPEDIAKSLQGNWRPELLFVLRQQVALYRIYQQKIAECDGQLRRHLETLPSKVDLAEQPIGARPRGKKGGSKNAPQFDLRSELYRITGIDWAQVNGIDVLTAQTVMGEAGVDLTEFASEKHFTSWLGLCPSNERSGGRILQRRTRKVVNRAAGAFRNAAAGLIRSQSYLGAQYRRLRTRLGAPKAITAMARKLACLYYRLIKHGQQYVDKGGEYYEARYRDQQIQAVIRKAQRLGLQVVIPQSA

SEQ ID NO: 300811 - protein, 398 aa, unidentified
MYKQFIGIDISKDSFDLTLLESNGEIKLETKLTMDIDGFNSLLKHLSSYPKDKLLIAMEATGIYHLPLLSFLLENSFNCVVVNPILIKSFIGSTTLRKTKNDKKDAASIALFSLKSYQSLHLATTDNIENIKPLIRERESLSCEVAKLKTEIKAILVQLFPELLKNTNIFTQSILNLLLKAPSRKAIRNLKKRTIQKILDNTSGNKVRITAQDILSLAKNSIAISDKYLEKVLTSKIRRLLHIQNELSLLDEELDNSLDDFDINNDIDILKSIPGIGDITSKNFMVEVSSVDKFKSVKQLCAYIGIDPSIKQSGTSINYRGKISKRGNSNLRRTIWQMAIGVIRTCPKFNAYFTKKREEGKRFKQAVIATANKLLKTIFVMLKNKTKFNENLAYGVSK

SEQ ID NO: 300812 - protein, 362 aa, unidentified
MAKVRSWVGLDVHARSVLAVMIDGESGELRSRRLSGTTSEVVEFCCSLAGPTRAAYEAGPTGYGLARALHASGVGCVVAAPGKIERPAADKVKTDQRDAERVLRLLMIDALHPVRVPTSEEEALRDVVRAREAVRGDLMRARQRLSKLLLRHDVRYEDTGSAWTIRHRSWLTSLDLGERGAQVTLLEYLGAIDAIVIRRDALERTIAELIPGSPWEQTVARLRCLRGIDTLSAVGLCAEVGEFERFAKARQLMSYLGLTPSEDTSGEKRRQGAITKTGSRHARRLLVEAAWHYRRAPAKSQALRRRQAGQPAHIIEISWQAQRRLHNVWQRLDTQRGKRRTIVAVAVARELTGFCWALANAY

SEQ ID NO: 300813 - protein, 314 aa, unidentified
MSILESKVYVGVDVASKHLDLFFPDTGKSERIKNDTEAVKALCVRIQGQSQYMFVMEASGGYESLLCAQLGSHGILHSVVNARRVREFARSMGVDAKTDQIDARVISQFASVLKPIASEAQSDEERSHTALVTRRTQLVDLITQEKNRLKQTWDPYAKKSVQKMLKHLENELESIDKLLVKMLENDKKNQRKIEILQSAKGIGNVSTSMLLAQLPELGKLNREQIAKLVGVAPMNRDSGNTMGKRFIMGGRGNVRAILYMATLVAIRHNEKIRAYYAHLKSHKKASKVAIVACMRKFITILNHLIKTDQVWETK

SEQ ID NO: 300814 - protein, 368 aa, unidentified
MNEFIYVGLDVHLNSITAAVLDGDVQAPQVIKLSGDLMQTRKLFRRLAKKGPVRACYEASGAGFVLQRLLAKDGFHCEVIAPSLIPRRPGDRRKTDRLDAVNLVRLYRSGHLTPVHIPSREQEALRRLIRLRYEYVRYTVGTKNRISGMLRNHGLVFTEGKSTWTKTHRRWLARTREEIDGAMRTSLATELEHLEYLETQRGVLDDEITRYAQATPYRTNVEALCCLRGIKTLSAMSLLAEIGDVRRFASPTALMAYFGLVPSERSSGERERRGPITKAGNTHCRRILVEAAWNNRHRSGADLVLRRRRHGQSPDVVAIALKAQHRLYKKFCRLDHKKHRHVAITAVARELCGFVWAALNAAPQLTTN

SEQ ID NO: 300815 - protein, 337 aa, unidentified
MDTVFLNKATYVGIDSHPTTHTALAINRFEDEKGHLTFDNSREGIQMLLSRLPTVDVKRENVVLGLEGGDATRNILLSYLLEKDYNIYEVNPLYTKRRRMFGTRRDKTDGKDAKLIAEVLTKKLSELPKIQSIQVATHILVLRKTVWFYEDITIQGAKLKNQLKTIQREKGLVRSQEEKKLLKAIEKRIAKELTHIKKGQKELEKQLAVQLKGYGENLVSIPGISTILAAKLVSHSGDIKRFHSLNGYIRYAGIAPKERSSGKNKRFVKDKQTGNRKLSTTLWIAALNQIQHNKVLKEYYRKKIQEGKTKRRALISVMKQIAATVYGMLRSGEEYRG

SEQ ID NO: 300816 - protein, 328 aa, unidentified
MMYLGIDISKAKLDCTLLDPATDKRKTKAVSNDLKGFEALSAWLDKQGIAPGDVHGVMEATGVYHEQAALWLADAGMRVSVVNPAQVRDFARGLAMRTKTDGTDSVALARYGSLIQPDAWEAPPPEIRELKALITRLEALETDARRELNRREKALVAQAPVLVRESLDNHLAALKQEIARLQQAIDDHINRHPGLKADRERLLSIPAVGDKTANRMLAVLHSRKFRSADQVAAFLGLVPVEHQSGSSIQKRPRLAKNGDAKTRGVLYMAAIVAAQYNPHVKALYTRLCAKGKTKMAALGAAMRKLVHLCFGVVKHQTFYQANWQPGLT

SEQ ID NO: 300817 - protein, 473 aa, unidentified
MRTIGIDLALKATHKAVVADDRGRVITPVIHFHTGPEELQALMERAREGKADDEPLRVVMEPTGLAWLPLASYFIQRGVTVHLVSTQKSADLRKFYSKHAKSDRISARVLVRFPWVLPQDLQSLDLADANYSDGQRWCKQREELADLITAIKNRVQAWERAFWPGLEEDIDDLFSSWMRRWREDCYDPWKLQAMDPRSLEAFLIDAGAGVDKAERLASAMQAVARRSATLFGSPSGGSSPYVNYASLQDQVLRELRLLEIYEQEHRSLQRQVRKLYRCMHPTRNLETIKGVGEKGASVYLFFIGRVERFSRQKHFRGWSGMVPESDQSGDVDKKGLHMTKAGPDLVKKYAYIDAEVARQWDPQIAAIYYDQMVNKGKHHVQAVCHCATHLLDRVRAVLRDDRPYELRDVDGTPVSWQQARFIIAERYHVPEEIRRRSSARERRIRRDREAERKQRRREVTHVCKRLTPVSHPN

SEQ ID NO: 300818 - protein, 349 aa, unidentified
MNNTITIGMDLGDKYHIAVVFDADGQELDIAKVINTKTQISNYFARYKGSTVAMEAGTHSPWISRLLEKMGCNVYVGNPRKLRFIWDSKDKSDERDARMLGMVCRIEPRLLSALRHRSSQAHADLVMVKSRDMLVKTRTKLINHARGVVKTNGERLPSCSTDYFTRRCAAHVPAELWPALEPIFDTIAQLGAKIHDLDAKINQLCQQQYPETQHLLQVSGIGPITALAYVLTVEDPSRFSKSRQLGPFLGLTPRRDQSGKTDKQLSISKAGNKYLRQLLVGSAHYILGPFGPDSHLRRHGLAIAARGGKNAKKRAAVAVARKLAVLLHRLWVSEQTYKPLYGAKQQKAV

SEQ ID NO: 300819 - protein, 439 aa, unidentified
MSTTDQDQLEFAAFVGIDWADRQHAWALSAVGSSTIEQGEMVHTPEAVDQWAVELERRFEGRPVAVALEQSRGALVFMLSKYAHLVLFPVHPSAAANYRKSFRPSGAKDDPYDASMLLDLLMRHGEQLRRLQPDTPETRTLQLLVQERRKLVNEKTRYSNRLTAHLKLYFPQVLGWFVHVTSQITGEFLERWPTLEKLQRARPATIRRFLCDHNSRDAEKLETRLEQIRHAVPATHDVAVVTASSTAVMALVRLVKELRRSIAAYDKQIEALARAHPDFDLFNSLPGAGPVLVPRLIAALGTQRERYQSAREIQCYSGIAPVVERSGNQYWVHWRWACPKFLRQTFQEWALHSIGQSEWAREFYEEKRAQGKSQHSVLRSLAFKWIRILFRCWKNRTPYDAQIYQQARAKRRPKAKTHQTVELQWKKVAGFSKLSALPS

SEQ ID NO: 300820 - protein, 346 aa, unidentified
MLADELDYVVGVDPHRDTHALAVVDVRSGCVVFEATTQADAEGYACVLRLAEQQAPGRRAFAVEGTGSFGAGLTRFLSGEGERVLEVGRLRRERQSGKSDALDAIRAARSVLGQTRPARPRAGGEREALRALNAAREGAVTARRAGLCQLRGLLVSAPEPLRAELRSLTRAQLLRRLAAVRPERRRDPELRGTLLALRALARRVKTLTVEERELAGEIETLTRKLAPQLLDQPGVGPLAAAQILISWSHRGRIRSEAAFARLAGCAPIPASSGQTIRYRLDRSGDRRLNRALHMILVTRRRADPPTIAYINRRIQEGKSRREASRCLKRYLARNLYRLLEHAPMPT

SEQ ID NO: 300821 - protein, 343 aa, unidentified
MTISILGIDIVKNTFQLHGADHSGKTVYKKRLARRELAAHVTNLPPCTIVMEACGGSNYWARVFQSSGHSVKLIGAQFVKPFVKTNKNDANDAQAIVEAASRPSMHFVPIKKVEQQDIQTIHRIRTRVVKNRTALINEIRGLCLEYGVVLTPGAARVKSSLCVAIADGDNELTPLSRESMQDLYDELVDVECRLKKLDNKIRQLCRQNENCQRILKIPGVGELTATAIVAAVPDPKEFRNGRHLSAWLGLVPRQSSSGDKRTLLGISKRGDRYLRTLLIHGARAVLSHYKHKDNDYTHWVGRKKATLSHNKAAVALANKNARIIWSMLNSGEEFSYGASATAA

SEQ ID NO: 300822 - protein, 352 aa, unidentified
MIMNDFLKYSVGIDVAKEKFDCCISVIASDQSVTIKGTRKFDNTIKGIKALIEWSKNKHKVNIPMVFLMEATGIYHENLALTLFIQGLDAIVVLPNKAKKYMQSFGYKSKNDKIDARGLSRMGAEQHLDLWHPYSENIYPIRSLTRHNEDLQQEKTAAGNRLESQIYSSHPNKTVCKQIGSMIKFIDKQISQTKSEINNLIENDVILKEKFEKIETIKGVGRMTVATVIAETNGFTLFNNARQLTSFAGYDIVEKQSGKTSGKTRISKRGNSHIRRALHMPSFCAVKNDPQNFGVFYKRVYENTGYKMKGYTAVQRKILCLIYTLWKKNEVYIENYEGLKNKEKLGKKILKY

SEQ ID NO: 300823 - protein, 396 aa, unidentified
MKGLDGSQYWDYHLPIRSALQILKRDPLKRSQNPFNQRRCIMKFYCGIDLGARKSHVCLIEENDHKMLDMKMDNELGVIEAALRPYKSSLEVVAESTINWEWLVYGLQKYGYEVKLAHTLGLKAITWSKKKTDTWDAFTLAKLLRGRLIPEAYIYPYELRPIRDLVRERIRLVTKRATEYGAINRMLLKYNIQGFDRNSVKHLSEKGMHELYHHPFVRVKATMELQRIELLTEQIRHIEKALFERARQDSTFSLLRTIPGIGDILALTILYEVGDINRFAHARAFCSYCRVVPGIHQSSNKAYRSPNSKQGNRYLKWSFSQAAIMAIRFYPQIRRLYERLAAKRRKAARLVARSIIAHKLAQAAFHVMKHHVEYKEELLFRFSNEHAEGKAVTPSL

SEQ ID NO: 300824 - protein, 368 aa, unidentified
MDNEYYTTIGMDVSDRTTKVCVMAKERGRRRILEETTIPTTKDGLRAYLSVKGADWPVVFETGAHCRWMKREVESLGMKAIVANPSRLRMVTESNTKNDRNDARELARFALADVELLHPVRLRGERCQQALRLMKARDMLVKVRTMHVNELRGFAKSMGFRLPDCPANRVHVLDKSGWPADFESVAWPLMDVLETVDLKIRAYEVQIRSLAESPELKDKVDRVREVYGIGLLSGVALVASIDADPDRFRKARDAGAYFGLVPKQRQSGEMDVQCHITRAGSDFVRRLMIEAAQIAMRDSARDTDVKLKGHRICARGGRIAKKRALVAVARCLVVTAVALLKKPDAEYVPLSESARREFEAMRSGTTAA

SEQ ID NO: 300825 - protein, 306 aa, unidentified
MNTIIAIDVAKDSLEVRFTNDSLSLHNNSSGFEKLIARCRTLESPFVVFEATGGYEQALKRALHDANIELCLLTPSRVRAFALSEGLKAKTDAIDAAMILRFAQEKRLKPTPAPTASQAKLTALLDRRNHLTEQLAREKTRRQKVCDLIIPFVDQMIKHIEAQLQEIERQVSILIRETPEMRERDQIFQTVKGVGEVTSWTLIAFLPEMTTLTRNEMVAMAGVAPFNRDSGRQIKRRSIQGGRGKIRSVLFMAAQTAAIHNPVIKTYVQGLRDRGKPYRCAIVAAMRKLLIHLRSLANNPQKSLAV

SEQ ID NO: 300826 - protein, 418 aa, unidentified
MKSYKTKKVTKINDKTLIATLDIGKTVQHGYFRAPNGNDIEPFAFYNSKKSYNTFWTKLCRFKKQQRLEDIVIGFESTGPYAEPLFHFLRQKPLRLVQVNPVHTKRVKELTDNSPNKTDKKDPRVIADVICLGHALTLIVPQGPAAELRRLSQARERAITDRTAMINQLEHLMYVIFPEFLTVLKISTKTARHFIKHFTTPENIFALGLESVSQKIKTVSRGKLGKDRAKQLYAAARDSIGIAEGKQSIVFEIEHLVRKIEAEDQFIDNLQQQVHVYLQQIPYSQNILSIRGLGEVTVAGLIGEVADFSKFDTISEVMKLAGLDLYEISSGKHRGQRRISKRGRPLMRKLLFYAAINAVKSKGIMHQKYHQMLDRGMLKMKALIAISRKLLAIIFAIVRDNSNYVKDYSDNHHYKLAA

SEQ ID NO: 300827 - protein, 385 aa, unidentified
MVTGITAYKRRSQMNNTTVYVGMDVHKESFTLCAYTLEKEKGSYSRRTPADYKEVLKYLEFLRTVYGNDTIFVCGYEAGCLGYTLYHQLTDRHVDCVILAPTTMLEQRGKKRIKTDKRDAEIIGRCLAQHNYSPVHVPTASDEEVKEFLRMRDDHKLALKKVKQQILAFCLRHNYRYDGNSHWTAAHINWLKSLTPEALYKEILDEYLLTYTTLSDKLERLDKRIEELAAKDEYKEAVRKLCCFIGVKTHTALSVIVEVGDFRRFASAEKFASYIGLVPGEESSGDDQTRLGITKAGNRHVRMLLTEASQCYSRGQIGYKSKALKARQDGNTPQVIAYADKANERLRRRYYKMVLSKCKKHNVAKTAIARELACFMWGMMTDNIA

SEQ ID NO: 300828 - protein, 413 aa, unidentified
MALKIVYPVCCGIDVHKTFVVACIAATQKGVTTYKSHRFSTYTKGLKELSQWLCKNDCKDVCMESTGKYWIPVFNVLEDSCNIVLAHPKYVKAIRGKKTDKKDAKWIADLFKHDLVAGSFMPPLAIRQLRDLMRYRFKLTNFMSSEKNRLQNSLTVSNIQLGNVVSDTFGKSSMNIINKLLENPLDHNFDIEPLVHASMKDKLPELELAIDGFITPEQAEKLKVIKQHCKDLESRKADLEKIIRSLSEPYAEEINLILTVPSFKNIFSAIAVVSEIGVNMDVFPTAKHLCSWAGLTPTNNESAGKKKSVRISRAGCYIKPLLVQCATAVVKSQKHPEIRNRYLRLKQRRGHKKAIIAIARMLLTAIYNILKKKESYNPELYRKSDVIPVNREITVEQAIILARTQGYHIRAAS

SEQ ID NO: 300829 - protein, 411 aa, unidentified
MYYVGIDIAKNFHVVSIIDETEIKVTKKPLKILNDLDGYNKLLNKLNSISTDISKFIIGLEATGIYGENLQEFLISKGYNVKLLNPFQTSRYREQLTMKKVKNDNIDSLIIALLLKDGKFSSGYITDDEYQSLRTLYRNRAGMIDNIKEVKKRILTDITVTFPEFEKFIDPFSISGLALLDKYPTAKHYERSSVDRILKVFRHIQGNNFNQTKALELLNLSKVSVYTGKAKDARALAIRSSIRILKMYQEELSIIEEEITTLLNKKQIVSNENDTTNPNTLIENLKTIPGVADKTIAAILSECGDITRFKNVTKFIGYLGLFPTENSSGNSKSTGHLSKRGSSLVKHALYMSSVSCLIHNIQLKQLYDTKRSQGKSKQEALIIVSRKLATIIFAIFKYNIPYDPARVFLKS

SEQ ID NO: 300830 - protein, 312 aa, unidentified
MADLFHGGIDVASDRLDVMLLPHGQCFWVGNNAVGWAELVERLRGLCIAAIGIEASGGYERGVLRALLAAGISVRQINPFKLRQFAKARGVLAKNDRLDARMIALFVATMPTRPAQRNEAAEQMAEIVTARRQLSDEKVAAENASRLFEDAILRRLYRRRLMRLALDIALLDKRLAAMVSANVALAQRYRLLTSMPGVGPVLAFTLIALLPELGQMSRRQVAAIVGVAPYDFDSGKLKGMRCIWGGRAPVRRVLYMAAVTACRYNPSLKAFHERLSAAGKKSKVAIVAVMRKIITTLNAMIRDNAAWNARFA

SEQ ID NO: 300831 - protein, 392 aa, unidentified
MIYVGIDVAKDKHDCFISNSHGEVLFNAFSIPNNREGFNALYQKIQSVTNDLSKVKVGLEATGHYSYNLLGFLFSKGLPTYVINPLHTNLYRKSLSLRKTKTDKVDARTIASMIMSDVNLKSYSDTSYHNEELKSLTRYRFEKVKERAKLKTSVSRLVCILFPELEKLVPALHMASVYALLSEFPSAAAVASAHLTRLSNLLSESSKGHYGKDTAVIFREAARRSIGSHMPAKSLELKHTIRLIRELDAEIDEIENEIKRIMDEEIHSPILTIPGISYRMGAMIIAEIGDFSRFDSPDRILAYAGMSPSTYQSGQLDNCYAHMEKRGSRYLRYALYNATKYVCKWDESFGAYLAKKRAEGKHYNVALSHATKKLVRLIYAMEKSGQSYNKAA

SEQ ID NO: 300832 - protein, 420 aa, unidentified
MDVVLERCAGIDIGKDEVVACVRTPGLGGRGRRKDTRTFSSFVGDLEAMADWFADEGVTEVAMEATGSYWKPVWYVLEDRDLELKLVNVRHLKILPGRKSDVLDAEWIAELLEHGLLRSSFVPPPQIRRLRDLTRYRKRLIQTHTQECQRIQKTLEDSGIKLGSVASDVLGVSGRAMLRALIDGERDPEVLAELAMGRLRKKLPELRQALRGRFADHHALLIGMSLDHIDHLETTMGRLDDEIDALFEANTNEAGVPFVQARDHLDTIPGVAKRAAEVILAEIGVDMSMFPTAGHLASWAGVAPGNNITGGKRGSGKTTNGDVWLTETLVTCAWAAARTRDTYLSAQFWRLARRIGKKKAAIAVAHSILVICWHLITNDADYEDLGGDYFSRRNNPDRHRDRLIEQLHGLGYRVTLDRVA

SEQ ID NO: 300833 - protein, 413 aa, unidentified
MRLFVGDDWAEDHHDVELMDATGRRLAKARLPEGVAGIARLHAMIGGQLGEAAEEEDAGQVAVGIETDRGPWVQALIAAGYTVYAINPLQAARYRERHGVSGAKSDAGDAHVLADMVRTDSHQLRPVAGDSAQAAAVKVVTRTHKTLIWERTRHTQRLRHALRDYFPAALEAYEDLDAPDTLELLARAPDPASAARLTTAQISAALKRAHRRGIAGKAERIQAVLRAAHLGQPAIVTAAYAASVRALIAVLGTLNEQVTTLEGQVEAYFGQHPDAEIITSQPGLGPVLGARVLAESGDDPARYASAKARKNYAATSPITRASGKKKTVMARYVHNDRLTDALMSQAFSALQASPGARAYYDHQRARGSGHNPALRQLANRLTGILHGCLKTRTLYDETTAWPQYAAKTEQAAA

SEQ ID NO: 300834 - protein, 331 aa, unidentified
MRQIYGIDLSKEKFDVNYIDQADQKQHCVIKNDLKNISEFLESLPDDSHLVAEHTGVYGDLLLFLSNQMNISISLCSGYSIKHSLGLRKGKTDKIDAARIREYGERFYDTLKPSTINSELMAELQELYSLRRQLVKEKKMLLTKQKGVTRLATRSIYAKNVYTRILDQLTREINDIELQIQKIIRSDNEFSRNFDLVTSIKGIGPITACELLIKTANFKRISTAKKAASYAGICPFPNTSGQMVKKARVSPMSDKSLKSLLFMCAKSAVAHNKEYRLYYQKKQLEGKPHYLIMTNVANKLLRTVYKVIETKTPWDPNYICLDPREMKNKVA

SEQ ID NO: 300835 - protein, 372 aa, unidentified
MNYNTVYVGMDVHKESFTLCSCKYEDEKASHYQRTPASYKNVLRYLAFLRTIYGEDTRFVCGYEAGCLGYSLYHQLENFNVECVILAPTTMLEQRSKRRIKTDKRDAEIIARSLAQHNYSPVHIPTETDNQTKEFIRMRDDHKAELKKIKQQILSFCLRQGYQYDGSGNWTAKHVKWLRSLKPVGLYKEILDEYLLTYTILTDKLNRLDQRIEELASKEEYKESVSKLTCFLGIKTHTALSVIVEVGDFQRFVSARKFAGYLGLVPGQHSSGDDRNGLGITKAGNTHVRRLLVESAQSYTRGKIGYKSRVLRSRQAGNSPQVINYADRANERLRRRYYKMVLKDGKKYNIAKTAIARELACFIWGMMTDNIY

SEQ ID NO: 300836 - protein, 354 aa, unidentified
MYGLKHQKEKRSMDYFAGLDVSVKDTSVCIVDDTGSITREVKVASEPDALLQVLRNPAYRFKRIGLEAGPLSQWLFSALAEADLPVICVETRHMRAVLKAQINKTDRNDARGIAQMMRVGLYRPVHVKTLRSQKLRMLLTHRKLLQSKAIAVENDLRATLRNFGLKVGMVGTAKFEARIKELVENVADLAVLVEPLLVVRRALREQIGVLHRSVLAIVRDDEVCRRLMTVPGVGPVVALTYRATVDVPARFRRSKSVGAVFGLTCSRDQSGERDRPGAISRCGDEMMRAMLYEAAQSMLRSRKWSWLKAWAMQIARRRGIKRAIVALARRLAVIMHRIWVDSTEFRWTREATAA

SEQ ID NO: 300837 - protein, 347 aa, unidentified
MRFYTGRHRYYCGIDLHARTMYLCILEHEGGKVVLHRNLRCDPELFLDAVAPYRDDLVVATECIFCWYWLADLCARENLPFVLGHALYMKAIHGGKAKNDKIDSHKIAVLLRAGAIPEAYVYPAGMRATRDLLRRRLFFVRKRGELFAHIRTTFHQYNLPSPSGQLLYQCNRAGIPEAFADPVVRISVEADLALATHFDGTIRSIERTIREQARSENPATLDLLQTIPGVGPVLALTLLYELHDVARFKRVGDFLSYARLVKSQKASAGKVLGTSGAKIGNAHLKWAFSEAAVLFLRKNARGQKLRDRLRSKHGKGKALSILAARLGRASYYMLRRNAAFDMDRFMN

SEQ ID NO: 300838 - protein, 330 aa, unidentified
MKQYTHFFGVDISKRTIDVTLAKEAEVIHRKFSNDLTGMDELMHWLAELNLNFDLVLFCMEATGLYCFPLTQFLAKNSIDIWIEHATQIKKASSLDRGKNDKVDSKRIAIYATKNLDRLRLWKPASHTLEKIRHLASLRERLVETRKRLLTPIQEFEEMGNIEMAKLLTKTIKSSLTALEKDLRNVEVKIISIVNEDENLKQLYKLITSVVGIGFVTAVNLIIHTHGFTVLKNVRKLACYCGVAPFEYSSGSSIRGKTKVHFMANKKLKCNLHMASLSAVRLDPDLKAYYDRKVLEGKNKMSVLNAVKNKLLARVIAVVTKQELYGKRTA

SEQ ID NO: 300839 - protein, 386 aa, unidentified
MSLRAAVEAPTTAAATRSIIYLGMDVHKDSITIAVLPEGAKVPTRLDRLPNDLPKLKRWLERVARDGELRSCYEASGAGYVLHRALQAWGYACEVIAPSLIPQRAGVQRKHDKHDAAALARLYRAGELVAVRIPSEADERVRDVVRCREVFQREILKSRHYILKFLARRGFVFREGTNWCTPHLQWLQHLTTDASPLAPEDRLVYREYHALLLYKLQRRDELDRQIEQLALLPTLAPMVSRLQCFRGISLHSAMVLATEIVDWRRFERPAQLACYLGLVSREHSSGERMRLGSITKAGNSHCRHVLVQAAWSYRHRPQTSVDLKRRQQGQPPAVITHAWKAQQRLHQRFTHLSYRKRPQIAVVAVARELIGFLWAAMQDVPRAQAA

SEQ ID NO: 300840 - protein, 383 aa, unidentified
MKKTKGTPIKDNTTKERVLYMALELSQNKWKLGFSDGEKERFKSIDARDLEQLQEEIEKARLRFYLEDDVRIVSCYEAGRDGFWLHRYILSREIENIVVDSSSIEVNRRKRRTKTDRIDARKLLRMLMRYHAGERKLWSVVRVPSEEAEDGRNLSRELEVLRKERNMHRNRIYGLLIQQGIQIRNPSSKEFLNELDSLQTWDGKELSVDFKDRLEREYKRLKMVEEQIKLLKQEREKRVQSADSESLRKVVQLRTLYGIGVTSSWDFVMEMFGWREFRNRKEVGAFPGLTPTPYDSGGSRREQGISKAGRGRIRALSIQISWGWLRFQPQSKLSRWYMERFAGGGSRMRRIGIVAVARRLLIDLWRYLEYGVVPEGARLRTVG

SEQ ID NO: 300841 - protein, 448 aa, unidentified
MAQRLKRRPSNPFSTINPHAAGIDIGATHHVVAVGPDRDPTPVRTFCTFSGDLHVLADWLQAVGITTVAMESTGVYWIPVFEILEGRGFDVMLVNARDVKQVPGRKTDVNDAQWLQQLHQYGLLRGSFRPREAVVQLRAYLRLGERLIEYAAAHIQHMQKALMQMNLQLHHAVADITGVTGMRILRAIVAGERSPEVLAAHRDVRCAASDATLRAALTGHYRPEHVFALQQALELYDFHQTKIAECDTQIETALRALAAERTAPTTPLPAQRHAKGRNEPAFDVRPVLHRLLGADLSQIHGLGPYTVLRLVAECGDDMTRWPTAKHFTSWLCLAPANKISGGRVLSAATRRSSSRAAALLRIAAVNVGRTQTALGAFYRRLAARIGKAQAVTATARKLAVLFYKALRFGMAYADPGISTYEAKYRHRLVQHLERRAKSLGFTLVAKAG

SEQ ID NO: 300842 - protein, 409 aa, unidentified
MRIIGLDIHRIFAEAVAWNDGKLQRLGRVDMRRDLLEAFARQLSMDDVVVVEATGNAAAVAAVIAPHVKRVVIANPMQVRIIAHAKIKTDTIDAGVLAKLYASGFLPEVWIPDEPTQALRRQVTRRNQIVRQRSRLKNIIQSILHSHLIPACPHADLCGAKGRAWLVAQVVPEDERLAIERHLREFDRLSEDLKVIERDLARSALNDEGVKRLMTIPGVDMVVALAMAAAIGEIGRFEEPQKLVGYLGLNPSVRQSGPGPAYHGRITKQGRGHVRGMLVEAAWAAARAPGPLRAFFLRIRARRGQHVAAVATARKLAIVIWHLLSKGESYAWARPSLHAKKLRDLELKAGYEATRGQRGAAHAYNLKSHRDEERRWVEQAETAYARFVAGWHPRGPKKGRTGAATEVRR

SEQ ID NO: 300843 - protein, 432 aa, unidentified
MEEVEDEPLFCERTAGIDIGKATVMVTIRVPSDTRKGGRAQETREFGTTRRELLALADWLRCWQVERTGMESTSDYWKPVYFLLEREGFDCTLYQASQVKALPGRPKTDKLDSAWLARITGRGSLAGSFVPPEDIRRLRTRTRYRRKLVQMRTAQKERCEKLLEDAHLKLSSVISDIHGVSGRDMLRAIAAGERNPKVLAQMARGVMRGKITRLEQALDCSFFTPEHAFILQMMLDSIDQLTARIAVLDEKIAEMCRPYERQIEQLDSIPGFGIITAQDLIAETGTDMSVFPTGGHLASWARTAPQVTESAGKRKGKNATGRGNPYIGGTLGEASISAGRTQTFLGEQYRRMSRRMPKKKAQGAIMRKQLVIAHALLSDPAATCQDLGPDYHERRKGTARRARSHLRELERLGYKVTIQAIDPSTGEILPAS

SEQ ID NO: 300844 - protein, 365 aa, unidentified
MASVAHLAPTHLGLDVHRDTISVGILAPGREVPVVERIAHDEASIRRLVGRLGDPRRLRACYEAGPTGYELARLLDRMGIGCEVIAPSLIPTAPGDRIKTDTRDCRRLARLHRAGELVGIRIPTPAEEAVRDLCRTRADMVEDLTRARNRLGKFLLRHGRVWRGGSAWTHKHEAWLGGQRFDEPALGTTYAHYRAVVATRHAQLDAVEVDLATWLDRPPFADQVARLAAYRGVTRLGGLTLAAEVGDWRRFARAAQFMGFCGLVPSEYSSGHSVHRGRLTKAGNAHLRAQLVESAWTYRHRPYVGRAIAGRQLGLDPEVVARAWAAQLRLSARFRALAARKNTKSIVAAAIARELAGFLWAEMVA

SEQ ID NO: 300845 - protein, 419 aa, unidentified
MFKIFRKNCCGLDVHKTWIFACIGMTDAKGITQYKQARFSSFSKGLRELVDWLALYSCKEVCMESAGKYWIPIFNILEKTCLITLAHPKYTKPQKGNKTDRKDAKWICDLFMCDMIKPSFIPPSDIRHLRDLMRYRFKLTNCLTGEKNRAQNCLTVSNLKLDDVFADVFGKSARSITEHILAHPGETFDVAPFVDGRCKHPIEEIQAAVDGAVSREQSIKLRECLNHIDEIEAHRQHIEAEILALTTPYAATLQLLRTVPGFDASPMTAIAVLAEIGGDMSVFPTAKNLCSWAGCCPRNDQSGGKVKFTRISRAGPFLKPLLVQVANALIRSKKNPEFAERYRRIKARRGHKKAIIAICRMLLTAIWNMLTKLVPYSPLGFLELRPSNPDKMFTVAQALHFLRLRGYSIQDEPLILATT

SEQ ID NO: 300846 - protein, 347 aa, unidentified
MKFYTTLHKYYCGIDLHAKILYVCILDQQGNKLIHQKIGADPQALLRLLEPYIGNVVVGVECMHCWYWVSDFCQSHEVDFVLGHALYMKSIHGGKAKNDKIDSYKIASLLKGGNFPLAYNYPREMRATRDLLRRRTGVVRQGASLKAHVVNTDSQYNLPIQHLNLKNSSARETLRHSYDDKVVQRTIELDMVLLDCYAKELAKVEYFIEKQAKQHHGAYLYIIRSFPGIGQILGLTILYEIGHITRFKSVQNFASYSRLVKCKAESAGKTYGTSGNKIGNGHLKWAFSEAAVLYLRGNDKAKNYLDKLQRRMSKGKALSALAHKIGRCIYFMLRDKTVFDEKKFLKG

SEQ ID NO: 300847 - protein, 340 aa, unidentified
MSEVTTIGVDLAKNVFQVHGVTASGEVVIRRQLRRRQVLRFFENQPPCLVGMEACASSHYWAREIAARGHEVRLMPARYVKAYVKRNKTDAADAEAICEAVTRPTMRFVAVKSAEQQSVLMQHRTRELLVRQRTMLVNAIRAHMAEFGVVTRTGLPQVKDLLAVIADEKDPRIPPLARTCLEGLARQLLSLECEIVAGEKRIHAWHRASEVSRRLETTPGIGQITASALAASITDPQVFKSGRAMAAWIGLVPKQTSSGGKERLGRISKQGDQYLRWLLVAGAMTVIRHAKRRGTSDPWLANIIADKPTKLAAVALANKNARIAWALLRHGGTYRRPATA

SEQ ID NO: 300848 - protein, 355 aa, unidentified
MNQEKYIGMDVHQATISVAVMDAQGKLIMECLLETKAATIVEFVRGLHGTLSLTFEEGTSAAWLHDLLKPHVSRLLVCDPRKNALLKDGNKNDRIDARKLAELLRGNQLHPVCHGEHGVRTLKELGRSYLTITQDVTRVMNRIKALYRSWAIPCAGATVYSPRHRAEWLAKIAEPGVRVRAERLYQQLDLLQPVRLEARRDLLAESHKHSAVKLLRQIPSIGPIRSALLVALLHTPHRFRTKRQLWAYSGFAVQTHDSGEYRSVRGKLQRNRERMTVRGLNDNHNRDLKNLFKSAAISASTRPGPLRDFYVARVEKGMRPTMARLTLARKMAAISLAVWKKGVRFDPQQLQRQAA

SEQ ID NO: 300849 - protein, 534 aa, unidentified
MHFTSTIDQRKAAVQGAVIGGVDVAQGWHYIQWLLPNGLSAGKPIRFVNTRSGFETMWARRPAGTRLVIGLESTGGYWLSLAHWLRQQPGVTVVLVNPLHTHKLKEVDDRTPSKHDAKDAGMIARAVAEGRYIPWVPREGVWSELATLAVTRRQQKTDVVRWQNRIQGWLDVYAPEFRRVFKSWQGLAALWVLDTVPLPADVVALPFEELVQGLLEASHHRVGRKRAQALVTAARDSIGVPGHASARGQLAAYLRHWRAARDALAITEAAQQALLASLPAADVLKTIPGFGPVVIATLLGELGNLADYAHPQQAVRMAGLNVVSDNSGKHQGKTHLAKRGRPQARQVLYQAALVAMAHEGPARARYRELRERLAPKAALIALACKLLRIAWACVHHQTPYDARRAFGPMSIKWTPEIETLAVSRMIRCIGLGRSLIIQGTMDPLPIIENLDIGKDRDFRFRPCSKFRQVNQLLLEETVPGFNHGVIVTISFATHARGHAVLLKAFLVRRGGILAAAIRVMQHAGRRPAVDHRTV

SEQ ID NO: 300850 - protein, 408 aa, unidentified
MEVIHERCAGLDVHKETVVGCLRVRERGQVRREVRRWATTTAELLELGDWLRQAGCTHVAMEATGVYWKPVWHVLEGEFELILANPAHIRNVPGRKSDVNDATWIADLLAHGLIRASLVPPSPIQELRDLTRTRKQLMREIVQHKQRIQKVLEDANVKLASVVSEVFGESGRRMLKAISAGQTDARQLAALGDGRLSASRETLAAALQGKVTAHHRFLLSQHFRMIEYLEQTVAAFEARIEAAVEPFRAAIENLVTIPGVSATAAHVIIAEIGVDMSRFAKVGHLRSWAGLCPELHESAGKVMSRRLRHGAPWLKTVLVQCAWAATRNKNNYLRAQFVRLRARRGSKKAIIAVAASILTTAYFLLRNQVPYRDPGALYFARVDQERTAQRLARRIKELGYEVQIRKAA

SEQ ID NO: 300851 - protein, 320 aa, unidentified
MMAQNDLVVVGIDVAKDKVDACVRSLSSGQMFSSTVEGRLQLIRWLRRHKVGKAVMEASGGYEREWAKALRDAKIEVRIVDPKRVRDFARSAGRLAKNDAIDAEMIAWFAETFGEAPDQAYDAEREKLVQIVRARQGLIDLKTELQNRGEHSLPDVVQRAHARLLKKIVAEIATFEVAISATVRATPRFAELAEIIESVPGLARTTSAGLIAAMPELGQVGNKPAAALLGAAPYDDDSGKRRGERHIKGGRRKIRNLFYMACLGAATLHNPVLKAFYDRLVAKGKEKKVALIACMRKLIVILNVMIARREKWDASRYALN

SEQ ID NO: 300852 - protein, 339 aa, unidentified
MNLTPVGIDIAKSVFQLHYVDAETGEIVNRPIKRARFLEHFANRAPCLIGMEACGGAQHWARELIKMGHQVKLMPAEFAKAFNIRNKSDAADARAVWLAVQQPSKAVAIKTEAQQAVLALHRMRQQLVKFRTMQINSLRGLLTEYGEVMGRGRAALDKAIPAVLARISDRLPMVLIDTLREQWDGLTKLDEQIAVIERRLRQWMLEDKAVKAITAIPGVGVLTATAAVATMGDAKSFRSGREFAAWIGLVPKQTGSGGKVTLLGISKRGDTYLRTLLIHGARSVLHHVREPAPWVEQIRKRRPPNVVIVALANKMARTIWAILAHDQPYQKGYVSAKPA

SEQ ID NO: 300853 - protein, 346 aa, unidentified
MEHHAGIDVSLELSSVCVVDARGKIVREAKVASEPDALVSFFKGLGSPVKLIGLEAGPLSQWLHAGLMRAGFEAVLLETRHVKAALSAMTVKTDRKDARGLAQLIRMGWFRPVHAKSTGSREIRALLVARKQLLGRLLDVELSIRGILRGFGLKVGPVTRKTFEARIRELVTGHTMLERIAEAMLSARATLQAQYEKLHKAVLAFVREDAVCRRLMTVPGVGPVVAVTFKSAVDDPSRIAKSKAVGALFGLTPKKYQSGEKDVTGGITRTGDKMVRTALYEAANVLLSRITRFSKLKRWAMDVAKRRGSRRAKVALARKIGIILHRMWIDGTTYRWAEAKPIAAQA

SEQ ID NO: 300854 - protein, 385 aa, unidentified
MTSIQAGAGRVGGRICPASGRKPAAVTIVAHSRPFVIGVDTHARTHTLAVLVAATGELVATEQFPATDAGMGRAVAWAARRTDGEMATLWVIEGVATYGAHLASAVQRAGFEVVEAAAMHARAHRGTGKSDPLDARRIAAAVLSLEPEQLRRPRSGDGVRAALRVLVTAREHMTTERTAAVNALTALLRVAALGIDARKPLTASQLGEAAHWRTRAEDLATSTARAEAVRLAKRVADLNEQLTANQAQMIDLIRASKAAVLLDKTGIGPVTAAVVYTAWSHAGRVRSEAAFAALAGVNPIPASSGNTIRHRLNRGGDRRLNRALHMAVITRMTHDPETRAYVERRRAEGRTTKEIRRCLKRYLARQLYRTLERLHTEPGAYPQAA

SEQ ID NO: 300855 - protein, 345 aa, unidentified
MGPMYYIGLDVHKQKISYCVKDISGKIYADGWIPATRFDLDRWMKTLPQPWSAAMEATMFSGWIYDHLKPHAAELKVAHPLMLRAIAAAKKKNDRIDANKICDCLRCDFLPECYMAPTDIRERRRTLRYRNLLVRQMVQMKIKISTLLMEAGVSYNKQKLHKAGYFRELLATNPDINEGLCSLLRVCRETVVRLQRTESALVRSLERDSLLVERVERLMTIPAVGPITALTWTLEVGDVQRFSSIKKAISYCGLCGAEKSSGSTVQRTPLSKQRNKHLQTTLIEAAKMAPRNSAELAILYDKEKQKGNANRATLAVARKLVAYLMAVDRGQRNFQVVETSNCIAA

SEQ ID NO: 300856 - protein, 480 aa, unidentified
MSNHHLIAIGCDSSKGRIDVEIRNHHGSVLHVGAFDDTPDDHLALSRLIDGLRERHPEARLLVGIESTGGMERNWLAFFRREKRWAKTMRVFRLNAAAVHAFRSAQLHRAPGDAAAASDIARFLLEHCAARQPAVEAESGPIVFYRTIRALSVELTATSQRLQTLLVAAQPDLVRFCRYGLPGWILALLARYPTAAQLAKAAVAQVDAIAHIDGARAAELVENAKRSVASLTDAATAATIRLLVTRIADTQARIDQGRAELQAIITADPESPLAKAVELLDGIPGIAPWSAACLACEIGDPARFAHAKAITAWAGLDPVTEASGDQRHDLGISHRGNAHVRAILFPLAMAGILHNPVLKDFHHRLTTVNGKSHLEALIAVMAKLLRIAHAILLSGKPFDREHEAKRRQQTAAAQAARSATTPETPAPPPAKLDAPISRREATRRKKAAAPGAKVRDQSPKRVPGRGPRPHAPVPAAHAKG

SEQ ID NO: 300857 - protein, 339 aa, unidentified
MNLYAGLDLHSSNTFIGVLDPQFNRIFKKRVSNDLDLILKSLEPFRDRLKGIVVESTYNWYWLVDGLMDSGYACVHLANPCAIKQYEGLKHSDDQHDAFFLAQLLILDILPQGYIYPKEARPVRDLARKRLFLVQQKTAHILSLQSLLARCCCQRVSSNQLRKVTGHDLRQWLKEEHLVLSAQANLDNIVFLKQQIGRLETAIQKQVKLSEAFNCLLTVPGIGKILAMTIMLEVGDIRRFSHVGNFASYCRCVSTQRLSDGKSKGSGNRKNGNRYLSWAFTEAAQMARRFNSRFRSYYDRKAAQTNSILATRALSNKLARVCYYIMRDQVEFREELAAH

SEQ ID NO: 300858 - protein, 299 aa, unidentified
MSITTLGIDLAKSVFQLHGVDADGTIVLQKKLRRGAVLDVLGKLEPCLIGMEACATSHHWAREIAALGHDVRLIPPVYVKPYVKRQKNDAADAEAICEAVTRPNMRFVPVKTEEQQGVLVLHRSRDLLMRQRTMILNAIRGHFAEFGIIAAQGPQKVAELVGGLADEGDLGLPETAQSALQALAAQLNGLEQEVRKIERQLLAWHRQNAASQRLETIPGVGLITATALAASVPDPTAFKSGRQFAAYLGLVPRQNSSGGKDLLGHISKMGNRYLRRLLVVGATSVTRRVLSNDTRTGAG

SEQ ID NO: 300859 - protein, 355 aa, unidentified
MLYLGIDQHARQITISLRDDNGDVILARQVSTKPDKINAFFDGLTRDRARANDSFVAVLEVCGFNDWLIEMLRNYHCEKVILIQPQEQKKRKTDRRDAAALSELLWVNRTRLLLGKPVRGLRQVNIPTKTDCEDRRLTLLREQAGQERTRIVLSIKHLPRRHNLQWQLPTKVFPTKKAITWAKKLVLSKMDRLELDYLLEDLQRIDKRISELQEAIVQRCSAREDAKLLTSMPGVGHFTATALACRVADVSRFPRASSLANYWGLTPGCRNSGENNQRLGSITKAGSVTARWLLAQMTFHLLRKDARLREWFKRIKRRRGSGIARVAVMRKLATIIWRMLSRGQTYAECRQLSTG

SEQ ID NO: 300860 - protein, 341 aa, unidentified
MEEDIIIGVDLAKNVFQLHGARRDGQVVFRKKLSRPQFARFCAEHPRSLFAMEACATAHYWARELMSLGHEVRLIPPIYVKPFVKRHKNDAADAEAITEAALRPNMSFVVPKSAETQALTMTMRTRDQLLEQRTATVNALRGHLAEFGLIAPVGLKNVERLRELVDVHPDLPELVVTMAKMHFNRIDQLSEEVDTLTGRIKSHCADSPEARRLQTMPGIGPIAAMVIEAFAPDMKCFEKGRDFAAWLGLVPKQHSTGGKTRLGQTSKMGQKDIRRALIIGAMSCIAAAARRGKRCHPWLQDKLDRKPKMVAAVALANRMARQIWAMITKEQGYQPSQEVAA

SEQ ID NO: 300861 - protein, 391 aa, unidentified
MVCVGIDVAKDKHDCCILDSDGTIRADCITIPNNMDGFKQLLQTIRDCTKKSDKIKVGLEATGHYSYNILGFLLDNDLAVYVMNPLHTNLYRKSLSLRKTKTDRVDARTIATMLLSDVDLKSYTDTAYHNEELKSLTRYRFDKVRERAKLKQSVSRLVTILFPELEKLVPSLHIASVYALLSEYPGAKQISEIHLTKLTNLLVTASKGRYGKDKAIQIRDAARTSIGSVMPAKSLELKHTIKLIRELTSEIDEIEVSIQKIMDELNPPILSIPGVGIQSAAMILAEIGDFSNFESPDKVLAYAGCSPSTYQSGKLTNCYAHMEKRGSRYLRYALYNATKYVCYWNPVFAEYLAKKRAEGKHYNVALSHATKKLVRLIYALQKSGKAYLVAA

SEQ ID NO: 300862 - protein, 391 aa, unidentified
MRAPGVQERRVIGLDVHPYLFSAAALSGPDALGARLEWVVDREPLDRLETGLRKRTQPGDVVALEASGNSFAVAERLWALGLKAVVLESQSVGQVGSRHCATDQRDAVKIARVYLSGLARTVWVPDGKAAERRELFFAHRNAVRDCTRARNRIWAFLNQHGVRRPKGLRLAGRQALEALLALRNWTPLQQQLLAQQLTAFQQAEARRRLLREEIAAEVASDPQLLKLIRLLGIRDKVALALAAFIGTIDRFENPRKLVAYFSLNPCVSLSGNSGGTGRLSHSGRADVRALLIQAAHSILKHGRGPTHRWAVALKMRKGHNIAVAALARKLVVSVWYLLKGFFTPLTEVDPTLRVKLHKIASEIGRRRLRQMGFRTVAAFERQKLEILLQTV

SEQ ID NO: 300863 - protein, 419 aa, unidentified
MLKIVHQICCGIDVHKKFVVATVGITNKQGVTDYETHTFQTFTENLVQLRDWLAESKCVEVCMESTGKYWIPIFNILEDTCRVFVANPKYVKGIRGKKTDKRDSLWLCDLHKHGLVQNSFIPPWRIRQIRDLMRYRYKLTNFKTSEKNRAQNSLTVSNIMLSSVVSDTFGKSSMRIVRHLLDDPTDISFDVAPLLDKRMKATAEEVTKSIQGNLTKPQAEKINVCLDHMDEIDKHIAAVESAVLELAEPYMEQVKLLLTVPGIKDVFTAIGIIGEIGTDMSVFLSARHLCSWAGLVPANNESAGKKKSVRCARAGTYIKPLLVQCAHSAVKSKECPYFRVRYEQITRRRGKKKAIIAVAHMLLNCIYHMISRNEKFNYDLYRIENAPKPKMAKKSEFSKEDAIALLESLGAQVILPDVA

SEQ ID NO: 300864 - protein, 353 aa, unidentified
MNGDKKMDQFVGLDVSQDETHICVVDRDGNKIWEGNCPSTPEGIGEAVKRHAPEAVKIGLESGHLSTWHWHGLNDMGLPAICIDAYHAHGVLRLQMNKTDKNDAHGIAQIMRCNWYKEVTIKSFENHESRALFRTRSNLVSMRTDVVNQIRGMLKTFGILIKGIAGVSFENRIQEIIDEGTAIAPPLQIQLDMLRMIKQKIDDLDELVLDHAYACQKCRILMSIPGVGPMTAANFVLAVYDADRFTKSKSVGAYFGLTPRRRQSGDMDYNGRISKRGDRVIRHQLYEAANSILTRVKKPSSLQAWGLRIAKRSGMKKARIAVARKLAVIMHQMLQTGELFCFNPATGERALYA

SEQ ID NO: 300865 - protein, 416 aa, unidentified
MLAVVVSDVEIESEYQFERRMFGSSPDQLRSLATWLLEQEVEEVVMESTAQYWKPVWEALERYWKPLRQKREGAGRRSGTLHLAQAQSNRGRRGRKRDFPDAERLVKRLVARELTLSFVPDAEQRLWRTVTRRKYQLRRDHVRLQNQVESLLEEAHIKLSSLVSDLLGASARRMLKALAEGETNPAALAALADWKLRATPEQLCDALGACTDLKPVYRRLLKMALEQLQFLEQQMDQLDQELASLLHLHQDAVQRLAEVPGLGVDSAQQIIAEVGPTAATFPSEKCLSSWVGACPGDDESAGVNYSHRSPKGNRHMRRVLNQTANAAARTKGSIFDIVYRRSVPRLGHNQAIGAIAHRQCRLIWLILHQGVRYEERGPAVTKQSKQKRTARMIRQLRSLGYRIDPPNPQPSQAHAQ

SEQ ID NO: 300866 - protein, 339 aa, unidentified
MHVTTIGLDLAKNVFQVHGITLDDEVAFNRPLRRAQLLPFFSKLNPCLIGMEACSSAHHWARELTKFGHDVRLIPPIYVKPYVKRGKSDAIDAEAICEAVTRPTMRFVAIKTVEQQSLLSVHRARSLLVRQRTQLINGLRGMVAEFGVYIARGLARVIGFAENILTGEVLELPDIANEVIHNMCEHLMALHARVHWYEDRLKQVAKEDARVRLLRTIPGVGAVTASAIIASIGDGHQFSNGREFAAWLGLTPANKSSGGKEKLGRITKMGDQYLRSLLVVGMTSLVRQTKSHPERASKWLTSLLECKPARVATVAMANKTARIVWAVLTRNEPYTPHTA

SEQ ID NO: 300867 - protein, 423 aa, unidentified
MAGPLKVVGGVDPHADTIHVAVITLTGKAVADREFATTADGYRSATAFLTATGAVVRVGVEGAASYGAGFTRALKAAGIDVVDVDRPARFDRRRAGKSDRLDAYHAARAVLAERSNPVKGPAIEGVRALHLARRSAMKAQTAAMNQMIAILVMAPDTVRARYRRLHGDRLAIALTRSRGALDPVSTDTLFALKALADRYRQLAVQVDALTTRLDHAVRQASPALRAAFGVGPDTAAQLLITAGSNPERFYSECSFAALCGSAPVQASSGKTHRHRLSRGGDRAANSALHRIALVRMANHRPAPTWPVRQRTDTANARSSACSSEPSPERSTGSSPIPPMCPTTPTSAPSGKPRTSPSPSPPGTSTSGPPSSPGSNAGCAATTTSPGNTEPGSRPPDHPRFRRQCQSGRSAGAVKMQRPTDERS

SEQ ID NO: 300868 - protein, 419 aa, unidentified
MREGGGAVDVIHPRCAGLDISKKDAKVCVRINGAGRRKTSETVTTFGATTRQIMAMRDHLAAQQVTCVVMEATGDYWKPFYYLLEDLSGVEVMLVNARHVKNLPGRKTDVADATWLASLGAHGLVRGSFVPPEPIRQLRDLTRTRTAITRERTREIQRLEKLLEDAGIKLSSVAADLTGASSRAMLEALLAGETDPAAMADLAKKRLRMKIPQLTEALYGRFTSHHAFLTRMHLDLIDQHTAAIEQLTDRIEVVIEPFRRFRDLICTIPGIGGNTADVVVAETGADMARFPTAQHLASWAGTTPGNNESAGKVKSRRTRPGNPYLQGALGTAAMSISHTHDTYLAAKYRRIATRRGPLKANVAVQRALLVAIWNIATTNTTYHDPGGDYFTRLNPQKARNNAVRQLEAMGYHVTLDQAS

SEQ ID NO: 300869 - protein, 351 aa, unidentified
MSQKTNAVAVRTIGIDTGKNTFHLIGLDEQGTIVLREKLARGRIARRLANASPCLIGIEAGMATHYVARELLALGHDVRQVPPAYAKPFRQGHKNDFRDAYAIAEAVLRPSTRCVPVKTDDQLDLQALHRVRSRLVGQRTAVINQIRSFLLERGIAVRQGPRFLRQRLPEILAKRIDVLSPRMIAIIEDLSGDWRRLDERVERVTEEIEQLAHRSESCRQLMTVPGIGPLIASAMVAAIANGAAFAKGRDFAAWLGLVPKQMSTGDRTILGHISKRGNRYLRTLFMQGARVILLRPANWARHSFGPWLTAAAKRLHHNVLATALANKLARIAWTVLAQRRNYETRVVTEAA

SEQ ID NO: 300870 - protein, 355 aa, unidentified
MWSLGIDQHARQITISLRDENGDVLLARQVSTQPEKIQAFFQQLTQDRLQKGEEFVAILEVCGFNDWLIRMLQDYRCHKVILIQPDDRQKCKTDRRDAAALSELLWVNRARLLAGKPVRGVRQVDIAASTDQENRRLTTLRKEARQARTRVINKIKHIVRRHNVQWHLPTKTFPTQSAIAWLKALVLPAVDRLEMNYLLADLEHLEQRYLDLEKVIAERCVASEDAMIVSSMPGVGNFTATALACRVGRVERFPRSHSLPNYWGLTPRCRDSGEKTQRLGSITKNGSSMARWLLAQVAYQVLRKDRRLREWYKNIKRRRGSNIARVAVMRKLATIIWHMLKHRKTYAECRAFVTK

SEQ ID NO: 300871 - protein, 494 aa, unidentified
MATRRATTDTQTQPRSAYRRRKARARARAARAHEAEERRVEGLPVTQAHAAGIDVGSRSHWVCVGAGAGDPAACVREFPAHTAGLHQLLDYLRQHHVTTVALESTGVYWIPLYELLESNGFEVLLVDPSYTKQVKGRPKTDRLDCQWIYRLHSVGLLAAAFRPDEKTCQLRSYLRQRANLIRYAGQHIQHMEKALEQMNLKLREIISDITGVTGQAILRAILKGTRDPQKLARLRNQKCKASEAEIAQALHGSYRDEHLFALRQAYEAWQFYQKQLDQVEEQIQQQLARMKQDRALPPLKPRPRTSGRKPNQPRFDVRTALYYVVGIDLTEIEGIAELTALTIISEIGPDVSKFATVKHFCSWLGLCPQLKKTGGRVKSSRTRPGVNRAAVAFRLAANSLYASKGALGAFLRRQKGRLGAPQAVTATAHKLARIVYLALKHGLAYVRQNQQEYAAKVREQQIKGVQRRARQLGLEVIEKQPPTSTAAQTAAVPC

SEQ ID NO: 300872 - protein, 483 aa, unidentified
MKSKPEEKNKRATNHPTQPHWDEMNRRQRREMTRKIQSEGLRLEVMHPDAAGIDIGNESHYASVPPSRDSQPVREFGCTTAELKAMADWLKQCRIRTVAMQSTGVYWIAVYDILEQAGLEVYLVNARDTKNLPGHKSDVQESQWLMKLHTYGLLRNSFRPTQEIRVMRTYWRQRNDLVQSASRHILRMQKALTQMNLQLANVLTDISGATGQAIIKAILAGERNPHKLAEFRDYRVKASEGQIAQSLEGNWQEDLLFVLKQEHEGYEFCHKQMAECDRQLQQYLQQREDRSHGAPLPEEKRKGRLQKKRANKPQFNLREGLFRMTGTDLTRIDSIDVMTATTVISEAGYDMSKWKTENHFVSWLRLCPDNRISGNKVIGKGRLPTNNPISIALKMAASTLKESKTYLGAQFRRLRTRLGAPIAIKAMAAKLARLVYRMLRYGMQYVDQGAAFYELRHRELQIKRLKAKAEKLGYRVAPIPVAA

SEQ ID NO: 300873 - protein, 310 aa, unidentified
MALATVSVLGVDLGKNVCSVVGLDGSGKVVMRRRVRRETLVGLAEKLPRCMVAMEACCGAHHLGRVFAAHGHDVRLMSPEYVRPYIKAQKNDDRDAEGIAEAATRPTMRFVDLKSQDQLDVQTLHRSRDRLVGERTALINQLRAILLERGMVVPKGRRNLEQFLIVLMDEQGGAGLSPRMILLVADARAQWAELDGRIAAFDAEFVRWTKENEDARRLGAIPGVGPIVASALVAAVGHAESFDHGRDLAAWLGLVPRQFTTGGKPKLLGISKRGNRYLRKQLIHGARAALPYVAEQDTPLGRWAKALMTR

SEQ ID NO: 300874 - protein, 401 aa, unidentified
MPQHFAGIDWASQVHAVCVVDERGTVADRFDVTHDQAGLQEAMRRLQRFAAEHAVPIAIERPTGLLVDVLVDAGHPVFPIHPNAVKAMRPRYRGHGAKSDSSDAYLLADALRTDGHRFRRLMPQSDGIRALRALVRGRDDLVATRVEVANQLRSLLESYWPGAVAIFAQIDTPIALAFIQRYPTPASAQRLGPKRLASFLAQHSYCGRRPVEELLERLNTAACCTVQELEGDAKGEVARSLAAVLERLVQQIASLTARIEHEVAQLQDGQVIMSFPRTGHVCAAQILSELGDVRERFPTDALLAAEAGVAPLTYESGKSRAVGFRWACNHRLRRAITCFADNSRHQSTWAASVYRSARDRGCDHPHAIRILSRAWLRVMWRAWTDRRPYDPLKHRGAVAMG

SEQ ID NO: 300875 - protein, 347 aa, unidentified
MGIVVALDVHRNQITFKALDRETGEMRRGRVAPAARVDVRAWLAQFAGHEVEFALEGTTGWRFVVEEIERAGHRAHLADPAETAAKRGRKRRAKTDNADCDLQLRLLLAGELPESWIPPAHILELRARVRMRKTLIDQRTAWLQRVQAQLFQQGVPAGLRLRSEVGRQALAAADLSPAGRELVELGLRMIDALDQELVPLTRELGVFARRQPGCRALIARLYGVGPVSATAILAELGDARRFSSSDDAVRHAGLDVTVHQSDSKRAPGHLSHQGPEVLRWALFEAALSGARVGSPDHGYYLQVAERIDHTRACLSLARKLCRRAYHVLRELGDEALAPVEEAIAAAA

SEQ ID NO: 300876 - protein, 410 aa, unidentified
METLVERCAGLDVHKNSVVVCLRLPGHEGKRQVVPRRFGTTTPQLLALRDWLEAEQVTLVGIESTAEYWKPVFYLLEEAMECWLLNANHLKQVPGRKTDMNDAAWIAQLLEHGLLRPSFVPPKPIRELRNLTRYRRAQIEERTREVQRLDKVLQDAGIKLSSVASDIMGVSGRSMLRAMVAGSRDPEALAELAQGALRKKLPALREALTGRFSSHHGLLIGEILAKLDYLEAAIERISAEVERLMTPFEPQVELLDTIPGVNRRTAEGLIAEMGVDMGRFGSPGRLASWAGMCPGQHESAGKSRSGKTRKGSKWLSAHLREAAKAAAQSKGTYLSAQYKRLRGRRGGPKATVAVQHSILIAVYYMLERGVPYQDLGADWFVTRSPEKRARKLVHELRHLGYEVTIDSEVA

SEQ ID NO: 300877 - protein, 347 aa, unidentified
MTIIGGLDVHRAQITFDYVDTETGETERGQVSPATRVVLRSWLAARFQGRADVALAVEGCTGWRFIVEELQRAGIEPHLAEPAETSHARGPKKRAKTDRIDARLLRDLLLQGRLPESYIPPAHMLEVRALGRHYQALAADRRAWLQRIHAQLFHQGAPAVAALLTETGRHQLESAGLSPAGRQMLTSALTMVQAIDRELDPLRQQLRAAGRSLPGPRALDKLFGIGELCAVIIWAELGDVRRFRNAGQVVRLAGIDVSVWSSAGKRSPGRLVRQGPPMLRWALYEAGKAAARSSSPDYDYYQQVKGRLDGKRAALSVARKLAKRCFHALRELGDEALAATELKTEAA

SEQ ID NO: 300878 - protein, 342 aa, unidentified
MKDVPAPQSFYVGIDVSKDTLDVSCLTQAGFHNYGQFENTRAGLQKLNRWLLQQQGFEYTTALFCMEHTGIYTRQPVEFLLLRNARIWMESALHLKRSIGMIRGKNDKVDSYRIARYAMVNKDEAKLVSPSNGILQLLKDLLACRTRINKSIQSLKVSVRELQRVDKASGKELDKLNKAALEGLKKSKTAIEKRMQELISSDPELKEIFALATSVKGVGRVLATELLIYTHKFTRMNNIKQLACYCGVAPFTHSSGTSVRGQTRTSHFANMNLKTTLHLAAMSSTQYVPDLRAYYRRRVAEGKPKMCVINAIRNKLLHRVLAVVKRGTPYLLNYAEINLVKS

SEQ ID NO: 300879 - protein, 343 aa, unidentified
MNATRKTVVGVDTAKSVFQVYTVDQGTGEVINKQLKRAQFLEWFANRAPCLVGMEACGSSQHWARKLQELGHEVKLMGGKMVKAFVCRNKSDAADAHAIYMAAQQPGVKAVAVKTEAQQAVLAMHRIRQQLVKSRTAQINALRGLLAEYGEVFAVGRAAFNAGMKMALARLAERLPAPLIETLRDQWNELGRLDERIARIEAALQTWLRQNRAATAIAAIPGVGLLTATAAVAAMGDAKAFRSGREFAAWIGLAPAQTGSGGKIKLLGISKRGDTYLRTLLIHGARSVLYRVKSPSPWLAQLGQRRPPNVVIVALANKIARTMWAVLAHERAYDKDHVSLRPA

SEQ ID NO: 300880 - protein, 411 aa, unidentified
MRLFVGDDWAEDHHDVEVMDEAGKVLAKRRLPEGVAGIAQLHELAGRHLGDDADEAEVIIGIETDRGPWVAALITAGYLVFPVNPLQASRYRERHGVSGAKSDGGDAHMLADMVRTDSRQLRQAAGDSPEAEAVKVTARMHKTMIWERTRAVQRLRHQLREYFPAALEAFEDLDAADTLELLGNAPDPDRARRLTRAQVSAALKRARRRNIPDKASAVLAALRSEQLAQPPALTAAYAGTVRSLIALIATLNEQVKALEAQVREHFGRHPDAEIYLSQPGIGAVLGARVLGELGDDPHRYASAKSRKNFAGTSPITRASGRKKVVAARFVHNGRLVDALNAQAFAALTASPGARAFYDQQRAKGIEHQDALRRLANRLVGILHGCLKTGTLYDEVTAWGHRQNLPQSSAAA

SEQ ID NO: 300881 - protein, 412 aa, unidentified
METLVERGCGLDVHQATVVACLLIVQKDRKVQKQIRTFGTTTRELVSLREWLLSEGCSHVAMESTGVYWKPVYAILEGEGTFKIVVANAQHVKKVPGRKTDVKDAEWIAELLCHGLLRSSFVPPKPIRELRDLTRYRRKLVESQTAERNRLLKLLETANIKLASVAADVFGVSGQLMLRALIEGKATPQEMAELAKGLLRKKMPELELALEGKLEEHHRFLLRLQLKRLGAVEEDLAVLEQRIQEKLKPYEAQLTLLDEIPGVDWTGAAAIIAELGVDMSVFQNVLQAASWAGVSPGNHESAGKRKSSRIPKGNVYLKTALVEAATAATKAKGSYLRDKFYRLKARRGYKRAVVAVAHKILVAIYHMLSHRVCYNELGDLYLDKLNKHSLTRNLVHRLERLGYTVTLEQTAA

SEQ ID NO: 300882 - protein, 415 aa, unidentified
MKIYRNCCGLDVHKQTIAACLIREDGSGNTCKEKRLFGTMTQDLRELAQWLREAEVGAVAMEATGIYWVPVWNVLERAGFHLLLINPEHYRAIRGKKTDFKDGERIAELLQDGRLEGSFVPSTELRVLRDLTRYRVKLVEHQSAVACRIQKLLEQCNIKLGSVASNVLGVSGTAMLHALASGETDPQRLADLAKKQLRRKIPALRLALDGCLLPHHRFLLGEMLHELSHIESQLARLEAEIESQMRPFQKALCAWMSIPGIKHRVAWTLVAEIGTDMKMFPSAADLASWVGVCPGNNQSAGKRKSGKTRKGNRWARRALCEAAWVAAKAKNSYLAAQFRRFAATRGSKRAIIAVAHTILTIGYHMLQRGTVYQDLGANYFDQRHILRTTKRLVKRLEALGHRVILQSPILNPGIA

SEQ ID NO: 300883 - protein, 408 aa, unidentified
MAGKVAGIDVHKKVLMVVVIDAEAPAAKPERRRFTTMPSELCRLSMWLKEHSVEEAVMESTAQYWRPVWLELEPHIRLHLAQAFSNRAPRGRKHDFKDAERLVRRLIAQELILSFVPDGEQRIWRNLTRMKLQLVRDRVRLQSQIECLLEEMRIKLSVVVTDLLGLSGLRILHALANGETDAKNLALLGDYRLKCSEEQLIEALTGSSHPMHRQMLALQLERLRLIDEQIAKLNSLVAQAMNPHQDTVIRLAEVPGLGIDSAQQIIAEVGVKAGTFPSAAEFTSWVGTCPGKQESAEENSSSRSAKGNKYMRRVLNQAANAAARSKGTHFQAVFRRLLPRLGYQSAVWAVAHRLCRLVWKILHEGIRYIEQGIESEPRLLIYRAQSLAKQLRKFGYNVQITPANRAPA

SEQ ID NO: 300884 - protein, 327 aa, unidentified
MQGWAREAGQSITNAVGIDVSKKDLVVAVSGDAALRRYMNDTAGRNRLCRDLARIAGPEALRIGLEASGGYERKTVSALRKAGFAVIVFQPIQVRAYAQYLGQRAKTDPIDARLIALATAAHDGEIRQGDERLAPLAEHLTLIEQIEEDLIRLKTRRDGFTVTALKSKLETEIKRLTARRNAEIRSLLKGVRQYRDLAFRLDLVASIDGIGERTALTLIIRMPELGSVTREEAASLAGLAPFDDQTGKTDRVRHIKGGRAKVRRSLYAAALPAAFTWNKALVELYQRLTANGAPHKKALIACARKLLIFANTVLARGTPWVKSTATT

SEQ ID NO: 300885 - protein, 348 aa, unidentified
MQFYTNLHPFYCGIDLHARMLYVCILDERGEILVHKKIKDSPEQLLNLLAPYIGNIVVGAECMHCWYWLSDFCEHHNIDFILGHALYMKAIHGGKTKNDKIDAYKIAKLMRGGNFPLAYVYPKEKRAIRDLLRRRTHAMRHSAELKAFIKNSLSQYNLPVPEKSDLSYTTGRDAMRGYFPNPQVQRSIDMNLRLIEVYDHEVSSIECHVEKLTKHDNGRDYYLLRSLPGVGRVLALTILYEIGSIHRFDSVQKFASYSRLVKCKAESAGKACGTQGNKIGNANLKWAFSEAAVLFLKGNPPAQAYLLKLQKRMSKAKALSALAHKLGRCMYFMLKNQTVFDSERFLAG

SEQ ID NO: 300886 - protein, 310 aa, unidentified
MDAIVVGIDVSKDRLDVHVHPSGEAFGVARNAEGLEGLNARLIPLGPWAVAVEATGGFESVVAASLGGAGLPVIVVNPAQVRAFAKALGKRAKTDPIDAAVIARFVEATKPQIRPLPDADTQLLAELVARRRQIIQMIVAERQREKQMANRRLKKSVARLILALSKELNELDAGIDEAVRGSPAWREKEDLLKSVPGVGPIVARTLIAEMPELGQLDRRQVASLAGLAPWTRQSGKWRGRSFTGGGRCTVRTAIFMAAMVARRCNPVLKTFYQRLVEAGKPKMVAIIAVARKLLTILNAIIRDKTPWQIA

SEQ ID NO: 300887 - protein, 474 aa, unidentified
MNSSGTLKIARNGYIVIAVVFCALGIFLMAVPEKAVKIICVLAGILFIADGIIKIIGYFSRDFYCLAFQFDLGFGILMIAVGIDISKAKSTVAVIDSDGTVLASPFTMAHTQPEMEAFVSYLKGLREPTTILMEYTGHYHYPVLKKLQDEGFPVCIVNPYQMKKYGDVEIHKAKTDKKDALRIAAYALEKSYKLVPYSSMEQKYEDLKFLSRQYNQRISYVAKLKVQLIALLDQTMPGITRILPLNSRNPEKCALLLFIKRFKSFDEIQRIGKARFLASYDVLAKKASERSASSKGLSIYELAVDSITTRGEDPYIWLSQNQCVDLLSATQNAADEIISQMRNIAETIPEYKVLRAMRGVGDRLGPIILAEIGDIRRFHSGKALNSYAGNDAPPYQSGQFESRNRHISKRGSSTLRKACYEVMQALKLTKPQDDPVYLFMLKKEQEGKPFNVAKMAGVNKFLRIYYARAMELYK

SEQ ID NO: 300888 - protein, 343 aa, unidentified
MNVFIGLDVSLASTAICVLGPQGKIVEELQAESEPEALVRAIVALPYSIDTIGLEAGPLSQWLSKGMEEAGFDVVMMETRLVKAALKAMPIKTDRRDAQGISRLLQMGWYRPVHRKSVSSQEVRALLTARKSVQQAIINLELSMRGVLRNFGLKLGHVTRIRYEARVRELVEQNEILSTSTEALLRARSQLRAELAELDAKIAGLAKDDNVCRLMMTMPGVGPIVALTVKSAIDDPARFARSKDVGPWAGLTPRRTQSGEMDIVGQITRAGDRGLRTALYQAAMILMHRGSPNWLQAWALRVARRRGSKRALIALARRIGVVLHRMWRDGTPFRSAQSPAATV

SEQ ID NO: 300889 - protein, 343 aa, unidentified
MDYFAGLDVSVKDTSVCIVDGTGKIVREVKVASEPQALLAVLRNATYCFKRIGLEAGPLSQWLYGALAEAGLPVICVETRHMRAVLKAQINKTDRNDARGLAQMMRVGLYRPVHVKTLRSQKLRMLLTHRKLVQSKAIALDNDLRGTLRNFGLKVGVVGTVKFEARVRELVENLPDVAELVEPLLIVRQVLREQLGILHRRLLAIVRDDDVCRRLMTIPGVGPVVALTYRATVDVPVRFRKSKSVGAVFGLTCAKYQSGEIDRTGAISRCGDEMVRTTLYEAAQILLVRSTKWSWLKAWAMQIARRRGMRRAIVALARRLAVIMHRIWVDGTEFRWTRKAAAA

SEQ ID NO: 300890 - protein, 411 aa, unidentified
MNPVIGLDVSKGESQVQAFSDKGKPYRKSFKVSHTVEGLGLLEKFLDEIKRETGKKPPIVLEATGHYHTSVVQYLEDRGYLLIIINPLISYKAKSSSLRKVKTDAVDAYHLCELFYKEDLEPYKKRGVQLLNLRNLTRQHENITGVLIQTKLQFQAILDQVFPEYRGVFGDLYSVVSLLTLSEFPSSEDILEASLETIADKIAQLCKSRSSRWANEKAIELKAAANRNPFEKTLYQSHILSLSIFINIILQYKEHLSKLETEIDALAKEVEEYNIIKSIPGIGEKIAATIISEIGEIDRFNNPKKLVAFAGIDPSVFESGKFTATKNRITKRGSSRLRHALYMAVRCAIRDCRKKKTTDEVIPRNKKMREFYDKKRKEGKPFKVAVIACVNKLLHWIFALLKSKTTFRDIA

SEQ ID NO: 300891 - protein, 362 aa, unidentified
MLESTTIIAFDQHAATTVAAVLLPGQRTPALHPMTSDNTTILRFVRRLKRNGGVRCCYEAGPCGFELQRALTVEGVPCDVIAPALIPRRAGDRIMTDRRDAAQLAILYRAGALTAIHVPTDQEEAVRDLLRCREDIRADLLRARHRLSKFLLRHGRRFTATKSAWSQRHQIWLRAQTWPLPALAQTHEAYVRTVDEAIARLRTVERQLQELVMIEPLRTRVQRLRCFRGMDDITALTIAAELGDARRFPSARGLMAYVGLIPSEHSSGGTRARGPITKTGNAHVRRVLVEAAWHYRHHPFIGKQLRRRQTGAPPSALVPAWRAQQRLYRRYQRLAARGKPKQHVVTAIARELTGFVWATLTQ

SEQ ID NO: 300892 - protein, 317 aa, unidentified
MTNVTFPQLIQRGCGIDVHLKVVVATIDGVGIRKETRSFDTFTSCLTEMKEWLLANGITHVAMESTGVYWKPVMRVLEADIPNVWIVNARHIKNVPGHKTDKMDSEWICKLLLAGLLKPSYIPPKEQRQLRDLTRYRNKLIQAIAAEKNRMMRVLEDCNIKLSSVVANTSGVTATALIDMLCEGRKLTIEDIESVYHKKLSASPQELLEACTGFVEEHHVYMLQMIRKSIAQTQGLVDELSKRIKEILIKYDNVLELLKEIPGFNTKVVEDLVSEIGLDMSAFPSEKHLASWAGICPGNNESAGKKKAEELLTVTNK

SEQ ID NO: 300893 - protein, 428 aa, unidentified
MPYKIAGIDVHKRMLAVVVSDVEVDGEYAFERRQFGSNPAQLRLLADWLLEQQVEEVVMESTAQYWKPVWAALERYWTPRCKKREGAGSMSGTPHLAQAQSNRARQGRKNDFADAERLVKRLVANELTLSFVPVPEQRLWRTVTRTKCQLTRNRVQLQNRLEALLEECHIKLSSLVSDLLGVSARRMVQALADGETDPAALAALANYHLRATQEQLRDALGACQELNPVYRRLLKLALEELQLIEKQISQLDQEIADLLRPYQDQVQRLAEVPGLGVDSAQQIIAEVGPTAATFPSAGNLSSWVGACPGDDESAGVSHSHRSPKGNRQMRRLLNQAANAAVKYKGGIFEILYRRYVPRLGHKQTIGVIAHRLCRLIWKILYQGVRYEERGPDVRKKSQRYRAARMIRELQSLGYRVEQANSQSADVPA

SEQ ID NO: 300894 - protein, 388 aa, unidentified
MYLIGIDIAKYKHHCHIATSDGVFINEFSFDNNSIGFNEFLNHLKSLDQSNEIKIGLESTGHYGNTLKQFISAKGYTFIEFNPYLAKQFFKSTTIRKTKTDKVDARLLSNMLASVDYKTLHTKYYHINDLKSLTRARNSLIYQRSKHLVQITNALDVVFPEFKPFFSNKLGSTALFILSKYNSKDKISKITSEQYKKLHSISRGKFSYPKFLNLKELANTSIGIKSKTYFMLIKTYIGLINSLNNALSKIETEIIKIMNMIDTKITTIPGISIFSAANIIGEIEDINRFSNSAKLIAFSGFDIAIYQSGEKEFYGRLVKRGSTLLRTTIWNLVLGTVRMIPQIADYYHLKRKQGKHHKAACAAISRKLLRLIFHLESNKIDFNINKYR

SEQ ID NO: 300895 - protein, 411 aa, unidentified
MDVFHERCAGLDVHKEVIFLCVLIGQGRRSERHKEKFGTFPHQLLELRRRLVQLGVTHVLMESTGVYWMPIYDALEGFLEIVVGNAQHIMNVPGRKTDESDAEWLAKLLRFGLVKPSFVPVRFFRELRQVTRYRRALVQTRASEQNRVEKHLQIAGVKLSSVASHVFGVSGTDMLHHIAKGRTDPRQLAALARGRLRKKIPQLHQAFAGSISEHTQTLIAIQMEQMNRLEATIAQADLKIATKVESRNAVLERLDTIPGVNVRLAVDILAETGDDMSAWATHRQFAAMAGVCPGNYISAGKRLKNRSRQGNPYLKTMLVQAAASAINVNGSYLQAKFLRLKQRRGHKRALVAIAHVIAVAIYYMLKKGEIYRELGAKFVSDDDSNRKKKALIKQFTSLGYSVVLTPIQPTA

SEQ ID NO: 300896 - protein, 339 aa, unidentified
MKLYTGLDLHSSNTYLGIIDETGKRVYKQKLPNDHERILAALNPYKNDIADVAVESTYNWYWLVDLLMGEGYHVHLANPAAIKKYTGLKFADDQHDAFWLAEMLRLGILPEGYIYPKEDRPVRDLLRKRMHLVRLRTSLIVSLQNILSRNNGFKLKTSDVKALTEDRVAPYLAGSEDLALAGLVSKESIDFLTRQIKKIEAVIEDKVELKPSYEKLQSVFGIGKILALTIMLETGPISRFAKVGNYVSYCRKVSSRWLSNDKVKGKGNKKSGNKYLAWAYSEAAEHARRSYTQARTYYNRKMQKTNFMAAHNALAHKLARAAYYVMRDEVLFMPEKIFV

SEQ ID NO: 300897 - protein, 355 aa, unidentified
MTFVGLDLHKRYITACALDASGTVLAEAKRLPTTLDALGAFLAPLAGPVTVAMEATLYWAWLTERLEAAGVTVHVAHAYQVKLIWQARSKTDPIDARKLAELLRTHLLPTIWVADAATRARRQLLRGRAFLVRQRTQLKIRLHGPPTAENHTCPTTDLYGKAGRTWLMSVALSPALREQVDALLRLVDALTQEIHALDRVVQRAARGNAVAAQLQTLPGVGPFGALMLEAEIGLIARFRSSHELAAYAGLVPSTHSSGGRTTHGGVGPAGNRWLKWILIEIVQTLKLAPGPVGTYYQRLLRAKGKAKATVAAARKLCCYVYWMLKEGWSYAEWLRQHDRSPSSEVRPVQRMGAVA

SEQ ID NO: 300898 - protein, 341 aa, unidentified
MGEVSTIGLDLAKNVFQVHGADASGAVLFRKKLRRHQVLTFFAAQRPCTVAMEACGSAHHWAREIGRLGHTVRLIPPAYVKPFVKRQKNDAADAEAICEAAQRPTMRFVAPKSEQTQAAALVFRARDLLVKQRTQIINALRAHLAEFGIVAAKGPARVPQLMQAVEDPAESIPEIARPILQMLIKTLRGLDEQIARLDHEIAQRAKENDAARRLMTIPGVDPVTAVALAALAPPVETFKCGRDFAAWVGLTPLQHSTGGKQKLGATSKMGERTLRRLLIIGANSVLLQVARHGAPAGSWIARMVARKPPMLVRVALANKMARIVWALLARGEVYRAPAAVA

SEQ ID NO: 300899 - protein, 297 aa, unidentified
MSQYCGIDLHSNNHVLVVIDEEDKRLYEKRLGNDLSQTLKALSPYRETLHGIAVESTFNWYWLVDGLQEHGYDLQLVNTAAVKQYDGLKYSDDHHDAFHLAHLMRLGILPTGYIYPKEQRAIRDLLRPRLSLVRTASAQLISVQSQLWRSTGIRIQWGELRKLEFAPPLLDDYTLQAVQAGLAVYQVIQREIDALEQTAHQAVKLTDAFKILQTITGIGKILGLTIMLETGTIDRFAGAGNFASYCRCVDSKRTSNGKKKGEGNAKAGNKYLSCVFHTKPATDSSASLPPIPDESCH

SEQ ID NO: 300900 - protein, 414 aa, unidentified
MQNLVPNRFRFFVGIDWGSQRHRVCLLNREGTLKEERWIDHSGSSLADLVDWLRCQTSASPSEIAVAIEVPRGPIVETLVEQGFAVFSINPKQLDRFRDRYSPAGAKDDRRDAFVLADSLRTDLHCFHAVRLDDPLIIRLRELSRLEDDVRQEQNRLSNQLWEQWHRFFPQWLQLAPSADEPWAWELFQAAPLPGKAARLSKARIARILQRHRIRRLDAQQVHAALTSTPLRLAPGAAEAASEHALLLLPRLRLLHQQRWEIAQRTQALLDQLTAPAQAGSPSEHRDAEILLSLPGVGRQVAATMLSEASQAIAERDYHALRCYAGAAPITQQSGKRMTVSMRRGCNERLRNALYHWSRVSVTCDAHSKKVYAQMRARGHSHARALRGMADRWLTVLISMLRHQALYDPQRRAA

SEQ ID NO: 300901 - protein, 419 aa, unidentified
MSNSNISRRLAQVKSGTLHAGVDLALESNVIIVLDEKARQCDRFRFPQDIDGYKYMHERLKKVCQKQGASQVVIAMEPTNYFWKLLANWLEQNQVDYHLVNAYTVNKHREGDQIDRSKDDPRDAFVIGDLSRTGKYTETQLPRGYYAELREYATLYYQTMKNVHRAKSILWGLLGQVFPELSRAFKSFSGATITALLKTCPAAVSIRALSEEDFIAKVTMAFSGKRLCRSKLRQAYRLARTSIGLVDGIQANALAIQIHLSHLETLQKEIVQIITALKSCLQQVEAAQYLLSVKGLNTLSVALILAEIGDPDRYRSASQLVKMAGIQPVPNSSGRKQRSSTPMSHQGRPGLRSTLYFACLRLTQVDRRFQEVYHYLQNRIKNPLTKMQALGVLMNKLLHILWALMHQKIFYNPNFFSAV

SEQ ID NO: 300902 - protein, 402 aa, unidentified
MLFLGIDLHLRQMTISLRNQGGDVLLRRQVSTRWPKLEEFREQLRQVAAGDEKYVAILEVCGFHDWLVKWLHQDARCQLVLVVQPLGRSATKTDRRDAHALSELLWINRDRLLRGDRVHGVRTVHVPGEEQMADRRLTSMRERLVRRRTQTINQIHKILRRQNREWDRPTKTFQTQKVAAWLTRLELEPMDRLLLNQLLVQWQLWEEQIVKVDAQIAQRWLTNGDAQLLATIPGVNMYIALAIASRVAPMERFPHGRSLANFLGLTPGCRSSGETERMGSITKMGSRLVRFLLGQVVLHLLRRDGTVRAWYQRIKRRRGTNIARVALMRRTVTIMWRMLTTREAWRPGSANAGAEAAEVPRKVRPRRGRRTVWSALSQAAPHAESTGSSSLLTSEEVTPCQA

SEQ ID NO: 300903 - protein, 373 aa, unidentified
MPKYSTAFGMDVHLRSTTVCALDADTGEAVTRRFPGNPWGEIAGWMDGFPGPSLAAYESGYLGFAPQRELAGLGVECVVAAVSKIPRSAADSASKNDRNDAARMAKAILAHDISPVWIPSPEVEGIRDLAGAYDGATARLATAKQRLLAFLAKRGFVYGGTTPAGNPRKYWTYDFLRWLDKVRPEDDGGVRTLAALRNEVEAAAEARADLLSEYRAAVDASPIAAEVAALQSIKGCAFALAAAFSAEVGDFTRFRSGRQVTAYFGLAPSQRSSGDSVRLGGISGAGNALVRRLAVEGSWSYVQASHQPKLMPKGSGVPLEIRMHGRKGSERLLRRRKEMLARGVPAAKANAATAAELVRWLWALGMMCREGAE

SEQ ID NO: 300904 - protein, 402 aa, unidentified
MNCVGIDVSKGKSMIAVMRPFGEVVVSPFEVRHTANELSELAGLLKSLDGETRVVMESTGNYHAPVAWLLHDAGLYVSVVNAMLVHDYGNNSLRRAKTDKKDAVKLANYGLDHWLTLPRYVPEENTRLMLKSCYRQYQQYSKVQTMLKNNLISLLDTAFPDANRLFTSPPRADGSEKWVDFVATFWHCECVCGRSEKAFTTQYQKWCRKHGYNFSEDKALDIYASACRHFGVIPKTDTAKLLVEQAISQLQTTSAALAALKQEMQSLAASLPEYPVVMEMFGVGPTLGPQLMAEIGDVRRFHSKKALVAFAGIDAPPYQSGQIDVRSRSISKRGSASLRRTLFLVMGVLLQCAPMDEPVYQFMNKKRSEGKPYRVYMMASANKFLRIYYASVKTYLDSLEHD

SEQ ID NO: 300905 - protein, 354 aa, unidentified
MNCIGIDLHKKTISVCVMNQERKVLKRQKLYCAEPDHIVAFFQKYRPFQAVVEATASYEWLWQLLEPLAERLVLAHPKKLRVIAESKNKSDRLDAEVLAEFLALDMIPEAYRPTPRQRQHRTLVRQRCFVQKNLTRVRNKIRRLLTDYNADRPDLFTKVGLKALLVIKKQLTAADRFVLNQLLAQWYYHRKQFQAADRQLKAFAHKAPLKEQEVRAVLASMPTVGPTTIEVVLSEIGDIERFRSAKRVVAYAGLAPGHRESAGRRKDLSITKEGSGLLRWVLIQTAWRTVRCTARWRCVYENLKKRRGSKRAIVAVARRLLTVMAALWRTGQCYRRDLAGPEPGAARAGLTAAK

SEQ ID NO: 300906 - protein, 412 aa, unidentified
MDVIYTHCCGLDVHKKTVVACLITSAEGLEPVKEIRTFRTMTADLLALADWLQQAGCTHVAMESTGVYWRPVYNLLEGQCELLVVNAQHIKAVPGRKTDVKDASWIAELLRHGLLRGSFIPSKPQRQLREFTRYRSTLVQDHARTLNRLQAVLEDANLKLASVVTDIYGVSARAMLEAILAGQRDVEALADLARGRLRAKRDQLKEALEGRVTAHHSFLLSEHLSTLEYLDEAIERVSGEIDQHLTAEQEAIALLDTIPGVGQRAAEILIAEIGTDMSRFPSAKHLASWAGMCPGNHESGGKRLSGKTRKGSRGLRQILVEIAHVASKTKNTYLAAQYRRIAARRGKKRALIAVGHTVLTIVYTLLTRKQPYQDLGTAYFDQREQHRVERRLVRRLERLGYEVALQPRALAS

SEQ ID NO: 300907 - protein, 415 aa, unidentified
MKFEKDTRGIKRYIGFDIHKEYALVGGQNAQQEWVMQPRRIGMEKLREWAAANLRAGDAAVIETTTNVWDVYDIVEPLVSYVVVAHAGGVRQIAEARVKTDKKDIERLIRLLIADIVPEVWVPPMEVRELRGMISYRNRLVKTSTMIRNRLQSLIHRHNLILPKGMLREKGWWAAQKMSALEKIQIRQELAMLDEMEKHKGEVDAELGRQSLGEVWGKRAMRLLQLPGFGVIVSMTVLSAIGDASRFESAKKIVGYSGLGAGVHDSGKEHIEKRITKSGRKELRWALVEAAWRAIRISPYWKEQYEKYLRRMRKPNQAIVVIARKLLVVVWHVLTKEETDERVSEEDLAYKMLVLSWDLDESVRMGLSYKQFAKYALMKLGVETDITRFVRKEVPRRLAPRAEVLERMAELGLAF

SEQ ID NO: 300908 - protein, 465 aa, unidentified
MTTAKLWRNRKERKDWARRLRSEDPGLEVVHPHAAGIDVGNSAHYVAVRPDRDPEPVRRFECFTADLYRLAEWLESCGVKTVAMQSTGVYWIPLYEILEDRGFEVYLVNARHTKNLPGRKSDVQESQWLLKLHTYGLLNNSFQPPAEIRVLRTYWRQRAEHVSGAATCIQRMQKALTQMNLQLANVISDLSGVTGQAIVRAIVAGERNPQKLAELSDPRIEASREEVAKSLEGNWRPELVFVLRQEVEMYDAYQRRIAECDQQLQKHLASFADTELPQSPKAESKEKRAKSTKNAPRFDLSSELKRITGVDLTRIDGIDVMVAQTLLSEVGMDMSRWNTEAHFSSWLGLCPDNRISGDKLLGKGTRHVVNRAATALRLAARNLIRSRSYLGAQYRRLRTKLGAPKAITAMAHRLARLVYRMLKYGQQYVDKGTEYYENRYRQQQIHLLQKNAAKLGLQITVAAQS

SEQ ID NO: 300909 - protein, 367 aa, unidentified
MKKINTVTAKKDEKVAIQKLTIGLDLGDRWSWYCVLDEMGEVVLEQKVATTPKAMKEVFGGMPRSRLALETGTHSPWVSRVLSELGHEVIVAHARNVRLIGESRKKDDRLDARMLARLVRIDPKLLAPVKHRSAQAQADLMAIRARAGLVRARTSLINTARGVTKSYGERLRGCNPRNMNPVKAQELSPELQAALEPLLGAIESLSERIVEYNERIEQLAKQSYPEVARLKQVKGVGTLIALTYVLTLEDAHRFSKSRDAGCYVGLQPGRRNSGQSEPQLHISKEGDRYLRTLLVQGAHHILGPFGGDSDLRRWGLKLAERGGKNGKKRAVIAVARKLAVLLHRLWVSGEAYEPLRNQRGVVLPVAA

SEQ ID NO: 300910 - protein, 355 aa, unidentified
MNSSKYIAMDVHTATISVAVRDAAGKLIMESVIETKTSTILQFIQGLRGDLHVTFEEGTWAAWLYDLLKPYVTNVVVCNPRRNALLKEGSRNDRIDARKLAELLRTNLLRPVYHGEKGLRTLKELARAYLTISKDLTRVMNRVKAIYRSWGIPCGGQSVYNPRHRKEWLSKITQASVRRRAELYYEQLDALVLLRKQARQELLAEGKKHQAWKLLRSIPALGPIRAAVLMAIVQTPHRFRTKRLLWKYSGFGVVTHSSADHRYVKGQLERSKKPVSVRGLDRDHNHQLKDLFKGAAIQASTRKGPFREFYEALVAKGMRPEMARLTLARKIAVIALTVWKKGGAFDAKYLKPQTA

SEQ ID NO: 300911 - protein, 397 aa, unidentified
MYIVGIDIAKRKHEAAVIDGEGAVIIKPFSFTNNCSGYNRLLAMLTKAKLPLDEVSFAMEATGHYWLALFTRLQKEGFRVQVINPVQTNSIRSFYIRQAKTDPRDALLIAEVIRFGHFSESTLHPENIYELRELCRGRHAIVSMQADVKRKVVALLDQVFPEYETAFTNMFGDTSMAILQTCPTPKELSKMPLEELCHLIEVSSHKRFRMAKAQELQALARNSFGFAMAGDVFSTMIRLYAKHLVFLKQQVQEMDRKIAEIMDTLDTPITTITGIGPTLGAYILSEIGDISRFSSAAKLAAYAGIDPTMRQSGEYNGVRNRMSKRGSPYLRHAIWLAASSAVLHDPALKLYFQKKRDEGKPYMASVGHACRKMVSIIYAVMRDNKTYTPHIPNEISA

SEQ ID NO: 300912 - protein, 365 aa, unidentified
MQKISTMLTSGKNIFQGRLTIGLDLGDRSSAYCVLNEAGEIVFEHKLATTPEALKQVFGSMPRCRIAMETGTHSPWVSRLLTALGHEVIVGHAQKVRLITKSRRKDDRLDARTLARLARIDPELLSPVKHRSAQAQLHLTEIRARAGLVSARTALVNAARGLVKSYGERLRKCGTQQFRRETTSSLSTGLREALDPLLREVESLNERIQEYDRRIEKMSKKTYPETALLKQVKGVGDLIATAYVLTIEDPHRFRKSRDAGCFVGLQPGRRNSGESEPQMHISKEGDEYLRTLLVQGAHYILGPFGEDSDLRRWGKKLATRGGKNAKKRAVVAVARKLAVLLHRLWVSGEVYEPLRNSQKVMSAAA

SEQ ID NO: 300913 - protein, 386 aa, unidentified
MGSKSDCPPVLRVLSRRSGRTAALPYPPPKSGHYTMEEPSAEKGQDLVYYCGIDLHSDNNVLGVIDSSGNRLRIKRNANDLEAVKKALRPFAGNLEGIVVESTYNWYWLVDGLQEAGYKMHLANPAAIEQYSGLKHGDDETDTWWLAELLRLKLLKEGYVYPRAERAVRDLLRKRGQLVRMRTQNILSIQNLTCRNTGDRLSGRQVKELTAGDVKEMYKEETERGLAVICCVNVIKALTKQIEAIEKRVKSKIQLSQPYQLLNTISGIGEILAMVIMLEAGDISRFPSVGNFSSYCRCVKSVRLSNNKKKGNGNRKNGNKYLAWAFMEAANYAIRWEPIIEKFYQRKSSKKGSVVARKAIAHKLARATYHVLRDQTPFDVERCFGC

SEQ ID NO: 300914 - protein, 330 aa, unidentified
MKKKDYVGIDISKEEVDIRLFNSKLDGKFNNSPSGFRKMKSFIDKNVDSDTDLLFCFEHTGLYAVPLQVYLEEKNMAYHMVSGLQVKRSLGIQRGKNDQVDAKRLAEYAYLHREQIKPQKLQSPHLIRLKYLLGMRSRLVRQRAGFMATTKDYKKCLALTNTDVMICVQQDMIKVLDKQVIKLEKEIRGIISSDTKIQSLFKLATSVKGIGLISATYMIVLTNCFTEFTTWRKFACYAGSAPFEHQSGSSVRGKTRISHYANKQMKAILTNAVMSAIQYSPEIRLYYQKRLKEGKHKKIVVNIIRNKLISRVFAAVRRGTPYVELIRYAA

SEQ ID NO: 300915 - protein, 467 aa, unidentified
MSAGGLEMNRKRSKSRVDRTMPMMHPNAAAIDVGATLHMAAVRADRATEPVRSFGTFTTDLHRLVDWFTECGVETVVMESTSVYWIPIFELLDARGFTVFLVNARDAKHVPGRKTDVSDAQWLQRLHSYGLLRASFRPKGQIAELRAYVRQRERLLEYAASHIQHMQKALTEMNLQLHHVVADITGSTGLRIIRAILAGERDPEVLACSRHYSCHSSAETIAKALTGSYRTEHLFALEQALALYDAYHEKASACDVRIEAVLKELCIHRGRGIGSVAPAPRRRHRTDQANALAFDVRAALFALLGKDITTIDGLGPYLSLKLVAECGDDLSSWPSAKHFTSWLGLAPSNKVSGGKMLSSRTRRSGGRAAALLRLAAVTVGRTDTALGAFYRRLSSRIGKAKAVTATARKVAVLFYNAVRHGMEYVDPGASSYETRYRTRVVNNLHRRAKAFGFVLQPLEPKAGAVVS

SEQ ID NO: 300916 - protein, 402 aa, unidentified
MRLALGGKVTREVRTFETTTSGLLLLLAWLTEQGCTHVAMEATGVYWKPVWNILSDGDFELVLANAAHIKNVPGRKTDVSDAAWIADLLAHGLIRSSFVPDQEIQELRELLRTRKQLIRQQTRHIQRLQKTLEGANIKLDSVIADIVGMSGRAMIEALIAGETDPAKLAALANYRIKASPQQLGEALRGRVTDHHRFLLRLHLQQIDFADAAISDIDRQVAALIARMDEEVEAGQASFQTLISLLMTIPGISLLAAQVILSEIGLDMSRFPSAGHLLSWAGLCPHNDESAGKRRSTRLRKGDPWLKTMLVQCAFAAKRKKGSYFNAQFHRLASRRGPKKAVCAVAASILTTIYHMIKDGTQFEDLGADHFDRRSKDVRAKRLVTQLAKLGFDAKLTPLAKAA

SEQ ID NO: 300917 - protein, 337 aa, unidentified
MLIIGCDFHPSFQQVAIFDKQTGEYGEKRLGHREQAEGFYRELAGQEVRVGMEACGHYPWFERLLADCGHQLWLGDAGQVRASVVRQQKTDRRDAEHLLRLLLEERFPRIWVPSLEERDVRQLLVHRHKQVQARTRVKNQLQALALSQGVQRRGKLWSERGRSELRQLPLLPYAAQRREHLLQALDGLNQEIGQLDRRVEEEVQRRPAAARLMTHPGVGPVTALALVLTVGPVKRFAHADQLSSYFGLIPREHSSGGRQQFGRISKQGNPFLRFLLVEAGQSAARYDAELGRFYRRLAVRKHRALAKVAVARKLTTRLYWMLREDWTYAQLSKAVCR

SEQ ID NO: 300918 - protein, 409 aa, unidentified
MQVKPGALHAGVDLALDENLVVVIDEQARKIGRFRFDQNADGYRYFLHKLAEMRVQTGAPEVVVAMEPTNYFWKLLAHELERQDLPYRLVNSYTVKKHREGDQLDRSKDDPRDAFTIADLSRTGKYTETRLQHGVYADLRQYATLYDQITKSLDREISMLSGLAGQVFPELRSVFKEMDGATIRAILSTCPSAAQIRALSEATFIAQVKTAFSGQRLPGKKVRVAYQRAQTSVGLTEGLQAYQLAIRIHLDHLQRMESEKQEVIQALLACLPAVEVAPYLLSIKGVHPLWVALLLAEIGDPHQYTCAAQLIKLAGTQPTPNTSGRKQRSRTPMSHLGRGRLRYLLYWSCLHLIQVNSDFRRRYEQLQTRPKDPLTKMQALGVLMNKLLKVSWALMSHKTFYDPALAPSA

SEQ ID NO: 300919 - protein, 383 aa, unidentified
MDCTTPTAGSTLHCALELSKNTWLLGIQFPDRPQPSLYPIKGGNTEDLMAKLTAARDRCAKLSGWAPSIVLCYEAGYDAFWLARFLKARGIECLVVDSASMQVNRRARRAKTDRIDVGKLLRGLIAWLRGDRHVWSVVRTPSIDEEDLRRSHRERDYLVHERTAHINRIKGLLFAQGIRGINVKRQYKTLDVDNLVTGDGHPIPPRLASEIVREIARLALVQEQIAALERERDERPTPCTATEKKRAQLMYLNGIGPAISAVMTREVYYRQFDNRRQVAGFLGLATSPYDSGEVERSQGISRAGRGQVRGTMIQAAWLWIKHQPRSTLTRWFLERTMGQGGRVKRIMIVAVARKLAIALWRFLEHGLVPQGAILSGQMTSMAR

SEQ ID NO: 300920 - protein, 357 aa, unidentified
MASLSMARTEKGVTVGVDTHGEVHVAAAFTSDLGRPLGHLEIPTTPAGYRRLLCWARSFGTSVQFGVEGTGSFGVGLTRFLRNEGCTVIEVNRPNRQTRRSRGKSDPVDAEAAARAVLSGEATGIAKDDQELVGMICSLRVARRSAVKTRTQVINQMQALLITAPMELRENLRPLSRDQLVSCAAAMRPGVVTTPMAATKFALKGLALRHQLLSAELLGLDVELARLTKEAAPALCDLTGVGPDVAGALLVAAGDNPERLRSEASFANLCGAAPLPASSGKTTNRHRLNRGGDRLANGALWRIVMTRLTCHEPTRTYMARRTAEGMSKREIVRCLKRYVARDVYRCLVPVPELAVAV

SEQ ID NO: 300921 - protein, 361 aa, unidentified
MKHVGIDLGATKTALCILSTDGLIERERTIRTDELSEWFEEQPPALMIMESCAESRVVASLAQRAGHQARVVPSVIVRALGVGARRIKTDRKDALALANASFRLGEQLPAIHLRSDASAATTTTIRGRWGLVQLRTRCVNFVRAQLRKDLIGRPRASSATFTAAVRTKLKARGEVPSPIVESYLKTIDASNEQISAIDEQLERLAQTELHRRLRVVPGVGPVIAVAMVAMIDDPKRFASASHLASYLGLSPGENTTGGGKPYRTGIIAAGQPLLRSLLVQGAWSLMQARRRNDPLALWARELAAKKSKRIAVVALARRLAIVLWAMMRDGTSYNPALTAPRPPPQPQPVPSSPAAEVTVTR

SEQ ID NO: 300922 - protein, 341 aa, unidentified
MSEVSTIGLDIAKQVFQAHGADTSGHVMFRKRLTRARLIEFFRSQPRCLVALEACGGAHHWGREIAKLGHTVRLIPPAYVKPFVKRQKNDAADAEAICEAAQRPNMRFVAVKDEEQQASGVVFRARDVLVRQRTQCINALRGHLTEYGWVVPKGATHVPTLIDQIEDPNCQLPESARTIFKVLISNLKSLDENIAVLDVEIGRRSKEDPVARRLMTIPGVGPITATAIVALAPAAETFKSGRDFAAWLGLTPLQKSTGGKQRLGATSKMGERTIRRLLIIGGSAVVRQACMRGAPAGSWLARMLERKPRMLVTVALANKTARIVWALLSKDEVYRAPIVVA

SEQ ID NO: 300923 - protein, 352 aa, unidentified
MSQNPSSAVDVIGIDIGKNSFHVVGLDRRGAIVLRQKWSRGQVEARLANMPPCLIGMEACVGAHHLSRKLKAFGHDARLMPAKYVRPYSKGQKNDFRDAEAIAEAVQRPTMKFVATKTVEQLDLQALHRVRERLVRQRTGVINQIRAFLLERGVAVRQGQRFLRAELPRILAAPPDVLSPRMVRVIEGLASDLRSLDTRIEGLSGEIGELAKQDAGCERLMSIPGIGPIISSAMVAAIGTGDGFAKGRDFAAWLGLVPRQISTGDRTILGKISKRGNRYLRVLFVQAAWVVLVKVKPTRWKGHGLQSWIEAAKKRLHHNVLAIALANKLARIAWSVLRHDKAFDTHLETAAI

SEQ ID NO: 300924 - protein, 344 aa, unidentified
MKIKLLGIDVAKNVFQLCALNQANKVLFNRTIRRAQLRSTIAKLEPTTIAMEACSSAHYWGRSFEAIGHKVLLVPAQHVTPFVRGGKSDARDALAICEAAQRPNIHLVPIKTVEQQDIQLLHRLRQRQVQHSTALANQIRSLGREYGVIFPAGIKPLISHLPEVLEDGSNELSPVARHALADQYQCLLDTRQAMGAFLLQIEQLAAQYPAYDDLQILPGIGPMTASAYIAAIGNGRQFKRGRQVGAWLGLAPRQYGTGGELKLGGITKSGDRHLRTLMIHGARAVITRGLKTRPELAQWVQPIIERQGFNKGVVALANKLARISWVIVTTGEPFDMKQAFKPAS

SEQ ID NO: 300925 - protein, 409 aa, unidentified
MNKVDIAQYEVFCGIDVGKTSNHIVALDRCGDKPLINRKVPQEEAEIRAALKEASDFGLALVIVDQFGAFGRLVVGVAKSMDIPVAHMSPRRFRQVAETYGEDKFDEKDAFILADASRTTPRNIEFVGNRAESMAEIKVLSSRRDDIVEERTRCYNRLHDFIHQVSPPLEDLFSKRKLHNDLEIRLIARYGGPIGFRQAGRARASTWAAELKYHCVDGPKKVEQVFDVLDRQTVMLPGAAVIEEQIRSIASRIIELLAEEKRLNLMIEQRAKMIPEVDLLQSIPGVGPVYAALIAVEIGDIGRFRDSNHLASYAGVAPRKEESGTSVHKRRKRKGGNRRLKNALMQSSQRSVQCDPVARAYYERKRAEGKKHLQALRVLARHRVTVIFAMLNEGAFYEPPVEVDENGRG

SEQ ID NO: 300926 - protein, 377 aa, unidentified
MHKKETVGFVVNGDPESGTWFTVPTTSEHLEELLPRLAGHKVLIEASTSGKAVARFLKNRGADVDLVQADILTGHARYVKNDKLDAKDLARIGLFGGYRTCYIPTAEEEELRSVVRHIRDLRQNVARIKNQAKAVLQRNLVPEPVGNLDNEPVRRRWSHLALPPAEKAALAAKLAVLVKLRAEEAHAMVDLCRLARRHDAMRVLLTIPGVEIYTAATVVAFCGDMTRFPDAKKVAAFTGLTPRLHQSGETLRHGRITKKGPNVLRFVLIEATHHAVRFPGRLKSKFARLAPRVGKGRAIVATARTLITTMWSMVLGGTPYDGFGAERGEAKAWRLDTVARLIEVGHVDAAQRLLAVADVKRAHERWKRGATRLVPLP

SEQ ID NO: 300927 - protein, 430 aa, unidentified
MQQNFYLGIDVSKGYADFIILDENKKSVEDNFQLDDTFEGHHQFYRVISGFLAKHPDSKIFASVESTGGYENNWLKFLNKTQSTISLSVARVNPFGVSYNSKASLNRIITDKQSSKNVAEYIISHPEKVKYNDEDYYSSVRRQWTFIKMLTKQKVQLLNQLESLLYIANPELLSYCSNKVNLWTLKMLKQYPTAKQLSKARVSTLSKIPYITESLAKQLVENANKSVASSVDDTTAEIIKALVDQILQLRKLIYLQRKQLEKNCNLAEVELLKSFKGIGTYSAVGLMIEILSVERFSSVKKLASFFGVHPVFKQSGDGLSGFKMSKQGMPKMAALGAVMYKILRIVYGMLKNNKPFAPEIDRAKHNRVDNQNKPNYSRRYQPMDIKAPISRRQIKKRKEQEKSQILKPLNAESTKEIFTGSDSHSFPEEN

SEQ ID NO: 300928 - protein, 343 aa, unidentified
MTHYVGLDVSQKLTAICVVDDSGHRQWRGQCTSAPEPIERTVRRHGGEDARIGIETGPMTPWLVHEVRGRGLAVTCLDARHARAALKMQINKTDQNDAEGLAQIMRTGWYRSVHVKSFASHRARALLGARAQLVGMTTRLSNHIRGVLKTFGMLPGAGRGLAFDRRVETLLADRAEVAPIVRPMLAAWRQLRQQTAAFDKAVRVLVKSNPICRHLMGVPGIGVLSVLAYVSMVEDPARFGRSRSVGAHLGLTPKQYQSGEIDRSGRISKCGDILARTLMYEAAVVLMTRVRRALGLKDWAQAIARRSGVGKARVALARKLAVILHSMWRSGEPFQWSEQPAAT

SEQ ID NO: 300929 - protein, 420 aa, unidentified
MKVVYQTCCGVDVHKSFLVATIIKTTSGFQPFYQKKRFSTFNNSILEFKKWLLDNSCRDICMESTGKYWIPVFNLLEDEINVTIANPKWVKAVKGNKDDAKDSKWIGDLFRLGLVPGSYIPCKEIRILREFTRYRYKLTSCKTSEKNRFQNALTVCNVALDSVVSDIFGKSATSVIDYLLKQSDNSINHEEISSRLLRSLKKKSESVIESIEGYQMTDPQKYRMRLVHAHMDYITSTIADIDSMVDSLVEPYESAIKLLCTIPGVDRNSAITILSEIGTDMSQFSNSKRLCCWAGLTPGNNESAGKKKSVRITRAGVYLKPALVQAAHSAVKSKKSPYYKVKYEHIFKRRGKKRAIIAIARMILTAAYHMLSTGEVWNPTDLYKIDMPGTLKEKQKEKAIKQAMKLLIAEGIIKESNIAS

SEQ ID NO: 300930 - protein, 322 aa, unidentified
MNKDIKYYGIDISKDVFDVCDSTGESSQYENSVKGFKRFVKTLSVNSHCVMEATGYYHYQLAYYLLESAVKVSVENPLSIKRFIQMKLSKVKTDKSDAKMICEYAQKVEMRLWEGQSKNQVECLQISRLLDLYFKQSTAVKNKIHGEKVLGKPSSLVMKSLQQSKRNIEKLIKELEARLTELVKSEHQELLTLLESIPGMGRKTSMMLIVLTDGFNRFDNAKQLCCYSGLTPTIRQSGSSVRGKSRISKVGNRKLRNLLFMCSFTACKHNKSCKQMYDRIVAKGKSKKLALIAICNKLLKQAFAIAKSGLPFDQSYRSKLGI

SEQ ID NO: 300931 - protein, 357 aa, unidentified
MSHATTLQPKVTIGLDLGDKLSQTCELDAAGALQGGAAVATTRKGLQQYFGGRARCRVVLEVGTHSPWVERLLTALGHETIVANPTEVYGGRRRKRKNDRLDAEFLARQGRSDPALLYPITHRSTQSQQDLEMARARDQLVRVRTQLINHVRGVVKSAGFRLPKCSAESFATQAARYLPDPLHAALTPVLTLLAQTTTQIRQYDRQLAALIATRYPAAQHLQQPSGVGPITALVYVLLLDNDPTRLRCSRSAGPYFGLVPRLGDSSAASPQLRITKAGDAFGRRLLVSAAQYILGPFGPPCDLRRYGEAIAARGGRNAKKRAVIAVARKLAVLLHHLWITNAIYDPNYQHTPVIDAA

SEQ ID NO: 300932 - protein, 362 aa, unidentified
MDVHSTNYTLASYTFENDRPFAVTQVEPDYKHILNYLKQVQKNYGGPCEFLCGYEAGCLGFTLYEQLKSHNVPCVILAPSKMPKVKNEIKTDKRDAMKIAKCLAYNDYSAVYVPTKEDHQVKEYIRMRDAHKAALKKVKQQILAFCLRNGFQFTAGKKYWTEKHMAWLKGLKMDEMLREVLDEYLATYQASLDKIERFDRRIEELAANSRYAEKVKMLSCFIGIRTHTALSLLVETGDFRRFAKAEQYAAFLGLVPGEHSSGCDNNHLGITKAGNSHLRRLLVESAQCLARGRVGYKSKALKAKQYGNPAQVIAYADRANERLRRKFYHLTLKLKKKRNIAIAAVARELSCFIWGMMTEHIA

SEQ ID NO: 300933 - protein, 341 aa, unidentified
MDHYVGLDVSVRSTSICILSAAGQVVREGKVESEPEAIAAFLGGRGLTYGRVGIEAGPLCQWLYAGLAKAGLPVVCIETRHAKAVLSAQVNKTDRNDARGIAQMMRVGLYKPVHVKTLASQETRALLGGRRALQAKLIDIENSIRGLLRNFGLKVGTVTRARYEERIRELTDGQAGLIAVIEPMLTVRRVVREQYVLLHKRMLALARADEPCRLLMSAPGVGPFVALTYRAAVDEPARFRQSRAVGAHFGLAPRTHQSGELDRRGPITKNGDETLRAALFEAALVLLRPGSKPSPLKAWGLKLAKRRGTAKAMVAVARRLAVILHRMWVDGTTFRLGAEAA

SEQ ID NO: 300934 - protein, 392 aa, unidentified
MVTMITIGIDIAKENHYACVMDNRTGEVLIEPFEFKNNKEGFNNLLSAINPFRDYIVGFEDTGHYGDNLLFFLLSNGFKVGLINPITIEMKRKSKLKTAKNDKLDTLLIAQALIHKDEYRLVNIETYHLRDLKKLTRHHHDLKEDLNVYKNRLQKSIDLVFPEFNKLFGSKYGVTYMNLLERFGSADTISKTDMRVLRKAITLKGSGKPVSFTAEELKALATNSIGEKSLASEFQVKHLIMTIRLMEEQVKEVDAKIKELSMQLNSPITSIPGIGTFSGMSILSEYGDINKFDSAAKLISFAGVAPYVFESGQFAAGRTSITKKGNPYLRKTLYQIALPVIRYNPVFYKYYTLKRHQGKSHRCALGHVVRKLLRIIYHLVSNDILFDEINLN

SEQ ID NO: 300935 - protein, 346 aa, unidentified
MNNNTKKGPVTVLGIDLAKQSFQLHGVDDAGQVVIKKKLNRTQLSAFVANLPFCLIGIESCGGAHHWTRLFTEMGHTVRMMAPQFVKPYVKSNKNDSADAEAICEAVQRPNMRFIPAKSIEQQDIQSLHRIRSQLVARRTAQANQIRGLLMEYGIVIPQGISYIRKSLPDILEDGENRLSVLFREQLSGLYEEMVHLDERIEALELSLKTISAQNEDCKRLLTIPGVGLMTATALIAAVGDVNVFKSGRELAAWLGLVPRQHSTGGKPTLLGISKRGDSYLRTLLIHGGRAVVRSANKHEDKRSQWVAGVEQRRGKNITAVAVANKNARIAWALLTKKENYQSCAA

SEQ ID NO: 300936 - protein, 375 aa, unidentified
MKGTRFVGLDVHAATIAVAVAEPTGEVRGMGTIPNEPEAIHKLMRRLGPAEQLRVCYEAGPCGYTLYWQLTRAGISCVVVAPTLIPVKPGDRVKTDRRDAEKLARSFRSGDLTPVWVPDAAHEALRDLVRAREAAKKDQLRARHRLQKFLLRHGQRPPAGTTAWTEKYRRWLGTVHFDAAAQEATRADYVAEVEHARERIVRLERALDEAVEATPAAMRAVIDALQALRGVAKLTAVTIVAEVGRLSRFDRPRQLMGYSGAVASECSSGPRVRRGAITKTGNAHLRRIVVEAAWSYRHRPGIGPTLRQRQAGQSAEVTAIAWKAQQRLHGRYRRLMARGKAKQQVVTAVARELLGFIWAIGVAVEGKQPPDSRAA

SEQ ID NO: 300937 - protein, 402 aa, unidentified
MNCVGIDVSKGKSMIAVMRPFGEVVVSPFEVRHTDSELSELARLLKNLDGETRVVMESTGNYHAPVAWLLHGAGFYVSVVNAMLVHDYGNNSLRRGKTDKKDAVKLANYGLDHWLTLPRYVPEEDTRLMLKTCYRQYQQYSKVQTMLKNNLISLLDTAFPDANRLFTSPPRADGSEKWVDFVATFWHCECVCGLSKKAFTAKYQKWCRKHGYNFSQDKALDIYASACGRFGVMPKTNTAKLLVEQAISQLQTTSAALAALKQEMQSLAASLPEYPVVMGMFGVGPTLGPQLIAEIGDVRRFHSKKALVAFAGIDAPPYQSGQIDVRSRSISKRGSASLRRTLFLVMGVLLQCAPMDEPVYQFMNKKRSEGKPYRVYMMASANKFLRIYYASVKAYLDSAEHN

SEQ ID NO: 300938 - protein, 358 aa, unidentified
MVTGLKHQKEKRGMDHFAGLDVSVKDTSVCIVDDAGKIVREVKVASEPEALLAVLKNPAYRFKRIGLEAGPLSQWLYSALAEAELPVVCVETRHMQAVLKAQINKTDRNDARGIAQMMRAGLYRPVHVKTIRSQKLRMLLTHRKLLQSKAIAVDNDLRGTLRNFGLKVGMVGKVRFEARVKALVENLPDLATLVEPLLLVRRVLREQIVILHRRVLAIARDDEVCRRLMTTPGVGPVVALTYRATVDVPARFRKSKAVGAVFGLTCSKYQSGEIDRNGRISRCGDEMMRVMLYEAAQSMLVHSKKWSWLKAWAMQIARRRGIKKAIVALARRLAVIMHRIWVDGTEFRWTRKQATAAA

SEQ ID NO: 300939 - protein, 335 aa, unidentified
MKSELSVVGIDLAKSIFHLVGTDERGKIILRKRLARGEVLSFMAQLPRVLVGMEACGGAHYWARHLREQGHEVKLMAPQYVKPYVKTNKNDLRDAEAIAEAVTRPSMRFVPIKNVAQQDLQALHRVRERLMGARTALVNDMRGLLAEYGIVLPTGVNAFRHAWAAKLEAEHAKLTPLSQELFGKLWAECKKVEAEVAYYDEKLQALATTHPESQRLLSIPGMGPSTATALIAAVGEVGGFTNGRQFAAWLGLVPKQYSTGGQTRLLGIRKRGERYLRKLLLHGARATLRWARTKTDSRSRWIRGVLERRGWNRTAVAVANKNARIVWALLSRGGV

SEQ ID NO: 300940 - protein, 419 aa, unidentified
MARLQDNTIVSVMHPICCGLDVHKESISACLLFTNNDGQELSELKEFATFTRDLHSLRDWLLENDCPIVAIESTGIYWRPVLNVLEGNVKIVLVNARHFKNVPGKKTDVADCQWLAGLLRHGLLRGSFIPPAEVRDWRDWTRLRKSHLQTLGDYKRRTHKLLESANIKLDSVVSELFGQTGRSLLQLLASSPDKISRADIERCAKGKLKAKKAALFEAIQGFFREHHRDLLNSLLRTIELLETEVAAIDQRLQELLKKHQPLLERLDEIPGVAQVAASAILAEIGPTLEEFPRSAALTSWAGLCPGNHESAGKRKNARHPVRANFLKTILIEVAWAAVKKKGSYYKDKFHRLKARRGPKKAIVAIAHRLLKAVYHVIKDGRHFKDLGEDYLSLRNQNAKLNYLQKQAQILGFNLVPMQA

SEQ ID NO: 300941 - protein, 344 aa, unidentified
MKQIIRIGMDTSKHIFQLHGVDAAEQVVLRKRLGRKQMVEFFAKLPPTVIGMEACGASHYWARVLEQFGHEVRLIAPQHVKPYVLRNKNDGRDAEGVCEAMSRPRMRFVPVKRAEQQAALMLAGVREQMVARRTQLSNTIRGYAAEFGITAAKGLDKIGPLLAQIAQDESVPTIARDLFALQGRAYAQLQVELKAIEARLRAWHRSNADSRRLAKIPGVGPIGATALVMKTPDPHAFPSGRHFAAWLGLTPKDHSTAGKTRLGKITRAGDERLRSVLVAGATAVIQQAKHGRGHPSPWVVALLKRKPPKLAAVALANKIARIAWKLMATGESYDGARMLGALTA

SEQ ID NO: 300942 - protein, 412 aa, unidentified
MDVLVERVAGLDVGKQVVVVCVRTPGPGGRRVSETRTYRTMSRSLEAMADWLVESGVTLAGMESTATYWKPVFYALEDRMGSWLLNAAHLKAVPGRKSDVKDAEWIAQLLEHGLVAPSFVPVPEIRRLRNLTRYRVQLMGDRTRDAVRLERLLEDASIKLSAVASSVTTLSAREMLAQLVAGNTDAVAMADLAHGKMRRKLPDLAEALTGHFDAHHALLVGAMLHRLEHVETALAELDVMIAAAMVPWAHQLELLQTIPGVGLKTAQVIVAETGGDMAQFPTAAHLAAWAVVAPAMHESAGKRRPAGSRKGNKWLASMLVEAASSVSRSKNTYLAAQYAQIASRRGRKRAALAVAHSMLVSAYYMLTRDEPYREVGNDWFDQRHADAHTRRLVAQLKRLGHTVVLDPADSPA

SEQ ID NO: 300943 - protein, 472 aa, unidentified
MRYIGLDLALATVHKAVVIDEQSQDVTPVLSVETSALSLEQLFHRAREGARLDEPLVVVMEPTGMGWFPIAVFCQRQGVKVYLVNSQQVADLRRYYRKHAKSDRIDSRVLAKLPIVSPEKLHALQLIGASQLACQRGCKELDRLMDMNIAIQNRLRSIDRFAWPGLEHVFPDNVASITRWFREHWYDPQTVLALGEEGLLVNWLENGQTSDEMLESGQWANALVQLAEQVLALYGTETAFLDYVYLQAEVTREQSLLSKLEAEYKQLQLETVRPLYRQSHPSRNLETLYGVGQDGAAVYFSFIGDPRRFPDHASFRGWSGMIPRSSQSGTSEAKGLPISQAGPDLIKKFSFLGAETARQWDPQIAAIYYDQIIHHGKHHTQAVCVCATHLLDRIWTILKEDRAYELRDVDGTPVTVEQARKIIATRYNVPKEVRQRNNQRNRLARREQQAEKNQKRKGRSHQVRGESETPSL

SEQ ID NO: 300944 - protein, 356 aa, unidentified
MEKNNKLDFTGQPIFIGLDVHKKSWEVSIHTRHGEYKSFSQPPRATTLAHYLRHHFPGALYYAVYEAGYCGFWIHDQLVQEAIDCLVVNPADVPTRNKERRRKRDRVDCRKLARGLRNNELEGIYVPSRAKLEDCSLIRTRLSMGRKQTRCKNQIKGMLLFYGVEIPEEKEMGHWSRRFIQWIEGIRMERASGDLALKFHLEELSHLRQILAKVNRAILALSRTDEYRPWVRLLRTVPGISTLTAMILLLELGEITRFPSIDQLCSYVGLIPDTQSSGEREQVGGVTQRGHSHLRWLLIEASWIGVRKDPALMEAFDQYCKRMRKSKAIIKIAKKLLNRVRYVLKNQAEYVPCVIE

SEQ ID NO: 300945 - protein, 365 aa, unidentified
MGNVSTFLRKIQPQDFDVFVGMDVDKRSIVLTQVDHLGAEKSVSMPHRGESLLNYVGNHLQGRRIAFVYEAGPTGFGLYDTLSQAGYPCLVVTPAAVPTARGQRVRTNRLDSRKLALQLRGGSLEGIRVPSADYRMLREYVQLRKMHMTEAARCKQRIKALFLRYGLEFPSAPGGYWSQELIQRLREYRCAPALQFKLASLLTSLEFARLQGAEAQMAMRRFVQDSPEIAESVGYAMSLPGIGWIIATYAVARVGDWRLLGKSPQTASFFGLTQCEDSTGEQADRGPITKAGDSVMRSMLIEGAWNAIRKDADLRTFYERVKANHPKDKAACIAIVAVARKLACRLHCVLKERRAYQIHRLTEQA

SEQ ID NO: 300946 - protein, 332 aa, unidentified
MTTTICEVYGGVDTHGKTHHVAALDAVGRLLGDREFPATETGYRQLILWLVSFGTIVKMGVEGTGSYGAGLAAALRAQQVPTVEVDRPDRRARRRQGKSDPLDALAAARATLSGEAVGIPKTRSGPVEAIRVLRVARRRAVKARTAAFNQLHGLLVAAPESLREALSGLTQTALVERCAGFRVDNARLDDPTVATKTALRVLARRIRSLSEEVAAADRQLRPLTERTAPRTIQLLGVGTEIAGQLLVTAGDNPERLRSEAAFAHLCAAAPIPASSGRRDRHRLNRGGDRAANSALHMALVTRLRYHEPTRAYAARRTAEGLSKKDIMRCLKR

SEQ ID NO: 300947 - protein, 272 aa, unidentified
MERTVIAVDIAKKVFQLHWVDMETGCIERLQLKRARLLEWFANRTAALVVMEACGGAHDWARALFEFGHVVRLISPRKVRPFVQRNKTDAADAQAIWTASQQPGMRFVPAKTKAQQIVLSLHRLRARLMKTRIMQTNELRGLLYEFGIVLPEGRVALLGALPDAMSDARVRLPPMLVDSLDEQVRRIQQVQADIDIIERRLSQQMRDIPACKAVAQIPGFGLLTATAVVASMGTPTAFKDAREFAAWVGLFPRQTGTGGRVQQLDISKRGDA

SEQ ID NO: 300948 - protein, 331 aa, unidentified
MPLRIYYPVCLGLDIAKAKIDACLENDTAQHHISIENSPAGFKKLLRWLRKLCPESVPVVMESTGTYGDLAAAFFHQNGYFVSVVNPRWIKDYGRSEGRRNKTDQQDARLVAAYGRTHLLDRWLPPTPEVAELRALVRRLNTIEELIQGETRRHEIAPAIATLRKSLERVAKALKAEQQLLEKAIRAHIAAHPSLASDCARLQAIEGVGAKTARALVAELPRHLPSSRAAAAWVGVTPRRHESGTSIHKPSRIGKEGNQQLRRALYMPAVVARSRNPRLKAFADRLEAAGKTKIATVIAVLHKLVRISFAILKNNTTYDPNHHPLTHSPIR

SEQ ID NO: 300949 - protein, 328 aa, unidentified
MECLSVGIDVSKREFVIAVHPTGDQWTTATTPAGIATVVKRLQTLGPGIIVVEATGGYERALVAALAVAELPVAVVNPRQVRAFAQAIGRTAKTDAMDADVLALFGGRLDPAPRPVTDMATQTLAALVARRRQLLEMIGMERGRLEHAPPTGHLTRELRRHIRWLERRVKDVDDEIGTCIAAHPTWRVQEELLRSVPGVGPTTARTLLGELPELGQLDRRAIAALVGVAPFNCDSGQQRGQRHIWGGRASVRATIYMAALSAARYNPVLRVFYRRLRDAGKPAKVALVATMRKLLTILNAMLKHQSPWTTQVASTPASLSGPARAATV

SEQ ID NO: 300950 - protein, 391 aa, unidentified
MIYIGIDVAKNKHDCFITNSDGEVLFKSFTISNNREGFETLFQKVQSISDDLTKVKVGLEATGHYSYNLLGFLLDKGLPTYIINPLHTNLYRKSLSLRKTKTDKVDARTIASMIMSDVNLKSYSNTSYHNEELKSLTRYRFDKVKERAKLKSSISRLVCILFPELEKLVPTLHMASVYALLSEFPSANAIASSHLTRLTNLLSENSHGRYGKDTANLIRNAARNSIGSHMPAKSLELKHTIKLIKELTTEINEIETEIKSIMDKINSPILTIPGIGYNTGAMIIAEIGDFNRFDSADKILAYAGMSPSTYQSGQLENCHSHMEKRGSRYLRYALYNATKYVCYWDESFGVYLGKKRSEGKHYNVALSHATKKLVRLIFAMEKSKQPYQPTV

SEQ ID NO: 300951 - protein, 411 aa, unidentified
MTIVETRPITGGVDTHLDVHVAAALDANGGLLGVWSFPTTTAGFAELHAWLSAFGTLGRVGVEGTGAYGAGLARFLRAAGEVVIEVDRPNRQARRRHGKSDSIDAVEAARAALSGRAEGVAKTADGNVEAIRVLLIAFRSGRDSRTRCLNQLRHLGFCGPDELWERFRGVTVAALAETAAALRPNPNGDRVMYATKLAMQTLGRRVVDIDTDCARLNDELTGLVTTTAPSLVALHGVGTHTAALLLVAAGDNAERITSEAAFAHLCGVAPIHASSGKVTRHRLNRGGNRQANHALWRIVFTRMSSDPRTRAYVERRTVEGRSKPEIMRVLKRYVAREVYRHPPTRRALRSERQVWPPKCQHATTAVLRTICRPAAPTPAATPPGLIRACPPPRVAHHWSASTIAKLTLDNP

SEQ ID NO: 300952 - protein, 411 aa, unidentified
MEKVYDKCCGIDVHKKLIVACFKKGSKQEIRDFGATTRELLEMADWLKEGGCEMVAMESTASYWKPLYNILETCELKAMVVNARHMKAVPGRKTDVKDAEWIADLLQHGLLTASYIPDKDQRELRELVRYRKSLVGERNRELNRLQKMLEGANIKISGTITDINGKSARNILEHILTGRQIDSAEYDILYEKKIIAHNLKATKEQIIDDLNGVMSGLQRKMMRILLDHLDELNAHIKELDDDIDSFMKPEEKKAASVIQDIPGIGNTSAQAIISVIGTDMERFPTDAHISSWAGLCPGNNESAHKRKSGKTTKGNALLRDTLVVCAHSAVKNKNSYFSAQFARISAHRGKKRAYVAVAHSMLVAIYHILKDGVVFKDLGADYYNQFNKERKINAYLKKLKALGWEAPVVAA

SEQ ID NO: 300953 - protein, 367 aa, unidentified
MDKYIGFDIDSKKVIACVVQKGQKEMYSTIGADVKSMRKYLQKQKADGSRVHLTFEISGQAGFIHDSLLDCVDTITVSNPSKMTWIYRTAKKNDRIDSRKQAVLLSIGEIPAVHMPSVEVRQWRNMILHRRKLVNKVTEVKNRIRAVLKSQGFTSGIHRGSLWNRSNRGWLKTLLDSTPLTTYEAKVSSTGLWCMSLYNSLEQLELLDGQVKRVTMYLDSYLSGQAGGGLLMSIPGVGPRTAEAVLAYTDDVRRFGNSKEYCSYFGLTPRLDESGTRRRLGHISKLGPSVVRWVLCESSWKVIRKSKGLRAFYERVMCGQTGRKKIAIVAVCRKLLSIMRAMMLTGEMYNEELVRRECGYKNMKRVG

SEQ ID NO: 300954 - protein, 334 aa, unidentified
MKQVNQIGVDVDSEALVSMMQRGGQRLPLARFANTAAGHKKFIRWATKGGHRARVCLEATGIYSLEFALALHHAKNVEVMVVNPRAIKDFVRACMQRAKTDAVDAGGILDYLERMPFVAWQPPAPEILELQAINRRIVQLNTELTREKNRRHASEFAGASANAIANDIEVNMHHLERRLERMNQSGLNLVRGVPALATKLAHLVSTKGIGEASAMRLLAELLVLPDDLAAPQWVAHAGLDPRPYESGTSVHRPRRISKVGNRHLRAALYMPALVAIQHEPNVKAFYDKLIAAGKKPMQAVVAVMRKLLHAIWGMLKHDQDFDGNKFFKIAAKTA

SEQ ID NO: 300955 - protein, 363 aa, unidentified
MNTTTVGVDLAKLIFAVCMLDGNGRVLLRRELRREAFAEWLAQLPAGAIVAMEACSGAHYWARRCLALGLQPRLIAAQFVTPFRKSRRSKNDRNDAEAVATAARQGNMRFVVVKTVDQQARLSWHRVREGYKEESLKVTNRIRGLLAEFGVVLAKSHVALRRALVDILEREDLPREFVEMLQGLREHWQQIQARLRMCDQRIETHALGDERCRRVRKLTGVGALTADAVVASVGNGCDFKHGRQMSAWIGLVPQQDSSGGHQRLGPISCSGDAYLRTLLIQGARSSVQAANRVMPEKATPEQIWIRQLATRLSFGKLLVAVANKHARQIWAMLARGEDYDPHAWLRHPMTQRSASRKSVPAAA

SEQ ID NO: 300956 - protein, 394 aa, unidentified
MILVGIDIGKLSHMFCVMDSSTGEFLVNPISFKNNKQGFDSFMDSINSFSKKDVLIGMEDTGHYHFNLLKFLLDSGYAVALINPITTDMTRKMQLGATKDDDLDAQLICDVLASNQRRKGYRISKIDSFDLYEQKRLTREHHDLKEQLNVYTNKLQKCIDIVFPEFNSLFRSKYGSVYMNVLKTFGSADSIAHADIRNIRKCFEANRKGRRISLTPEELKEAARNSIGFPSKAEVIELRHLIDIIELINVQISEVDKKIEEFSVQNNSPILTIPGISHFSGTSILAELGDLRNYSKASQVIKFAGVSPSKYKSSQYEAQHTAITKKGSRYLRKTLYQVILPVIRYNPVFNAFYRHKLSQGKGHRCAQGHCVRKLLRIIYHLVTTDQSFDPKLLR

SEQ ID NO: 300957 - protein, 358 aa, unidentified
MNKSSNLDFSGTTIYCGLDVHLKSWRVNIRDHQMELRDFSQNPDPSALHKFLTKNYPNANYKVGYEAGFCGFGIQRQLAQLQIDCVVLNAADIPKSDKDKRQKNDKRDARAISEEIKNNNKAGIHIPQAAMEYARSLVRQRQRLVLDSTRQKCRIWHCLHFHGLELPQKIDTGQYWSNKFIKKLESNTCNGDTWLKMNLQLMIKDHQQKRALILETTRGIRSLCRQEVFTKQIALITGIPGIGEINAAIILFEIEDINRFKSPDHLYSYAGLVPDTDDSGDTKKSKGITHRQNSRLRKAIVESSWVIIRQDPAMLMLYKNYCKRMHKNKAIIRIGKHLLSRIRFVLKQQKPYVQAVLK

SEQ ID NO: 300958 - protein, 366 aa, unidentified
MSLSSWLVAGIVPGVERQPLKKLEGDESALLKLLNRWREEAKKAGHRIERIAVAFEAGRDGFWLARWLRARGIEAHVIHASSVAVSREHRRAKTDRLDTELLKRAFLGWLRGERDHCKMVAIPTIKDEDAKRPNRERESLVGEQSRIVNRMKAALIRLGIRGFNPKLKKAAGRLEDLRTPEDEPIPPNTLAELRRDMERRRLVSDQIRQIEEARRERLKQAPYDGPHAMVRLLARVIGIGIETADTLVQEVLSRNMRDRRAVARYAGLTGSPDESGRKRREKGLARSGNARVRRGMIQLAWRFLMFQKDSALAQWFRARTENACGTRKTMIVALARKLLIALWRLVREGIVPEGIVLASGTMNGGR

SEQ ID NO: 300959 - protein, 334 aa, unidentified
MWHLGIDLHRRTVVVAAVHDSGETLEARTFDCRDVDRLVDYVHCLQPFRGVIEATSTYRWSYELLSREGTILLAHPAKLRLMIQRRAKTDRLDCQLLANLLRIDQIPLSYVPPKSYQQLRDVTRYRSRLVGGQTQAKIGLRSLLARHNRQAPYRVPFGPRGLAWFRQQQFGAMDDYIRDELVARLSHFRREVAAIDQRLTELATGFPEVESLMDIHGVGLYTALVIIGELGEIERFRFAHQVGAYAGLTSRVRQSGDHCYYGKITRQGSPWLRCVLVEAAIHVVRRDDGLRNFYQRVRKRAGSNKARVAAARKLAEICWKRLRRWHREHSPQAA

SEQ ID NO: 300960 - protein, 344 aa, unidentified
MKITTVGIDLAKNVFQVHGVDERGKTVLRKQLKRAQVVQFFANLAPCLIGMEACGSAHHWGRKLESLGHRVKLMAPQFVKPYVKGNKHDAADAEAICEAVRRPNMRFVALKTVEQQGILAVHRARQGFVKARTAQSNQLRGLLAEFGIVIPKGLHHMAKALPGILEDAENGLPGAFRQLLRRLGENLKAMDRQVGELEREIGLWHRGNEASRRLDAIDGIGPITASALVATVGDARSFKNARQVPAWLGLVPRQESTGGKPKLLGISKRGDSYVRTLLIHGARAVIQAAERKPQSDPWLKGLLARRNKNVAAVALANKNARIAWALLAHGRQFEHDYIPRRAAG

SEQ ID NO: 300961 - protein, 348 aa, unidentified
MTVYIGVDFHARQQTISYLTTEDGEIKRLQLDHAQPEEVRRFYAQFAGQRVVVGFESSGRAAWFEELLEELGCEIWIGHATAIRLFARRRQKNDRRDADLILDLLVRGDFPRIHRYSAESRAVLQQLRYRQRLVKMRTMLLNSLVFMAASRGVVLRSQLKTKRGLERLRQIDLPPALREQRDELCQLLLELKPKIDKVESSLAAKAEADLRVGRLRTQYGIGPLTGLCLAHTLEHPERFANPRKVTAYVGFDPVEDSSGERRRIGSISKQGSRLLRFLLVEAGQIAVRRDPELARVYQRVLVRRGHAKAKVAIGRRLLVRAFIMLRDEIDYAEFQRRGVAARSSRGIA

SEQ ID NO: 300962 - protein, 342 aa, unidentified
MESVQGLVVGVDTHKDTHSAAMVDELGGVHAALDVGANRNGYRSLLEWARCQGSRRIWVVEGTGSYGAGLAAFLSAEGEVVFEGDRPQRRKRGAAGKSDQLDAIKVAREALARPHPAVPRRRGQREAIRILLTTREGAVQAYRQGLNQLYALVVSAPEPIRERLIRLKGEQLIHACIRVRGASYLESSVTATTMRQIARRLNLLLSEAADYERQLAELVGAAAPSLLAEPGVGPITAAQLLISWSHAGRIRHEGAFAALAGVAPVPASSGRVVRHRLNHQGDRQLNRALHVVALSRSSLHRPTRAYIARRTAEGKSTREIRRCLKRYLARRFFRLLQRLDNP

SEQ ID NO: 300963 - protein, 289 aa, unidentified
MNEDSLVYVGVDAAKAKHAVAIAESGRSGEVRYVGEIETTPAAVERLVRKLARKHPRLHFCYEAGPTGYGLYRQLVALGHACEVVAPSLIPKRPGEHVKTNRRDAASLARLLRAGELKGIWVPDAAHEAVRDLVRAREAAGEDLRKKRQQLQSFLLRHGRMFTSRKAWSPAHSRWLAAQRFEHPAQQIVFQDQVDVIADAGQRVGRLDAQLVEFVPTWSMAPVVAAYQALRGVSFIVAVTFVTEVGDIRRFDSPRQLMAFLGLVPSERSTGETVKRGGLTLAGARRVLV

SEQ ID NO: 300964 - protein, 403 aa, unidentified
MSINGASVMAATVVAVDVGKNTAALSVTDEARRRLLGPINFAMTAAAVSAVLDRVCGVLPAAAVKVGVEAAGHYHRPLLAPGVWPAGWEVLELSPARVSEQRRVLGRRRVKTDAIDLEAITELVLAGHGVPVTVRTATVTELSGWAMHRNRRVQTRTAIKNQLLAQLDRCFPGVTLALPDVLGTRIGRLVAAEFADPQRLAALGVARFVRFAANRGLRVRRSAADRLMAAARAALPTPEAAVARQVLADDLGLLADLDGQIATAEAKIAHLLPETPFAPLTTVPGWGVVRAANYGAAVGDPGRWPGARQLYRASGLSPAQYESAGKRRDGTISREGSVALRRALIDLGIGLWHADPAARRYGQRLRARGKKGGVIGCAMAHRANKIAYAMVRDQSGYDPTRWA

SEQ ID NO: 300965 - protein, 429 aa, unidentified
MNFRPMAGIDVGKFFSEMAILSPSNEVIARMKIRHDSSSDVERAVELLKKTEKDFDSRPFVVMESTGHYHKILFHSLCKAGLEVSIINPIQTDSIKNIGIRKVKNDKADARKIALLYRFQELKTTNIPDEDIECLRSLCRQYYKLSDELTAYKNRLTGIVDQLMLNFKDVFPNIFSKAALAVLEKYPTPAHILKANRNKLIALIQKNSRRSLKWSTAKYNLLVSKAREFAPLTVHNSSNVAMLGVYISMIRTLEDNLAKVLKTIHLLIAEDMAKDMPMLALTLELLQSLPGIGLLTAATILAEIGDFSAFSKPGKLVAYFGIDPSVMQSGEFTGTRNKMSKRGSRLLRRVLFTTALANIRTKRNKEACNPVLLEFYKQKCQSKPKKVALGAVMRKIIIYIFAVLRDRKPYQLRSPQEHAQMLAAKHIAA

SEQ ID NO: 300966 - protein, 321 aa, unidentified
MSKITTIGLDLAKKVFHVHGVDVAGNVVVARRLKRKEVLAFFAKLPPCLVGVEACGSAHHWGREIAKLGHTVRLMPPRYVKPYVKRGKTDPIDAAAICEAVTRPTMSFVPIKGVEQQGLSMLHSARSLLIGQRTQLINAARGHLSELGIVAARGLLGFAELAAIVRDERDQRLPATARAALMVLVRQIEAISAEIASLDSILMKENKASELGSRLDTIPSVGPVIASAFRARVTDAKLFENGRHLSAWIGLVPENDSTGGKLKQKGLSKKGDRYLRSLLVNGAMAVVRQAQKRPDKHPWVTKLLGRMSAKQAAIAIARLPG

SEQ ID NO: 300967 - protein, 419 aa, unidentified
MSKSTIAKQLAQVKPGTLHAGVDLALEKNAVIVINEKAEQIDSFNFTQDRLGYDFFLRRLEMLRQKHQASEVVVAMEPSNYFWKLLASELEEKKVTYHLVNAYTVKKHREGNQLDQSKDDRRDAGQIAELSRNGNYTETRLQQGRYEDLRQYVTLYDQLQRSIRREKQVLWGLVGQVFPELSQIFKDPSGELIEALLTTCAAAKIITQLKREDFISQVRLAYAGKRLLVSKLRQVYEMAAISVGVREGLPSIQLAIQAHLGLLHAFQEQLEKVITAMTDCLNSLSEAKYLLSIPPLGAISAAILLSEVGDPKRYHNAAQWVKLAGIQPAPNTSGKKQRSRTPMSHHGRPRLRTILYFVCLRMVRLDKHFGQIYADLQRRKENPLTKMQALGVLMNKLLHILWALITNQTFYNPSFASSI

SEQ ID NO: 300968 - protein, 482 aa, unidentified
MKKKNIYVNQSQELLSLFEEAGNNEKIMCVPIDYAKKDHVVMFCNGYGHILRKPFSVKNSPEGIEYLTEQVTRSCGHRRIDPKHVFFGGEDVGSYAENFANTLRSGGWIVAGVNAHDAKKQRANIQASTDRLDLMGIASMLLNRRANCSPAQSGIYRNLRTLVRHRRNLVSMSTEEKNRIHTVVDRLFPGFLDEKKSGILPFSKSSLYLMENRFSPLQIRRRKRHTLIEVLHRYGTVKPENTAARLQEYAVRVLNTPDEYITTLQLSLVQHVKHLRCLQDSINQLENEIAVWLAQTQGAFLTTVRGIGIVLAAGVSAEIGNPNEQKPLNNLVSYSGIIPRVKQTGGPQGKTRTGKVAKRCNRILKDYVVQSALHMGLHGPEDLMADYKRREAAGQHADFGIGRRYLRKAMCLMRTSQIYMPQRLRNTEVKPEERAGYYLMTWPSLRNKWNKAGALEAAFEKDRPLGQWRNMIQALYEIKLKL

SEQ ID NO: 300969 - protein, 343 aa, unidentified
MEQLRVIGIDLAKSVIQIHGSDSRGKCLIRKKLRRNQLLPFMAKLPRCLVGMEACGGSHYWAREIKQLGHDVKLIPPQFVKPYVKTNKTDVADAEAICEAVDRPTMRFVPIKGPDQQAVLLLHREREGLIKERTAVINRIRSSFSEFGVAIPAGPKRLRQWLSDSYGDVENDLPATLNRLMLRMVDRLNYIESEICDLDKEINDQNKSDERCKRLIEVPGVGRLAASAIVASVGNAKEFRSGREFAAWLGLVPRQYSSGGKQNLQGISKRGDAYIRKMLIHGARAVIRHMNRNSAPVDWLEDLMRRRHHNVVIVALANKLARTIWALLSKEQSYKRYEDTVVA

SEQ ID NO: 300970 - protein, 366 aa, unidentified
MRTKKSYYIGLDVHKDTIWMAVMVDEKDSPIESRQLPNNYLKVVKAMAPYDEKGKVQVAYEAGCLGYGLQRHLSEFGFDCRVIPPTKVVRPGLDKRVKTDKRDAVLISNMLKRREGESINIPTREDEAGRDLLRCRSDFKDDLKRTKQRLLNFLLRHDKKYESNRYWTQKHRKWMSGLKFDLALDRMTFEYYINYIENTEERIARVDEEIRKEAENDRNAEKTKVLRAFRGIDYVTALSFICEIGDFRRFATAESFMSYLGLVPSEYSSGKKIHRGPITKTGSSHLRKLLIESSWHYRRPLKESKRLAERRVGTSEQVITYADKAMSRLHGKFYKMLARGKEQNIAITSVARELSGFIWGVMNMAG

SEQ ID NO: 300971 - protein, 403 aa, unidentified
MAGTRTAGVDWASAAHEVCVSEEGQVRERFSVAHDETGIAELAGKLVRLRVARIAIERPDGILVERLLAAGIRVLAIHPNQVKAARPRFAVAHGKSDRFDAYVLAELARTDAHRFRALVPDSDETKALRSLTRAREDLVAARVELGNQLRAQLQAFWPGALIFKDVDSPISLAFLARYPSPDDARGLGARRMATFLARQGYSGRVEAAELVERMKAAPRGTAGAAEREARRGVVLGLLLALEPIVAEIARLTAQIRSSLAAHPDAEIFRPLFRDPKTAICPATLIAELGDCRGRYPTEAALAADAGMSPVALESGKLRVATFRRACDKRLRLAVATLADSTRHWHPWAREVYRRARVRGQDHPHAIRTLGRAWLRVLWRCWQDRVPYDSALHGNFGRLQPAGG

SEQ ID NO: 300972 - protein, 344 aa, unidentified
MENIARVGIDLAKRVFHITAVDAAGAVVERRKLRRAGLQSYLTLLPRGCTVAMEACSSANHWGRLAARHGHAVRLMSPQFVVPYRKSNKNDANDADGIAEASSRPTMRFVALKSVAQQHVLQVHRARRMAVRNRTAQANEIHGFLLEYGIESPKRGALLPRLAEVLEDAENELPDEGRALLRELGDELRRLDARVKTFDARIAAIAACEPACQRLIAIPGIGVLTATALVAAVGDAAVFRNGREMAAWLGLVPRQHSTGGRPTLLGVSKRGDRYLRTLLVHGARAALTAAGRRTDRRSRWALGVRERRGWNVAVVALANKNARTAWAVLARGAKFDAAHIARAA

SEQ ID NO: 300973 - protein, 373 aa, unidentified
MHQVIMIGCDLHDKTMLLKIAAGREVPETWSVKNTGAGRAKMIEALRERARAAGGVRVLFAYEASGQGFGLYDELSEAGIECYVLAPTRIARSQRGTSQKTDEKDAQQLLELLRAHVLAGNELPAVWVPDPTTRDDRELVRMRLDATEKMTMTKSQIQSLLKRNHIRRDPGTGKGWTRLFRGWLKHSLCESADSPLGASTRLALASLLRQLDFLEEEERRLHDQVNALAAAPRWAAAVEEMTSLCGVGVLTALVFLTELGDLSRFANRRQLAAYLGLAPRSHESGERKDRKGHITRQGSSRVRKMLCQATWARVRHDRQEQETYGRLVAKNPKKKKIAVVASMRRLAVRMWHRGQVPPGQRSRAMILAAEAAP

SEQ ID NO: 300974 - protein, 455 aa, unidentified
MSIVSSLPSEFERININAAGIDIGAQKHYVAVPRGRDPKGRDVRHFDTFTADLYGLVDWLKQCHIDTVAMESTGIYWIPLFEILEKNGFEVRLVNPRSIKHAPGRKSDVVDCQWIQQLHAYGLLTSAFRPDEQINVLRSYHRQRTMLVNHAATHIQHMQKALEQMNLKLTNVISDITGTTGMKIIRSILAGERNPKKLAKHRDPRCKRSDKEIAKSLHGNWRDEHLFALQQAVALYDFYQTQIEVCDKQIQAQLCRFEDRSHGGQPPPVTGKSKGSGKRLSFDATEHLYRMTGVNLTQIVGLNTPTVLTIIAEVGLDMSRWPTSKHFASWLGLCPGSKISGGKNFSSKSKPSANRAAHAFRMAAFSLHRSQTAIGAFLRRKKAQLGSPKAITATAHKIARIFYEMLKNRTEYKDLGVDYYQARYKERMLRNLKRKAKAFGLELVKSNQDQLVMVT

SEQ ID NO: 300975 - protein, 481 aa, unidentified
MKAKTPEKIQKATDPSTRGHWNEMNRKQRREMMRKIQSEDLSLEVVHPHAAGIDIGNESHYVAVPPTRDSQPVRRFGCTTVELKAMAEWLKQCGIRTVAMQSTGVYWIAVYDILEAAGLDVYIVNARDTKNLPGRKSDVQESQWLMKLHTYGLLRNSFRPSQEIRTIRTYWRQRNDLIRAAVSHIQRIQKALTQMNIQLANVLSDVSGVTGQAILKAILAGERDPHKLAALRDPRVKASEEQIARYLEGNWQEDLLFVLKQEQQGYEFCQQQMAECDRQLEQYLQQRDDRTQGASLPKEMRKGRLLRKKGNKPAFALRAELFRITGTDLTQVDGIDVVTAATILSEAGWDMSKWKDEDHFVSWLRLCPDNRISGNKVLGKGRLPTNNRASIALRMAASTLRVSNTYLGAQFRRFRTKLGAPVAIKAMAAKLARLVYRMLRYGMKYVDQGAKFYEAKHRERQIGQLKWKAAKLGFRVVEVAA

SEQ ID NO: 300976 - protein, 376 aa, unidentified
MNQDSTLYVGLDVHKDSITVAYAMGLDEVELFGKIGTTHSEVDRLCRRLQSKARHVHVVYEAGPCGYGLNRLLLDKGFDSMVCAPSLIPKKPGDRVKTDRRDAFKLVRSLRAGDLSAVHVPSVEDEAFRDLARAWSSARDDLKQARQRLKSFLLSHGVQYSGRANWGPAHRRWLSTLSFDSTWQQLAFNEHRRTIEDRLEQCDRLEAALHEAVVSWRFYPVVLALQAMRGIQFTSAVGLISELGDLSRFDHPRQLMAWLGVTPSEHSSGSKRRQGSITKAGNSYARKLLVESAWSYQHPARVSKDMQRRQEGIPKPIVDRAWDAQLRLCGRYRRLVARGKSRQVAIIAVARELAAFIWDIGRMGITLAVSQSERPA

SEQ ID NO: 300977 - protein, 343 aa, unidentified
MAIAIVGIDLGKNSCSVAALDGNGAVVLRRRVSRGKLAGYVGRLPACVVAMEACCGAHHLGRVFEAQGHAVRLMSPEYVQPYVKAQKNDDRDAEAIAEAATRPTMRFVAMKAEAQLDMQTLHRARSRLVNSRTRLINQLRAILLERGITVAKGRRALAVALEPLLEPEGAGLSSRIRMLLADMRREWDALDARIATLDREFVETARRSAPERRLATIPGIGALNATALVAAVGEAEGFAHGRDLAAWLGLAPRQMTTGGKPRLGGITKRGNVYLRTMLIHGARAALPSLSRSDTPLGAWLRGLMARAHVNVAVVALAAKLARIAWAVLRSGADYDRRAGAAAA

SEQ ID NO: 300978 - protein, 351 aa, unidentified
MNKTNWRDGYVKGEKIPMYQLGIDVSKNTLDLCLLREGIKGRIKTRKLKNTADAAKVVAEWLKKQSCELGEVHIIMEATGVYHEPLAYGLHFAGARISLANPHRTREFARGMNILTKNDKVDAWMLACYGSLKEPEAWTPPPESVRYLRALLRRRDALVADSTREKNRLEKSVFTDSPDAVRASIENMLQELSNEIEHLDVLIQEHIKTHPELNQDFRLLTSIKSVGYLLGLNMLAILKSHSFESAEQAAAFLGVVPVERRSGTSVKGKPKLSKIGPPEIRTKLYLAALCGLRFNPVMKQMYTKLCQRGKSKMCAIGALMRKLVHWCYGVLKTQLPFDAEYNQQSYYKTTC

SEQ ID NO: 300979 - protein, 413 aa, unidentified
MEWSRRLLFFVGNDWAEKHHDVELQNESGKVLARAKLPEGVAGITKLHAMIGQHLGDEDEAEVIVGIETERGPWVQALVSAGYQVYPVNPLQVARFRERLGVSGAKSDTGDAHVLADMVRTFREQLRPIAGDSIEAQAIKVVTRAHKTLIWERTRHLLRLRHTLREFFPAALAAFDDLTAVDALELLAAAPDPASAAALSLDTIEAALKRARRRGRVAKAQAIAETLRAEYLGQPQAVAAAYAATVRAQVAILTVLNQQITTMGEQVDAHFSKHPDAKVYLSQPGLGAVLGARVLAEFGDAKQRYTDAKARRNYAGTSPVTRQSGKKKVVLARHVHNDRLLDALGLQAFAALTSSPGARAYYDQIRGRGAGHRAALRQLGNRLVGILHGCLKTGTLYNEAKAWPNPQDQQAAA

SEQ ID NO: 300980 - protein, 369 aa, unidentified
MQTLVAMASVMFQELEEVPMTMVGGLDVHRQQITFDYVDDDGLVHWGQIRPATRKTLRGWLAEHFRDGDADFALEGCTGWRYVSEELAAAGLGVHLGDPAETAALRGRKKRAKTDRADARLLRTLLVEGRFPESWIPPAHVVEVRTLGRLYCTLMDERRAWQQRIHAQVFHQGCPPIRALLTRAGREALAGAELSAAGRQYVDTALRRIDELSAEIDPLRTQLISFARRQPGCRALQRHYGVGWLCAVIIWAEIGDARRFSSSDQLVRFAGLDVTVYSSDAKRAPGHLSRQGCPELRWAAFEAAKSAARRGSPDHGYYHKLAAKHDGHNGKNPTLAVERKILRRCYHTLRELGDAALALPDIRPQEVAA

SEQ ID NO: 300981 - protein, 386 aa, unidentified
MPQSNDLSRCLIPFRQDETLVAVVEMSKTSWLVAGMIPGVARHPLKKLVPDEKALFELLERWRDEAVKAGKIITRITVAYEAGRDGFWLARWLRARGFEVYVVHSSSVAVTREHRRAKTDKLDCEMLKRVFIGWLRGERDHCRMVAIATQTQEGAKRPNRERENLVGECTRIVGRLKAGLARLGIRSFNPKLRNAAERLETLRTPEDVPVPANTLCELRRDMARLRFVKDQIKQIERARVRQLEQAPEQGPQQMVRLLARVLGIGIETADMLVHEILSRNLRDRRAVARYAGLTGSPDESGQKRREKGLSRAGNARVRRGMIQLAWRFLMFQKTSALAQWYRVRTKDAGGAVRKTLIVALARKLLISLWRFVTTGEVPVGVTLRVA

SEQ ID NO: 300982 - protein, 321 aa, unidentified
MEKERVYVGIDVAKASMDVAVHSSDQRWSFTNDDRGIIQAVSCLRELAPGLVVMEATGGIELPLVAAIAAAGLPVVVANPRHVRDFARATGKLAKTDVLDAQVMARFAAAIKPTPRPLPDDQAQEFADVLARRRQVVEMITAERNRLSSIRNKAVRRHIKDHIAWLERELVDTDNDLRRSIKESPVWREKDNLLRSVPGVGPVLSATLLADLPELGTLNRRQIAALVGVAPLNRDSGNFRGKRSVWGGRAKVRAVLYMATLVATRHNAVIRTFYQHLCAAGKEKKVALTACMRKLLTILNAMLRHRTFWCYPNTRIIGPCS

SEQ ID NO: 300983 - protein, 360 aa, unidentified
MRNGAQDTQLTNQENMIYMGIDVHKRHINVAVMSEHVVLGQNHVEIRDVDAYMVRLKKKYPDRRLRAAYEAGFSGFALYHQLESLGIETIVVNAADVPTTDKERTTKSDRADSLKICHALKCGQLRKIWVPPDELSGDRDLVRYRLVLRQHLAKTKTRIKMFLYKQGVQIPPELESSHWTKAFQAWLKEQTMTTASSQTTLMLMLEELQHADQVYKKHLRRINELALTQRYSHNVDLLYTIPGIGRLTAITILTELGPIARFAKADQLASYVGLIPMQHQSGSSDRNMPIQRRAHQELRTLLVQCSWMAIKGSNHFNMVYEHKRKNKTSQVAIIAVARRLLNTIYAVLKKSQPFMESGTN

SEQ ID NO: 300984 - protein, 329 aa, unidentified
MKKMHIIGVDISRNTIDFHCYGHSVTPDPVANNLKGFGQFQKWIRQQVSKTKEEVMIVMEHTGIYTYNIERFLHAKGWSYVKGPALDIKRSVGIQRGKSDRTDARMISKYGWMNKESLAPMEPVNDNRVNLQQLMSYREKLVTDRTAHQVRIKELQGQMGNKLCDQIRRSTQRMIKLLTIEIEKMEEAVKACLAKEASLQKNYELLITVSGIGFVTAVSLLITTENFTRFDNHRKFACYCGVAPFTHRSGTSIRGKTRISQLANKPIKSLLTMSALSAVRNDTELKAKYEQKCKEGKAKMSVLNIIRAKLIERVFSVINRQTPYLKAAA

SEQ ID NO: 300985 - protein, 348 aa, unidentified
MRQETKVYVGLDVHKEFCQACVMNKSGLVISNERFLSNQDALDKFLDRFDKAKFVLESTGIWEFIYEGIEKRGFEVVLAHPLKVRAISEAKVKTDKVDAETLAHLLRADLIPRSHVPPRDIRNLRQLVRHRAYLVRQCTSIKNRIHAELLRRGIRRPDDLKKTFTFKHVGWMRSLGILTITSSLNCLEGIQEQIKEVESFLLVEYNSRRDAQLIATIPGIGFYGALLILAEIDDVRRFPGPEKLCAYAGLVPTVHQSASRSYNGSITKNGSPHLRWILIEAVHVHTNYCPGSKLSKFHAKVAQRRGKQRATVATARKLLHTIYWMLLTKEKYHCQGFNLVEKAAPMNA

SEQ ID NO: 300986 - protein, 346 aa, unidentified
MKILALDLGKYKTVGCAYESESGAHQFKRGLTTAAGLAGMVQAVKPDRVVIEICSIAGWVCDLMWGLGIEVQVANTSDDAWRWRKVKQKDDRRDALKAARLSAVNQLREVYIPAPEVRQWRALITYRQQVIRRRTKIKNHIRDLLLREGQLLGSGSSCWRQVGIAALAAQARPFSECGPAELWRGELQLELEQLKEIQRQVATVTAQLDKLGAGDARVQLLRTVPGVGARLAEAIVALLDQPQRFRKASQVSGYIGMVPKALDSGETERRGHITRQGSRLVRSLLVEVAWAGLRHNAWVRQTYQRLSGGKKARKKIAIVAVGRKLLVKCWAMLRDNRPWDWQPQIT

SEQ ID NO: 300987 - protein, 395 aa, unidentified
MLDISKSKSVAAILNQDGSMHTSPFEFHHTQPELDALIKYILNSKQSATILMENTGHYHYPVLKAFQEAGLPVCMVNAYQIKKFGDMDLRKAKTDKKDAVRIARYALEKSYSLVPYTSMEQKYEDLRFLARQYNQRMLTLKTNKVFLLNLLDETMPGITNILPLTTRTPETSLSVLFINRFKSYDRIKKMGKSRFLDAFEKIARKSRNRQTKTYGLAIYEAALRNITTRGENEYTLAAQDQCLELVCESQKAADSIILKMQTLAETLPEYAVLRSMAGVGDRLGPLILAEIGDIRRFHSGKALNAYAGNDAPPYQSGTFESHNRHISKRGNAALRKYCFEVMQALKLTRPQDDPVYLFLLKKEQEGKPYNVAKMAGVNKFLRIYYARAMETLKQQ

SEQ ID NO: 300988 - protein, 363 aa, unidentified
MAYPTSIGLDVHARSIAAAAFIPETGEVVQRSFPYDPSSIAEWAASLPQPAKCVYESGPTGFDLQRRLEGLGVECCVGAVTKMLRPSGERVKTDKRDALFLARMLAVGNVVEVATPSPEMEAARDLARAREDCRHDLMRARNLLSKFLLRKGIVYEAGRSAWTKAHASWLSSLEFKDPCEALVFEEYLEGIRGLERRRERLDAAIERRASEEDVSAKVAALSCLRGISTLTAFSVAVEVGDFSRFPTARAFMSYLGLVPSESSSGEAVSRGRITKTGNAHVRTTLIEAAWHHRRAFNPLSTASMMRSSGVPARVAEAAAQANRRLKDRSAHLLQRKKPSNIVNVAIARELAGFIWALALMASG

SEQ ID NO: 300989 - protein, 351 aa, unidentified
MLIIGVDYHPSFQQISFLDQETGECGDRQLNHSEGEVERFYRELKQRGANVRVGMEATGHSRWFERLLAELGFELWIGDPAEIQRQRGRKQKTDREDGRLLLRLLLENRFPRIWTPNPENRDLRQLLWHRHRLVQMRTRIMNQLQAVAMNEGYRWKKKLFSEKGRALLEKLPLAPWASRRRKELLELLDQLDPKIAELTAAVEREAQQRPEAVRLMTHPGVGPITGLAYVLVIGTPDRFPCGKKIGSYTGLIPSEDSSAGHQRLGHITKQGNALLRYLLGEAAQAAARCNPDWRRRYVHLMMRRQKRIAKVAMARKLAVRLYWMWRNNWQYAQLVEFGSNAGKLGTVHGVK

SEQ ID NO: 300990 - protein, 311 aa, unidentified
MNSKGTWIGVDVCKRFLDVHASGLAAFRAANTPEGYGELLQRLAGVRVRGVVLEATGGYERGALAALQAGNLDAAVVNPARVRAFAEGTHQLAKTDRIDAKVLASYGAYMQPAPAALPSSARAELKELIAYRAQIAQEIVARTAQLRLYTSDHVRTRAEAAIAALRSERIRSEGDIKALVAAHQELARPFKLLVSVPGIGLVVGAILIAELPELGGLSRRQIAALVGLAPFPRDSGERRGYRAIRGGRADVRCALFNAARVAIRHNPPIKAFYERLRARGKNGKVAIVAAMRKLLTILNVMLKNNRTWQPA

SEQ ID NO: 300991 - protein, 281 aa, unidentified
MKRKLVVGIDVGKERYAVSLFDGERFRDFSVPSSPQELLRRVTPYLPGKTRRVLFVMEATGVYHLKLALFLKERGYPVSVVNPFVVKKYAEMLQKKAKTDPVDARILAQFGFFASPPPFVPKDKKAYLLEEIQKTIEDYQKRRTEILNHLEALKHHPFPHPRLQKLYEEELQRIEETLKTLEKEAEDLALQYAPRAYELLLSIPGVGKRLACAILGILSPLTRFARSKELASFLGLTPQIDQSGKRKERAWMKKGESLPAETPLSFRPQCFPVQRAVQGAL

SEQ ID NO: 300992 - protein, 315 aa, unidentified
MTITLEEYAGIDVSKDKLDIAVLGQKTVTQATNTKRGIARLIRQMQKLDPKLIVVEATGGYEEALVLGLHEAGLPVALVSPQRVRQYARASGLLAKTDSLDARNLAEYGKNIQPRLFTAKSEAGRRLSGLVGRRKQLGEMHKAEKNRLRMANVEIKASIQAVITCLEGEVKRMDDEMREFMKEHADFQEQEKLLRSAKSIGPVTAATLLADLPELGKLGRKEIAALVGVAPMNHDSGKKRGYRKTKGGRPEVRSVLYMSALSAIRYNPLIKAQYDQLVKRGKEKKVAITACMRKMLTILNAMMRDQQPFREFALA

SEQ ID NO: 300993 - protein, 410 aa, unidentified
MQVLYPHCAGLDVHKDTVVACVRHMIEGTVKREVRTFDTTTKGLLALADWLASEGCTHVAMEATGVYWKPVWHILGDGDFELVLANAKHVKNVPGRKTDINDATWLADLLAHGLIRGSFVPGEETQVLRSLLRTRKQLVRERSSHIQRLQKTLEDANIKLDSEISDIIGLTGRRMLEALVAGETDPTKLAALAHPRVKAPPEQLREALRGKVMAHHRFLLRLHLQQIDALDAALGQIDREVEGRIAPFRIAVELLTTIPGISELSARIIAAEIGTDMSRFPTAAHLISWAGLCPRNDESAGKRRSTRMRKGAPWLKTTLIQCSCAAVRKKASYFQTQFHRIRSRRGGKKAIGAVAASILTAVYHMLKDGTCYHDLGPDHFDRRAKTTQTKRLITRLQNLGYAVQITPLPA

SEQ ID NO: 300994 - protein, 349 aa, unidentified
MAVTIVEEARPITGGVDTHADTHVAAALDSVGGLLGVREFPATAAGYSGLLGWLGGFGTVCLAGIEGTGSYGAGLARHVTAAGIRVVEVDRSDRQDRRRQGKSDPLDAVSAARAAQSGRARGAPKGRDGAVEAIRALMVARRSAAGERTRTIGQARALILTGPDDLRARFTRHTPAALAAALASLRPRPGDVPGYAVRVALRELGRRAQFPGGQLGRLDDLIVPLVTARAPGLLALYGIGPRTAALLLIAAGDHPGRLRSEAAWAHLCGAAPIPASSGKVTRHRLNPGGDRQANHALWRIVFTRLGSDPATRAYAERRTAEGKSKAEIIRCLKRYVARQVYPHLRPAGG

SEQ ID NO: 300995 - protein, 454 aa, unidentified
MAKRPRVLRSKRKIIGDLVVVNPDAAGIDAGSEEHWVSVPEDRSDQPVRSFGTFTADLQALADWLVECRITTVAIEATGVYWIPLFEILEERGLNPKLVDSRSIGSRKKKSDVVDCQWIRQLDTYGLLNGAFRPGADMLPLRALMRQRDMLIRYAADHIRHIQKALDLMNVKLHLAVSDTVGVTGLRIIHAILSGKRDPMEMAALREPSCKSSEETFVKALTGNYRAEHLFALKQAVDLFTTYQSKIKECDAQIEAALSKFDKTPATASLAPKPAKRRRKNQPHFDGRTLLFEITGIDLTSVPSLEASTILTIISETGTDMSAWYNGKHFAAWLNLSPNNRITGGKRIYKKMPVIRPNRAAQAFRIAAQTLERAQCALGAFFRRVRSRLGRSGAIKATAHKLALIFYSMLKNKTQYREAGVDYYEARYRERLVNSLKKKAAEFGFNLTPIQEVH

SEQ ID NO: 300996 - protein, 344 aa, unidentified
MEITTIGLDLAKNVFQVHAVNGASEVVVKKTLRRVQMRRFFEQLDPCLVGIEACGTSHYWAREITRLGHEVRLMPPAYVKPYVKRGKSDASDAEAICEAVTRPTMRYVAIKSPEQQAALALHRTRDLFVKQRTQLVNMIRGLLAEFGIEIPRGIGQALMLAKRIAADDVPNIPPLASKVIAGLAGQVLDLQARLREIELELLAWLRSNDIAKRLATIPGIGTVCATALAASVTDPHQFRSGRQFAAWLGLTPLQHSSGGKERLGRISKMGDKYLRRLLVVGMTSLIRRAKYKPEAVDPWLAGLLSRKPARLVTVALANKAARVVWAIMVRGGVYRMPAGVATPL

SEQ ID NO: 300997 - protein, 356 aa, unidentified
MNVYTGTHRYYCGIDLHARFMYICILDNEGNVVYHKNHRCSPEEFLNVIAPFRNGLAVGVECIFCWYWLADLCDEEGIDFILGHALYMKAIHGVKTKNDKIDSLKIARLLRGGNFPVAYVYPPQMRATRDLMRRRNHFVRKRAELFGHIQNTTSQYNLEPLGALSRPHHRRDKEIVGHFPDPVVQLIIQTDLELIDHYDPIIKRLDKQILSLAKEHDPTSLHLLKSIKGVGDVLALTMLYEIHEISRFPSRGEFCSYARLVKGQKSSNGKNYGTGGGRIGNAHLRWAFSEASLLYLRGNTQAEKYYNRLISRHGKGKALTIIAKRLGVAVYYMLKRREPFNEHKFLTNSIMSKPKT

SEQ ID NO: 300998 - protein, 408 aa, unidentified
METIHPICCGLDVHQASVTTCLRRATAENTVSVEKREFPTTVQGLTQMCQWLTEAGCPIAGMESTGVYWKPVYHILSATMEVWVVNAREVKQRRGKKTDPADAKWIAELLAYGLIEPSFIPPPQIAALRDVIRMRTALVQTRTQAKNRVLAVLEDTNVKLASVVSDPFGVSGRKMMEALIGGKQDPKVLSQLAKGVLRRKIPQLEAALEGSFTVHHALLVRLNLEMIDHIHAQIAKLDEQIERMIEPLEKEIERLESIPGVHQTAARVILSEIGGDMSRFGSASRLASWAGVCPGNHESAGKRKSGKTRKGNRYLRRVLAECAWAAKKTDSFLGRTFRRLEARIGGKKAAVAVGHKILAIVYHLVNEETMYDDQRYNRPNPREEARQVKRAMRTLERLGYQVQLSPVA

SEQ ID NO: 300999 - protein, 408 aa, unidentified
MDVIYKVCCGIDVHKNKLVACLKIKGKKNVIKEFSGQTEDIKAMANWLKENECEKIAMESTASYWKPLVNIFEMTKLEYTIINAYEFKTLPGRKTDVKDSEWIADLLQHGLLKDSYIPSREQRELREATRYRKSLTQERSRGLNRLQKMLEGANIKITTVLSDVMGVTSRNLIEYVLEHDEEVTKDKAKELAGSKSVYGKLDDIVKAMEGIITPFQKTMMKEVIKHIDELTTRIIEMDKIIDNYMIEYEENKKKLEKMPGIGKRSSEIILAEIGRDMSRFPTAGHISSWAGLCPGNNESAGKRRSGKTRSGNKILKSILVECAGSAIKRKNTFFHAQYERLVIKRGKKRAKVAVAHSMLIAIYYMIKENKEYEELGGDFYNKFNKEKKANSYMKKLKELGYDVQIKAS

SEQ ID NO: 301000 - protein, 341 aa, unidentified
MKVSTLGIDLAKNVFQLHGVDHEGHTVLRKKLTRAKFVQFVIQLEPCLIGMEACSSSHHFARLFSRHGHEVKLIPPQYVKPYVKTNKTDAADAEAICEAVTRPNMRFVQIKTEEQQAVLALHTERGILIRERIACSNSLRATLAEFGITMATGQSHLICELPAILEDADNGLSPFVRASILRQAKHIRALEEQIKEVEEALASWYKTQAACQRLAKIPGVGMLTATYVVAAVGNARQFSTAKQFASWLGLTPKEHSSGGKQQLGGISKRGDGYFRYLLVHGARALTAWVNRKGSVEENAWLQGLLERKHYNVAVVAMAAKTARIMWSMLAHNTEYQPRQPA

SEQ ID NO: 301001 - protein, 347 aa, unidentified
MRFYNTQHQFYCGIDLHARSMYVCIVSHDGELLVHRNMKAAPEPFLKAIAPYRDGLVVAVECIFTWYWLADLCAQEHIPFVLGHALYMKAIHGGKAKNDKIDSQKIATLLRGGMVPKAYVYPAEMRATRDLLRRRTHLMRKRAELLAHVQNTNSQYNLPEIGKKIAYKANREGVAERFDDPAVQKTIAVDLALITYYDQMLSDLELFILKTAKQHDAQTLYLLQTVPGIGKILSLVLLYEIHQIDRFPRVQDFASYCRLVKCAKESAGKRLGTSGNKIGNAHLKWAFSEAATLFLRGNEAGQKYLARLEKKHDKGKALSILAHKLARTVYCMLKRKTAFDLEQFLRT

SEQ ID NO: 301002 - protein, 327 aa, unidentified
MTHIGIDISKATFVAAYPQKNGYRTLTFPNTPHGCLKFIRTLESGQHHCVMEATGNYGFLLLYLLHKADITVSMENPKKIKNFARTMMSVTKTDEADARLIALYGERMQPLPFRMPADSIMMLRQKRAVLRMMKKQRNAGSNLMQSMQVLPKQDPMARSSLEKVISALDRQIRRMEEDLAQTTQQEFDRQMALLTSIKGIGTAIASALIIATGGFTYFDNAKQVSRYLGLCPTIQQSGTSVHVRGNINRNGDEQLRAEMYIASWSASRHNAACKECYNRLRQRGKPKQLALIAVANKLIRQAFSVVKKGTPYQDGFVSDKPSTILTT

SEQ ID NO: 301003 - protein, 350 aa, unidentified
MIIIGCDYHPGFQQIAFVDTDTGEFKERRVEQREEAEKFYRDLGAQGAKVRVGMEASGHARWFERLLSELQFELWIGDAAEIRMKRVRKQKTDRQDAQLILRLLLEDRFPRIWVPSWENRDLRQLLWHRHRMVQARTRIMNQLQAVALNEGLRCKKRLWRDAGREQLESFALTPWASRRRRDLLELLDRLTPTIAELTQAIEQEVEKCPEAQRLQTHPGVGALTALAFVLIIGRADRFQCGKQIASYLGLVPLEESSGQRRRLGHITKQGNSLLRFLLVEAAQVTVRSDQEWRSKYFHLAMRRGRKIAKVAMARRLAVRMYWMWRKGWDYEQLKKFGSHAGQPGNRDGVR

SEQ ID NO: 301004 - protein, 415 aa, unidentified
MEKVYDICCGIDVHKKIMVACLKKGSKQEIRQTGATTRELLELADWLKASNCQMVAMESTGSYWKPLYNILEMNEIPAMVVNAQHMKAVPGRKTDVTDSEWIADLARHGLLRASYIPGKDQRELRELVRYRKSLVEDRTRELNRLQKMLEGANIKLSGTIKDINGMSARNILNYLVTGAVIDEAKFDEMYAQNKIAHNLKAPKAQIIDDLNGVMSPLQRRVMKELLAHLDELNEHIKNLNDEIDNFMKPEEQAAATKIQDVPGIGTASAQAIISVIGTDMSRFPTDRHISSWAGVCPGNNESAQKRSSGRTRKGNALLRSTLTVCAHSAVKVKSSYFYAQYMRICAHRGKKRAILAVAHSILIAIYHILKENVPYQDLGADYYNRFNRESKINAYLKKLKALGWEAPTAPATLPA

SEQ ID NO: 301005 - protein, 341 aa, unidentified
MQHELRTVAIDLAKKVFHLVGTDTTGKILWRKRLTRHAFMPFIAQLPPVLIGIEACGGAHYWARRFREHGHEVKLMAPQFVKPFVKSNKNDMRDTEAIAEAVTRPTMHFVPPKEVDQQDMQCLHRVRERLIGARTALINEVHGLMHEYGIVLPKGVAKFRQAVVDKLESEKEKLTALSQEMFGKLVEEFGALEKQLAYYQEKLEALATTHPECQRLMTIPGIGPITATALVAAVGDVGVFKNGRQFAAWLGLVPRQHSTGGQTRLLGISKRGDSYVRKLLIHGARATLRWVKLKTDDRSRWMRGLLARRGWNRTAVAVANKNARIVWALLSRGGVYGDNVS

SEQ ID NO: 301006 - protein, 371 aa, unidentified
MNNIAYVALDVHKNTIVAGMSLKAGESIIMGEYANSSSGLKKLLSRLNKLKNDFAEIRICYEAGPCGYEVKRILEKNGYHCEVIAPSLIPQRSGDRIKTDKRDALKLARLYRAGELTAIAVPTEFQESVRDLVRCREDISRALLAARQKTNHFLIRHGHFYEGRNWTKGYFAWMKTIGFNNKYLKETLNQYITHIEHLYFQLEDLDREIAKIAESDDYKMKVDALKAYRGISTLSAMVLIVEVVSFNRFAKARELMSYLGLVPSEYSSGGTMKKGALTKCGNKRVRRILVEAAWHNRHEAKVTYSMKANLKKIDAELRNPPLKALKRLNKRYYHLIFAGKPKSKVAAAVARELVGFIWHSMIIVESRLCTN

SEQ ID NO: 301007 - protein, 484 aa, unidentified
MEAAMPFHKPRQQRVAKSRRRAVIESLHITHPHAAGIDIHAAEHWVCVPADHVPDAGHAPDLSGSPHGSGHGSSHVPRHVRKFGACTADLEMLADWLHGCGVTTVAMESTGVYWIPLFELLERRGFEVFLVDPRQTKHVAGRPKSDVLDCQWIQRLHSYGLLAASFRPADQVVVLRGYLRQRQMLIAYAGQHIQHMQKALEEMNIKLAEVVSDITGKTGLAIVKDILRGQREPRQLAKNRNEHCKSTEAEIARALKGNWRDEHLFALRQALELYEFYLGQLRACDRRIEAHLATFEDKSQGRTLAAKRRRTRTTNEPAFDVRGLLHRMSGVDLTAIEGIDERTALVVLSEIGLDMSKWPTEKNFSSWLGLCPQHQSSAGKIKSRHIRRGSNRATKALRMAGQGCAHAHNALGAFYRRIRTRSGGPKAVVATAHKIAQRVYRLLKYGQEYVRQEMQAYEEAYKIRLVHGLARKARELGYRLEPAT

SEQ ID NO: 301008 - protein, 424 aa, unidentified
MNFKMQNKQNQLIERITDQHLVVGVDIAQHVHVARAVNYRGIVIGKPLSFENNEEGFTRLLNWIKELKHMKNLDTTIVGMEPTGHYWINLSKWLVKQNVDVVTVNPHHVKRNKENRDNTQSKSDKKDALVIADMVKNGYYAFVRSTSESFEKLRVLMANRDVIVKRLVSSINQINRWVDVVFPELRQVFKDVSCKGAIATLRLFPTPAEICSLQPQDIVTGWKSCMKRHSGHKKARSLITLAKRSIGTKQALDAYKLHLEQLLEEYDLASSQLERVTQEVTNVLEQIPFVKQILAIKGISEISLAGILGEAGDLSGFAHGNALLRHAGLHLAEASSGKWKGQIVLSKRGRSRLRRYLFLATMSLVMNNPEFKALHSNNVKVKKIKKMKSIMKLCGKLARVLVGIARNGSVYKPEMVFPLEQLAA

SEQ ID NO: 301009 - protein, 348 aa, unidentified
MVVLGVDAHKRSHTVVATDELGRKLAEKTVASTSEGHLEALEWATRWPERSWAIEDCRHVTRRLESDLLVAGEAVVRVPTRLMAGARRAGRERGKSDPIDALAVARAALREPDLPVARLDGEARELRLLVDHRDDLVAERTRIQSRLRWHLHELFPDLQIPPKALRRHHVLNSLEAQLAGIEGTVARIARELVVRCRELTIQANELEREIGRMVKRLAPSLLAMDGCGVLSAAKMVGEVAGADRFRSKAAFARWNGTAPIPVWSGSPGPQRLNRGANRQVNAALHRIAITQWRGVGLQGRAYVERRMHSGNTKTEALRLLRRWLSDEVLRRLIADLPATWSDNLRAVA

SEQ ID NO: 301010 - protein, 356 aa, unidentified
MTNLSAPPSGLTIGLDIGDRYSQICVLDAAGQVDEESRVATKPAALQRSLGSYAPSRVAIEVGTHSPWVSRLLAECGHEVVIANPRKLRGIYENDSKDDRVDAQWLARVARLDPQLLSPIRHRGVQAQADLAQIRARDALVRARTQQVNHVRGAVKAFGTRVASCSAASSRKRAAELPESLRVSLAPVLQTITWLTTQIQEYDRRIEAMQDRYPETQLLRQVCGVGPLTSMAFVLTIEDPHRFPRSRILGSYLGLRPRRDKSGAQDPQLRITKAGDTMLRRLLVSSAHYVLGPFGPDSDLRRWGLALAARGGKNAKKRAVVAVARKLAVLLHRLWITAEVYEPLRQAAARGEVTPA

SEQ ID NO: 301011 - protein, 442 aa, unidentified
MDTDCFSLYVGIDWGDAQHQVCMLSDPNHPKELQVKHGGRALADLAMALAHDVWGQNHRVAVAIEVDSGPVVESLLLQGFAVYSINPRQLDRLRDRYFPSGAKDDRRDALVLAQSLRTDRQLFKRVEVDDPDTITLRHVTRARDELQRSLQRTTNRLRNHLAQYFPALLQLSPDASDPLVWALIERAPDPEVAAKLSIVAIAKIVKDLRIRRVSPQQIRDVLREPPVQLLPGARQALAQRALTLIPQIRLFHEQFVEHTRAMERQIADRCQPVQEPVSEPAGEPALEAPAPEQSSKPSDAPTSPAPRLSDAAILRSMVGIGAYVLAVLLTEATRAIARRDLAALRAQTGIAPVTRQSGHSLHVSMRRACSWRLQKAAYCWGMAAIQNDPLSKAHYQRLRASGHTHARALRGVVDRLLDVLITMLRDGTLYDPERRRELQNAA

SEQ ID NO: 301012 - protein, 346 aa, unidentified
MKRTTIGLDLAKRIFQVHSVEPDSGEIFRQTLKCSQVLRYFANRAGSVVAMEACGSAQYWARELVKLGHEVRLISAQFVRPIVKTNKTDAADAEAIWEAAQRPGMRFVALKSEEQQAVLGLHRIREQRVGMRSALVNQVHGLMAEFGIALPRGWREMLRQAGALLAEECAVPELLRGALREQIEQIRALSEQIKALERQISSWQRRAEDCQRIGEIPGVGLLTATATVAMIGDARSFRSGREFAAFVGLVPRQSGTGGKIRLLGISKRGDRYLRTLLIHGARAVLRWQSRPGRELDPWLKSLLSRRARNVVIVALANKMARMIWALLAHGRTYQRGYGGPIEATVV

SEQ ID NO: 301013 - protein, 345 aa, unidentified
MYRTKVGVDLAKDVIQVCIYRNKKVQSNIEMTPSEFLCWLVNAKPVTIIFEACGTSNYWKQKATEAGHDARLISAKLVAVVRQNQKTDKNDALAIVQAALLPDVTFIGGKTVEQQQLQSIKRLKELAVKHQGASQKQLVSLLLELNIRISNRRGGIICAIEGVLEDATNGLSAECRAAIYTAKEHLKSLIDAVHRYDDCLEKSVVAHADCKKLLKLEGVGTMNAINLYLALGCAELGVFSKGKDASACIGLTPIQHSSGGVVKLGSIGKHCKNSMLRSQLICGAMAAVHQAVIREAKTKKDVWLKGLVERRGKKCAAVALANKTVRTAFAMLTQGTEYKAELLVA

SEQ ID NO: 301014 - protein, 312 aa, unidentified
MDAIVVGIDVSKDRLDVALRPTGETFAVTRDAEGLEALIARLTPLAPAAVALEATGGYETVVAASLAAAGLAAVVVNPAQVRAFAQALGRRAKTDPIDAGVIAHFVEATKPAIRPLPDEKTRLLADLVARRRQIVAMLVAERQRQKRLTEKRLQKSIVRLIAALQKELSMLETDLDQAVRGSPAWREKEDLLASVPGVGKIIARTLLAELPELGSLDRRKVAALVGLAPWTRQSGQWKGKSFIGGGRADVRASLFLGAMVAARHNPQLKTFRDRLVQAGKPKLVALVATARKLLTILNAILRDRKPWRIQTA

SEQ ID NO: 301015 - protein, 342 aa, unidentified
MQIRSVGIDLGKTTFHLVALGSSGKVLVKKKFTQKQLLVFTANMQTSLIGLEACAGAHFLGKALREQGHDVRLIPAQFVKPFVKSNKNDFVDAEAIAEAVERKNMRFVPIKTDDQLDLQAIHRVRDRLVSRRTAVINQIRAFLLERGMVFAEKPAKLKAAMADVLENADNALTPMVRNLIGGLWSEWKLVEQQIEELTDTLEQISATDPGCCRIRKIPGIGPIVATAIVAAIGNGAAFRKGRDFAAWLGLVPRQYSTGGKAKLLGISKRGNTYLRKVLIHGARAAAMRIKRDRFAIGAWMDALEARAPRNVLVVAMANKLARIAWAVLSSGNEYRPVATTPA

SEQ ID NO: 301016 - protein, 412 aa, unidentified
MEVLHSRCCGIDIHKRSITVCVLIREAGRKEQEHLREFGTTTSAILNCADWLRSLGVTHVAMESTGVYWRPVWNLLEGQFDLLLANATHMRNVPGRKTDIKDSEWIAQLLQHGLLKPSFVPNTVLRDLRELSRDRTSLVAERSRLKNRIQKILEEANIKLGSVASDVLGKSGRAMLTAMVEGQENPQHLADLALGQLRLKIPQLVEALRGRVRGVHRFRLKQQLERVDFIDAQIAQLEAEIEKQNAPFDEAVSLLAEIPGFDRTTAWSVIAEIGIDMNQFPSADHLASWAGVCPGNNESGGKRLSGKTRKGSRWLRQKLCQSAWCASRCKNSYFTAFFQRIAAHRGRKRAIVAVSHSLLVVCYYLLKRRCHFQDLGVNYFDQLNQEKLTRYFVKRLTRLGHRVILEPCSAAA

SEQ ID NO: 301017 - protein, 332 aa, unidentified
MMAQNERVVVGIDVAKDKVDACIRALSHRQTFPSGAEGRRQLIAWLRKHKVGQAVMEASGGYERDWAKALREAGIAVRIVDPKRVRSFARSAGRLAKNDAIDAEMIAWFAETFDEAPGQAYDAAREKLAQIVNARQGLLELQTELQNRREHSVPEVVQKVQARLLKKIAAELATLEAAITALIKATAHFAELAEIIESVPGLGGTTSAGLIAAMPELGQVNDKIAAALLGTAPYDDDSGKRRGERHIKGGRRRIRNLFYMACLGAATRHNPVLKAFYGRLIAKGKEPKVALVACMRKLIAILNTMIARRQKWDVTRYKVSDHARPLPSACPA

SEQ ID NO: 301018 - protein, 313 aa, unidentified
MSEIKVVVGIDVAKASVEVVTLGGTGPAGEFGNDPEGHTELVAQVPAGALVVMEATGGYEAPLACALQAAGLAVAVVNPKRARDFAKGVGSGAKTDRIDARMLAEFGQMLRHKPDFQRYLKPPVDEQVQDLAAWVTRRRQLLSMLLSERQRMEFSRPKVRPSIEAMIESIKRQLDQIDRQMQTHVAHHHEELDRLLRSTRGIGPVASATLIAGLPELGRLSGTEISALVGVAPMARDSGQKKGRRWIQAGRFEVRRVLYMATLTAIRSNPVIRAFYLRLVAAGKVKKVAIVACMHKLLRILNAMVRDHQPFQA

SEQ ID NO: 301019 - protein, 348 aa, unidentified
MLADELDFVIGVDTHRDEHALALVACPSGARVQERLIGADERGYAAALAFAVERAAGRRAWAIEGTGSYGKGLARYLTQRDERVHEVERPKRQGGRARAKSDRVDALRAARSLIAAEKPALPRAAGLRESLRVLLQVRTSAVAARRVALNQLRALLVTCPEPLRAELRSLTRARLLRRCRELEPERTDDPELRSTLQALRLLAARVESLTAETRELEQELRAEAEQIAPALLAERGIGPIGAAQALVSWSHKGRFRSEAAFARLAGAPPIPASSGKTVRHRLDRGGDRKLNNVLHQIVITRRKHDPRTIAYIERRRREGKSEREAIRSLKRHLARHLFRLLETTATPT

SEQ ID NO: 301020 - protein, 349 aa, unidentified
MRFYTTEHRFYCGVDLHARTLAVCILDAQGQVAFQGQLPARPDDFLRAIAPYREGLAVACECMFAWYWLADLCAEQGIPFVLGHALYMKAIHGGKAKNDRIDAAKIARLLRGGTLPQAYVYPAGMRATRDLLRRRTFLVRRRAELLAHLVNTNSQYNLPPLAQKLCYAANRAALDLPARFADPSVRKSVEADLALIDAFDAQVRALELYLTRAAKVDDPRAYQRLRSIPGVGPVLALIFLYEVHDARRFPEVGHFLSYARLVRCAHESAGRKKGSGGHKVGNAHLKWACGEAACLLVRSSEQAKRWLARREKRHGKAKALGALATRLGRAVYHLLRKGEAFDPRRFFAS

SEQ ID NO: 301021 - protein, 430 aa, unidentified
MTFAGLDLHKKEVEAAVLSEDGRILHRSRFPATRVALEAFAGTHLSQDSTIVAVEATTNTWPVAAILQPLVHKVVVSNPLRTKAIACAKIKTDKVDALALAQLVRTGYLPEVWIPDEETRLMRRRSTERAMLSADRTRIKNRIHSVLHQRLIEAPSSDLFSRKNLHWLKQLPLDPFGRDSLDRHLRQLDRVEQELAALTAQIALHAHQTPAVKLLMTLPGVDFTVAETILAALGDLSRFATPDKAASYLGLVPSTRQSGDHCYHGPITKQGARHARWLLVQAAQHAALHPGPIGAFFRRIAKKKNRNVAVVAAAHKLVLLAWHMLKNNEPYRYAQPKTLQAKLSRLRILATKQKRKGGIAKGQPRPLQYGKGRTQAVPGLDDLYKTEGLPPLSKGLKPGEQAMLAQQGMAAFASAVRVPRRVPRGAKPEA

SEQ ID NO: 301022 - protein, 339 aa, unidentified
MKYYSGLDVSLKETFISIVDEKGKIVKEEVVTSESSVIAKFLLSQSKEYESIGIESGQLSISMCKGLRGFGLPVICVDARHMAAALSARINKNDKNDARGIAQMMRAGLYKEVLVKSDESCQIKIALGSRRQLKRSREQIAGTIRGLLKIHGIKVSQSSSSVSFSLKVQEIINNLDEISKNSIELLVNSLEAIEESMRKLNKIILEQGKKDEDCKLLTTVPGVGIIVAMTYKAAIDNPYRFETSYAVGAYLGLSPRQYASGEIDRHGSISKMGPVECRNMLYEAAQVLLTICKRTFKLRSWGLKLLKKKGTKKAIIAVARKLSVIMHRMLVSKTEFCCK

SEQ ID NO: 301023 - protein, 326 aa, unidentified
MNQVKMYIGIDVAKEHLDVAPFDNQPARVPNNATGIKQLIKRVKATGKTAFLCCEATGGYEQTLLDMACDAGVDIARVNSARVRYFAKSEGHFAKNDKLDAAVITRFAEQKKPAAHQRPTPFITRLQNLLDRRYQLVDFQTQDTNRLHQTSDKESRGFITSTLKHIKEQLAEVDGLIRGLIASDPGQAARAKRLLEVCGIGEVTAAALLGYAPELGRYDEQQITSLGGLAPWADDSGDHRGKRKICGGRAKVRRALYMAAVVAAHRNHVLASFYQGLLKRGKEKKLALTAVMRKLLRLANRLLRDENFQLQTKAKTAKIKPAPASE

SEQ ID NO: 301024 - protein, 426 aa, unidentified
MRVMYERVAGIDVHKDMIKVGIRGPGHRAWTRKSEVLEYRTFYGVLLTMAADLRKRGVTHVVMEASGVYTEPVYYALAGQGFEQVAVINPAHAKALKGHKTDAKDALRLAELFECGLLRGSYIPSQELKDLRDLTRYRTKTVQARTSEIQRLAKALESAGIKLDSVVSELTGKSARLMIEGLIDGERRGQVLADLAIGRMRTAGKLADLSAALTGRFTDHHAALCRLHLDRITLFNAAVGGLEAKIAVRAAPYRRELDLLKSVDGFGDTVAHAWLAEIGPAPHEYFDSHEKLASWVTLCPGNHMSAGKRSHGRTGNAGTYIKPMLVQAAWSAIKTPGRLQARYHRLVRRLGGPKNPAAVKKAILAIAHTLLKIAYQVLKSGKPYEDPGADFYSRRESPEQRRAYLLRQLEKLSPGCTITITPAEAA

SEQ ID NO: 301025 - protein, 313 aa, unidentified
MDRIVGIDVSKARPDAYCLERQRRLAVGNDAAGIEQLAAWLAPGSLVVMEASGGYERLAHRLLTARGIKAAVVNPARVRHFAKASGVLAKTDRLDAAVIARYGASAHPAPTPVRDGRREAVAELLGYRRQLLGEITARSQQLGHLRTASLIERAKAALERLRRDKAELDALLRRTIAGDPELEATAALLGGTPGVGPVLIATLLAELPELGTLGRRKIASLAGVAPVANDSGQMRGRRVIQGGRSAVRQALYMAVLSASRGRSRFATAYRALLAKGKPAKLALAATMRKLLVTLNAIARSRTPWREERLPAAA

SEQ ID NO: 301026 - protein, 351 aa, unidentified
MNIIRCDLHTRFQQIAMLDTETGEIVERRVEHGNGEAQQFYAALAAPARVGIEATGYARWFERMLREQGHELWIGDAGAIRAARVRPQKTDARDARLLLALLVEDRFPKIWVSSPAERDVWQLLRHRDKLVRFRTSVRNQLHALAMGEGLCRKKKLWSKRGRQELQSLPLGAWASRRRAELLEMLDRLDGSVEELDQAVAEQAESCPAAVRLMQQPGVGPVTGLALALAVGPVERFRNSRKLVSYLGLNPRESSSGGKQRLGSISKQGNRLVRWLLVEAAQTASRKDPELRRVYQRLVHRRGRAVAKVAIARKLAVRLYWQLRHAGAQPSPPTRTQGSPCSPVVEVTRPTP

SEQ ID NO: 301027 - protein, 334 aa, unidentified
MKQVTQVGVDVDSEELVCAMQRAGQRQPLARFANTVAGHKKFIRWATKGGHPARVGLEATGIYSLQFALALHHAKNVEVMVVNPRAIKDFVRSCMQRAKTDAVDAGGILDYLERMPFVAWQPPAPEVLELQAINRRIVQLNTELAREKNRRHASEFAGASADAIAHDIEVNIHHLERRIERMHDSGLKLVRGVPALATKLAHLVSTKGIAEASAMRLLGELLVLPDDLAAPQWVAHAGLDPRPYDSGTSVHRPRRISKVGNRHLRAALYMPALVAIQHQPNVKAFYDKLVAAGKKPMQAVVAVMRKLLHAIWGMLKHDQDFDGEKFFKIAKENA

SEQ ID NO: 301028 - protein, 372 aa, unidentified
MKYGLSTISISSQRSAHVNSIKYIGLDVHTATISVAVLDAAGKFIMESVVETKASTILQFMQGLRGDLHVTLEEGTWAGWLYDLLKPHVTNIVVCDPHRNALLKEGSKSDRIDARKLAELLRAGLLRPVYHGNQGLRMLQELARAYVTIGKDLNRVMNRVKAIYRSWAIPCHGQSVYAPRYREEWLNKIAHHGVRCRAELYYQQLDGLVLLRKQVRKELLVEGKRHKAWKLLRSIPTLGPMRVAVLMAIIQTPHRFRTKRMLWKYSGFGVVTHTSADHRYVQGRMERSNKPVFVRGLDTNHNHQLKDLFKSAATQASTSTGPFREFYEALLAQGMREEMARLTLARKIAVITLTIWKKGVAFDANYLKSQTA

SEQ ID NO: 301029 - protein, 318 aa, unidentified
MNVIGLDISKDTIDVTLITAKGEMDYIKIGNSHEGFEKLIAWIKTKRVRKIAISMEATGVYYEQAAEYLSAVYTVYVINPLKIKDYAKSQFSHTKTDKADSKLIADYAKRHLDKLTPFRTSENPTLYKLINLLQQLKQQKHESQNRLHTAKDPFIRSTHETIILLLSNKIDETSKRIDSTIKQQKSLNAEYQNLQTIPAIGKDTAAILLRHLTDKTFRTANQFVSFAGLSPKIEQSGSSVNKKGRLSRYGHRQLKRALFMPALVAYRINAFPQLVKNLEAAKKPKMVVIVALMRKLAKIAFYIHKAKTPFDKARHQTV

SEQ ID NO: 301030 - protein, 331 aa, unidentified
MFPFGIDVSKNTLDLCMLYDGIKGRIKTRNIQNNRHSVENILRWLRLQHCGPEDVHVVMEATGVYHERLATELHDAGFYVSLANPHRSREFARGMGIMTKTDKVDAYMLACYAFLKNPHRWEPPAPEIRYLGALLRRRDVLLGDALREENRLEKYLSTDTPADIISSCMHMAQLLREEVSNIERQIKAHIKASPALRRDYTLLTSIKSVGPQLGMHMLVVLRSHDFSSAEQAAAFLGVVPIEKRSGTSVRSRPRMSKIGPPQLRAKLYMSALCGKIYNKRMRNIYDEMCLRGKPKMVAIGALMRKLVHWCYGVLKTGIVFNDEGLKQVLST

SEQ ID NO: 301031 - protein, 414 aa, unidentified
MEVVHERCAGMDVSKRDVKVCVRSPGKRRGSYAKAVTTFGSVTAEILRLREHLITAGVTLVVMEATGDYWKPFFYLLENGPFEVMLVNPAHARNLPGRKTDVSDAQWLAELAAHGLVRGSFVPPPPIRILRDLTRARVILTQDRVREINRLDKVLEDAGIKLSSVASDILGVSGKAMLQALVAGERDPQVLAGLARMSLRNKTDQLAAALTGRFTDHHAFMVGLHLRLIEQLTAGITDLTHRIDTVIEPFRPVLKLLTSIPGVSDKAAIVIVAETGGDMTQFPSAAHLASWAGVCPGHHESAGKTKSAAPRPGNSYLKGALGNAAMGAAHTNGCYFQARYRRLAARTSPLKALVAVEHSILTAVWTMITNNQTYNDLGGDYYSRRDPTAAMRRITRQANALGLTVRFDPIEHPA

SEQ ID NO: 301032 - protein, 348 aa, unidentified
MDATTVAIDLAKDVFEVAIGNRAGQVLHRYRFTRARLQRFLEGQAAGTEVLMEACGTAHHWGRLCQRLQLVPVLLPVQYVRAYVRRNKSDRTDAAALLEARRCGEIAPVPVKTPEQQAWQGLHRIRQQWQKTRTARINGLRGLLREYGIVVGLGARRLHAHVPAIVTTEEAPVPGPLLAALQTLLEEIRELERRIKALDATLVAHLATDDVGQRLQTIPGVGPITASALLASVPHIHQFRRGRQFASWLGLTPREAASGHRVWRGRITKRGDVYLRTLLIHGARSVIRHAHAQARQARVALTARQRWVLALVSRRGVNKAATAFANHQARVIWAVWRSEQPYRCVATP

SEQ ID NO: 301033 - protein, 348 aa, unidentified
MLIIGCDYHPGFQQIAFVDTETGELGERRLMHRAEAEQFYRELKKQNVRVGMEASGHARWFERLLHELQFELWIGDAAEIRTKRVRKQKTDRQDAQLLLRLLIEDRFPRIWVPDSENRDLRQLLWHRHRLVQMRTRVMNQLHVVALNEGLRRKKALWRPAGRQELESFALAPWASRRRQDLLDLLDQLTPKIQELTQALEEEVEKRPETRRLMTHPGVGPLTALAFELVIGTPGRFHCGKQIASYVGLVPSEKPSGDLRRLGHISKQGNALLRFLLVEAVQVTVRSQPAWRGTFLHLALRRGRKIAKVAMARKLAVHLYWMWRQGRDYSQLQKLGSHAGEPGNLNGGQ

SEQ ID NO: 301034 - protein, 355 aa, unidentified
MHSVRYIGLDVHRDTISAAVLDSEGKLLMQSVLATRAAAILDFLHGIKGTLHVTCEAGTHSAWLYDLLVRRVGKLVVCNPRKNALLKSGSKSDAIDARKLAELLRANMLSAVYQGENSALAVQHLARSYTLLTEDTTRVMGRLKAVLRSQAIACAGKKAYGKKHREHYLGQLGTGSLRRRAECLYQELDALQPLRRQARRELIVECRKHAAAQWLRSVPFLGPIRAGLLIGRVQTPHRFRSKRQFWAYCGLALETRDSGEYRLVNGQIERRRKPTLVRGLNWNHNHELKNLFKSAATTASACPGVLREFYLGLLAKGMRPEMARLTLARKLAAIALTLWKKGETFDAEHLKPQAA

SEQ ID NO: 301035 - protein, 389 aa, unidentified
MKIFVGIDIAKLNHFAAAISSDGEILIEPFKFTNDADGFQLLVSKLESFDKNSIIIGLESTAHYGDNLVRYLVAEFYQVCVLNPIKTCQMRKNNVRKTKTDKVDTFVIAKTLMMQDDLRFITFFDLDMMDLKALGRFRQKTIKQRTRLKIQLTTYVDQVFPEIQYFFKSGLHQNAVYALLKEAPSPKEIASMHMTHLANLLKVNSHGHFTKEQAKELRILAQKSVGANDSAISIQITQTIQQIELLDSQLEKIEAEMTDIMKFNDSVIMTIPGIGYINGGMILGEIGDIHRFSNPNKLLAFAGLDPSVYQSGNFQAKTTRMSKRGSRVLRYALVNAAWNVVRNNATFKAYYDAKRAEGRSHYNALGHCAGKLVRVIWKMLTGEVEFNLE

SEQ ID NO: 301036 - protein, 403 aa, unidentified
MYYVGIDVAKEKHYVCILGDDREVASKPFWIYTDILGLQKLEKRLAELSNNKDEFIIGVESTGAFSENLYEYLTDSDYKVILLNSYQTAKFRDFSTMKKIKNDAIDALVIAELLATGKYKESHISNDAYHSVKVLGRLKASLDKKIKSIKREISTVMATVNPEIAKVFPNIFTKTGLAIIKEYPTATDIASATPKKLTRLFRHIRGNNFSEDKAKLLIELAKSSVYAGRASEARALMITTNIRILELYCQEKLQIEAQIKELIESEIDAIDNTVENIKSIPGVSIKTIASLLGECGDLRRFDSAKSFIGYLGLYPTQYQSGNSLSVGRLAKRGIPIAKHALYMAAVGSVLHNPQLKKLFYDKISSGKSKKEALIILSKKLATIIFAIAKHNKPYDPNRVFIPN

SEQ ID NO: 301037 - protein, 370 aa, unidentified
MNEDSVVYVGVDVAKAKHAVAIAESGRGGEVRYVGEIETNPAAVEQFVRKLARKHPRLHFCYEAGPTGYGLYRQLVALGHACEVVAPSLIPKRPGEHVKTNRRDAVSLARLLRAGELKGIWVPDAVHEAVRDLVRAREAAGEDLRKKRQQLQSFLLRHGRTFTGRKAWSPAHSRWLAAQKFEHPAQQIVFQDQVDVIADASKRLERLDAQLVELVPTWSMAPVVAAYQALRGVSFVVAVTFVSEVGDVRRFDSPRQLMAFLGLVPSERSTGESVRRGGLTLAGNRRARRVLVEGAWSYRHPARVTETIRVRLEGLPKEVREIAWKAQTRLCARYRRMTAAGKKAPIVIAAIAREMAAFLWAIGRQVEPVR

SEQ ID NO: 301038 - protein, 331 aa, unidentified
MDHCAIDLGGRKSQVCVRSPDGRLLFEGPYDTRSLPEFLRLLPRSRVIVETAAEAFRVADAAKEAGHEVRVVPATLVRSLGVGARKTKTDRRDARALSEVSCRIDLPSVHIPSARSREWKAICGMHDALITARTKLINNLRGWLRGQGLRIGKGKAETFAERMAKFEPLPDYVRSQAEALAALTEKIRGSDKRIEALAKDELCQRLMTVPGIGPSSAVRFVAAIDEIARFESAHKVESYLGLVPGESSSSERQQRLSITKAGSSSVRWVLGQAAWSLQLRCQDPGARPLQLWAAEIARRRGARIATIALARKLAGILYALWRDGTKYEQRP

SEQ ID NO: 301039 - protein, 369 aa, unidentified
MTLIAVIEMSQSSWLIAGIVPGIERHPLKKLAVDESALLKLLNRWREQAEKAGHRIERIAIAFEAGRDGFWLARWLKARGIEAHIIHASSIAVSREHRRAKTDRLDTELLKRAFLGWLRGERDHCKMVAIPTLAQEDAKRPNRERESLVSEQSRIVNRMKAALARLGIRGFNPKLKTAVERLEGLCTPEDEPIPPNTLAELKRDMERRRLVRSQIRDIEKNRVERIDQAPSDGPHVMVRLLARVIGVGVETADMLVQEVLRRNLRDRRAVARYGGLTGSPDESGKKRREKGLARSGNARVRRGMIQLAWRFLMFQKDSALAQWFYARTKNAPQSRKTMIVALARKLLIALWRLVREGVVPEGVVLRPVS

SEQ ID NO: 301040 - protein, 343 aa, unidentified
MQVVRIGLDLAKYVFEVHGVDKHGKVVVRKRLRRDAVSRFFANLPACLVGMEASNGAHYWARVLTELGHQVRLISPQFVTPYVKSNKNDRNDAEAICEAVGRPSMRFVPRKSTDQLAVQAVHRIRRRLVADRVRLVNQIRGLLSEHGIVIARDIAQLRRGLAFIVGRVNDGLSEMVQALMRELQAELAELDRRIATYDRRIREIFRTSEQCQRLGKIEGIGPVTATALIAAVGDRTSFKNGRQFAAWLGLVPKQRSSGGRTRLFGISKRGDRYLRTLMIHGARAALSRASGKQDPRSLWLGKMRQRRHPNVAAVALANKNARIVWAMLSDDTAYEPALSVKAA

SEQ ID NO: 301041 - protein, 457 aa, unidentified
MRIPSKKTKKQKQKVSIQQDWPLLNPDAAGVDLGFREHWVSVPPDRDPKPVRGFGTFTSDLKALAGWLKECRITTVAMEATGVYWIPLFQLLEREGFKVLLVNARQIKNVSGRKSDVLDCQWIQRLHTYGLLGGSFRPADPYCVVRSYLRYRDELVSARSRQIQHMQKALAQMNVQLHQVLSDITGESGLAIIEAILKGERNPLKLAGLANRRVKATRQNMAKALIGDYRAEHLFQLQSALDLYHFYEGKILSCDQALAAEMEKLPNRVDPQLKPLPGKTDPQKKIDEVLRACLYRKLGVDVTSVEGIGALVGLTVLTEVGPDLSAFKTEKHFSSWLGLCPDNRISGGKVLSCRTRRVLNRLSDVLRVAATTLERSPTALGAYYRRMKAKLGAAEAVTATAHKLARILYRLLTHGEAYVRQGLVDYEEKHQTRRLKNLQKTADSMGMQLVPKQTTAH

SEQ ID NO: 301042 - protein, 319 aa, unidentified
MAQNGLVVAGIDIAKDKADVSIRAMSLRQTFPSTAQGRRQLISWLRKHKVTNAVMEASGGYERDWASALREKDIAVRIVDPKRVRHFARSAGRLAKNDVIDADTIGWFAEIFGEAPSQAHDAAREKLQQMVFARQGLLDIRTTLSNKGEHDVPEAVKKSHSRLLKTLAVELARLEAAIAALIKTTPHFAERAKIIESVPGLAGTTSACLIAGMPELGQVSNQAIAALLGVAPYDDDSGKRQGQRQIKDGRRKVRNVFYMGSLGAATRHNAMLKTFYDRLIAKGKKPKVALVACMRKLIVILNVMIARGETWDAGRYTVG

SEQ ID NO: 301043 - protein, 458 aa, unidentified
MAQSRPKSANRRSAPPEALPHINRNSAGIDVGSASHFVAVPADRDDHPVREFAAFTGDLYRMADWLQACGIETVAMESTGVYWIPVFQVLEERGFEVKLVDARQLKRVPGRKTDVADCQWLQQLHSFGLLGGAFRPDDQVCVLRSYMRQRAMLVRYAGQHVQHMQKALVQMNVQLQHVIEDVTGATGMRIIRAILDGERDPHCLAALRDNRCKNSVSTIGKALQGDWREEHLFALQQAVELVEAYQAKIADCDTRIEAQLQTFEDRSGGQTPPKGHPSRHDRHDLGFDATAELFRMTGVDLVAVNGLEAHTVLKVLSETGLDMSKWPTSKHFGSWLGLAPNNRVSGGKVMSRRTIPTANRAAAALRVAAQALHHSRSALGAFLRRKATQIGMPKAITATAYKLARIIYGMLTQGNAFVERGQDYYERQYHDRVLKNLSRRATELGYCLVKQDQAASSG

SEQ ID NO: 301044 - protein, 403 aa, unidentified
MNNVVGIDVSKGKSMVSVLRPFGEVVAKPFSIGHTGSELKKLADYLKSLDGETRVVMEHTGRYYEPVARFLHDEGVFVSAVNPKLIKDYGNNTLRKVKTDKADSRKIARYGIDNWAELRQHTPMDTIRMQLKTLNRQQSLYAKTKTMMKNNLIALLDQTYPGVNALFDSPVREDGSQKWVDFATAFWHVDCVRNMSLAAFAERYRKWCKRHGYNFSQSKAVEVHAGAQDLIAMLPRDALTKTMVRQAIDALNAISASLERLKAEMQALAAQLPEYPVVMTMHGVGDSLGPQLMAELGDVTRFTHRNAITAFAGVDPGADQSGTHEAKSTRVSKSGPPELRRALFLVMDCLLKTQPQDDPVYRFMDKKRAEGKPYLVYMTAGANKFLRIYYGRVKEYLASLEGN

SEQ ID NO: 301045 - protein, 330 aa, unidentified
MIYLGIDVSKKKLDAKLLLDPTQVKFKSKSVTNTAQGVAELLAWTLRHSGCAVAEVHAVMEATGVYHELAATVLFDAGVRVSVVNPAQLKEFARGLAVKSKNDGIDTAVLARYGALLNPAPWQPEPRKVRELKALLARLDAIEADLRRELNRQEKTEHATVPAEVLESLAKSVAFLREEQARLQQRIKDHIDGHPTLRQDRALLQTIPAIGDKTAFRMLALLRSRAFASASQAAAYVGLVPVEHQSGSSVCKRPRLSKAGNARFRAALYMAAVVATRYNPDIRAQYQRLLAAGKSKMSALGAAMRKLVHICFGVLKHQTPYVAQCGQKYP

SEQ ID NO: 301046 - protein, 378 aa, unidentified
MNRIIKIGMDVHTTNYTLCIFEPSFEHDGTVHCITQVKPEIKKIIHVIETFKKKHENEELNIVCGYEAGCLGYSLYHELKEKGVECVILAPTTMKTEKGGRKLKNDYRDAKMIAECLAYGGYSAVHVPTELDNSVKEFIRMRDDIKENLKSIKQQIIAFLTRNGKQFNGKSYWTRKHIDWINTVSFSEPLLQDTLKEYMIEYNHLCDRVEILDKQIEEVSLKEEYVEKVQQLQCLIGIKTHTALSLIVETSDFNRFKKGNMYSAYLGLIPGDDSSGGHEKKLGITKAGNNHLRKLLVEAAQGYTRGKVGFKSKDLKARQEKCSSEVVAYADRANERLRRKYYRMILRGKKYNVAKTAIARELACFVWGIMTNHMDLCS

SEQ ID NO: 301047 - protein, 330 aa, unidentified
MKKNEIIGVDVSKMKLDLYLHTTKRHFVLENNNKGFAELIEKSIVTTRCKPEDLLVCFENTGKYSKPLSVFLQSQNIRFAMLSALEIKRSLGMTRGKNDKVDAFRIANYAHQKRETLSPTILPGPMIDKMKSLLSLREKLIRHRTAYKNGLTDVNDCHCEGENDLYIQIQTDMIEQINDKVNKIEAELQRIIQSDQALERNYRLVTSVIGVGPIIAFNMIAYTDNFKSFDNPRSFACFAGIAPFEASSGKRKGNARVHPYANKQLKSLLNMAAMSAIGTSGELKNYFRGREQAGKNNMSTMNIIRNKIVFRIFAVIKRGTPYVNHQKFAA

SEQ ID NO: 301048 - protein, 449 aa, unidentified
MSRPQVIDDEEHEQVHDRVAAVDVAKDTGVVCTRLPHPSRAGARRSTVWTVKARMGAVRALGRQLARDGVEVVTLESTSDYWRIWFFVLEACGLAVQLVNAAQARNLPGRPKTDKLDAMWLARLTEMGLLRASFVPPKAIRDLRDYTRMRTRLVQERTRCFQRLEKLLESALVKVSSVASKLTTLSAQDMIRAMIAGQRDPRVLADLARGPMRARREELAEALDGMFDDHHGELAGLLLDQIAFLDERVARLGARAAELTAAMPAAWGVNPDGTTGPDAGTGPGAPAPNTMARLAEIPGVSEDLARTIIAETGLDMARFPTAGHLVSWAGLCPSARQSGPRTRTGKKGQGNAWLRGALGQAAVGAARTGTFLGERYHRIARRRGKAKAQVAVARSILVIIWHLLADPQARYADLGPGYYQARLDTDRKLRNHIRQIQALGFDITITKAA

SEQ ID NO: 301049 - protein, 379 aa, unidentified
MEIITQNEKILYIGIDVHKDTYSLCCFDFFRNELSDEMTIKATTKAVIKYLEAIRKKHKEEILFACGYEAGPTGYGLCRGLQKAGYGCVVMAPTTMSNPDGKKRVKTDRIDARAIARILAYKSYSQVHLPSEEMEALKEYTRARDAKKRMFKKAKQELLSFLLRNGKTYPESGNYWTEKFFKWIKTVQFSEKWMQEAFNEYLAEVYSLKAKIELMDMKIREIAELEIVKDKVNKLICFSGIDVITAVETVVEIHDFTRFATAAQFVSYLGLCPGEDSSGKTKNMLPLTKAGNKRVRALFCESAKAIKRTNPYGQKSKRILERQKNSSPEIVAYADKATKRIRTKMKHLEERGKNYNVSSAAGARELACFVWGMMNGKIA

SEQ ID NO: 301050 - protein, 330 aa, unidentified
MALSANGGRLAECRIPANQQGYSNLRSWALELGTKPIFAIEGTGSFGASLCRELMASGFPVLEINRTDRSTRRPLGKDDAIDAEAAARAFIAGLATIEPKGGHRVVEMIRLLKGNKDSATNSRTRAINQIKAILVAAPALLREQLEPMANINLIATCAAFRIAVVDCTFAAAKKALRYLARRVLQLEKEIAELLEDLDQLTQQACPGLRKTYGIAVDGAATLLVAAGDNPARLRSDAAFAALCGVSPLPASSGKTNRHRLNRGGNRQANATLHRVVVVRLRWHEQTKAYAARRMEEGRSKPEIMRCLKRFIAREVFHTLLGRPPVRTAAT

SEQ ID NO: 301051 - protein, 453 aa, unidentified
MKEQDQILMAIVNPKAAGIDIGSRSHFVAVGQKEEHVREFGVYNEDLKAISNWLKENDIQTVAMESTGTYWQALYAVLLNDGFQVILCNGKFTKNIKGRKTDVQDSQWIQKLHSIGLLSGSFLPDLQTEQLRTYCRHRASLIDVAADTSKKMQKYLRLLNLRLDIIVKDICGLTGLKIIEAICNGETTPEKLAELRNGNCKKSEEEMTKALQTNGRKDYLFGLKQEYKMYKNLQTQIKECDVEIEKLLQEQIDNDHNKKQHYTDPKNHKRINKNTPKNIDLNLIGYQYFEGVDLLKIEGFSHQTLLTLMSEVGLEGIKKFGTAKQFSSWLRLTPNNKISGGKVLSSRVPKGSNRLKIALRNAANAIGNLKESTPLRDFFHRINFRKGRVSAISATARKLGVIIWNMIVKNTSYYNPENYLYLDEKRKLAVQKRIQKQMEKHQFKVDDFNFSTI

SEQ ID NO: 301052 - protein, 354 aa, unidentified
MLIIGCDYHPGFQQIAYVETGTGELQERRLEHRQEAEQFYRALKAQHLEVRVGMEASGQARWFEHLLAELDFELWVGDAAKIRTKRVRKQKTDRQDAQLLLGLMLENRFPQVWVASWENRDLRQLLWHRHRMVQMRTRLMNQLQALALNEGIRRKKGLWREAGRKQLESVALAPWASQRRHDLLELLDRLSPRIAELSERVEEEAHKIPAAQQLMTHPGVGPLTALAFLLIVGQAQRFRCGNQVASYLGLVPEEDSSGEHRRLGHISKQGNSLLRFLLVEAAQVTVRSDPEWRRKYFHLALRRGRKIAKVAMARRLAVRLYWMWRKQWDYERWKKFGPHAGQPGTGVGVQSNTE

SEQ ID NO: 301053 - protein, 348 aa, unidentified
MSDGTAVDRQFVGVDLHSRRSVICRIDAGGVELACRQIDNDAKTLVREVRRAGRGAPVAIEATWGWYWAVDALQGAGFEVHLAHPYGMTAMRKRKRVKTDAKDAYELANLLRLGSLPEAYIAPGGLRELRELVRHRQRLTQANTAVKAGIRAVLAKLNIHLPVSDLESGLGTALLDQVTLMPAYLHRLDSQRRQMLLLEAEIGATGVELDRRLKHHPDFRNLQKIKGIGPVLSAVLVAEIGDVHRFAGPDQLACWAGLTPRHYASDRTTRRGHISKEGSVLVRWAVVEAVQRQCEPSVRELRERIIARRGPGGRNIAKIAAAHRMLDIVYYSLRDGTSRVFTDTRDAA

SEQ ID NO: 301054 - protein, 385 aa, unidentified
MYFVGIDISKYKHDCFITTETGEVIVENFSFQNTNEGLNQLLDLLKSLDNNQEIRIGFEATGHYGMNLKLFLEKNDYSFMEFNPALVKNFISGQTLRKTKTDKKDAFQITRYLMSIEYKPHPKQFYHKYSLKSLSRMREKLVKQRSYYEIQLTNVLDLIFPEFKPFFNNDFTTTSLFILDKYKTPDKIKSMKDYDSIRKKSRGKFTSAQFVKLKDLAKNTIGCSNDIFETELESLLILHSQINQEINKLEDKIEIIIKELNPPTLSIKGIGNILCAGIISEFGDVTRFKSADAMVAFAGIEPSISESGTESHTGHMVKHGSGHLRYFLMNAADMVFVHESIFTEFYYKKRDEGKSHRVALNHVAKKLVRIIYKLESENIKFNRNL

SEQ ID NO: 301055 - protein, 383 aa, unidentified
MTQVAFKQDFTSNDPILYMAFDLSHKSWKIAFSDGARKRYCTVAGKDLEALSAAIEKARQRFQLPEDVRIVSCFEAGRDGFWLDRYLRSIGIDNIVVDSSSIEVSRRKRSAKTDRIDAGKLLLMLIRHIGGERKHWGVVRVPGEADEDLRRVQREVDRLIKERGQHTARMRSLLNLHSFVVDKVGGPGWSKLVTGLRDWNGAPLGPNLVAELLRENVRLSLVREQLLELEREKCRLLEEELEKYPSLKQVQQLLLLKSIGKASSWVFVMEFFGWRQFKSRKQVASLAGLTPTPFSSGDDSREQGISKAGNCRIRSMMIEIAWLWLRYQPESELTLWYQARFAGGGKRMRRIGIVALARRLLIAIWRYLETGELPKGAVLSAAK

SEQ ID NO: 301056 - protein, 404 aa, unidentified
MFKFGIDWSEQHHNLSIRNDKGAIVSQVEFKHTLEGFQRFDDERRKLGVPPTECLVAIETAYNLLVDFLLDRGYLVHLIPPQATKGYRNRQRSTDAHTDDTDAALLSSILHTDLDSHRRLQPNSALTQQILAQVRFIDLLRRSIQRQTNQLRAVLFRVYPQALGLFGKLTAQINLHFLMAYPTAEEAQGLTRTAFEAFCREHRYFRTDLISRRYAHLMEPAPEANPVAVAAYRDQIRILAELLLPQVLRRTEALSSLAQLFSQHPDGFIFDSLPGTGELLAPALLAKFGDHRDRFPTPAGVQALAGTCPVTKKSGKRKVVIFRRGCDREFRRIAQQFANTSVRQSGWALAYWRDLRPRCRSDSDAYRRLANRWLAIIWRMWQDGKAYDETYHLRQRAQRRRPRS

SEQ ID NO: 301057 - protein, 386 aa, unidentified
MQASNVSTPTAERISTIFVAIELSQKSWLVTMHSPDKDRISRLKLPGGDHAGLLALVDRVRERATRALGAIPAVVSCYEAGYDGFWLHRLVTAAGITNYVFDPASIAVDQRARRAKNDRIDGEQLLRTLMAYCRGEPRVVRIVRVPSVEQEDVRRDSRERDRLIKEQTAHTNRIKGLLRLLGMAVGNPRRRDWLKWLAAQRDWQGHVVPSRSLAELTREHARLMLVRDQLARLEQPPARTERTPAAAEMARRTDHLLELKSLGPIFSATLVNEAFYKDFRNRREVGGYFGLAPSPWQSGGTDREQGISKAGNPRARQKAIELAWLWVRHQPDSTLTQWFRQRTANASRRIKRIAIVALARKLMVALWRYLTTGLVPEFAVLKAAKA

SEQ ID NO: 301058 - protein, 312 aa, unidentified
MALQDVFVGIDVSKGRLDVHVRPLGVGFSVSNEAAGYAALIARLRPLRVKRIVLEATGGYERALWLALSEAGLVAAIVNPRQVREFARAAGRLAKTDRLDAAVIAHFAETFAPRIGKPDPVADRLGEHVLYRRSLQDEIVALEHQRRRLETPALRERAERRHAALRAEVKEIEAAMRTIVDSDPAKKALFACLTALKGVGLVLACTLIANMRELGSLTRHQAAALIGVAPLNHDSGARRGYRAIAGGRRRVRNVLYVATLSAVRCNGPIREFYRRLSAGGKPAKVALVACMRKMVVMLNGRVRDQLAATATP

SEQ ID NO: 301059 - protein, 416 aa, unidentified
MPELWAGIDAGKAHHHCVLIDDEGNRLLSRRVANDEAALTALLTDVLALAAGREILWATDLNRGGAALLIGVLEAHQQALVYIPGRSVYHASRTYRGDGKTDAKDAAIIADQARMRRDLQPIRSGDQISTDLRLLISRRTDLVCDRTRAINRLCAVLLEYFPALEAAFDYAMLKAAVVLLTKYTTPAGIRRAGESRIADWLRNQGCYNAKSIASRAVAAAHAQHTTVQAQEVGSDLVAALARTVMDLHAQVTDVEKQIETRFRQHQHAEILLSMPGFGTLLASEFLAATGGDITAYESAARLAGVAGLAPVPRDSGRISGNFHRPKRYDRQLLNAFYLAAQSAARYCPQSRTYYQRKRSEGKNHNKPSYPSPDAASTSSGPCSVTGLRINNPWSKSFNPRARTRLQPSLQWESPRL

SEQ ID NO: 301060 - protein, 345 aa, unidentified
MKKTIVGVDLAKKVIQVCVVQANQIVSNDEMSPAQFTSWLAMAKPAIIVFESCATSNYWKQVANDKGHDARIISAKLVSQIRQNQKTDKNDALAIVQASQLVDIKFLNGKTFAQQELQSIMRMRELAVKHKVALRNQIEALLLEFNIRVSSRNGGLGGTVQGVLEDAENGFCMPFRQALNATWKLYLQTVEDITEKDKFLAQAIKLHPECEKLLALEGVSTINAVNLYIAIGCGEAGTFKTGRDAAACIGLTPLQHSSGGKTKLGSIGKSMKNIAIRSYLVNGAMSVINHVDKREPRTKKEKWLKQLLERKSKKCAAVALANKTVRTAFALLRQGTEYKAEPIAA

SEQ ID NO: 301061 - protein, 358 aa, unidentified
MNNDSIVFIGLDTHKSFIQVAVLQGHRGAQPQHLGRINSNKSALVKLAQQLQSKYPKATLHFVYEAGPCGYWTYRLLTSLGHCCYVVAPSLIPKKPGDRVKTDKRDAAKLAKLFKAEELTPIYVPEAEDEAIRDLSRARETAMKDLKDAKFQLKGFLLRNNVQATVNDNWSKKHLRWLTDLILPHHSQQIVLQEMTITISERMKRLQRLDNELLHQIKNWRYYPVVKAVQAMRGVRLLVALGTIAELGDLRRFDHPRKLMAYLGLVPTESSSGGKTRRGSLTKCGNSRTRRLLVEGAHTYKHKAKISVELQRLLQKGKHRNVVVVAIAREMIAYIWAIAREVVVSDVDPKTRIARLPA

SEQ ID NO: 301062 - protein, 353 aa, unidentified
MVYAGIDLHPKNMAIVAINNNNEVMREAEMPTSVRSLADFFSTLDQPVQAVVECTCNWYWLSDWCRENNIPLTLAHAKMVKAISYAKVKTDTVDAKTLAQLLRVDLIPEAHQAGPERRELRELTRGRLRMVHDRSRLQSGLWSVAIKYNIGISGDDWRYLPELQDKLVRQLPSAASLQAELLIGQVSQLCRHISRLEAEIEKQASFSHQAQDLIQVPGIAKVGAWTILAEIGDITRFPSPKQFTSYCRLVPGSKNSGGKSRHKSGNKDGNKYLRMAFGQAGISAYTHYKPVKKFYNKIKRRSGKPVARAVVAKELAKIVWHMLTKDQEYKGFKGQPTRVAQQTYWPQPISPNA

SEQ ID NO: 301063 - protein, 394 aa, unidentified
MAFKIFRKNCCGLDVHKTWIYACMGITDTNGRTEYKQARFSSFTKGLQELADWLAKYDCNDVCMESTGKFWIPVFNILEKTCWVTLAYPKYTKPQKGNKTDHKDAKWICDLYMCDMVNPSFIPPPDIRQLRDLMRYRSKLTNIMTSEKNRALNCLTVSNLKLDDVFSDVFGKSSRSVIRYILEHPGETFQVAPFIDRRCKHPVEEIQAVIDGTISHQQAVKLRECLQHLDELEVHKTNVEKEILCLVQQYPYQLELLQTVLGFSGNIMTAIALISEIGADMSVFPSAKHLVSWAGCCPRNDQSSKKVKSTRISRAGVYLKPLLVQVAIQPFTANADKLSAAGALEIRCQICDGRFLSMWAALFIFLGCPLSPCPKNLHVHNGRIVILASVAWIF

SEQ ID NO: 301064 - protein, 365 aa, unidentified
MPNLAHPDAIFLGLDVHRDSISAGILNPGGESPDVEKIFNDEESVRRLIGRFPERRLLRVCYEAGPTGYDLARLLGSMGVRCEVIAPSMIPKAPGDKVKTDKRDCRRLARLHRAGELVAIRVPTPAEEAVRDLCRTRGDMVEDLTRARNRLSKFLLRHSRVYRGGTPWTHKHEAWLAAQSFEEAALAVTFGHYRATVLARDAALAAVEADLIPWQDHPLFVDPVHRLGAYRGVTRMGALTLQAEVCDWRRFGRAASLMGFVGLVPSEYSSGASTHRGHLTKAGNAHVRAQLVEAARSYQHRPYVGTEIAKRQEGLPPEVLARSWSAQLRLSGRFRHLAARKNAKSVVAAAVARELAGFLWAEMTA

SEQ ID NO: 301065 - protein, 360 aa, unidentified
MISQRTSVGLDVHARSVMACGLDRETGEVFERRLCPNHREILDWIGELPAPVAVTYEAGPTGFGLARALDAAGIECVVAAPSKLIRAAGDRVKTDARDAVLLARLLQLGQIVAVVVPSVEQEAARDLVRAREDCRADLMRTRHRLSKLLLRQGIVYNGGHPWTVTHERWLRQQRFEEVGLMRAYEEAFDAMLTTRDRRDRLDGAITGMAADSDFTPVVRRLGCLRGVSTLTAFALAVEIGDWQRFTGRSIGAYLGLVPTEYSSGRSRVQGGLTKTGNGHARRLLIEAAWYHRKPYSPTVTLRRRWDAASLGARARGHAANRRLHHRWERFEDRTKRAVVANAAIARELAGWCWSLAVLDE

SEQ ID NO: 301066 - protein, 412 aa, unidentified
MRVLYERCCGLDVHKKTVVACALLTQPNGQVQKLVRTFAATTGGLLALADWLSSLQVTHIAMESTGIFWRPVFNVLEEGHSIILVNAQHMKAVPGRKTDVKDSEWLADLLRHGLLKASFIPTKPTRDLRDLVRYRKTLVYERTKEINRLQKVLETANIKLASVVSDVLGKSGRSMLAALIEGASDAEALADLARGSLRGKLPQLQEALQGRVEPHHRVLLQQLFAHITFLEDSIQRLQQDIDQRLSPFEEAMQLLLSIPGIQEITAAAILGEIGSDMSRFPSAKHLASWAGVCPGNKQSGGKRLSGKTTKGNARLRAALAEVVWSISHMKDNYLSAQYHRLARRLGKPKAVMAVAHSVLVIVYHVLRDHKPYSDLGADYFDSLDKERLARQSIRRLEALGFAVTVAAQEVIA

SEQ ID NO: 301067 - protein, 394 aa, unidentified
MAFKIFRKNCCGLDVHKTWIYACMGITDTNGRTEYKQARFSSFTKGLQKLADWLAKYDCNDVCMESTGKFWIPVFNILEKICWVTLAHPKYTKPQKGNKTDRKDAKWICDLYMCDMVNPSFIPPPDIRQLRDLMRYRSKLTNAMTSEKNRALNCLTVSKLKLDDVFSDVFGKSSRSVIRYILEHPGETFQVAPFIDRRCKHPVEEIQAVIDGTISHQQAVKLRECLQHLDELEVHKTNVEKEILCLVQQYPYQLELLQTVPGFSGNIMTAIALISEIGADMSVFPSAKHLVSWAGCCPRNDQSSKKVKSTRISRAGVYLKPLLVQVAIQPFTANADKLSAAGALEIRCQICDGRFLSMWAALFIFLGCPLPPCPKNLHVHNGRIVILASVAWIF

SEQ ID NO: 301068 - protein, 335 aa, unidentified
MSLYCGIDLHSNNQVIVVIDDQDKRLLERRVPNELGATLSVLEPFREDLLAVAIESTYNWYWLVDGLSDHGYSTRLVNTAAVQQYPGLKYTDDQHDAFWLAHLMRLGILPTGYICPREIRDVRDLLRKRLGLVRERARNLTSVQNILARELGHRVATAKVRGILNGDDKFRPAVRTAIAANLAVIETLDTVISGIQGQALEVIKPTSRHRRLKTISGVGDVLAPTIMLETGEIERFKSVGNYSSYCRVVDSRRESNERKKGEGNKKCGNRYLAWAFSEAAHFAVRYNDRARRFFDRKAAKRNRMVAIRAVAHKLARAAYFIQRDRVEFDAARLFG

SEQ ID NO: 301069 - protein, 386 aa, unidentified
MKRNDLSRSLVAFDQNSTLVAVIELSLKSWLIAGLVPGLARQPLKKQSADAEAIVKLLYGWREEAVKAGGKIERIVVAFEAGRDGFWLARWLRERGIEAYVIHPTSIPVSREHRRAKTDRLDTALLMRAFLGWLRGEAKHCSMAAIPTLAEEDARRPNREHEHLVGERSRIINRMKATMIRHGIGNFNVKYRKAAERLEEVRGPEGMPLAENTLAELRRDMARLALVRAQIKEIEKTRLERLKKAPQEGSHPMVLMLAKVMSIGIETADMLVHEVLSRGLRDDRAVARYGGITGAPDESGSKRREKGLARAGNARVRRGMIQLAWRWLMFQKDSGLAQWYRARTASARRDVRKTMIVALARKLLIALWRYVTTGEIPLGARLRPAQ

SEQ ID NO: 301070 - protein, 394 aa, unidentified
MFLVGIDIGKHKHSFCIIEKETGESIVKPKFFDNNKVGFEELLSSFKGLPKKDILIGMEDTGHYHFALLKFLLDKKYQVALINPVTTDLTRKLSGSHTKTDKLDTLTICDVLTSNQRTKPYRISKVDRFDLYEQKQLTREHHNLKEQSNVLKNRLQKSIDIVFPEFNSLFKSMYGVVYMNILKEFGSADALAHSDIRTIRKCFDFKGRGKRIELTAKELKNAAINSIGFPSIAEVVQIKHLVNQIELVEEQIEELDKKIEEFSIANNSPILSIPGISHFSGTSILAELGDIHNYSKPSQIIKFAGVAPLTYESSQFMAKHTAITKKGSTYLRKTLYQIIIPVIYNNKVFKDYYNLKLSQGKGYRCAQGHCVRKLLRVIFQLLSTNTQFDPTLLV

SEQ ID NO: 301071 - protein, 354 aa, unidentified
MDSVKYIGMDVHQETISIAVRNSSGKLVMEGIIETKASTILQFFQGLSGSLRVTFEEGTWAAWLYDLLKPQVTELVVCNPRKNALLKEGSKSDRIDARKLAELLRQGALSAVYHGEHGLRMLKELSRSYLTISKDLGRVMNRLKALYRSWAIPCAGTQVYAPRHRSEWLSKIREAGVQRRAELYYQQLDALRFLRQQARKELLAEARKHNATQLLRQIPGIGALRAAHLVALLQTPHRFRTKRQLWGYSGLALETHDSAQYRYVQGQLQRSRKPQQLRGLNANHNHDLKDIFKGAAMRASTCHGPLRDFYQNLLAKGMRPTMARLTLARKIAAITLIVWKKGVSFDANYLKQAA

SEQ ID NO: 301072 - protein, 340 aa, unidentified
MMNVTRIGIDLAKQVFQVHGVDERGHTVLRRRVARSQVRAVLAQLPTCVVGLEACGSAHHWAREMRALGHDVRLIAPQFVTPYRKNDKNDGNDAEAICEAVGRPHMRFVPVKDVGQQAVLTVHRARQLLIAERTALVNQSRGLLAEFGLIVPAGIGALRRLWPSLLEAPAVPALAREVFTDLADRLRAVDERIAAYDHRVVQLAQQTEPAQRLMQVPGVGPVTATALIATVGNAHAFRNGRQLAAWLGLVPRQHSSGGTRRLGRITKRGDVYLRTLLIHGARAVMRHLARRTDATSRWVTALHARRGFNKAVVALAAKQARILWALLATGRTYQPAVACP

SEQ ID NO: 301073 - protein, 402 aa, unidentified
MNAVGIDVSKGKSMVAIMRPFGEIVSAPFEIKHTASGINSLVELINSVEGESRIVMEHTGRYYEVLAHQLSEANLFVSAINPKLIKDFDNDSLRKVKSDKADAVKIARYALDKWQNLKQYNVMDELRNQLKTMNRQFGFYIKHKTAMKNNLIGILDQTYPGVNTYFDSPARSDGSQKWVDFASTYWHVDCVRKMSLNSFIDHYQNWCKRKKYNFSQSKAEEIYGKAKELVPVLPKDAITKLIIKQAVDQLNSASTTVESLRTLMNETASKLPEYPVVMAMKGVGTSLGPQLIAEIGDVSRFTHKSAITAFAGVDPGVNESGSYEQKSVPTSKRGSSDLRKTLFQVMDVLIKTHPQDDPVYQFLDKKRAQGKPYYVYMTAGANKFLRIYYGRVKEYLSSLPES

SEQ ID NO: 301074 - protein, 415 aa, unidentified
MALKIVYPICCGIDVHKTFVVACIASTNSKGVTTYKRHRFSTFTQGLNELSQWLCEHDCMDVCMESTGKYWIPVFNILEHSCNITLAHPKYVKAIRGKKTDKKDARWIADLFKHDLVAGSFMPPLPIRQLRDLMRYRFKLTNFTSSEKNRLQNSLTVSNIQLASVVSDTFGKSSINILNKLLDDPTDTSFDLEPLIHGSMKRKLPELELAIDGFLTPEQAGKIKVIKQHYEDLESRKAELESIILSLAASYTEELNLILTVPSISNLFSAIAVVSEIGVNMDVFPTAKHLCSWAGLTPTNNESAGKKKSVRISRAGVYIKPLLVQCATAVVKSEKHPEIRNRYLQLKKRRGHKRAIIAIARMLLTAIYHILKNKEPYNPDLYRKSDARPVEREITVEQAIKLAQTQGYRVLTAAT

SEQ ID NO: 301075 - protein, 344 aa, unidentified
MDHFAGLDVSVKETSVCIVDDTGRIVREVKVASEPEALLTALKNPSYHFKRIGLEAGPLSQWLFSALAEAELPVVCVETRHMQAVLKAQINKTDRNDARGIAQMMRVGLYRPVHVKTLRSQKLRMMLTHRKLLQSKAIAIENDLRGTLRNFGLKVGIAGKTKFEARIKELVENLPDLAELVEPMLVVRRTLREQIVILHRRLLAIVRDDEVCRRLMTTPGVGPVVALTYRATVDVPARFRKSKSVGAVFGLTCSKYQSGEIDWSGRISRCGDEMMRTMLYEAAQVMLTRTNKWSWLKAWAMQIARRRGMKKAIVALARRLAVILHRIWVDGTEFRWTREQAVAA

SEQ ID NO: 301076 - protein, 310 aa, unidentified
MDAIVAGIDVSKDRLDVHVAPIGEAFLVSNDAAGIEALANRLSGFGATLVALEATGGFESLAAAMLGAAGLPMAVVNPAQVRSFADAMGKRAKTDPIDAAVIARFAAASGTVARPLADAQTRLFADLVARRRQITAMIVAEEARGRRAQGRQLKKSITRLLAALRRELESLDEEIDGQIRASPLWRIKENLLASVPGIGKTIARTLIAELPELGSLNAKQIASLAGLAPFTRQSGKWRGKSFICGGRSHVRAALFMGALVASRHNPILKAFRDALVARGKPKIVAIIAVARKLLTILNAIVRDQKPWQPA

SEQ ID NO: 301077 - protein, 331 aa, unidentified
MEIIDVVGIDVSKLTIDVVIHKSKVYCQFDNSNKGFRILCKWALSQSKIERKNLLFVFEHTGLYSHQLAVYLSKKEFNFSIVPGLEIKRSLGISRGKDDKIDAAKIARYAYRLRDEIEPSILPSQELQNLKNLLTLRDRMVKQRAGYKASLKEMKRVLKLKNNVILFTTQERIIASLDKQIAKIEEQMDQIIQCNEKLKRQRNLMISITGIGQQTALYMIVNTAGFSKFKNSRCFASYCGIAPFPNSSGTSVRGKTKVSSLANKKMKSLLDLAAKSAIQHNVEMRLYYNKRIEEGKSKMSTINIIRNKLLSRIFAVVKRDSPYVNTMSYAA

SEQ ID NO: 301078 - protein, 377 aa, unidentified
MKRIKFVGLDVHAETIAVAVAELEGEVRSIGVIPNRCESVRKLVKKLGPVEELRFCYEAGPTGYVLYWQLTALDAKCEVVAPTLVPVRAGDRVKTDRRDALKLARSYRAGELTAVWVPDAAHEALRDLVRAREAAKRDQLRARNRLTKFLLRHGKRPPEGVNPWTLNYMNWVRKDVHFEPLAQQATLLDYLHEVEHMAARVTRLEQAIEEAVQLAPQQMREVIEALQALRGIAKVSAVTIVAELGELSRFGEARQLMAYSGTVSREHSSGESCKRGGITKTGNVHLRRIVVEAAWAYRHAPAVTACLRKRQERASEEVKEIAWKAQHRLHGRYRKLTARGKNTGKVITAVGRELLGFIWAIGVKVEAEQRKALGQAA

SEQ ID NO: 301079 - protein, 314 aa, unidentified
MNNDSMTVAGIDIGKYKLDLALSGSARRWCFSNDLEGWTGLVGELQAAGAVRVGLEASGGYERDVVDVLRQAGFDVIMLQPRQVRAYAIFRLRRAKTDAIDAGLIAECTAEHRSAARDIADPRIAALSEPMRLLEQIEEDIVRMKTRCESYRDEAIRQEIKQEIARLKARRRLQLKALLAALRAHADLSRRLELVLSIPGIGPRTALTLIIRMPELGSLSREQAASLAGLAPFNRDSATLAGRRHIAGGRNAVRTALYAAALPAAFRWNKALIDLYQRLVAKGKAHKTALVACARKLLIFANTVLERQVQWQTT

SEQ ID NO: 301080 - protein, 418 aa, unidentified
MTATDTTVSTLLVAIDISKHRHEVLIGVPGKKRRRRLTITNTLDDFRRLAAILMDYGLPVRIGFEATGNYHRPLAHHLGQAGFDLKLVSSVGLARTREALHNSWDKNDPKDAQVILHMLEIGAVQFFHDPLVTGIADIQELSKTHEIVSRSKTELWHRILTHYLPLYFPEAERFHRSSRTDWFLAFLEKYPTPHMITVMSREAFVADAWQVVGRKVSKERLLSDIYATAVGSVGLPVHPESDAVRMFRLVLAEGRSLVRRRNEIEARAVELLSDHPDYQLLTTVPGIGPINALTILAEAGDLRRFRHHRQFLKFCGMDLATVQSGMFRGQSRISKYGNARLRRTFWMAGQVAVLKRTNSFRDTFERYIARDRHNAHLRRKAYTAIAAKMARTVHAVVKHGEPYRPFFEGVSPGGRTLV

SEQ ID NO: 301081 - protein, 336 aa, unidentified
MNQIKALAIDLAKNVFQLHGVDERGVVVLRRQVRRGQLLALIARLPACLIAMEACATAHYWGRQFLRLGHRVKLIPPQYVKPFVKGSKTDRNDAAGICEAALRPDMPEVAVKSEEQQGVLALHRMRELLEKQRKQLANQLRGLLGEFGIAIAASMKALREALPAAMEQVPLLLRATLEQACERLRELERQCKAHTQQIEVCANQNALCRRLMRERGIGPISASAYVATLGDPRNYRNGRQVSACLGLVPRQHSSGGKTVLLGITKRGDKYLRMMLIHGGRSVVRHAKGKSDPLSEWVTELARRRGANRAAVAMANKNARRLWAIWRDEGQELAAAG

SEQ ID NO: 301082 - protein, 366 aa, unidentified
MIVIGVDVHKRTHTLAAVDAITGRQIAQQQIQATDAGHVDAIRFAADLDDEVVWALEDCRHVSRRLEQALLSAGSQVIRVPPAMTGLSRKGQRQPGKSDPIDALAVARTVVREGVERFAVAFLDEHAMEIRALHDHREQLIAERTRQINRLRFALVVLDPALEADLAPRTLHFAGAQARIRRRLAKLSQTAQARVARSELAHIVALTKEINALHADLDRLTAAHNPGLRAETGCGPICAAMLIGQTAGARRFATDAQFARQAGTAPIPASSGNTNRYRLHRGGNRQLNRALHTIALSRARNDPDTRAYLKRKRAEGKTNPEAFRCLKRHLARRIWKIMFAAAPPPSPATTRATIAVAAPALMPCTG

SEQ ID NO: 301083 - protein, 408 aa, unidentified
MKVVYPICCGVDVHKSFIVATIIKTDKITPTYSKKRFSTFNNDILRFKQWLIDNDCFDVCMESTGKYWVPVYNLLEDKINVVVASPKWVRAVKGNKDDTKDSKWIGDLFRLGLVPGSFIPPKPIRILREYTRYRYKLVSCKSSEKNRYQNSFTVCNVALDSVVSDMFGKSASLITDYLIRTDNFDPEHCKTLLYRSLKNKYDAVIESIVGYEIAPAQKERMLMVKAHLTYVEKALEMMDAGIDKLVAPYEGQISQLCSIPGVCRRSAITIISEIGTDINQFSNSKRLCCWAGLTPGNNESAGKKKSVRISRAGVYLKPALVQVAHAAVKAKDTPYYKHKYERISKRRGKKRAIIAIARMILTAIYHMLKTGELWNPVDLFKVDLPPCLWKGINRRLFNMLSNFWLHRA

SEQ ID NO: 301084 - protein, 386 aa, unidentified
MTIVAQTRPFIIGVDCHARTHTYVIIEASTKRQIACEQFPTTSAGISRALAWVARRTDGDMGCLWAVEGIGSYGARLARAVTDAGYDVAEAPRMNARGRRGLGKSDPLDAAAIATAVLGLEESQLRAPRRDEGTRAGLRILSAARDQLTRERTMNVNALVALLRAHDLGIDARKPLVPSQIATITRWRERQEQLELSIAREEAVRLARRVLEVTAQLAANQKRMTELIQQSPAAPLLEMVGAGAVTVSAVLAAWSHPGRVRSEAAFASLAGVSPLPASSGNTVRHRLNRGGDRRLNRALHTIIMTRMTHDPGTRDYVAKRTQEGRSYREIRRSLKRYLARTLYRQLNTLYATAGPTPPHAAAATPTGNWPTSSALRDQQSWLPVVA

SEQ ID NO: 301085 - protein, 422 aa, unidentified
MSYCPVAGIDVSKRFSDMCILSPDNKIFAQEKIYHDETSINRANALLQKAERLFFSKPVIVMESTSHYHLILFQFFSEHGYDVIVVNPLQSNSMKDFSIRKRKTDRVDAFKLAMIYRTKTLRPSQIPQTATRALRQLCRHRAELLNDVSSYKNRLTALLDQTFPGYDKVFSDVGGVTSCAVLVRFPTPTILLVEEESELVEVIAAASKSGYSFAKKKAGLLISAAQKAQTLGIHSCADETLIVCTIQMLRTLSESVLQIETAIDNLLAQIKEMRNNVSLLQSIPGVGSHSAALLLGEIGDISLFKKPKQLAAYFGLDPTERQSGSFRGTKNKLSKRGSPYARAALHMGVVNSICKRGKDSAANPVLLSYYEKKCKNKPAKVAQAASMHKLVFIVFAVLRDQKPFELKTPEQHAVEQGFVKAA

SEQ ID NO: 301086 - protein, 410 aa, unidentified
MLFVGDDWAEAHHDIEIETDEGRVVARRRLPEGLAGITMLHELVAEHLDPAAEPDQVLIGIETERGPWVQALLAAGYVVFAINPIQVARYRERHSTSGANSDQADAHLLAEIVRLDRAHHRPVAGDSEIAEHIKVAARAHQSMIWSRVRQVNTLRSMLREYYPAALAAFGADLAGREALAVLAAAPSPDRGRRLSQARLESLLRRAGRQRNVTATAAKIRATLASEQLTARPGVVPAYAASASALIAVLSAMAEQTEVLARQVEQGFGQHPDAEIYLSQPGLGIILGARVLAEFGDDSDRYADAKARKNYSGMSPITKASGTKRVVLARFARNRRLGDALFLQAFAALNNSPGARAFYDRQRARGATHYQALRALANRLVGILHGCLRSHTPYDEHLAWHSEPDKLSSAA

SEQ ID NO: 301087 - protein, 373 aa, unidentified
MKKHTSVGKQKQEVAGRTPAARGRMTVGMDLGDKTSRYCVLDGSGSVVKESSVATTKKAMLQTFGAMKRRRIAIEVGTHSPWLSRLLGKLGHEVIVANARQVQLISQSSRKSDQVDARTLARLARADPELLRPIRHRSERAQGHLMEIRIRAALVEARTSLVNAGRNLAKSIGERLPSCDADNMGLEQAVALPAELRETLTPLLLQIESLTTRIKECDGKIERIAREEYPETALLRQVNGVGLLIALTFVLTIEDKERFGKSRDVGCYVGLRPKRSESGQSQPELRITKEGDIYLRRMLVQGAHGVLSRRGPDTDLKRWGTKLAGRGGRNAKKRAIVAVARKLAVLLHRLWVTGEVYEPLRNSGGRHRLRPAA

SEQ ID NO: 301088 - protein, 400 aa, unidentified
MISVGIDVSKEKSTVCILKPYGEIVSKPFEVYHVEQELSELATMLLRLNDEVRIIMEATGIYHLPVLSYFKEKGFFVAVINPFEMKEYRCQGLRRVKTDKQDAITISHYGIDHWYRLKEYEAQENIYTELKLLGRQYCHYMRMRVESVLELTHLLDYTMPGIKTLLQGWNERNGKDKLGDFAEEYWHYDKITKKSEKQFIDSYLKWAKKKGYHQNQDKAIKIYALAKEGIPTVSSNTPSTKMLVQEAVRVLREVDHTLMTILTQMRSLAKSLPEYPIVRAMGGVGDVLAPKLIAEIGDVRRFHSGKALIAYAGIDAPPYQSGRLVGTERKISKRGSSNLRKIGYEVMRSLKTHKAPEDAAVYEFILKKEREGKSKRAAKIAGLNKFLRIYYARVMEVYRK

SEQ ID NO: 301089 - protein, 397 aa, unidentified
MNPLFVGIDVSSKNNVAYLMKPDGSKHSSFSVQNNLGGAKLLSERIVSALGSMQLERVVIGLEATSIYGDSLVYALREDGRLGRFQRKIHVLNPKQVRKFKEAYSDLPKNDWVDAFVIADHLRFGRINREVYMDDYRYKALQTLTRARFDVIQNLTREKQRFANYLFLKCSGMAQDKDIQNTSATTIALMEHFETVDDLANADLEELTAFITETGRGKFADPDATAKAVRAAAKGSYRLPKTVNDTVNQAMAVSIASMRALKGQVKVLDKAIEQQFEIIPNTLTSIPGIGKVYSAGIIAEIGDIHRFDSQASVAKYAGLVWNRSQSGDFEAEHSRMIKSGNRYLRYYLLEAANSVRRCDSEFRRYYDLKFKEVNKYQHKRALALTARSTQCFLLCFA

SEQ ID NO: 301090 - protein, 482 aa, unidentified
MKSRPPEKVKKAPDHATRGHWNEMNRQQRRDMMRKIQSEDLSLEVVHPDAAGIDIGNESHYVAVPPNRDSQAVRRFGCTTVELKAMTHWLKQCRIQTIAMQSTGVYWIAVYDILEAAGLDVYLVNARDTKNLPGRKSDVQESQWLMKLHTYGLLRNSFRPSQEIRTMRTYWRQRNDLVQAAASHIQRMQKVLTQMNIQLANVLSDISGVTGQAIIKAILAGERDAHKLAALRDPRVKASEEQIARYLEGNWQEDLLFVLKQEQHGYEFCQKQMAECDRQLNHYLEQREDRSQGTRLPEEMRKGRLQKKKGNKPQFDLRAELFRMSGTDLTQIDGLDVMTATTILSEAGWDMSKWADENHFVSWLRLCPDNRISGNKIIGKGRLPTNNRASIALRMAASTLRMSNTYLGAQFRRFRTKLGSPIAIKAMAAKLARLVYRMLRYGMKYVDQGAQFYEAQHRKLQITQLKWKATKLGFRVVEAPAA

SEQ ID NO: 301091 - protein, 429 aa, unidentified
MENILAVGIDPGKWINYGVAMVYPEKILLSRSFPNTWTGVLEFDKEVEKIAEQRGLVIIYGVEGGKNCALPLCQILHQRKKRYLLEVNPLKSNRQKDFYGEDKSDAVDARAVAAIVLRSTENLPVIEGGTSLFNDIREAERYLTDLSRRKTQLINKLHSHLSQVYMAHYKNFFPQLKSKKALRFFEQYPIPQYLKGESKEQLMQFLKKTARRYGPFSKKEAQKQIEEKAKMMMYIGTTLGCFPLDRALRIKATIITQLCQQILSLQENIARVEKLLEKDLLPQTGLHLTSFSGMSTILAAIIIGESQDTHRFRSSSSYAKYNGTAPAEKASGGRCRHKARKACNKRLKRAFYLLALSSAGCDSLSREYVNRCQIRGISKKEGVKRLARRLSDVIYAMMRDKTTYDRNKVLARKTRRGGNLIRRHVAAVL

SEQ ID NO: 301092 - protein, 367 aa, unidentified
MSVLSVADCLSQASRFDTYSGSSSMAHAPHLVLGVDTHKDLHVAVLLDRLGRYLAAASFATTDAANTDLVAWTRRYGQVTTAGVEGTGSYGYRLAQHLRDHGIDVVEVNRPDRARRRRRGKNDPVDAEAAARAVLAGDARAVPKDRNGAVGELRALVVARRSAIKARTQATNQLRALLVDGDDELRGRLRPLRKAHLARACAQLAPAAGLQLALGSLGRRWLALNDEITSLDAAITSRVRRTAPRLLERHSVGVQTAAQLLITAGDNPGRLHSEAAFAAVCGASPVEASSGKTIRHRLNRGGDRAANSALWTIANNRLMHDPRSRAYAAKRTALGSSRKEILRCVKRALARELYPLILDTLALPRLP

SEQ ID NO: 301093 - protein, 328 aa, unidentified
MQAGEVIIGIDISKDSFDVVLRGIHGEQHRVLSNDQKGFMALVGWAEKQPERVMYVCMEATGSYWEGLAEYLYQGGYTVSVVNPYQIKRYADHLLNRNKTDKADASLIAEYCEKDRERLRAWKPYSPEIKALRSMGRRLDELQRMKQQEQNRLKSGVTDLVVIESLQENLKQLEAQIKALWKKIKEHVQQHPDLREQQRLLTSIPGIGKLTAIKLIAEIGDIRDFDNASQLAAYAGLSPKQFRSGSSVHKQTHISKQGRIELRACLYMPAVVASEHNPIIMNLKRRMLASGHAMMEVIVAAMKKLLHLVYGVLKSAKPFDPDYGNHFC

SEQ ID NO: 301094 - protein, 385 aa, unidentified
MTNQLQDTTFIPRDYEIFGGLEVDKKSMAVTFRDHGIMRKSLRLPYSASDLLNYTRKHFPGQRVAFVYEAGPTGFGLHDELTAASHPCLVVSPSMVPTVQRKRVKTNRLDSLKLAEGLRGGQLRGIHVPPPSYRELRHLVQLRDTQVAQLRATKCRIKSLLLYEGIPFPTANGKWSGPALRELEALPCNATVRFKLDQLIDALQFHFQSAAKVQKQIRYFCQNDPELRGCISFLVSLPGVGTITATHALARLGDWRQIKDVRQIAGFLGLVSSEHSTGDKENRGEITRIGDSRLRNKLIQCAWTAIRKDPELRAFYRRIYERQPKKVAARKAIVAVARKLTTRMYAVLKEQRPFVIRADSSIAPLTAEETGGPRERLDAAQNEQP

SEQ ID NO: 301095 - protein, 352 aa, unidentified
MRYAKIDSQYYCGIDLHARTMYVCVMAKQGNILLHRNMDNNFNEFKNYLEPFIPDVAVGVESSCYYYWISDACKKENIDFYLGHAFYMKAISGGKVKNDRVDSRKIADLLRANLFPLAYPYPEKMRATRDLLRRRHYFIRRRAGTYTHMQILCMQHGMYDVSSKIVKDEKDRLKLIKFFDNPDLKLMLQIDIDYIESLHPIIERLEKRIRKQAKHHNQRDYQLLMTIPGVGEMLGLVILYETHDISRFEKVQHYSSYCGVVKCERSSAGKIIGSKNNKIRNPYLKWAFGDVIIKAQQVEPKIDKLYQRLKSKYGLGRAKSIIAHRFNVAAYFMLKNKQVFDVDRFCQSSKYN

SEQ ID NO: 301096 - protein, 401 aa, unidentified
MTTMPDNAMRVKRFRELKATLRTAHHRLLVGLDIAQAEHVVHLRHAHTRVVTPALTIPNSTRGFTHLWARIQQAQRATGCREVVCGLEPTGTYHQAVATFLEAQGATVVLLSSSVAYWNRRTQDGTWDKHDRKDAANCAELLEQGKVLFYSQPEGPLAELRPLVKCLRRARTELAACKARWRTTLRPALGPMGKPLPNRLRAELPAVLQAWETAAPGRPALPKGRLPLGLATACADLGAQVTAVQARIAAIERALPPLAERLPAYPLLRTIPGIGPTVGAILLAEIGDIAWFTQFSQLRKLAGLDIVRVQSGQFAGPARISKCGRGLLRWALYHAAMGMARTAAGRARLAALKAKRQGDRYAGFKAIVELAAKVLRVVWGVWRSGTPYDPRRTGGLQRQAR

SEQ ID NO: 301097 - protein, 341 aa, unidentified
MSNANTYIGVDLHKKTCYITVMNYEGEIEKQIEISTDQDEVRKFFEKYREAKVAVESTMNWIPFYENLESLGCKVVLSNPLQTKAIASARIKNDKVDSKVLADLLRTNLLPTSYIQPREIRDLKELVRQRAHFVGLRTKIKNKIHSVLFKTNLKHNFTDLYGVAGMEWLKNLELRDIYKQELERYLLVLEHLNGQVEEVSEVIKETAKLDYDCKLLMTIPGISFYSALMIKSEIGDISRFGNAQKLCSYAGLIPSTYASAEKVRHGRITKRGSKWLRRTVVDAITSGSRNPNRIAAFYKKLKKNKGTGKAKVAAGRKLCSVIFAMLTDQQPFRDFTPTKQR

SEQ ID NO: 301098 - protein, 453 aa, unidentified
MEQPTRFIGMDVHKDTIVVAVTATGDVGKATACGTIPNTAAALEKLANRLHQAGSGSLKFCYEAGPCGYGVHRTLTRLGEDCMVVAPSMIPRKRGDRQKNDKRDANALAVLHRGGLLTAVWVPDAAHEAMRDLIRSRLAAVRAVRTARQQLSAFLLRHERIYRNGRKAWTKAHRGWLADQSFAQPAQQIVLEESIEAVRLGEHRRDRVDGFLRAQIPTWSLFPVVQNLSALRGLDTIASAGLAAAIGDPSRFASAPDFMAYLGLVPSEHSSGPKRRIGAITKSGDIHARTLLIEAAHSYRFPARITRHQLAGVDTVPEAIREIAWKAQTRLCQRYRRMMAKDKPTPVIVTAIARELAGFVWSIACITSDPPAKSSAATTTCDEVCPTESTGRRALRRRSLQAAGARPDQTGAPIELRYVTVDRTHPEADNPKVGTPTSRTRRSAAAPAQRKAG

SEQ ID NO: 301099 - protein, 359 aa, unidentified
METRSNKIDFSNQNIYVGFDVHLKSWKVTILTEKVAVKTFSQDPNPELLFQYLKRNFPGGIYHSAYEAGFCGYWIHNKLLSLGVNSIVVNPADIPTTNKERVQKEDKRDSRKIARSLRNGDLKPIYVPGLKTLEDRGLLRARSTMVKDLTRFKNRIKSFLHFHGINFPESFSKPQSHWSKRSIIWLESLELTEESGKITLSSLIHQSKNLRAAILDLTKQIQKLSCTKTYQDEVILLRSLPGIGILTAMIILTELETILRFSNLDKLCCYIGLVPSTSSSGEKEKTGDITPRGHSVLRNAIIESSWIAIRHDPVLLKSYLDYCKRMDPNKAIVRIAKKLLSRIKFVLKNKQPYVFSWVN

SEQ ID NO: 301100 - protein, 348 aa, unidentified
MVILGIDAHKRTHTVVAIDEVGRQLGTKTTQATTTAAHLELVRWADRFGKDRRWAVEDCRHLSRRLEADLLAAGEELLRVPPKMMAHARDAARTYGKSDPIDALAVARAALREPGLPTARLDGPSRELRLLVDHREDLVRERTGHINRLRWHLHELDPTWDPKPRSLTRYKALDALAVRLGPLEGMVARIARDLVGRIRELTVEANSLQREIEQTVRELAPALLAVRGVGELTAAKIVAETADVRRFRSKDAYARHNGTAPLPVWSGNRIRHRLSRTGNRQLNASIHRVAVTQMRCHGPAKEYLERRMTNGNTKTEALRALKRKLSDVVYRALLADATGSSVAFGEAA

SEQ ID NO: 301101 - protein, 429 aa, unidentified
MKSLAPQQFTAYVGIDWADTKHDICVQVSGSEAREFDCIAHRMPDIDKWARSLHQRFKGPIAVALELARGPIVYALQRYDFFVFFPINPLTLAKYREAFQPSRAKDDPTDAELAVDILVRHPQRFSPLQPQSAAMRTLLSLTEHRRELVDDKTRCTNRLTNALKQYYPQALDWFGQHDTLLFCDFLARWPTLSQAKRARRSSLQAFFHAHNSHRTGVINARLDAIKGAMPLTEDKGVITPCRLQVLALVEQLRATLQAIDCFDREIAQLAPTLPDYALFQDLPGAGPHLAPRLLAAFGEQRQRFGSADQIQKYVGIAPVTERSGKKNWVHWRWQCPKFLRQTFVEWAGQTVNKSFWAGAYYRQQRDKGSSHPAAVRALAFKWIRILYRCWETRTPYDESRYLNALRERGSPLLKNLEINKQSKEVAPLV

SEQ ID NO: 301102 - protein, 398 aa, unidentified
MITADIDIFLGLDVGKTDHWACAVTKDGTKIWNKTLPNDEAKLVSVYQNLSAKGTVLVVVDQPATIGALAVAVAQHLGIPVAYLPGLSMRRIADRYPGTAKTDEKDSFIIADAARTMTHTLRSIQVSDEDEATLGMLTEFDLDLARQITQTSNRIRGLFTQIHPPLERILGPWLEHDAVLEVLAIWPTPAQLKHAGKVRIDAKLKKYSARRHTAWASTIIDALEEQSVIVVGTEAAGLAIPHLARQLVSLHAQHVDVATHLETMVEAHTLYPVLTSMPGVAVRTAAIIIAETSGKTFTSAAALSSYTGLAPTTRQSGTSIKSKRVSHSGNKRLKRALFLSAFASIRFDPTSRNYYDRKRAQGKRHNQALIALAHRRLTVLFAMLRDGSLYDVPELKIA

SEQ ID NO: 301103 - protein, 405 aa, unidentified
MFCGIDWASERHAVCVLDDAGRKATALEIAHTGDGFDHLVTRLRRFGDPATLPVAIERPDGRLVDRLLEAGHPVVPVQPNAIKAWRDAEILSGAKSDPGDAALLAEYLRLRHHRLRVLQPFSAQTRALRAVVRTRDDLVDQRVAATNQLAACLDAFWPGAKAVFADVESPIALDFLTRYPTPESAARLGEQRMAAFCVKHGYCGRRPAAELLARLRAAPAGLTGTVEVEARRDAVLAMVGVLRALNQAIKDLDRAVVAHLGEHPDAEIFTSLPRSGQISAAQVLAEWGDCRPAYDGPDAVAALAGIVPVTKTSGKHRTVSFRWACNKRFRAAITGWADNSRHASPWAAKAYADAVARGCDHPHAVRILARAWARVIWRCWVDQVPYDPAKHGAARKLTETAASAA

SEQ ID NO: 301104 - protein, 349 aa, unidentified
MSLKLNSGVAVIGIDIGKNSFHVVGLDQRGAIVLRQKWSRGQVATRLANVPPCLIGMEACVGAHHLSRKLTSLGHAARLMPAKYVRPYSRGQKNDFRDAEAIAEAVQRPTMKFVATKTAEQLDLQALHRVRERLVSQRTGIINQIRAFLLERGVAVRQGLRFLRAELPRILATPCDALSPRMVRLIEDLAVDWRRLDARIEGLSSEIEVLARRDAGCERLMSVPGIGPIISSAMVAAIGSGDAFAKGRDFAAWLGLVPKQISTGDRTILGKISKRGNRYLRVLFVQAAWVVLIKPKSWQRHGLKPWLEAAKKRLHYNVLAIALANKLARIAWSVLAHGRTFEASKVQTA

SEQ ID NO: 301105 - protein, 324 aa, unidentified
MLPTLGIDISKDSFHLELSINDKLRHRKFANRKEGFGELCVWLVKHKATQVHACLEATGPYSEALALYLHQQGHTVSIVNPVQIKAFGQSELLRNKDDRPDAGLIRRFCEKQQPAPWTPPPAHLRELQALTRHLENLIETRQQQINRLEATNTKNVAKSLRKLVAHLDAEIKRTEQQIDDHVDRHPDLKQQSVLLESIPGVGKRTAAKLLAEITDISQYKSARQVAAYAGLTPRNNRSGTIRGKTRLSKTGNARVRKALFFPAIVAKRHNPIVRAFCERLSSYGKNKMQVIGAAMRKLIHIVFGVLKSGKYFDPNHELLLNSVS

SEQ ID NO: 301106 - protein, 341 aa, unidentified
MTFYTGIDVSLEVSHFCVVDTAGNIVKEARVASEPEAIITWFEGLGLEMTAIGLEAGPLSQWLYAAMTDAKLPVVLLETRQVRDAFRSMPVKTDRKDARGIAQLMRLGWYRPVHCKSQQAQENRTLLAGRKMLQSRYIDLEMCLRGLLRGYGLKVGQTNRKTFEGRVRELAASIPGLDCAVDALLKARATLLEQFRRLDSLVVSRARQDERAQLLMTVPGVGALISLTFVSAIDDPKRFSSSRSVGAHLGLTQRKYQSGETDVTGRISKCGDQEVRTALYEAANIILTRPVKGSQLKSWAAKISCRAGMKKAKVALARKLAVIMHRMLCDGTCFNAGLAAA

SEQ ID NO: 301107 - protein, 429 aa, unidentified
MVDVDALEESCGFVERVAALDMGKASVMACVRVPHPSRPNRRIQEVREYLTLTSALLELADWLRCERVSLVSMEATSDYWKPIYYLLEAEGFTCWLLNARHVRNVPGRPKTDKLDAVWLAKVTERGMCAPSLVHPKPIRQLRDLTRYRRSLIRERTREKQRCEKLLEDAQIKLSSVISDLFGVSGRAMLEALIAGQRNPRALAQLARASMRAKIDVLTEALTGHFDDHHAFLAQRMLNRIDTLSADIDALSAQIQAVIAPFATHVTQLDEIPGVGMIGAQELIAELGVDMTRFPTAGHLASWAKFAPVDHKSAGKGKAAATGKGNPWLAGTLGEIVAGFARTNTFLGHRYRRLSKRRGTNRAIVAAGNSVLTIIWHLLANPQAHYHDLGPHLRHTTAHTAHRQRDLIRQLEGLTGKKVTLHPRSEPTAS

SEQ ID NO: 301108 - protein, 344 aa, unidentified
MENRPKYYVGIDISSADFTSSIGQGKEKWGIIVKPELFTNDNEGFEKYLEWLKEAKLNKKNCVICMENTGIYNEKLVEYLEKLSFRVCVEMPLKVKRAFDVAGSKNDAVDSKQIAEYAYRFFDEMTPWKTKSAILEHVKVLLNVREGLVEERTRHLSRMHALKRKVVRVEFAELALLRHVEQLKKDIEAIEAEIEKIIINEPELGKQFLNLLTAPGVGLLLSAQMVVLLNGFEQPLTDKKVAAYLGICPYEHRSGSSVRRKTRSTQHGPETIRKLLHLGARSICTHKQPYIDYFNKKKAVGKSANLIYNNVSNQMVGLLVAMYKSGDPYIPGYRSLHPALLTKS

SEQ ID NO: 301109 - protein, 368 aa, unidentified
MKQQTSATTETLNKGRTMIDFTGKTIHVGIDVHNKDWQVGQFHAGLVLGNHRITGNSRELIDFLKKRYAGATLKCVYESCAWGFNLQRQLTAAGIECIVVHAGDVPGSDKEKKNKTDKVDAVRLARHHAAGLLKAIHVPDEELQKERNLVRFRKKLVGDLTRSKNRLKSLLKFQGIGIPEKMDNPNWSKNFITWIEQQVANDPLLHHTVELMLEEVRLQRQLLLKTEKKLRQLMRSEKYAATTKLVRSVVGVGPILSTLFLLEAGDIRRFKGFDPLNNLIGFYPGSNSTGDKDIDTGISKRKHKQLRTMLVEAAWQAIRQDPAMLDAYQQLTKRMKGNEAIIRIARKLLRRIRAVLISGQEYQIGVVK

SEQ ID NO: 301110 - protein, 412 aa, unidentified
MDIVHERAAGMDISKRDAKVCLRLPGQREGTYTSTVTTWGATTGQILALRDFLEGEHVTTVVMEATSDYWKPFFYLLEETLPVMLVNAKAARNIPGRKTDVSDATWLAQLGAHGLLRASFVPPEPIRELRDLTRARAIAIRDRTREIQRLEKFLEGSGIKLSAVVSDLTGVSSRAMLEALVNGERDPEVLAGLAKGTLRSRIPELVDALTGRFKAHHAFMARLHLDQIDAQSRIIDALTGRIEEAMEPFSAAREFLTTIPGISLKVADVIIAETGADMSRFETPGRLASWTGVCPGANESAGRIKSAHIMPGNKYLKGALGIAALSASRTKNTYLAAKYWRIAARRGPMKATVALEHSILTAVWHMLADGECYADPGSDHFTLLDPTKAKNNAIKKLNSLGFNVTITPATAA

SEQ ID NO: 301111 - protein, 390 aa, unidentified
MPRIVDDLSRALVAFEQDSTLVAVVELSQSSWLVAGLVPGLWRQPLKKLAADAEALLALVRRWRDEALRAGVAVRRIVLAFEAGRDGFWLARWLRARGIETHVIHAASVAVSREHRRAKTDRLDTQLLMRGLLGWLRGEVGHCKMAQIPTLAEEDDRRPGREREALVAERTRLLNRGKAVLARFGISGFKLGLRKAGERLAGLRTPDGEGLPVHTLGELERILQRLALLKTQIGALEAARRAQPSPSPAQAQAQVMHAALARVVGVGVETADLLTQELFRRGLRDRRAVARFAGLTGSPDESGARRREKGLARAGSARVRRGMIQLAWRFLRFQPAADLALWFQQRAQGASSKQRKVLIVALARKLLIALWRLATTGQVPQGVRLRSAAA

SEQ ID NO: 301112 - protein, 340 aa, unidentified
MVHVGVDLHKRVSQIAVLTAEGVLAQHRIANTPDRVHRFFAQLPSPARVAIEASGTWWWLADLLEGLGHQPILSHPKHTKAIAAARLQNDRVDAARLVHLLRGDLLPQVWIPPPAVREARELLRHRVALVRVRTGIKNHLFALLARRNLHPTSATRWCTARGLRECQDLPLGPLPTMVKEGCLALLRVLDEQIRDLDHELTRRWGADPRVRRLMSIPGIGPFVAIALVLELGDIHRFPTAKHVASYVGLVPRVRDSGERVRRGHIVKEGNRLLRWALVLAATQATRRPGPLRTWFRTMQQRKGKMIARVALARRLAEIAYRVWKEDCDYLALLRHGAVQG

SEQ ID NO: 301113 - protein, 372 aa, unidentified
MNYNTVYVGMDVHKESFTFCAYTIDAEKGSRFQRTEADYKNVLRYLEFLRTVYGNDANFICGYEAGCLGYTLYHQLTEHHVNCVILAPTTMLEQRSKKRIKTDKRDAEIIAKCLAQHNYSPVHIPTAADEETKEFLRMRDEHKLALKKVKQQILAFCLRHNYRYDGNSHWTAAHIKWLKSLKPEALYKEILDEYLLTYTALSDKLERLDKRIEELASKDEYKESVKKLCCFIGVKTHTALSVLVEVGDFHRFASAQNFASYLGLVPGEDSSGDGQTRLGITKAGNRHVRMLLTEASQCYARGQIGFKSKKLKSRQAGNSPQIIAYADKANERLRRRYYKMVLGKSKKPNVAKTAIARELACFIWGMMTDHVA

SEQ ID NO: 301114 - protein, 481 aa, unidentified
MAKRNLSTFERLRFGAALNRKERREVQQRLQATDPGLEIVNRDAAGIDVGNESHYVAVPPGRDAQPVREFGSWTAALEEMAQWLIRCGIRTVAMQSTGVYWIAVHDVLQQHGLEVNLVDARGTKNVPGRKSDVQECQWLMRLHTYGLLRACFLPAPEIHAVRTMWRLRDQHVKDAGRCIQHMQKALIEMNVQLHIVLSDISGMSGQAIIRALLAGQRDPKVLAALRDPRCQASEEEIIHSLHGSWKPDVLFELQQAVDAYDFYHLQMAKCDEQLKQYMVLLPARKTEMCAPPAASDKSKSRRSRKPSKPTKNQPSFNLEAELERILGVNATTINGLGAMTIQTVLAEVGPDLSAWKTEAQWSSWLNLAPKRDVSGGKVVRHVRGQHLNRVGNAFRTAAQTLLRSESYLGARFRYLRVKLGGLKAVKAMARILACQYYRLITKGQVWVDQGAEEFKRRSEQRELATLQRKARQHGMQLVPTA

SEQ ID NO: 301115 - protein, 451 aa, unidentified
MKKGNIEMNIVNPNAAGIDIGSRSHFVAVGQADNEIEEFGVYAEDLTAICNYLKKFGVTTVALESTGDYWQNLFTELIKFDFEVILVNGKFTKNAKGKKTDVKDARWIQQLHSLGLLSSSFLPDHETEIIRTYYRQRSNIIRQIAGTSRRMQKFLKFLNFRLDVVVKDVCGLTGLKIIDEICKGNLDPSELAKNRHYNCRKSEQEIEKALHGNNRQDFLFGLKQEYEAFTFLQKQLIRCDKEIEKALKLFLNKHPEKKKLKFNSNPYKRKNKNAPEVKDFAKKAYQYFGGVDFMAIEGVSHATVLSIMSEIGFAGFSKFQTAKHFTSWLRLAPNNKISGGKTLSNKLPKGSNRLKIALRQAANAIGNLKETHLSDFFKRVAYRRGRQAAVSATARKLAVIIWNMITKKEPYNPPSIYMYRDEKRKLGLIKKIRKQIAKFDINPADVGILTT

SEQ ID NO: 301116 - protein, 350 aa, unidentified
MVVVGADVHKRTHTFVAVDEVGRKIGEKVVTATTAGHAEAVMWVRERFGAEVVWAIEDCRHLSARLERDLMGFGQSVVRVPPKLMAQTRASARTRGKSDPIDALAVARGFLREPDLPVASHDEVSRELKLLVDRREVLVAQRTATINRLLWRVHELDPHHAPKARSLDLAKHRRLLGDWLVTVPGLVAELARDELADITRLTETINALAKRIGPRVRHLAPALLALPGCGELTAAKLVGEAAGVTRFKSEAAFARHAGVAPVPVWSGNTAGRVRMTRSGNRQLNAALHRIAVTQIRLDGLGQAYYRHRQDCGDSKAEALRCLKRRLARVVFGHLHIDHQNRTQPCQQAAA

SEQ ID NO: 301117 - protein, 404 aa, unidentified
MIRHGSSHWSVAKGESQVQAFLEKKNPYKKSFKFKHDRMRLHDYYLFYQEVEQRGGQSPSVIFESTGHYHEPVLQFLEDHGVTYYLVNPVISYEAKKVSLRKVKTDAMDAYHLCELYYKEDLEAFQKKSIQTLNLRNLSRQHDSFTGTYVQTKLQFHTILDQVFPEYKGVFGDLFSKVSLHTLLAFPTPREVEERSIYEIAHEIHHLCKSRSESWAMKKAEELKYAARNNPYKQTLYYSHLISLKMYSEMLLQYLKHLSQLEAEIDAMAQKFESYHIIRSIPGIGGKIAATIISEIGEIDRFNNPKKLVAFAGIDPSVHESGQFKARINRITKRGSTRLRQILYTAVQCGLINTRNPRLKEFYDRKREEGKPHKVAVIACANKLIHWIYALLKRKETFVIYPLP

SEQ ID NO: 301118 - protein, 429 aa, unidentified
MNYNTQNAKITSITEKSLIVGIDVGSETHYARAFSWRNYEYSKKPFAFSNDEDGFASFKAWMDDIAEKHEMEKVIPGMEPTGHYWLNLGAYLQEQGMKPVHVNPHHVKKSKELDDNNPSKNDRKDPKTIAGLVNEGRFSYPYIPTGIYAEIRNLSNLRIQTQEEITRIKNRIARWFSIYFPEIKDVYRNPDAVSGLIVIKQAPLPCDIKELGVNGVNKIWRDARLKGAGIKRATTLVTAAEHSIGNTEAPRSARKEIRNLLNDYETYKNRMDELMQEIKETLSEIPYIDKLMEINGIGIKTVSCFIAEVGDIGRFDNPKQVQKLAGYAIVADSSGKHNGESRISHRGRKRLRYALYEAAISVIGKNKEFKEIHSYYRTREKNPLKKMQSVIAVACKLIRIFYTILTKGVDYDSQKMLNDIVRPEIQLAA

SEQ ID NO: 301119 - protein, 352 aa, unidentified
MIIIGVDFHPEFQQIASVDTDTGEVQEKRLAHREEAEKFYRALAGQKVRVGMEASGHGRWFERLVAELQFELWIGDAADIRTRRVRKQKTDRQDAQLILRLLLEDRFPKIWVPSWENRDLRQLLWHRHRMVQARTRIMNQLQAVALNEGLRCKKRLWRIHGREQLESFRLAPWASRRRRDLLELMDRLNPTIAELSQAIEQEVEKCPEARRLMTHPGVGPLTALAFVLIIGEADRFQCGKQVASYLGLVPLEDSSGNRRRLGHITKQGSSMLRFLLVEAAQVTVRSLPEWRSKYLHLMMRRGRKIAKVAMARKLAVRLYWLMRQGWDYQQWVKFGSHAGQPGNRHGVQSNTE

SEQ ID NO: 301120 - protein, 322 aa, unidentified
MAQGEVMVGVDVSQARLDVALWPGGESFSLSNDPTGVEQLLKRMLELRPQAVVIEASGGPEDLLVGELCAAGVPVAVVNPRQVREFARSLGQLAKTDRLDALVLAQFGHSAQNHGRLTLSQLPAVAEAELKALVRRRRQLIGMLVAETNRRQRASKVVKRSIVATIRALKRSLVELEQQVRETIKNSPAHQQKIAILQQVPGIGPQLARTLIAEVPELGQIGRRQIASLIGVAPHAHESGKFKGRRMIWGGRAGVRSTLYMAMLSATRHNPLVAPFYRRLLERGKSKKLAYIACARKLLVIINAMFRDRTPWSPGLDSQHSR

SEQ ID NO: 301121 - protein, 338 aa, unidentified
MYYVGCDQHKKYSYVVVKDQKGNTLNQVKLYHADKENMKNYFKGLPNASTVAIESCTFAHWLGDMLEELGLKVKMSHPTKTKAIAEEKIKTDKISASVLADLLRADMLPQAYRAPVDTRDSRSLMRYRQHLVTLRTSLKNRIHCIIDYHGIQQSFSDLFGVDGRRFIEQLKLRPTYKSIIENCLAIIDDLNKRISKLDYQLKCKIKTNNKAKALATIPGIGAIIANIILAEAGDINRFANHHRFARYIGIVPSIHQSGQILYHGHITKQGNKYLRTAFVEAAQTAIRRDPYLLAQFNKIKTKKGYGVAIVAIAHKLTKSAYMILKNNWEYRYRSVYNR

SEQ ID NO: 301122 - protein, 353 aa, unidentified
MSSDKYIALDVHQATTVTSVLNAAGREVDQSVIATKSQPIRSYLEGFSGPLHVTLEEGTYAAWLYDLLEGRVAELVVCDPRHNALLKEGSKTDRNDARKLADLLRTGMLRPVYHGSRSVRPLQELVHSYEALVEDTTRAMNRIKALYRRRGIDCAGRGVYTQKQRASWLEKLPAGASRLRGELLHEQLDHTRSLRRKARLALLKESRKHLISARLREVPGLGPLRVARLIAWIQTPHRFRTRRQFWTYCGLGLVIFDSSEYRLIQGRVVRRAQPVKIRGLNRNHQPRLKEIFKSAALSAIRQPGPLKEYYDARVSQGRDPALLRLSVARKLAALVLSLWKKGGRYRAQDVKQA

SEQ ID NO: 301123 - protein, 359 aa, unidentified
MARSSLTSLNNFVEKFSGHEFWVGADVHKRSYHIAIYRVDGEVRTFVCPACPARLLRKLQSLNVTIAGLAYEAGPTGFSLARIIQSAGIRVIVAAPSRIPRPVLCGAKTDRLDCIKLAEYGAKGMIKSIVIPTEKEEAKRSLIRRRHLVVDSIRKCKQRIKGKLLFLGIQEPQEVRNWTKNAPEVLLALPMDDVAKLALESFLREFAFLQEELKTILKKLNNILKEEGIRKTMTCLKSVPGVGMVVASTFCMELFRPERFTRAEEVTSYLGLAPMVYHSGENNPSGRLKPVGQRRLRSLLIEAAWMWRSRDEYARKTYNRLLGKTGIPQKAITALARKLAVILWRLSVEKRTYRKIEAV

SEQ ID NO: 301124 - protein, 447 aa, unidentified
MAKTKQKMVELAMLNPNAAGIDIGSTEHWVAVPEDRDAERVKRFSAFTCGLHQIARWLKKCGITTIAMESTGIYWLNLFLLLEDYGFEVFLVNARNVKNVSGRKTDMSDAEWIQKLHSCELLSNSFQPDNYTRELRTYTRHRQNLIRQASRYLQHMQKSMELMNLKLHKVIRDLAGKTGMSIVSAILNGERDTEALADFWDRCIRASKETIMKSLEGTWNEEYLFTLRQAYDAYHFVHGQIRQSDEKIEKVLQEKEAVEISGNDKKPLKKRRKTKNKNPLKFDVDNYLKTQLGVDITQIDGIDCRSDLNILGEMGSDFSKWPTRKQFFSWLNLVPNNKQSGGKLISSHLMNKKNSARHIFRKCGSCLWKSKGPLGDYYRIQRAKNGGKAAAIATGNKLASIVYTMVTQQVEYHESILVNMKRNSQQKRLDNLEKKVAHIQKELEEAA

SEQ ID NO: 301125 - protein, 316 aa, unidentified
MNSPVFIGLDVSKQHLDVAVRPQNRHFVNSNDDRGIKQLVKRLAALKPELIVLEASGGYEFLVTAALAEAQLPVALLNPQAVRKFAGATGKLAKTDKIDAQVLAHFAEALRPEPRPLPDQALQVLKAALQRRLQVVKMIGQEKNRLEKTFIPSVRQDIQEHLAWLQKRLKELDRDLNDQIRQSPLWRDRDRLYQSVPGIGPVVSRAVIAQLPEIGTLSGKKAAALVGVAPFNRDSGRFRGKRMIRGGRSYLRNMLYMAAVVASQWNPVIRAFYQRLLAAGKSPKLALTACIRKLVLILNAMVKNNQPWNQFITQVP

SEQ ID NO: 301126 - protein, 339 aa, unidentified
MKFTPFGVDIAKHLMQIHFVDEYTGELIDKQLRRPDFLTFFSNREPCLIGMEACGGAHYWARELRKLGHDVRLLQAKFVKAFRMGNKNDVQDARAIWLAVQQPGKSIAIKNEGQQAILSLHRMRHQLVKFRTAQINALHGLLLEFGETVHKGRASLDKAMPEVLERLRKKLAPFLLALLEEQYHRLTEIDEQIEQMENQLTAWAKQNADCQRIMKIPGVGVLIATAAIATMGDPSAFRSGREFSAYLGLVPKQTGTGGRVKLLGISKRGDTYLRTLFIHGARVTTLLTKTPLPWVTALKKRRPVCVAIVGMANKLARTVWALVAHQQEYQKDYISVRPY

SEQ ID NO: 301127 - protein, 425 aa, unidentified
MEVPARSSTGLSCENERTGRVAVRERIWVGIDVGKIAHHASAVDETGKVVFSQRVDNGQVAIEQLVARAGKAAAEVRWAVDLTSGAAGLLVMLLLATGQPVTYVSGQTVNRMAGAFGGEGKTDAKDARIIAETSRMRGDLPRLSVPDQVVTDLAVLTARRADLMNDWVRDVNRLRELLSSIFPALEKRLDCTTRAALTLLTGFQTPAAVRDAGEPGLTRHLHDLGVRPGTAHTVTAKALAAAAEQTAALPAEAVTAPLIARLSRQLLDLDREAKDLTKQIGDTFRTHPQAAIIESLPGLGPVLGAEFLVGTGGDLSAFRGPDKLAAFAGLAPMPRDSGRVSGNRRKPRRYYRGLRRVFYMAALVSTMREGPSKTFYQRKRTEGKHHVQALIALARRLVDVLWALLRDNRPFTPAVTDTAAVPTAA

SEQ ID NO: 301128 - protein, 379 aa, unidentified
MMTPSIAATCFVAIDLSKSKWLVALDAPQLAKIKSVRLDGFDTAGLIDLVRATVAEATELCGPDQRPIVCFETGYDGFWLQRLLSNEGIETLVVDPTSFLVNRKARRVKTDRVDAEGMVVLLKNYCSGDRKAFRTVRVPTVAEEDAKRFHRERKRLMSERTGHINRIRALLALQGVRHINPAMVTWRKKLEGLETADGRPFPDQLMREIVRSFERLELTNKMIKALAEERDEALAAESEQFPEHEKAVLLEGLRGVGRHSAMLLSAEVFGREFKNRRHLSSYLGLTPSPYSSGDVERSQGISKAGNRPARTLGIELAWCWLRYQPQSALARWFRKYTAERPGVRKKVAIVALARKLIVALWRYVETGLVPSGAVLKAEV

SEQ ID NO: 301129 - protein, 343 aa, unidentified
MQTVSTIGLDIAKSVFQVHGVDANGLVVVRRQLKRRYVLAFFEKLGPCLVGIEACASSHYWSRELQALGHNVRLMPPAYVKPYVKRQKNDMADAEAICEAVTRANMRFVPTKTPEQQSGLVLHRTRHLFIRQQTSLINAIRGHLAEFGVTAPVGRKGIEELLRVIADPSDKRVPDVVRACLAALGSQLLSLKKQILDFDRMIMAWHRSNQTSKRLNCIPGVGPLLATALVASVADPKVFRSGRNFSAWIGLVPKQHSSGGRARLGSISKQGDRYLRGLFVAGALAVIRYAKLHGTKYRPWVAALLARRPTKVAAIALANKLARMAWAMMARGERYNYPAALRV

SEQ ID NO: 301130 - protein, 370 aa, unidentified
MTMSNILFIGMDVHKDSIEIAIAESDSQEVRRYGRIGGTHDAMRKTLRKLVSQGKSLHFCYEAGPCGYELYRYLVSEDHDCWVVAPSLIPKRPGDKVKTDKRDAVQLARLLRAGELTPVYVPNREDEAIRDLSRAREDTMLVQKSARQRLKSFLLRHDIRYQGKTSWTEAHLRWLADEVRCPSPAQQIVFHEYVNAVTESQQRLQRLDEQIEHFAQAWRLYPAVEALMSMRGVKMIVAITVVSELGDLSRFESPKQLMSFLGLIPSEYSSGPRQKRGGITKTGNGHVRRILIEAAWCYRYPAKVSREMQLRQEKVPLVIRDIAWRAQLRLTQRYKHMQSKGKPHNVTVVALARELTGFMWAIVNEVKYPR

SEQ ID NO: 301131 - protein, 353 aa, unidentified
MVPPVNNRSGAFGTAAAVTHDRTVARLSIVRTRQVTVTKIICGVDVSSTSLDAFVGPSGPAHSFRNTAEGIAELAAFCRQQSVDLVAMEASGGYEKQAFALLWAGGVPVALLNPRAVRDFAKGMGLLEKTDCIDARVIAWFAAVKGSMSNAPASAEQQRLKALVTRLRQLTELQAAQRNQRLLVSEATVLELIAELLKVVASQIRMLEAEIAALLASDPLWQKLDQALRSIKGVADRTVARVMAEMPEIGTLSNKAVSKLAGLAPLAHDSGKREGKRLVRGGRRNVRAILFVVAGVVRRHDPDFAAFHQRLSAAGKPRKVIRIALAHKLLVRLNARARDARKAFAGASVCQSA

SEQ ID NO: 301132 - protein, 499 aa, unidentified
MEWDWRASEVGARRKTKQKPAMVEPVEIPDAEHELVVDRGAAIDVAKAAGKVCVRLPGKSGRRFSRVWDVPARTGAITELAEQLVELGIEKVTVESTSDYWRIWYYLLEDAGVDVQLVNSRDVRNVPGRPKTDKLDAVWLAKLTEKGLLRPSFVPPAPIRVLRDYTRLREDLIRERTRYWQRLEKLLEDAAIKVSAVASKLDTLSTRDMVEALIGGERDSRRLADLARGRMKTKRSELITALDGRFDDHHAELARLLLGQIDALTAQIGALSARIERLIDAMDESDHPTGDRGRSGGGGPQVTGAPSTGGQATAPARRTTTAIGVDSDTATVVEPQRLTAVERLDEITGVGQCAAQTIIAEIGLDMARFPTPEHLVSWAKLCPRTIQSGPVIRGGKTGKGNPYLKGALGEAAAAAARTDTFLGERYRRLVKRRGRLKALVAVARSILVIVWQLLSDPTARFHDLGPDYHTSRVVTERKIRNHIAHLTAMGFHVTLQPAA

SEQ ID NO: 301133 - protein, 342 aa, unidentified
MDKFDAAGLEVSAKVLVVALQTDGQLRSSEFPNTAAGHKQLVRYLRHYSRRLRICLESTGLYGLDVALALQGQEGLEVMVANPRSVRHFAQAMMKRSKTDPLDAELLAEYSQRMPFQAWQPPSVPGRRLCAVARAIHQLTEMSTMQKNRLHAAGSTQTTPKIVVTELRRNLAHQQRSIKRLVREAVQLVQSDPLLQKRFQLLLGIGGIAELSAVQLLGELVLVPPDCDVRQWVAYAGLDPRQYKSGESVQKKVRISKAGNKHLRRALYMPALVAVRHQPYFRAFYQHLRAKGKLKKVALVAVMRKLLHGIFGVFKSLQPFDAAKLFSSSIAVPDLTKKKLAS

SEQ ID NO: 301134 - protein, 352 aa, unidentified
MKRYRQSEDKGKRIYVGIDVHQIQWHVTIRTQDIELFHGAIPGKWEALERMLDRYRGYAKQAVYEAGYFGFWLHDHLARYGADCIVTPPSLVPQEYGNYVKTDRRDSRKLAHLLAKGFLKRVWVPSPEERYERQVIRRRRQLIGDRVRTQNRIKAELRFYGVDLPSPTGQWSKAYVKVLRQLRFDNRWMQESFERLLEEYEFLTQQIERQTKVLRELAETTEYRERVGILRTTPGIGLISAMELLLELQDVERFRRADQLAAYVGLTPSQYSSGGNVRMGRITAIGKNDLRGTLVEIAWRLIGKDPTMRRKYERIKARAGSKRAIIAIARRLLLCTRRMLLDRQPYIVGLAA

SEQ ID NO: 301135 - protein, 341 aa, unidentified
MKKFIRIGVDLAKNYFQVHALESEDGRAVTRKLKRSKMHEFFSRIEPCVIGMEACGSAHYWGRELKAMGHEVLLMPPAYTKPYVKRGKNDAVDADAICEAMSRPGMRFVPIKSPEQQAMLMLHKTRELLTKQRTMSVNALRGHLSEFGIVAAKGIGRVDELLDLADSDATLPVAAKAGVNVLAQALEGLDTAINALENEIANADAQNEMVRLLDKVPGVGKLIASVIAASVPDPSVFKSGRDFAAWLGLTPRQNSSGGKQTLGSITKQGNRYIRKMLVLGATSLLNVVGKRKGALHDWIVGLLAKKPARLVTVALANKLARILWAMMKTGECFRTEMFAKA

SEQ ID NO: 301136 - protein, 348 aa, unidentified
MKILAMDLGKSNTIVCFYDSDSAMHKFGKVKTTPQQIHDLIAEHEPDRVVFEMGSATGWIYDIAMASGVEVQVANTNHHAWRWKNVKKKNDRDDALKLAQLSAMNQLPLVHVPKRSIRQKRSLIRYRQSLVKRRTQIKNNIRAILDKEGCSMTQGKGGWSKGTLEELRKIALPIDECDVDNLWRGQLYVELELLESVGSCIRKIEICLDGQGKTDKQIQRLQTAAGIGPRLAEAVVAFLDEPNRFKNGKQVGSYVGLTPRQYQSGEMNHQGKISGQGNKLLRSLLVEVSWLGLRHNPWMLKTYERILRGSASRKKIAITAVARKLLVRCWAMMRDEQDWREEKPKHAA

SEQ ID NO: 301137 - protein, 374 aa, unidentified
MVMTGVRSPESADVEVVLGVDTHLDFHVAVALDNLGRRLGELTVPTTTKGYKRLLSWAEDFGAVRCAGVEGTSSYGAGLARYLTATGVAVAEVERPKRRHLRRNGKSDPIDAEAAARTVLAGETAGAPKSADGRVEMIRALRTARRSAVKARGQAANQLQALVVTAPDALRDRLRWLSTRRLVTAACRFRPGTRPETPEAATKLALRSVARRHEALSEEIAELDVQLDRLVAEAAPELLALPAVGTDHAATLLIVAGDNPERLRSEASFASLCGASPVEASSGKVVRHRLNRGGNRDANRALHMICMVRMGQDRRTREYVARRTAEGKSKREILRCLKRYVAREVYRVLVVAVEASPLTTGYPGASSGRLSVMS

SEQ ID NO: 301138 - protein, 348 aa, unidentified
MRAWRLPIKDRWCVGIDLHKDTLYVVAFDPRSGEVLERRLACKCRAKIVEFFRSLGRPNIVAIEAVGFYRWLWELLEPVVDRLVLADATQCRALAGRRIKTDAEDAANVMELLMAGRLPLAWAPPTPVAALRDLTRHRNYLSRQHARVLHRVKSIMLLVNRPGPARLKAPGLMRYLKAQRDKLPAHLAEQLEMAVDELVLLERQLDRMEQRLKAHLGQPGFAAVAECLESFPGVSTVIAATILAEVGDFRRFGDRDAISRYAGLNPRLFSSGETTRTGRISKTGSPDLRWALVQAGWVAVRCDPAVRRLWLRLRKRLGGKRAIVAVARRMLRWMWSASRHGRLYQPAA

SEQ ID NO: 301139 - protein, 334 aa, unidentified
MENIALIGIDLGKNSFHIHCQDHRGKAVYRKKFTRPKLIEFLATCPATTIAMEACGGSHFMARKLAELGHFPKLISPQFVRPFVKSNKNDFVDAEAICEAASRPSMRFVQPRTESQQAMRALHRVRESLVQDKVKTTNQMHAFLLEFGISVPRGAAVISRLSTILEDNSLPLYLSQLLLKLQQHYHYLVEQIKDLESQLKRKLDEDEVGQRLLSIPCVGTLTASTISTEIGDGKQYASSRDFAAATGLVPRQYSTGGRTTLLGISKRGNKKIRTLLVQCARVFIQKLEHQSGKLADWVRDLLCRKSNFVVTCALANKLARIAWALTARQQTYEA

SEQ ID NO: 301140 - protein, 394 aa, unidentified
MTLYIGIDVAKTFHIACVINAQGQMMAQLRFDNDAAGFHQLEQIIQRLAFPEMEWVLCGMESTGHYGIALRDFLIQLGYPVQVFNPLKVNRFRDFYIQPHKDDYRDAFVIAQMLRYGERAPYTPPRPAIRALKQLTRYRTSLVRARAKVKTQIRAILDEVFPEYQQTPLFVDVFGAGSLALLKRFPTPQELAATSQEELASLLSRNSRGRLSSQRAALILEKARGSVGSPASARAFATILPDLIDELEILESRISHFTAKIEAQLAEIDQTLTTIPGIGPIFAATILGEIGDITHFPSADALVAYCGFAPRRYQSGQFTAKNMHLAKRGVPQLRYVFYRAALVSIQYNPDLAAYYQAKLRQGKPKKKAVIAVARKLIRIVYALLKSQSPYVSPG

SEQ ID NO: 301141 - protein, 317 aa, unidentified
MTDSGVIVGIDVSKDRLDVFVRPEGQRFSVSNDEAGRKALVERLRLYGVKVVALEASGGYERPAVADLVAAGFAVRLLNAGQVRKFAQAGGLRAKNDRIDAEVIAHYAEVFNGPVCQRTSQTALLSELVGTRTLLVEQKVALGNRRRMMSDAGVRDSLDDVIADLERKIREIEGRLADIVAADPVLARKAEIVTSVISVGPVVSWTVLALLPELGSLGRKPIASLVGLAPFDRDSGVYKGRRKIEGGRKPLRDVLYMAAQSARRYNPDLAAFDERLRAQGKKKKVAIAAVMRKLLVMLNALVRDNRLWTPDHVSVRP

SEQ ID NO: 301142 - protein, 353 aa, unidentified
MKRETESNRTTLAVIGVDIGKEVFHLVGFGVDGKIAFRKRIRRLGLKDAFEKLPPCIVGMEACLSAHFVSRTLRGLGHEPRIIPAIYVKPFVKGQKNDYNDAEAIAEAALRPNLRFVQEKSQDQLDLQACHRVRSRLVSRRTATINQIRAFLIEQGIAVRTGLRALRKSLFAILENRKDEISPRTAKLIRGLYEDWCALDDRIETVTAEIEDLSRTESKCRRLMTVPGVGPLISTAMVAAIGTGEAFDCGRDFAAWLGLVPRQHSTGGRSILGRISKRGSKYLRTLLIQAAKVLLMRPRNWSGYSFGAWLKTASQRLHRNKLAVALANKLARIAWSVLHHDKAFDTHLEAAAI

SEQ ID NO: 301143 - protein, 378 aa, unidentified
MRIVCGLDVHKDSVYLCILSSTGEIVEKVFGVLTFQLAKMRDLMLKHHVQEVGMESTSVYWIPIWRVLEPHFKLKLVNPYFIKQLPGHKSDVKDAQWIAECMLKELVRGSFVPPERIQQLRLYDRRIFDLDDEINRKLSKLDAALQRCNIRLSNYVSNTDSKSYKEVVARISEGITDPKVLVEEIHGRIINRHGRKTIIAALTGVITQADSDMMRQIREEIDIAERHKQECIDKMQEICEKEYSDQLRNLQTIPGVKLRAATSLIAEIGIDMSHFETANHLASWSGLKPRNDESNKVIKSKRITHGNRYLRRTIIECSWAASRTQGCFFSRFSYHQTQVRKKTKMKVQVAISRKLLICAWHILSKNVPYQDFCERGIS

SEQ ID NO: 301144 - protein, 395 aa, unidentified
MYYLGIDIGKNNHEAGLITDDGSHVYKSLRFTNTQEGFQKLLQFLEQRLPEQESFCVGMEATGHYWLALYSFLREQGFVLHVINPIQSDSLRNFHIRQQKTDAVDCFLVAEVIRFGKFSETHLADEDILVLRNLARFRESLKDSCADYKRQVITVMDQVFPEYDTLFSNLFGESSKAFLKTYGTPDQVVEVNTKSLAALLSKASRGRHSTEKARELKSLAARSVGLTLCSDAFAFQIRILIEQIEFTEKQIDEIDKKIAKQLKKLNSVILTIPGVGPATGAIILGEIGDISRFSNPKKLVAFAGIDPTAFQSGNFVGQHNRLSKKGSSYLRRAVWMSALIAARHDPVFKAFYEKKRSEGKAHGTALGAVSRKLLYTIHAVLKANQPYEVRLETIE

SEQ ID NO: 301145 - protein, 346 aa, unidentified
MMIIGCDFHPSWQQVAVFDSETGEVSERKLVNGDGEAERFYGGLPLPSLVGVEACGNSQWFIELLQQLGHEVWVGDAAQIRASYVRKQKTDKHDARHIRKLLVEGRFPRLWTPSAEQRDLRQLLIHRHKLVEIRTRVKNGLQHLMLNRGVQKKHRLWTEAGQKALRELPLGGWAARRRQDLLALLQSLDRQIGQLDQAAKQAAEEHEQARLLMTQPGVGPITSLAFALTIGDVRRFARGKQVASYLGLIPREHSSGGRQQLGAISKQGNRFLRMLLVEAVQSVIRLDEGFRKQYKQRCHRMEKGVAKVAAARRLAVRLYWMLRTNMAYPEIVRIESSPRVALVGEN

SEQ ID NO: 301146 - protein, 409 aa, unidentified
MRPILRSCCGIDVHKSMIKACVAKGPLNKPPKIEIRTYTTMTSDLLKLSEWLKENKVEAVAMESTGVYWKPIFNILEADFPVSIANPKYLKKVPGKKTDVSDSEWIATLLRCGLIPKSFIPPKPIRELRDLNRTRRKMVEHMASEKNRLQKVLEDANIKLTSVVSKVDGISSMNMIQALLTQDEISREDIAAMVHGKLKNKIDQLVQALHGRLTDHHRYLLRLHLKQIAFLADQIKELDDVIQKKMKAFKKESDLIKTVPGIGDTTSAAIIAEIGIDMSQFPDEAHLSSWAGICPGNNESAGVKKSGKIRKGNKFLKATLCEAAWSASKKKGSAYSAYYNNLAKRRGKKKALVALAHRMLMDIYRTMKTGEPYVDEGAEAVFERNSSGRQKSAIRFLEKAGYAVTKASA

SEQ ID NO: 301147 - protein, 371 aa, unidentified
MSKSTTILYVGLDVHKDSIAVATCGPERGDEPVFVGPIGTRECDIDKMVRRLQSRASRLVFAYEAGPCGYVLYRKLTAMGLECLVVAPSLIPRKAGDRVKTDRRDAVQLARLLRSGDLTSVYVPKVEDEAIRDLSRAREDAIIDLKGARLRLKSFLLRLGISYVGRANWNDAHRRFLSRMVCPTPAQQVVFQEYLRAVDDHAARLKRIEEHLAEFLPGWRMNPVVEALQALRGVQQITAVTTVAELGDITRFDSPRQLADFLGLTPSEYSTGESRRQGGITKAGNAHARRALVEGAWAYRHPAKVSPHIHKRLEKLPKPIQDISWKAQVRLCKRFRRLTARGKNPNVVVTAIARELAAFMWAIAREVPGKA

SEQ ID NO: 301148 - protein, 276 aa, unidentified
METAYDGPQFVGMDLHRRRSVLVRMTGDGRRLSTARITNSPAELRRAIAAAGKSPRVVLEATYGWYWAADVLQAAGAEVHLAHPLGVKAFAYRRVKNDEKDAADLADLLRMGPLPEAWIAPAEIGELRELTRYRLKLVQRRSGFKEQVHAVLAKLGVPVTCTDIFGVWGNTWLDGLALPQLYAGKVASLRTLIGQLATEIALLDAVIADLLADHDGYRALQALPGIGPVLAAVIVAEIGDIHRFSCPGKLCSWACLTPRHRESDLKVARGHITKQG

SEQ ID NO: 301149 - protein, 350 aa, unidentified
MTIKHYIGFDVHKKTISYCVKAADGNIHEEGILRAIPMVLREWAGKRQEPWHGAMEATLFSGWVYDALKPFASALEIGNPSMMKAISAAKKKNDKLDARKIADLVRCNLLPACYVAPQEMRALRRLLRYRNVVVAQAVRMKNKMSGLLMEVGAEYSKQRLHSKKYFSELLDQLEEVPESVKDLLRLSRGSVEMFETTQRQLLNRLQKDPLLVKRVELLRSIGGVGEVTALTWALEICDPQRFHCIADAVSYCGLSSALVSSAGKQQRGPISKQRNAHLQTVLIEAAKLAPRWNRQLAELHERERKRGNRNRATLAVARKLVAYLLAVDKSGQAFQVRNPPPAEPGVDKVA

SEQ ID NO: 301150 - protein, 406 aa, unidentified
MEKKEKRYIGLDVHKHYLVALGVDVDLNVVLPMRRVELSHLESWMKKNLTKQDEVVLEMTTNTWQLYDELSEHAGTVTVVHPPHVALITRSQVMNDKIAASILARLLAKGLLVGIWVPPQEVRELRGLVAQRQKMTRLATQAKNRLHAVLQRHHLKAPAGNPFAKTNNGWWQALTLGKLEKMNMQSDLETLQFAEQQEVRVEKEMTLIAAEDEKIGRLLQISGFGVITAVTVSAAIGDIARFIEPKKLVGYAGLGARVHDSGMTTRTGKITKAGRRDLRVALVEAAHVAANNHPHWKAELARLQPRLGYNKAIVAIARKLLITVWYVLQGKSDKYVEPKAVAQKMLKFAYSVGKTNRAGKTAAQFARERLDRLEMGKDLVSIPWGVKKPVPLPPSKLKGESAVPNK

SEQ ID NO: 301151 - protein, 399 aa, unidentified
MLNPQALQLRVGVDVGSQCHRVAVGLSDGSLLEEFETLHTAAGFEDFFSRIEEHAKLHPYPIAVAMEGYNGHVRPLDSLVRARGWQLFNVNNLKLARFKEIFPAAAKSDRIDTRKTLELFQLRDHLPMAGDVLQEVMVTPEENDILKRLSRRRRRLVNEKGRVVNSMQADLQAAAPGLLLITRDVANLWFLNFLTCRDDIRKLARVRRASLLKLSAIGPAYADHIQAWQNDACFGHDARLVGDMIRQDAMRILELNQQIKALEVETARIAAKSTIACQLASIPGYGSVCTAELAGEIGTIARFRSEASLALYLGMATLDNSSGKYRGSKAPKHVNARAKAAMMAAVDHHRKRVPQSQSYYEKKRAEGKKHNQAIRALGRHLCRVIFKMLSQERPYRIDP

SEQ ID NO: 301152 - protein, 422 aa, unidentified
MDENSRLTEFRQMKNEIRGSSRYLVVGIDVAKERHHAFFGRSDGRTLLRNIVFDNTKEGFEKLLFHAEITKKRHMLETVVFGMEHTADYHKPLAGYLIEKGYLTVLVAGTAVKRNRELLDGRWDKHDTKDAANIADLVAQGKCLFCEFPSPQIQQIRALLSLQRRLKKSERGCMVRIRNHLIAQYFPELDRYWKYAEGRAVIGNCFDPPHITRLSLEEFITLVASRRGSAAQRVRIREIWHAARRSIGSAAHQAAVFEATLLTRQLQTIQAMIRETDARLHEICSPLPEYPCLVSIPGFGPEISAMVIGAIGNPHRFENARQVLKTAGLDLSSSRSGKRSETPYSISKGGKAHLRYALYQAARIASTRNRCFMQYFANTLTGRQRERGIVTKMRVKLAAKMLVIAWTLMKKKEVFDPGHITI

SEQ ID NO: 301153 - protein, 339 aa, unidentified
MLYVGIDIAKNKHDVTALNVPGKTVLKPLTFSNNKAGFELLDLSLRQLNQDCLIALENTGHYAFNLLNFLHEQGYKVYTYTPLLIKEFAKSLSLRKTKTDKKDAHGIALKLLSDPNREQFQHDNRQVELKILTRHIHRLKKKQSDWKVQYTRCLDIIFPELDKIVEKHSEYTYQLLTCYPNPQKRLEAGFDKLIEIKRLTASKIQDILSVAPRSIGTTSPAREFEIIKHYKRLIDKAETCVNDLMAEFNSVITTVTGIGNRLEAVILAEIRNIHAFDNPAQLQAFAGLDSSIYQSGQIDLAGRMIKRGSPHLRWALIQAAKACPRFSPAFKAYLKTKLE

SEQ ID NO: 301154 - protein, 364 aa, unidentified
MDVHKENFTVCCYDMIQDKIFYTQKLEPDYNQILKYLTFVRKAFRKDVDFVCGYEAGCLGFTLHHQLTQHGVSCVILAPTTMMKPAGKKKIKTDKRDAALIARCLASNNFSPVHVPTTQDEEVKEFLRMRDDHRLALKKVKQQILAFCLRHGYSYTATKNHWTVAHIAWLRSLKPEGLYSEILSEYLLTFQALSDKLERLDWRIEELAAMKAYSEGVKKLSCFLGIKTHTALATMVEVGDFHRLASANQFASYIGLVPGEDSSSESVNRLGITKAGNAHIRTLLVEAAQSYTKGQVGYKSAALKKRQAGNTSEVIAYADRANERLRRKYYKMILSKSKRTNVAKTAVARELACFIWGMMTDRIA

SEQ ID NO: 301155 - protein, 459 aa, unidentified
MNRKQRREMQRKIQSEELSLEVVHPDAAGIDIGNEVHYVAVPSNRSSEPVRRFGCTTAELKAMADWLKQCRIRTIAMQSTGVYWIAVFDILEAAGLEVYLVNARETKNLPGRKSDVQESQWLMKLHTYGLLRNSFRPAQEIRRLRTYWRQRNDLIRAAGRYIQRMQKALTQMNIQLANVLSDISGRSGQAIIKAILAGERDPGELAALCNGRVQASPEEVAASLEGNWQDDLLFVLQQEQEGYEFCQKQMAECDRHLQEYLQQTRDRSQGADLPVEKRKERLKKKKGNKPQFDLRAGLFRMVGTDLTLIDGIDVMTAMTILSEAGCDMSKWETENHFVSWLRLCPDNRISGDKIIGKGRLPTNNRATLALKMAASSLRTSQTYLGAQFRRLRTKLGAPVAIKAMAAKLARLVYRMLRYGMSYIDKGMEFYEAQHRKLQINHLKWKASQLGFQIVEAATA

SEQ ID NO: 301156 - protein, 423 aa, unidentified
MREQEANQLELAACIGVDWADEKHAVCLQAADSSPVEMMELKQKPEALQAWVRQLQQRFGGRKVGIALEQSRGPLIYALMGYDFLVLYPINPKALAKYREAFQCSGAKDDAPDAALLLNFLQCHRDRLRAWLPEDEQTRTIQLLVEHRRKTVNRRTKLIQRLTQVLKEHFPQALAWAGELPSLQACDFLLKWPTLEAVQEARPAQLRAFYRQHGCRRPQIIAARLAEIRQARPLTHVSAVITASSTMAKSLAGQLRCLHQAVVEFDRQLEVLFQQHPEHDLFDSFPGAGAALAPRLLSAMGARRDRFASAADIQQFSGIAPVTVRSGKSCRIHRRWACPKFVLQSFQEFAGHSIPGSFWARAYYQQQRERGLGHHAAVRALAFKWIRIIYRCWLDRTPYDEHRYIEGLRRRGSPLVARLKPAA

SEQ ID NO: 301157 - protein, 317 aa, unidentified
MAQNRTIVGIDVSKDKVDVALPSGAEATFPNTPPGRRQLVKWVKQHQVDKAVMEASGGYERSWARLLQDGGLEVWIVDPKRVRRFAQSAGQLAKTDRIDARMIAWFGETFADGIGRQPDAAREELDRLVSARTDLMDLRTRLAHLGEDDQPDEVRRCYRKIEKHVTDQVSALEAAIEARVEANARFAELARFICSVPNLGKISSAGLIAFLPELGLVSNKQASALVGVVPYEDSSGKHQGRRFIQGGRRKLRNLLYLPIVGAATRGNPVLKAYYKRLRAKGKEPKVALIACMRKLIVILNTMVARGEMWDPQKHAIP

SEQ ID NO: 301158 - protein, 320 aa, unidentified
MDTVSFPSMVSRGCGIDVHKKVVVATIDGSGLRKETREFNTFTSSLTALKEWLLANGVTHVAMESTGVYWKPVYKVLEPAGLIVWIVNARHIKYVPGHKTDKADSAWICKLLLAGLLKPSYIPAREQRELRDLTRYRTKLIQHVASEKNRTMRILEDCNIKLSSVLSDTMGVTATKLIDMICAGKSITMSDIDSVYHGKLSASKEDLYEACNGLVEEHHIYMLGIIRRDIAQTEQIIADLNERIKNMLSVYDNVLELLKKVPGLSTKTVEDLVAEIGLDMSAFPTEKHLASWAGMCPGNNESAGKKKADESLMGTNKSSL

SEQ ID NO: 301159 - protein, 351 aa, unidentified
MGKLIRIGVDTSKSVFQLHGVDESERAALKKRLRRKEVLKFFSELSPTRIGMEACGAAHFWAREFRKLGHEAVLIPPQYVKPYVDRGKNDMADAEAICEAMSRPKVQKRFVAVKEAESQAGQMLMGLRDQLVRRRTQLSNTIRGHAAEFGFVAAKGLANIEPLLLRLADDEHLPSLARELFVLLGSEFAGIDRQVRSLDARLMTFHRGDEVSRRLAEIPGVGPIGACLLALKAPDPSAFRSGRDFAAFIGLTPKDHSTAGKVRMGGITRAGDEALRKTLVVGATALIQQINRGQSKPSPWLAALLERKPPKLAAVALANKTARIAWKLMISGERYDQTRDMAPADIVPIAA

SEQ ID NO: 301160 - protein, 362 aa, unidentified
MRSLPVFVGLDYHQDSVQVCVLNPDGEILTNRSVANEANIIQELGTRYGPPQRVAIEACCGAADLAEELATQWQLPVQMAHPGYVKRIKQSPDKTDFADAHLLADLVRVNYLPQVWLAPRPIRELRRLVRHRGQLVQRRKDTKLRIRGLLRENRLKCLHARAWTKAWFAWLTDEAQLSESDRWVLTDHLEELISVSGRIAAIEARIRVHIKGDPMVARLMEEPGVGLVTAVTFRAEVGRVSRFKSGKQLARFCGVTPRNASSGARQADAGLIRAGNPALRTVLIELAQRLTRMPGTWSARANKMLSRGKQKNVVVAAIANRWVRSLYHELLRPTKEEATSTPALQKGTAPSRLAIPSSQVSG

SEQ ID NO: 301161 - protein, 331 aa, unidentified
METDQYIGVDLHKVFFQACAMTRHGERQWEGRFPRTPEGIGALVARCTATSAIAVEATTPTWHFVDQIASRVATVCVVDTRKTKLKAGYAAKTDRLDARRLADALRRDSVVSIYVPPPAIRELRELSRHRLMLTQLRTRVLQRMRALLLRQGLGDPPASRLRSAAGQAWLDQVRLPPQAQAALTTMRRVEHDLTAQLAVVEADVAREALADPIVERLQRLHGVGPVLGVMLRAEIGEIARFPSPRHLASYAGLVPYVDSSASHTRYGRITKAGSPWLRWALVEVGLHTLRRKDPLGRWGRKLAVRKGKLTAQVALAREMCQEIMTMWQHVA

SEQ ID NO: 301162 - protein, 412 aa, unidentified
MPSTERPFTATAAGEQDATLFAALELSLSRWVVVASAPGESKVSKHTLPACDGPALLALLDGLRGRAERRSGRAVTVVTIQEAGRDGFWVHRLLEAHGVRSHVVDPSSVAVNRRSRRAKTDRIDAEAMLRTLMAWSRGERQVCSMVHPPTREAEDARRLGREREALLAERIRHANRIKGLLATQGIFGFEPTRHDRRARLADLHTADGQRLPPRLSTELWRQMDRLELTMQQLATVEAERDAALAADGRAGSAADAAAADCQGGNDTRAAASVGREGAGGRLLRLKGIGPETAAVLAGEAFFRDFRNRREVAAYAGLAPSPWQSGGVDNEQGISKAGNARVRKTMGQLAWLWLRNQPDSALSLWYRNKVRDGRGRIKRIAVVALARKLLVALWRFVTQGVVPAGAALKAQAG

SEQ ID NO: 301163 - protein, 345 aa, unidentified
MKYYAGIDVSLESASVCIVDERGLIVREGKVASEPEALIGWLGKLGPKIVLTGLEAGPLSQWLHGGLSQAGLTVELLETRHVRAAFRAMSVKTDRKDARGIAQLMRLGWYRPVHCKSLPAQEMRALLVARKLLQKHHAVEMSVRGILRNFGAKVGQTTSRGFEGRVRTLVEGQPTLQAVADALLAARTVLARELSSLEKRVRSAARHDDRVRLMMTAPGVGSIVGLNYVSAIDVPQRFRSSRSVGPHFGMTPTRYQSGETDISGRISKVGDGTVRSALYEAAHIILTKPVKNAGALKRWALAIAKRAGRKKAKVALARKLAVILHRMWTDWTPFDPTKAVGAAAA

SEQ ID NO: 301164 - protein, 361 aa, unidentified
MNATTVAVDLAKSVFQVAVADENWRVVESHRLTRTQFERWFANRQVSLVIMEACGSAHHWARWLNALGIEVKLLPAAYIRAYVKRNKTDAADACALIEAARCAEIVPVRVKSVEQQALQGLHRTRSLWMGTRTSRINALRGFCREFGLTIPQGARTGVEAISRALADPGSAIPLLIRRTMLLLVEEIRLLEARIAQLERELTELARHSPACTTLLTIPGIGLLTATAMVAATGGEVKHFKDARHFASWFGLTPKEYSSGSARRLGRISKRGDRYLRMLLTHGARAILRAATLARQAGRPLDGLRHWATEIQGRTHHNKAACALANKLARICYAVLRDATPYGLPQPRQAKKLNRTAFAVAA

SEQ ID NO: 301165 - protein, 323 aa, unidentified
MLGRLEVGTSTRGYAQLLKWAHAFSPTTTFGVEGTGAYGAGLARYLIDSGCEVIEINRPDRRARRGHGKSDPIDAEAAARSVLAGGPLCIAKRDHDRVGMIRTLRVARRSALKMRTQVGNQMHALVVTAPDSLRHQLRHLSLDKLVAVTAAARPGTVTTPTAASKLALRSLAIRHQGLTAELVVLDRELGRLTIETAPALCDLTGVGPDVAGALLVAAGDNPERLRSDAAFASLCGVSPVPASSGKTNRHRLNRGGDRIANNALWRVVMVRLTCDQRTKAYVARRTAEGMAKRDIIRCLKRYVAREVFHALVATAPALTRISA

SEQ ID NO: 301166 - protein, 344 aa, unidentified
MHIASIGIDLGKTTFHLVALGERNKVLVRKKFSRAQLLAYTANLPSSLIGLEACAGAHFMGAALREQGHEVRLIPAQFVKPYRKSNKNDFIDAESIAEAVTKENMRFVQIKTQEQLDVQAMHRVRDRLVQRRTALINEIRGFLLERGITFAAQPIYLRKNLPTVIEDAEQNLSPRLRWLLQRMWQEWKQVEIDIKAMTDEIERISNENALCRRLRQIPGFGPLVSTATVAAIGNGAAFRRGRDFAAWVGVVPRQYSTGGKQKLFGISKRGNIYLRRMLIHGARSVLFRVKYDTGGFGQWVHRLAQRAPRNKVVVAIANKLARMAWAVLSSGKEYRHQPLQLAAA

SEQ ID NO: 301167 - protein, 338 aa, unidentified
MTIVMGLDQHRGQITAEWVDTETGEIERARVAPAHREPVARFLHRFDGAELEVALEATTGWRFVVEEVRAVGGRAHLAEPAETAARRGPKKRAKSDRADARHLRELLMVARLPESWIPPDHLLDLRARVRLRHTLCDQRGEWQQRIQAVLYHHGLPARRDLLTRENRAWVERAALPAAAREQVTVALAIIDALDVQIAPLDRALRAYARRQAGCRALMGHYGIGCLTAVTILAELGDCRRFSSSRHAVRYAGLDITVHQSDQRRAPGHLSRQGPPALRWALFEAAQVARRPGSPDRDYYTQAAERLGGNRACLAVARKLLKRSYHTLSELGEQALAPA

SEQ ID NO: 301168 - protein, 345 aa, unidentified
MQSMYYIGLDVHKKSISYCVKDGSGRIHAEGAIPATRSDLDRWMRTLPQPWTAAMEATLFTGWIYDHLKPHATALKVAHPLMLRAIAAAKKKNDRIDANKITDCLRCDFLPECYMASTEIRERRRTLRYRNLLVRQAVQLKNKIAVLLMEAGVSYNKQKLHKVGYFRELLATNQDIDDGLRSLLRMCRETVVRLGRTESALVRSLGRDPLLVERVERLMTIPAVGPVTALTWVLEVGDVRRFSSIKKAISYCGLCGAEKSSAEAIKRTPLSKQRNKPLQSVLIEAAKLAPRRSPELALVYDQEKQKGNANRATLAVARKLVAYLLAVDRRQKEFLTVERENRTAA

SEQ ID NO: 301169 - protein, 389 aa, unidentified
MLFRRDPYPDWYRPFTADHENPGKESTVTAQPIVAHCHPFVVGVDTHARNHVYAIINSNNGALLDTQSFPATSAGINRAINWVARRTDGNADTLWVIEGAATYGAILAGTVTAYGFPVTEAPRMSKKQNHGVGKTDALDAHRMAAASLPLPVNKLRHPRLNEGIRQALRILVTARSSMAKDRTRSVNALNALVRSNVLGIDARKKLTSSQITEVSRWREREDELSLRIARSEAVRLAKHILDLEQQLTTNEQQLDELVRVSEAAPLMEEVGFKAINVAKCFVAWSHEGRVRNEAAFACLAGVNPIPASSGNTTRHRLNRGGDRSLNAALHLAAITRMTYDNETRIYVEKRRAEGKTDREIRRCIKRYLVRRVFKIFHVSAVAEEVALAV

SEQ ID NO: 301170 - protein, 358 aa, unidentified
MSMQQVPAHRRVVVGVDTHKHVHVAVAIDELGTILDGRSFAADAGGYTQLIDWAVAFGGKVTFGIEGTGSYGAGLTAAVRRRDIGTIEVIRTDRRDRRLRGKSDTIDAENAARSVLAGQSTAVPKTHDGVVEMIRQVKVAKDVAVKARTAAMISLKQVLVNAPPEIREDLEPLTKMALIAKCAGLRPGQVTTITASTKHTLRSIARRWQHLNAEVAEHEKILAGLTSQAAPQLAAAFAVGPDTAAEMLIVAGDNPERVRSEAAFAKLCGVAPIPASSGMTTRHRLNRGGHRQANAALYRVVIVRMQHHEPTKAYVARRIAEGKTKSEIIRCLKRLLARELWAAMRPLRETRQDLPGAA

SEQ ID NO: 301171 - protein, 345 aa, unidentified
MEKHTLIAVDLAKSVFEIAVSHEDGKVAKRRRLPRSAFLEFFANVPRATVIMEACGSAHYWGRELQALGHEVVLLAPHQVRPYVPRNKTDKTDAKGLLEAYRNEDLQPVPVKTLAQQSLTSIHRLRANWITARTAQVNCVRGLLRELGGVIPQGIEKVLPQVRLIVADADSGLPESLRPILYAACEELEALNERIAMTERQLEALAEETPLVGRLRTAPGIGLITSSATVAFVGGVQRFPSGRHFASYLGITPKEFSSGSRRRLGRISKRGDTYLRTLFIHGARSVLCHARKAKEHDRLRAWALALEARSGRNKATVALANKMARIVWAIWKHERSYEARPAAAA

SEQ ID NO: 301172 - protein, 390 aa, unidentified
MLYIGIDISKYKHDCIVVNDAGAIIRNAFSFDNSRTGFDQFTEMYRSLDPKEIKRIGFEATGHYQDNLKVYLERSGIGFMELNALLVHKFKNSQTLRGVKTDKTDARLIASYLSSIEFKPYPKTSYHTLALRSLCKRHFDLTSERTKYLIRITNFLDRTFPEFKESINGNIKSKTAMYILRNYGIPSKIANINAQSYENIRKCSHGKFSVAKFNGLRELARNTVGFSYETDLFEIKSLLRVYDALQDEISLVENEITAHLSKIDSHIPSILGIGKVSAASIIAEIEDISRFDSPNKILAFAGLDPRIYQSGTQEFRGRMNKKGSVVLRRVLMNCAESVLMYNPAFYTYYRKKRDEGKSHRVAISHVARKLVRIIYKLETEHIDFDLSIVK

SEQ ID NO: 301173 - protein, 412 aa, unidentified
MTVTNQFAAHVGLDWADKKHDVCVQFKNGERVFDVIEHTAEALDAWLTELHQKVKGRIAIALELKKGPVVYALQKYPFITVFPVHALSLARYRQAFSPSGAKDDPQDAELALELMLRYPQKIKAIEPDNADIRLLQQLVEQRRQLVEDKRRFVNRIINTLKQYYPQPLEWFSHRGSLLLCELIIRWPSLQQLKRARRDTIRNFLNAKGGRAMALTEQRVASIDNAIPLTTDPSVIEANALMAAALATQIKVVSEIIKTYDERIETLFDTLPDAGLFKSLPGMGPCMGPRMLAALGDNRDRFYSAEEIQNYAGIAPVTERSGQKSWVHWRWQCAKFVRQTFVEWAAKTVNSSYWAKLYYQGLREKGKSHQSAIRALAFKWIRIIYRCWKARTCYDEAKYLLALEARHSPLLKP

SEQ ID NO: 301174 - protein, 349 aa, unidentified
MITIGIDPHKRTHTAVAVSGVGQLLDELTIPADEAGHRRLIDWAHQLDPSAELRFALEDCRGVNGRLERFLLAAEESVLRVPPKLMANARKGGREIGKSDSIDALAVARAALREESKLHAASNDPRARELKVLVDHREGLVRTRSIFAARLRWHLHDLDPELEPAARTLDRDPVRRSLAQRLARREQSAQVRVCRDLLAQIGDLTRRERELAAEIGALAKSYAPQLFEIPGVARLTAGKLIGEVAGVERFRSDAALARHAGCAPIPASSGNTRRLRLDRHGNRQLNATFYRIAVTQARVHPEARAYLAKKRAEGKTGKEAFRCLKRHLVRVVWRTLRQPDAVAGSPARS

SEQ ID NO: 301175 - protein, 353 aa, unidentified
MSSLTDLRVVVDVVIGVDTHVHTHSAAVICARTGGVLDEITVEATADGYDQLVDFVDEHAALRAWAIEGTGGHGAGLTRHLERREEVVIELDRPERAKRRHGAKSDPLDAIRAAREALSRPRLGSPRSGGDRQALSVLLAARRSAVNAATDAQRQVFSLVIAAPEKLRERFRGQKLPAMIKTAAALRVHPGWDVETTTTVTVLRSLARRVRTLTEEAAEHEKAIRVIVRSWRPDLLEQLGVGPIVAATVLCAWSHAGRIHSEAAFAMLAGVAPIPANSGQVTTRYRLNRYGDRQLNRALHTIVLARIRYDQTTRDYVTRRTSEGKTTREIKRCLKRYIARDLYRLLEHRPILA

SEQ ID NO: 301176 - protein, 461 aa, unidentified
MQMIHRCCCGLDVHKKLIVACLISLNEAGEFQKEIRHFTTMTKDILVLADWLTSVGCTHVAMESTGVYWRPIWNLLEGQFELLLVNAQHIKAVPGRKTDIKDAEWIADLLQHGLLRPSFVPPAPQRHLRELTRYRSTLLAERARLVNRLHKVLEDTNLKLTAVVTNIMGLSARDMLDALLQGETNPEVLAKLARGKLRKKREDLEQALVGRVDDHHRFLLTSLLTHIDFLDEQVADCNGKIEQFLSAPSDEKAELVSSASDDQRQEQALVSSTPVGTGSMLAQDQVPEEGPKVPLSYQQAIALLDSIPGVNQRIAEIFLAEVGTDMQRFPTAGHLASWVGICPGNHQSAGKQIRGTTRKGDRWLRHALIEAAQGAMRTKGTYLSAQGRRLTHRRGKKRAVVAVAHSILIIAYHVLQRQQPYQDLGSNYFDERERSAVARQSVHRLEQLGFKVTLEAAGEAA

SEQ ID NO: 301177 - protein, 380 aa, unidentified
MKIIGCDFHPAVQQIAVFDSETGEYSEHRLSNGDGEAERFYRALSMPCWIGIEACGNSRWFIDLLERLGHEVKVGDAAKIRASYVRKQKTDKRDAGHILTLLLENRFPAIWTPSRQQRDQRQLLIHRHKLVQMRARIKNNLQHLALNQGMQRKSKLWTQTGQKMLKQLPLEGWTAIRRQDSLALLQQLDKQIEQLDEAAELAASSDPQACLLLRQKGVGPITALAFSLTIGDVSRFEHSNQVASYLGLIPAEYTSSNKRRLGGISKQGNGFLRMLLVEAAQSVVRLDPQFHKHYVHLCRNKHKAVAKVAAARKLAVRLYWVLRTEQEVQKAVHNESRSGVPLVSESQTATLIERSRIQQRAASAGNDGKRKTRVSHIPNA

SEQ ID NO: 301178 - protein, 338 aa, unidentified
MYYTGIDLHKFTSYLTTVDSSGAIVKQENLKNVAHNFIQYFSSIPGEHQTTVESTMTWYWLNDLLTSIKIPLVLAHAKYVKAIAYAKVKTDKVDSHTLAQLLRMDYIPVAHKISNENRLLRDALRARLKIVQRHTSITNSMQLLLAKYNYDSPTQLSGISKFQYEQLSEVEALLDEQMLDLEKQLYPFLIPDDDIQRLLWIPGIGKMNAFTLLLEIDEINRFPDVKNFFSYCRLVPSARNSGGSSKQRSSKDGNKYLKVAFSNAATHAVQYYPVIRKYNNSLTRKKNKQIAKTIIAKEIAKIVFHVLKNKTDINNKFKAQLLEHTKSLQWPRVVSPDV

SEQ ID NO: 301179 - protein, 373 aa, unidentified
MKKNITFVGLDVHKNSIDVALAEAGRNGEVRFYGTIGGDLDSLHKVVRKLQSTGAELCFAYEAGPCGYDIYRSLTSKGFDCIVVAPSKIPRKSGDRIKNDRRDALNLARLHRSGDLTAVYVPMAEDEAMRDLTRGREDAVKALRVARQELLAFLLRHGYRYSGKAYWSKAHQTWIAGIKMPHRAQQITLQEYVHAVQERLERVQRLTRQIQELVPQWQLAPQVKALQSLRGVSLIVAATTIAELGDLTRFDSAKQLMAYLGLVPSEHSSGGTTKRGGITKTGNGHVRRALTEAAHTYCHPARESRVLLARLDGLPQEVRQISWKAQVRLCGRFKALMARGKNRNTIITATARELAAFMWAIACALLPNPAMQQ

SEQ ID NO: 301180 - protein, 335 aa, unidentified
MQVYGIDLSMEKIDINFIDEKGKEKQKEVKNGVNSISKFLSTVPKDGMLCAEYTGAYGDLLVYLCNQVKVPIALVPGYTMKHSLGLLKGKDEPLDARRIREYGERFTDKLVFSEYDEECIVELKQLYTLRSQLVKARKTLLTSDKGRDHLPMQSISAHNHLQPVLCGLDAEIEAVEKEIEALIKSNEDLYENYEFAKSVTGIGPVIATDLLIKTGNFKKIDTARKAASYAGVCPFPNKSGKMEGKSKTSPFADKKLKSLLYMGAKSAVKHNKEYKLYYQKKQLEGKPHYLIMNNISNKMLRTIYSVVKNKTPYSQDYICLDPRERNINSSAKKVA

SEQ ID NO: 301181 - protein, 346 aa, unidentified
MPIVGGLDIHRKQITFDYLDTGTGQVQRGQVSPADRAHLRAWLARFAGREDAAFAVEACTGWRYVAEELAAAGVTVHLAEPADTAFARGRKRHAKTDKTDARHLRQLLAEGRLPECWIPPGHILECRALLEAYHDLRAGHTAWVQRIHAVLFHQGAPALGQGALRGEQGVAALRAAAAAHLSAAGQLQVATALAVTETLEARMHAVRHQLLDAARHLAGAKVLAARLYGVGPVTALALTCWLAGAGRFSSSRQAVRFAGLDVTVHSSDGKRSAGRLSRQGPPVLRWALYEAGKTHARAPAPDHAYYAQVKDRCGGKRAALSEARKILRQACHILAGLGDDALAPAA

SEQ ID NO: 301182 - protein, 338 aa, unidentified
MKTYVGIDLHSNNNYIGVCDENDKRLYGKYHNNQLNEVLNVLKTFKKSIQGIVVESTYNWYWLIDGLQENGYKVHLANPSAIKVYEGLKQTNDKTDSYWLAHLLRLGILPEGYIYPKDERPVRDLLRRRMLFVKQRTAQILSLQSMINRNRGQHMSGNSIKQLEESFAEDYFEESYLNFTAKSQIGTIRFLGDQIASIEKEVLLTAKLKEEFKILQTIPGVGKVLSLTIMFEVCNIGRFPKVGNFSSYCRCVESKRISNGKTKGKNNSKNGNRYLAWAYVEAANFSKRYCQKAQKFYQRKASKTYSILATKALSNKLARASYYMMRDKIPYDVDKLFR

SEQ ID NO: 301183 - protein, 391 aa, unidentified
MIIVGIDIAKNHHEATIIDSLGNIIGKSFRFSNSHNGSSILINNIRKANQSNEPIVIGMEATGHYWLPLYSRLLSEGFEIKVINPIQSDSFRNLYIRQTKNDSKDSFIIAEVIRFGRFSSTCLAEEDILALRNLSRFRLFQVDLVSDLKRKVISLLDQVFPEYSKLFADTFGKSSLEILTEYSTPEEFLNVDTNALAETLSLASKGRLGFCKAEQIKDAAANSFGIKLAADTFSFQIKQLIEQIKFIEEHIAELEQEIAQLLRKLDTPIETIPGIGPVLGAIILSEIGDITRFKNASKLVAFAGIDPTVKQSGEFIGTKNKMSKRGSPYLRRAIWLAANVASFNDPVLSAYYNKKREEGKHHFTALGAVARKMLYIIHSVLKNNKPYEPIA

SEQ ID NO: 301184 - protein, 397 aa, unidentified
MYIVGIDIAKRKHEAAVIDGEGAVIIKPFSFTNNCSGYNRLLAMLTKAKLPLDEVSFAMEATGHYWLALFTRLQKEGFRVQVINPVQTNSIRSFYIRQAKTDPRDALLIAEVIRFGHFSESTLHPENIYELRELCRGRHAIVSMQADVKRKVVALLDQVFPEYETAFTNLFGDTSMAILQTCPTPKELSEMPLEELCHLIEVSSHKRFRMAKAQELQALARNSFGFAMAGDVFSTMIRLYAKHLDFLKQQVREMDRKIAEIMDTLDTPITTITGIGPTLGAYILSEIGDISRFSSAAKLAAYAGIDPTMRQSGEYNGVRNRMSKRGSPYLRHAIWLAASSAVLHDPALKLYFQKKREEGKPYMASVGHACRKMVSIIYAVMRDNKAYTPYIPNEISA

SEQ ID NO: 301185 - protein, 324 aa, unidentified
MEKTGVVGIDISKATFDVMWAGEHRNFSNNSKGYKILVKWLKKGAPRAVCMEETGQWSKNLAKYLYGEGLRVYVVNPYRIKRYRDYYLHMNKTDKTDAGLIAEFCEKEERKLRVWEPPTEAEEHLQSVKRRLDALQKMRDQENNRLKSGENDELVLDDIRAHLKYLDEEIKRYTKLMQQAIKTDPVLRRKQKLLESIPGIGELTAARILVEIRDIEEFGDASQIAAYAGLNPSRFVSGTSVNKKGKISKQGKAILRKNLYFPAVVATNYNPIVIELKSRMTATGHAPMEIIVAAMNKLLHIAYGVLKSGVPFDPNYGKQFCYTP

SEQ ID NO: 301186 - protein, 332 aa, unidentified
MNMHQQGGVANGEVRLNAGIDVSKLHLDVCVGTTQQRVVNDANGWSELTAILQAARADLVVLEATGGYERGLVCALQSAGVCVARVNPRQARDFAKSMGVLAKTDQVDARVLRDFADVLSRHADRHKFVTPMLDQARQALAELMTRRRQLVDMRVAEHNRLEHAGTRAARSITSVLKLLDKQIAAIDSHIDDHMDQHFKAQRQLLDTVKGVGPVTILTLTAALPELGRLGRRQIAKLVGVAPLADDSGGRSGKRRTWGGRSEVRSVVYMAAIVAMRHNEVIRVFYERLVQAGKPKKVAIVACMRKLLTILNAMLRDQAIWAATRHLKPSEQT

SEQ ID NO: 301187 - protein, 336 aa, unidentified
MEPGYVGVDLHRRRSVIVRKDGDGEVIETVQISNDPVALAEVVSRSGESPEVVLEACYGWYWAADVLAEIGAKVHLAHPLGNNWGNRRVKNDERDAADLVDLLRLGRLAEAYIAPPGLRQLRELVRYRAKLVALRSGLKAQVHAVLAKEGVAVTVADCFGVAGRVFLDQVELAGPYRARVDSLLRLIDTLGEEIAGFETEVADCLAGHPGYHAVQAIPGVGPVLAAIFVAEIGDVTRFGGPDQLCSWAGLTPKHRESDTTVRRGHITKQGSRLVRWAAVEAVGRQRGATPIRETHHRIAERRGVNGIGRVAAARKLLVLVYYGLRDGHIRCLAEAG

SEQ ID NO: 301188 - protein, 414 aa, unidentified
MYYVGIDIAKRSHVACVLSEDNTVMIKPFEFVSNQSGFHKLLMHLQSLSCDLSDVIIGMEATGSLFENLYRYLKEFTYRVVLLNPYQTSKFREMDTMKKVKNDNIDSIMIAALIKSGRFSEGYVSDEQLQSLRELYRHKASLDDQIKALKRQTGTLLAVVFPELEEIITDPFNVTGLMLLEKYPTAKHYEYASVERILKTFRGIKGNNFNEAKASKLLELARCSIYSGVAKDARAMSIRSNVALIRLLQEQMNTSDEEMLALFSTQERYASNEDKQEMSELIDNLRTIPGVGDKTILSLLAECGNLDRFTDAKALVGFLGLYPTLEQSGGSIKHGKLAKRGARLAKKAIFLASIAAIRHNAELRTVYMKYRSKGRAKKECVIIVARKLIAIIYAIYKRNTSYDPVRVFVPKPNQ

SEQ ID NO: 301189 - protein, 413 aa, unidentified
MRLFVGDDWAEDHHDVELMDSAGRRLAKARLPEGVAGIARLHAMIGEQLGEDADEDDAGQVAIGIETDRGPWVAALIAAGYTVFAINPLQASRYRERHGVSGAKSDTADAHVLADMVRTDSHQLRPVAGDSAQAAAIKVVTRTHKTLIWERTRCTQRLRHALRDYFPAALEAFEDLDAADTLELLGRAPDPAAAAKLTTAQISAALKRARRRDIAAKAERIQAVLRAAHLGQPDIVAAAYAASVRALIAVLATLNEQVKTLQGQVEAYFGQHPDAEIVLSQPGLGPVLGARVLAESGDDPGRYISAKARKNYAGTSPITRASGKKKTVMARHVHNDRLIDALISQAFTALRTSPGARACYDHQRARGAGHNPALRQLANRLTGILHGCLKTRTLYNEATAWPQHPAATEKTAA

SEQ ID NO: 301190 - protein, 433 aa, unidentified
MLKLNYMSTLFVGIDVSSKTNAVYAMDFEENKYISSSFGNNQPGADQLVTMIAQCMHKHKNLDTVLIVLESTSVYSVHISNFLSTSEVLMPYKPYVFCVNPKATSNYRKSYIGMEKTDPTDAYLIADFGRVGRTKKLEPWRGGQFISLKRLTRHRMHLSECITREKTYMVSNLYLKFSELQLLEGDDKPFGSLYGATSSAVLTEFLSPQEIIDMPEEELLTFLAGKSRNRISDLSKTSELLRKAARDSYRLDKCMYEPLSISLASSFNCIHAYQKEIKLIEQAIEKCINGMNPNALLILQSIPGIGPIWASGILSEIGDITVFHSSDALAKYAGLYWPKGDSGDFTSEDNKMSKAGNPYLRCYLGEAANSVRKHIPEYADFYARKYAEVTKHQHKRALALTSRKLVRLVFGLLVKNQLYTGEKLDTEYNIESN

SEQ ID NO: 301191 - protein, 457 aa, unidentified
MARKRKKTKKQKIVELEALEQINLNAAGLDIGAAEIYAAVPKGCDTESVRCFQTYTRSLHALADWLEACGVDTVAMESTGIYWIPIYEILDQRGFEVLLVNARHIKNVPGRKTDVLDCQWIQQLHTYGLLQGSFRPADNICALRALIRHRDMLIRYRSSHVQHMQKALHMMNVQLTNVLSDITGVTGMKIIRSIVSGDHDPQGLAEYRDYRCGKSKEEIALALEGNYRAEHLFALKQALELFDLYSQKIKDCDFEIEVMYSKFEPQVDIAEKPLKDRKRKRNKPVGNEPDFNLRLYLYQMTGVDLTQIDGINALTAQAVLSEIGIDMSKWKTGKHFSSWLSVCPYNDITGGKVIKSGTKKSQNRAAKALRLAARSLTHSDSYLGAFFRRIKARTDAPTAITATAHKLARIIYAMLRDQSEYIDPGAAFFEEQYRQRAVKNLQRKAKRLGFAVVPVAA

SEQ ID NO: 301192 - protein, 429 aa, unidentified
MEEVDEVELVVQRVAALDLGKATLEACMRVPHPSKPGRRMQEIRGYATTTATLLEMAIWLRQWGIERVAMESTSDYWKGVYYLLEAEGFDCWLVNAREVKNVPGRAKTDRADAVWLAKVAERGMCRPSLVHPPPIRRLRDLTRYRRALVADRSREMQRVEKLLEDAQIKISSVLSDIHGVSGRAMMEALIAGQRDPRSLARLAKGLARKKTDRLEEALRGFFTDHHATILQMMLDNIDRIGAQIAALDARIAEAIGPFSRQGSRLADIPGVNTVAAAELIAEIGVDMTRFPSAAHLVSWAKFCPQIHQSAGKSRSKARGKGNPWLAGTVGRIVFSASHTDTFLGARYRRLARRRGKPKAIVAVGNSVLTVVYHLLSDADLDFCELGPAHYESRINKHRRARDLATQLQALTGQHIVIRDGKAIITDNAA

SEQ ID NO: 301193 - protein, 401 aa, unidentified
MFAGVDWASEEHAVCVVDGQGRIVQGRRYRHDESGLRALCRRLLDLGVQLVALERPDGVLIERLLDAGLSVIAVHPNQVAAMRPRFSAAGGKSDRFDAFVLAELARTDKHRFRVLIADSDATKALRALSRAREDLVGHRVALANALRAQLDCFWPGATQVLADIDSPIALAFLKRYPSPADAHGLGEQRMQRFLARHHYCGRKSAGELLRRLQSAARGRADALETDARRQIVLALVAALEPIVTRIGELTSEIRDALTDHADGPTFRSLFKDPKSVVAAATLLAEIGDCRERYPTKATLAADGGQAPVAVESGRSKRARFRWACDHRLRAAICVLADTSRHHNPWAADIYTRARARGATHQHAIRILGRAWCGVIWRIWQDHDTYDPARHTALQQLLATTG

SEQ ID NO: 301194 - protein, 359 aa, unidentified
MDYFAGLDVSVKETSVCIVDDAGRLVREVKVASEPEALLQVLMAPGQPFERIGLEAGPLSQWLFSALAEAGLPVICVETRHMRAVLKAQINKTDRNDARGMAQMMRVGLYRPVHVKTLRSQKLRMLLTHRKLLQSKAIAIDNDLRATLRNFGLKVGIVGRAKFEVRIKELVEDLPDLAVLVEPLLIVRRVLREQIDILHRRLLVIVRDDDVCRRLMTVPGVGPVVALTYRATVDVPARFRNSKAVGAVFGLTPSKYQSGEVNRSGAISRCGDEMMRMMLYEAAQIVLVRSTKWSWLKAWAMKIARHRGMKKAIVALARRLAVIMHRIWVDGTEFRWTQQHERVENQCNRRKLELHQAVE

SEQ ID NO: 301195 - protein, 431 aa, unidentified
MLCSLRAPPWPFLSIPEGAAVEVIHTRCCGLDVHKKSVVACVLITHTDGQVERQVRTFKTMTADLLALSDWLNGLEVTHVALESTGVYWRPVFNVLEDDARTLLLVNPQHMRAVPGKKTDVRDSEWIADLLRHGLLRASFIPPAPIRAIRELTRYRKTLVQERVDEANRLQKTLEGANLKLAAVASDVLGVSGRAMLGAVIDGERDPDVLADLARGVLRAKLPQLRQALLGRVQPQHVVLISRILAHIDFLEQAIAQVQVEIERCLPALEESLQLLQTIPGIGAVAAAAIVAEIGTDMSRFPTAGHLSSWAGLCPSNKESAGKRMKGPVNRGNVWLRAIMGEVAWASVKRRATYFHAQFHRIARRRGRNKAVVAVAHSLLVVIYHVLQTRQPYAELGIDYFDQLDTARIQRHHVRRLEQLGYSVTLTPLAA

SEQ ID NO: 301196 - protein, 375 aa, unidentified
MKGTSPSRGVRVEAEYGNEVPRWEVRNLINSLQKGKSMAIVYVGIDLAKNVFAVHGVDEAGKPVLVRPAVPRAKLHELIASLPPCTLAMEACTGAHHWARLFVARGHAVRLIAPKFVTPYRMSGARGKTDAADAAAICEAVQRPNMRFVPLKSEQQQSQLMVHRARQGYVQARTACINRTRGLLAEFGHVLPLKAHTVRRQAAGLLEELPGWANTVIGDLLSELHRLDERIAAYDRHIAQIAREDERAQRLMSLNGVGATTATAVVAMIGSGHEFKCGRQFAAWVGLTPGQYSSGGKTRLGRITKAGDGYLRSLLILGARSVLALAKSRSDGLSGWALALQQRRGYWKAVVAIAAKNARMAWAVLRRGESFKLPT

SEQ ID NO: 301197 - protein, 348 aa, unidentified
MIWIGVDAHKQLHQASAINEEGIVGERRITNEPAQWAALLDWARQWPERVWAVEGAWYRGRGLAQYLATQGEAVHEVNGRWTAGRRRGMRKPGKSDRLDARSVAQLLREERPTLPRVYAAEDELAPVQLWSRLAAELTEDRTRLLNRLHNLLLLCDPQYNSTLPELTSKAGVGAALAYQAPGASALARERERAVRQTAEQLALLESQIAELERKLERVTRGSFRALRQIEGVGAKIAATFIAELGRPRAGFGDQQLAAMAGAAPLEASSAGGTRHRLNRGGNRRLNLALHRIVLTQGRIYPPATAYLARRRTEGKTAREARRALKRHLCRRIVQAWRACFEQSLPAAA

SEQ ID NO: 301198 - protein, 338 aa, unidentified
MDLVCVLDEAGEVLLEQKLSTTPKAMKEVFGKMPRSRIALETGTHSPWVSRGLSELGHEVIVAHARNVRLIGESRRKDDRFDARTLARLARIDPQLLAPVQHRSAQAQAHLMVIRARAGLVRARTSLINTAWGLTKSYGERLRGCNPRNMNPEKAQSLSPELQAALEPLLAAIESLSQRIYEYNQQIEKIAKESYPQVARLKQVKGVGTLIALTYILTLEDAQRFRKSRDVGCYIGLQPGRRNSGQSEPQLHISKEGDPYLRTLLVQGAHHILGPFGADSDLRRWGLKLAERGGKNGKKRAVIATARKLAVLLHRLWVSGEAYEPLRNSSAVRLPAAA

SEQ ID NO: 301199 - protein, 409 aa, unidentified
MEVVHEVCCGLDVHKKSVTACVLWASGRRKQIREFGTFTRDLLELADWLRSCGVTHAAMESTGVYWKPVWNLLEGQFEVLLVNAQHIKAVPGRKTDQKDSEWIADLLQHGLLRASFVPPTPTRELRDLTRYRASLAQEINRIANRIQKVLEDANIKLASVATDTLGASGRAMLEAIIQGEQDRQRLAEMSQGKLRNKIPELQQALEGRVTAHHRFLLRELLDHLYFVESKMRRMEQEIAERLDPFQSEVARLCTIPGVDRVTAWGLVAEIGLNMAQFPDAQHLASWAGLCPGSHESAGKRKSGKIRKGSLWLRRCLCQGAWAVSMQKNNYLSALYRRLAARRGSKRAAIAVAHNLLVIAYYILRDKVCYRDLGPDYFDRLNPEGLRRRLTKRLEGLGFKVTIEPLAQAG

SEQ ID NO: 301200 - protein, 429 aa, unidentified
MKIIYPRVCGIDVHKKFIVAVICISESVEPIYLKKRFSTFHNDLIRFRDWLIQNDCQNVCMESTGKYYIPVYNVLESHISNIVVANPKWVCAVKGEKDDDKDAKWIADLFKLGIVKSSFIPQKDFRILRELTRYKYKLVNMRSSEKNRYQNALTSGNCKLDMVFTDVFGKSASNIIDLILSDNPYTDEDILSKVHKNCKASPDMILNSINGTDLTPVQKSRIELVNDHIKQLSSNIQRLDKLIDLMIEPYEDYISFLCQIPGVSRNSAIIILSEIGVDMNQFTSSRRITSWAGLTPSSNQSAGKKKSVRISRAGVYLKPCLVEVAHAAVKDKNHPYYANKFNKISKRRGKKRAYIAIARKILVAAYHMLLTGEIWNPADLAEVETPVEQRIKYVKNNLKSDIKQLLDIGLTVEELTLMIQQNANIIATQ

SEQ ID NO: 301201 - protein, 339 aa, unidentified
MKAIATIGLDIAKQVFQVHGADKSGRALLRRKLRRGEVARFFSELQPCLIGIEASGSAHYWARVLGSLGHTVRLMAPQFVKPYVKSQKNDANDAEAICEAVTRPHMRFVPQKSAEQQDLQCLHRVRSRLVACRTQLINQIRGLLAEYGIVLPQHPGQVRSGLPAVLEDAENQLTGSGRDLFRSLYEELTQLDVKVADADSRIQIAFQNHPDCRRISAVEGVGPLIATAVVAAISNGHAFENGRQFSAWLGLVPRQNSSGGKSRLLGISKRGDPYLRTLLIHGARSVVFRAKAKTDKRSLWIMDKQQRLGTTKACVAVANKNARIIWSLIAGEQEYRCAA

SEQ ID NO: 301202 - protein, 372 aa, unidentified
MIAGIDTHKDTLAVAVVDDTGRLVAGGDVPNTERGFAQLVDMFTAHHVQRVGIEGSGSFGRAVAVHLALCWQSDQPVAVVEVPTLMTSRERHGQLGKGKPDPVDALAIARITAREQQLPTVRLTIGAAADLRALLDYREDLVRERGALVNRAHAELGGLRPGYQQQIPILTTCARVRAALDLLGDDSSIRATLCRRRLERVLAIDTETAELKRQISKLVAAADTTLTDLYGVGRLVAARLIAEVVDIRRYPNRDAFAAANGTAPLPASSGRTLRHRFNPGGNRQLNRSLYTIALTQIRGDTEGRAYYERKRAAGKTKREALRCLKRRLSDIVFTTMRHHAAGADASRDQASPPVWPVLGVGAVDANEARLTA

SEQ ID NO: 301203 - protein, 338 aa, unidentified
MNTTQVFEKRKIAVAIGIDLAKDHCDVVAYNADNKICFTKANWAYPHLMEWLANAQPAVVLMESCKGCHVRARDIADLGHDTRLVKGADVKALRNVCQKNDIRDADYIARLLYVPGTKFVFVKNQRQQSLQFLQNEYKSIQELRIQVGNQIHAGLEEFGCPGPKSKKFIQSRMMAHLEKNAEPIPDEVMSSFLRRREMWLNLFEQEEEAKKRMEEIAKTDDDAQRIMTVPGVGAQTAVGMLVHIGGDIGRFKNSGQFAASIGLVPKQNSTGGNTTLNGITKCGPKRLRANLVQCGQVILMHADKLKGNFGDWVRKLRDSGKKRGVIVCAIAAKIARIV

SEQ ID NO: 301204 - protein, 355 aa, unidentified
MNDEKYIGLDVHQATIVVAVMDSTGKSVMESILETKAATILQFFAGLRGTLAVTFEEGTWSAWLYDLLHSRVDKLVVCNPHKNALLKDGNKSDRIDARKLADLLRGNQLKPVYHGETGVHMLRELSRSYLTIVKDLSRVMNRLKAVYRSWAIPCAGRDVYYRRHRAQWLAKIREAGVRRRAERLYEELDMLQHLRQQARRELLAESRKHAITAKLRQIPYLGPIRVALAVALIQTPHRFRTKRQLWAYSGLALETRTSAEYCFVEGQVRRSKTLLSIRGLNKDHNHDLKGLFKGAATMASVRPGPFQDFYTAALAKGIKPTMARLTLARKIAAITLTLWKKGENFDAEKLKSQAA

SEQ ID NO: 301205 - protein, 338 aa, unidentified
MNIVFLGIDLAKNVFQICGLNQAGKPVYTKRTGRKELLQMLANIPACLIGIEASTGAFYWQREFEKLGHNVKVISPQYVKPFVRGQKKDGNDAQAIAVALMQPTMHFVPPKSPEQQDIQALHRARQRIVNHRTATVCQIRGLLLDRGITIGAAVSRVRRAVPLILEDAENGLSVRMRSTIAELYDLFNDLERRIHFFDKEIETVFRQSEACQRIAKVKGIGPKTATAVVAAIGKGTEFKNGRHFAAWLGLVPRQHSSGDRQVLMNMTKKGDKHLRTLFIHGARAVVRVAANNNDSHMNQWVNQLKERRGFNKTTVAVANKNARIIWSMLRNETEYQVV

SEQ ID NO: 301206 - protein, 437 aa, unidentified
MRRKKKNANKSINLQVLPLVHPNAAGIDVGAKEHVVAVPCDRDPKPLRTFQAFTPDLHELAAWLKRCGIETVALESTGIYWISLYEVLEQYGFEIRVVNARHVKHVPGRTKTDVLDCQWIQKLHSFGLLNGSFRPDQQIRKLRTYMRLRDNLVVASTQAVHHMQKALFEMNVQLSNVISDIVGETGLRIIEAIIAGQRDPVQLAASCSTRIKASRETVAKSLHGNWDEALLFALKAALETYRFSQTKIQECDCCVQQHLAQFESRAEAINSPQDLKAQLHRVCGVDLTKIPGIKEQSAQIIISEVGLDMTQWKTEKQFCSFLGLCPDNSISGGKVLHRATRKVYNRAADTLRLCAQSLTHSKSALGAKYRRLRAKLGAPKAIVAMAHHLARLVYRMLRYGQNYVEQGIHQYELKFQLQRVRWLRKEAKSLNLQLVPA

SEQ ID NO: 301207 - protein, 348 aa, unidentified
MDKITAVGLDLAKQIIQVHALDAAGRVVLRKTVRRERLLALLAQFPRCVVGMEACSGAHHWARELARLGHEPRIMAAEFVRPFRKSIAAKNDANDAEAVCTAMRQPNMRFVSIKSIEQQAVLGLHRVRQGFIEERTAMINRLRGLLAEFGIVIAQSPAAVARTLPALLADADRLPALAQRCAGALQAQVRELEARIAEFERAIGQHTKGSESAQRLTARIGVGAITASAVVATIGSARDYRNGRQFAAWLGLVPRQASSGGKVRLGRITRRGDAYLRTLFIQGARSTLQSALRRAPQHHDRLSAWIVRLVQRVGYHKALVAIANKHARIIWALLARDQKLDHMRTAMA

SEQ ID NO: 301208 - protein, 417 aa, unidentified
MPFIFSRATRLFEVKQSRTNGRDLEGSGALQLNNNEQTNTPMKKELYLGLDVHKDCIITAVAEEGRKGEVRDTGVISNDLHALEKWVGRLRKAHGRDVILRACYEAGPCGFGIARRLKQLGVECEVVAPSLTPKRAGERVKTDRRDARKLARLLRAVELSPVYIPESTDEAIRDLCRARTDAVDDRCRSRHRLKGFLLRHGYHYQGKSSWSAAHERYLRELVLPHPAMKVILEEYLQGIAAAGERIARCEEAMRALLEKWHLRPAVKALMAMKGFRTVAAMILVSELGEVHRFSHPRQVMAYLGLVPTENTSSDRRRQGHITKCGNAHARWLLVECAQHYATPPKVSKELSRRQEGQPREVRALSWKAQNRLHGRFARLSARRLQRNKALVAIARELCGFIWELLHMQPCYQAQPPS

SEQ ID NO: 301209 - protein, 399 aa, unidentified
MATGAVELRVSVDVGCRAHSVAVGLSNGRLLEEFEIAHRPEGFAEFFSRIEAHRRRHALPVAVAMEGYNGYARPLDTLVQGHDYRLFNVNNLKLARFKEIFPAAAKSDRIDARKGLELFQLQAHLPLAKRVLQPVARSPEENAQLKRLTRRRRMLVEEKGRVLSRLQGDLHAVCPGLLAITREADNLWFLRLLAHSEDLTKLARLQHRTLLKIPGIGRTYAAAIRQWQPKALFSHEVDYVGAMIVEDARRVLELREKIKELEARCRALLEVSEIGQLITTVPGFALVCASELAGEIGTLARFAGESSLALYLGMASLDNRSGTYQGSKPSKHVNTRAKAAMMTGVDRHRKCVPESQRYYERKRAEGKTHNQAIRALGRHLCRVFFKMLKQQRPDERRTD

SEQ ID NO: 301210 - protein, 322 aa, unidentified
MSVSILGIDVSKQKFDVALLVDEKTKHKTCKNSAEGFETLTLWLEKQGIQKVHACLEATGSYGEDLAIYLHEAGHIVSIVNPARIKGFAQSELIRTKTDKIDAGVIARFCLAMKPDPWIPPSPEIRSLRALVRRVDSLIDMRSQEKNRISTAHESVISLIKEHIAYLDQEIEKIRRQIADLIEQNPHLKRRKELLDSIPGIGKATIPHILAELDDLEKFNHVRQMVAFIGLAPKETLSGSSIKGKPRLCKIGHARLRKALYMPALVSIQCNPVMIAFYNRLKDKGKNGKVIVCAIMRKLVHVIFGVLKSGKKYDPNYKPAAA

SEQ ID NO: 301211 - protein, 338 aa, unidentified
MVVIGIDPHKGSHTAVAIDEDEVKLDEVRVRADRRQLEALRSWASAFPERSWAIESANGLGALLSQQLVGAGEEVFDVPPTLSSRVRVLASGKSQKSDPNDAFSVAIAALRSSRLRPVATEDHVAVLRLLWNRHKNLTSLHTQAVCRLHALLAGIIPGGLPRRLSADRAAAVLSGCRAKTAVEKARKTQAHDLIADVRRLDVQLKASKRTIVEALAPVPTCLGELSGVGPVATCIILAHTGDTRRFATRDDYASYNGTAPIEASSGPRKRHRLNPRGNRQLNHAMHIMAFSQLSHAGAGRDYYERKIAEGKTQKEAVRALKRRISDAVYRRLVRDTQR

SEQ ID NO: 301212 - protein, 294 aa, unidentified
MFFFWGRPSCKTLRLLVSTSASILSTFTVSDKSGKALLCTKFTRTKLIEFLAGCTPATVVMEACGGARFMARRIADLGHEAKLIYPQFVRPFVKSNKNDFVDAEAICEAASRPSMRFVQPRTEVQQAMRALHRVRESLVRDKVKTTNQMHAFLLEFGISMPIGVTVIKRLSTVLAENELPPYLAQLLMRLHAHYLYLVEQITELETALEQELSRDETEQRLQTIPGVGPITANVLSSQLGDGKQYSCSRDFAASTGLVPRQYSMGGKNTLLGISKRGDKNLRRRLLTNLDDSIL

SEQ ID NO: 301213 - protein, 345 aa, unidentified
MQLHTIGIDLGKTVFHLVGLNLRGEVVVRKKFSRKQLLHFTANLQVELIGMEACGGSHFLGRTLREQGHEVRLMPAQYVKPYVKTNKSDYIDAEAIAEAVGRPKMRFVPIKSDEQLDLQSLHRVRERWVMRRTAVINQIRGLLLERGITVRQGRGHIDAALPGILEDASAQLSGALRVLLVQLKLELDHLQMRIDEADAMINKAAGENEACRRLVAIPGIGPVTATAIIAAIGNGAAFKKGRGFSAWLGIVPGEYTTGGKQKLLGISKRGNSYLRRLFVQGARAVLQQSAKQSSGLRTWLAQLTTRVHSNVAAVALANKLARMAWAVLAKNEPYRPPIVVGVATA

SEQ ID NO: 301214 - protein, 438 aa, unidentified
MSNKVIFNLDELFISVGIDVGADFSWMSIALPNQQFVGKPFKILHNSIDSLTTAVSEIKEAEELYSLESRIFLESTGIYHYPLFCYLRDKGFNCSVINPIITKNSTNINIRKVHNDRFDSKKAALVGLKPDLKVSLMPSDLALNCRNLCREYYDLMDNRSAYVNKLQGELRMAFPQYLGIFSKVTINTSLTLLETYTSPSAFLEADKQEIIDIIKSTARFGLTYAQNKYNAIIQAATDANQFGYIIDSNIKRIRLYISFIRKYDEEINSILESLHELVDANEDTDFVKQIHLIKTFKGAGFLSAVSIMGEIGDFSAFSKPKQLFAYFGLDPAVKQSGKFEGTKVQMSKRGSAIARRVIHTLTLQSISISRNGEAKNPVLREYYLKKCDSKPKLVAMGAVSHKVCNMIFAILRDNKPFKIIAPQEHIKQYNAAKCDIAA

SEQ ID NO: 301215 - protein, 316 aa, unidentified
MVVGGVNARQEIVLSPRRVELDDWSAWAQAHLKPTDVLVVEATTNTWWFYDQTHEHVGQLLVADPRKIAWIAQARVSTDNGAVLKLARLSAAGLIPTGWVPPQPVRELRALLAHRRRLVKTQTMLKNRLHSLLHRLHLTPPEGELFAAKQRAWWEGLDVTPMEKLHVRHDLATLDQVAEQIAEIEAELGRLSCAEPWAALAPYVLQLPGIGLVIAMTILAAIGDILRFPAAKKLVGYAGLGAGVHASGQLYREGHITKEGRKEFRYVMVEAAWSAVATSEYWKAEFEQLCRPPAAWTRTRRSSPSRGNCSSSCGTC

SEQ ID NO: 301216 - protein, 344 aa, unidentified
MKYFAGLDVSLDETAICIVDEDGIVISEGKAASEPDDLVRWLAATGLSITRLGLEAGPLSPWLYAGLRGAGLAAICIETRRMKGATAAMAVKTDRNDARAIAHAMRVGWFTTVHVKTAESQELRLLLSNRRTLLEKRIAIDNEIRGTLKAFGLKLGTVTVAGFEARVLELLAERSRLLAMVRPMLAARAALRQQCEVLHRMVLKTVRANAVCRRLLSVPGVGPIVALTYATGVDDPARFTHARDLGPHFGLTPRKYASGEIDRNGSITKAGDGAVREALVQAALTLLTRVQRWSALKAWGMAIAKRRGLRRAIVAVARKLAIVMHRIWLDGTTFTWSRETAAPV

SEQ ID NO: 301217 - protein, 437 aa, unidentified
MRRKKKNANKSINLQVLPLVHPNAAGIDVGAKEHVVAVPCDRDPKPVRTFQAFTPDLHELAAWLKRCGIETVALESTGIYWISLYEVLEQYGFEIRVVNARHVKHVPGRTKTDVLDCQWIQKLHSFGLLNGSFRPDQQIRKLRTYMRLRDNLVVASTQAVHHMQKALFEMNVQLSNVISDIVGETGLRIIEAIIAGQRDPMQLAALCSTRIKASREMVAKSLHGNWDEALLFALKAALETHRFSQTKIQECDGCIQQHLAQFESRAEVTNSPQDLKAQLHRVCGVDLTKIPGIKEQSAQIIISEVGLDMTQWKTEKQFCSFLGLCPNNSISGGKVLHRATRKVYNRAADTLRLCAQSLTHSKSALGAKYRRLKARLGAPKAIVAMAHHLARLAYRMLRYGQNYVEQGIHQYELKFQLQRIKWLKKEAKSLNLQLVPA

SEQ ID NO: 301218 - protein, 371 aa, unidentified
MEHTRFIGLDIHKERISIAVAESGRSGAVEYLGEVANDPGAISKLCDRLGRPGRPLAFCYEAGPCGYGVYRQLKSLGHRCDVVAPSLIPMKPGDRVKTDRRDATMLARLHRAGELTPVWVPDADHEAMRDLIRLRSVVRQIVTRTRQHLQGFLLRHGRKHGQGTAWRMAYRRWLSTLAFQHPAQQIAFQDYVDAVMDAERRLQRVEEQISCLLPEWNLRPVVDALQAMRGIALINAVVLVAEVGDFTRFSSPRQLMAYFGLVPGEQSSGETVRHTGITKTGNSHARRALVEGAWAYRMKPRIGRHKVDQIEALPKIVRDIGWKAQVRLCARYRRLSARGKNANVVNIAIAREMVGFIWSIACTIQSAPRTA

SEQ ID NO: 301219 - protein, 423 aa, unidentified
MDVLYERVAGLDVHKATVVGCVRRTMAGKVERECRTFETTTAGLLALLEWLRESGCTHVAMEATGVYWKPVWNILSDGAFELILANAAHIKNVPGRKTDMNDAMWIADLVACGLLKPSFVPKERLQELRSLMRTRKQLVREQARHVQRIDKTLESANIKLGSVICEIMGVSGRRMIEAMISGVRDPHKLAALAHAQIKASPKELYDALHGRLTDHHRFLLQLHIGQYDALSAAIGRIDRQVDTAIAKLDEEATKGQASFRDLISLVCTIPGVSTLAATSILAEIGRDMSRFPSAGHLVAWAGLCPGQNESAGKRKRTRLRKGAPWLKTMLVQCAWAAKRKKDSYYKAQFNRLSSRRGPQKAICAVAASLLTAIYHMLKDGTEHHDLGAAHFDHRSVAAKAKRLVAQLAKLGYAAKLHPIPEAA

SEQ ID NO: 301220 - protein, 317 aa, unidentified
MTFAGIDVSKTHLDLALVSNSPKPTRLRFPNSPEGRQALLAALAHHNPAWVALEPTSAYHLPLLKLLAENRLQVALVNPYHLAAFRKAKGERQKTDRQDALLLARYAQVYHEDLRAYTLPPETLRELKALVGYREDLAGRERTILNQMEAAEWAGSKEVLALLQKELACVKGLLGEVEARIQALLATLPEAEVLMALPGVGPQVAAAVLALLPPELWGRAKRAASYAGLIPEREASGKNVERSQLSRKGPPLLRRKLYMGALVAVRHDPEMRAFYHRLLSRGKRKKQALVAVAHKLLRRMMGRLREYYATQLDQGVA

SEQ ID NO: 301221 - protein, 369 aa, unidentified
MFSERTSVGLDVHARSVAGAGLDTVTGEVWERQLRPDSRGIVSWLSTLPAPVAVTYEAGPTGFGLARDLTAAGFRCQIAAPSKIRRAPGDRVKTDARDALLLARLLRMDDLTVVTVPSVEQEAARDLVRAREDCRGDLMRARHRLSKLLLRHGLVWDGKNAWTSAHDTWLRRLRVDTGWSAGTRSAFDAGYETVVATSARRDRLDAEIAEMAADSEFTPITRRLGCLRGISTLTGFALAVEIGDWSRFSGASIGAFVGLTPSEHSSGSSRRQGSITKTGNGHARRLLVEAAWHHQRPYRPGKTMQDRWALAPIAAQVRGDAGNRRLHRQWLRFTARKKRGTVAAVAVARELAGWCWSLATLEAEDPMTG

SEQ ID NO: 301222 - protein, 354 aa, unidentified
MSTATKYVGLDVHQATTVAAVRQANGRLIARTVVPTEASALLALVRGMRGAVHVTFEEGTQAQWLADLLRPEVDRVLVCNRRGQTSQGNKGDHADAAALADLLRQGALRAVYHDAGARAALKELARTYLNVVEDSTRVMLRLKALFRARGIRTAGRGVYRPDQRREWLAQLPEAGVRFRASVLYAELETLQRLRPTVKTALLAEAKRDPAWRVLRTIPYLGPVRVALLLATLQTPWRFRTKRHLWAYAGLAVVTRTSAEYAHDGGRITRRTRAPMTRGLNRNHNRIVKNVFKGAATAATGRAGPLQDFYRAVIARGMRDELARVTLTRKLAALTLRLWKTGAPYDATQLTVQAG

SEQ ID NO: 301223 - protein, 392 aa, unidentified
MVVSVGIDVSKDKHDCFIVSSEGEVLADVFTIPNTMDGFAYLLQRIRECTTPQDKIKVGLEATGHYSYNLLGFLLDNGLATYVLNPLRTNLYRKSLSLRKTKTDRVDARTIASMLLSDAGLKPYTDTAYHNEELKSLTRYRFDKVKERAKLKTSISRLVCILFPELEKLVSTLHMASVYALLEECPGAKQIAAAHLTRLKTLLETASKGHYKRDIALEIRDAAKSSVGSRMPAKSLELQHTIRLIRELNSEIAEIEEQIQAIMDELNSPIITIPGIGFRMAAMIFAEVGDFARFDSPDKLLAYAGMSPSTYQSGQLKNCYPHMEKRGSRYLRYALYNATKYVCHWDPTFAAYLAKKRAEGKHYNVALSHATKKLVRLIFSIEKSGQPYCAAA

SEQ ID NO: 301224 - protein, 402 aa, unidentified
MNAVGIDISKGKCMVAVMRPFGEVVLSPFEVRHSSSELSKLARLLKSLDGESRVVLESTGNYHAPVAKMLHDAGLYVSVVNAMLVHDYGNNSLRRAKTDKKDAVKLANYGLDHRLSLPRYIPEEDTRLLLKNCYRQYQQDAKVQTMLKNNPISLLDMIFPAVNRLFSSPARADGSEKWVDFIDVFWHVQCVAGLSVNAFSAKYLKWCRKHGYNFSEEKALEIHRTARQHVAVMPKSETTKLLVKQAVAQLRTVSSAKAALQNEMDALAASLPEYPVVMDMFGVGPKLGSQLMAEIGDVRRFHSKKALVAYAGIDAPPYQSGQLNVHSRSISKRGSPALRRTLFLVMRVYLQCSPPDEPVYQYMAMKRAEGKPYLVYMMASANKFLRRYYATVKAYLNVLEQR

SEQ ID NO: 301225 - protein, 311 aa, unidentified
MTYIGIDVSKATLDVAVHAGSVQQVANDAAGIAKLVAQWRAAPPTLVVLEATGVYHHSVTAALLAAAVPVVVVNPRQVRDFARSTGQLAKTDRLDAQVLARFAAVVQPEVRPLADEATHELAALVDRRRQLVEMLTAEKNRLAIAKRSVRPSVKQHIAYLTKAIGAAEDELDRWITQSPAWRAQEDLLRSVPGIGEHTARMLIAELPELGRLSRREIAALVGVAPMARESGRWRGMRRCWGGRAHVRAMLYMATLTATRCNPVIKDCYDRLRAANKPPKLALTACLRRLITIVNAMVKTQQRWQAPTPANA

SEQ ID NO: 301226 - protein, 404 aa, unidentified
MKGPIVSIDVSKGKSDYQAFKDLNVKYTGSRSIKHNKEGFDEIVNLVREMEKKLETEVCVVYEATGVYHRVLKKVLEDNNIKQFIINPLLSAKTRKNDSLRSPKTDKLDPKSIAKTYYSHSLHNSHKQETIYHELRELSRYYEDILVHIRKDKVAFRAQLDIVFPGYDTLYDDLYGPVALAIIEKYPHPEILQKKKINTVSKVIQNKTCHRQAVSDTMADKAIEYSKTIYSGCDKDDIEVLILQRFIKKLNEDMAEAERTIGEMIKLAQELPDFNIIKSIPGIGDNLAARIIAELGDMTRFKKKNELVAFAGLDPRMSESGQNDGDHMHITKKGNKRLRCLLYLAVTCSIRLKRDDNSIKDFYIKKKQQSNPMCSKAAKTACASKLVRIIYSMCKTGELYQYNK

SEQ ID NO: 301227 - protein, 344 aa, unidentified
MVTTIGIDPHKATHTAVAIDDDEIVLGEFTVRADKDKITKLIEWAGYVDGDGRLWAVEAATGLGHLLSQQLIATGETVLDVPPVLASRIRVLSSGKSDKNDENDARSVAIAALRRDGLAAVRREDDTAVLRMLAKRHRELTALRTQAACRLHATLAALRPGGMGHRLSAKQASRMLGGIRGLDAVGEQRRLMAKTHLVDIRRLDRDLETIKAQIRRAVTAVDTSVTDIYGVGPVVAAFLIGYTPPIERFTTADRYAAYNGTAPIEVSSGGKVRHRLSRRGNRTLNHAIHTAAVTQISHHTPGRIYYDRKIDEGKTNKEALRALKRRISDAVYRQLVADAQRRSN

SEQ ID NO: 301228 - protein, 343 aa, unidentified
MEQYVGLDVSLKETHFCVMDAAGEVVARGREVTHPELLARALGREAPCARVVVLETGGQSSWLQAELEAQGIPAVIVDARRAKQALSCRLNKTDANDAEGLAHLARTGWYREVMAKRRETRLSRSLLLARQQLAKQRRDLENQVRALLRGFGLAVGAVAKARFEERVWELVGREPALEDALGPLMQVRRSLCLQLRELEGRIGKAVKQSDVCRRLMTVPGVGPMTALAFTTALDDPGRFGKSASVGAYLGLTPRRHQSGEVAWSGRISKHGDALARHMLYEAANSLLCRTKAWSAPKAWAARLTRRIGGKKARVALARKLAVILHRIWCDGTEFRWSAKAQAA

SEQ ID NO: 301229 - protein, 415 aa, unidentified
MSLKIVYKICCGIDVHKTFVVACIASTNDKGITYYESHRFSTYTSGLKTLLQWLLNRNCKDVCMESTGKYWIPVYNILENDCSIVLAHPKYVKAIRGKKTDKKDAKWIADLFKHDLVAGSFMPPADIRQLRDLMRYRFKLTCFQSSEKNRLQNCLTVSNIQLGNVVSDTFGKSAQAILDKLLENPADTSFDLEPLVYKSLKKKLPQLRDAIDGYITPEQAGKLKVIKSHYENLESRKAELEELILALAAPYQQELAILQTAPGIRSDFTAIGIISEIGTNMEAFPSAKHLCSWAGLTPTNNESAGKKKSVRVSKAGCYIKPLLVQCANAVVTSKKHPEIRNRYLRLKKRRGHKKAIIAIARMLLTALYHMLKNGENYNAELYRKSYLTPVDREITVEQAIIIARNQGYKIKSATA

SEQ ID NO: 301230 - protein, 430 aa, unidentified
MKSNTQNAKIEAITEKTLVLGIDVGSETHYARAFDYRGIEYSKKPFKFSNTEVGFATFKEWILDLKERHEKDKVVPGMEPTGHYWFNLGKFLQDNEMKPVLVNPHHVKKSKELDDNNPTKNDRKDPKVIAGLVREGRYMIPYLPDGVYADLRTASNIRFQLQAELTRIQNRISRWFNIYFPEYKTVYGKPDAKSGMLILKAAPLPEDILTLGIDGVNQIWRDAKLRAVGKARAKTLIEAAEHSIGSKEGTMSARMEIRMLLEEYESKNMRLQEVMVLIEELVKEIPMAEKLLEIKGVGIRTVSGFLAEVGDISRFNNPKELQKLAGLAVVENSSGKHKGKTTISRRGRKRLRYLLFEVAMSLVAKNPEFRELHNYYTTRRLNPLKKMQSLMAIAAKLIRVFYAMLTKGVDYDPKKMISDIKRPTVYLQAA

SEQ ID NO: 301231 - protein, 364 aa, unidentified
MDVHTTNYTLCCYSMEDDRFFAEVQVEPDVKNILKYLARIEKQQSRDCRIVCGYEAGCLGYSLYHQLHAHGIDCVILAPTTMMTKPGKRIKTDRRDARLISKCLAFHTYSPVYIPTEVDDAVKEYIRMRDDANSALARVKQQIIAFCIRHGKIHDGKSYWTNKHLEWLSSLDLGNKILSEVLQEYLIRYYQLREQVDMYDMRINELAQAEPYRQKVEKLGCFRGIAAHTALSFCVEVGDFRRFATAQQFASYLGLVPGECSSGDKQQYTSITKAGNSHLRKLLVETAQVFGRSATKSGKSVALKERQAKCDSLTVAYADKANARLKKKYFKIAMRSKVNIAKTAVAREMACFIWGMMTDNISCA

SEQ ID NO: 301232 - protein, 391 aa, unidentified
MVCVGIDVAKDKHDCCILDSEGTTLVDCFTIPNNMDGFKSLLQTIQDCSQKSDKIKVGLEATGHYSYNILGFLLDNDLPVYVMNPLHTNLYRKSLSLRKTKTDRVDAKTIATMLLSDVDLKSYTDTAYHNEELKSLTRYRFDKVQERAKLKQSVSRLVTILFPELEQLVSSIHGTSIYALLREYPGAKQISEAHLTRLANILVKTSRGHYRKDKAADIRYAARTSIGSVMPAKSLELKHTIKLIQELTSEINEIEDAIRKIMDELKPPILSIPGMGFHSAAMILAEVGDFSNFNSPDKVLAYAGCSPSTYQSGKLTNCYAHMEKRGSRYLRYALYTATKYVCYWNPVFTEYLTKKQAEGKHYNVALSHATKKLVRLIYALQKSGKAYLAVT

SEQ ID NO: 301233 - protein, 427 aa, unidentified
MGARDTVQEPGFVAFVGIDWADQKHVWSWQNADSTQPESGELEHRPEAVEAWVGELCRRFGHGPIAVAVEQTKGALVYMLRKYDCLHLYPVPSTMSASMRAALYPSGAKDDPRDADLLLELLLLHRDKLRRLTPDNEATRRVQNLVEERRKLVEEKTAQLNRLIGYLKVYFPQMLEWFAKLDTKLVCDFLERWPSLEELQQVRPGEVKKFFRHRRGRHGELTAWRMEGISQAMPAIQDRSVIEAKRTVVQVIAQLLRTLLEGIATLDRKIGEAAEAHPDFFIFQSLPGAGAALAPRLLAAFGSQRDRYGSANEVQKYSGIAPVTERSGKRKWVHFRWACSKFLRQSFHEWAGHSIGQSVWARAYYQQQRERGNEHHAAVRALAFKWIRIVFRCWQDGVAYDESRYLAALAKRGSHLTSTCAAAAVSM

SEQ ID NO: 301234 - protein, 358 aa, unidentified
MNYIGCDCHISTLDCAVVNERGNETKKQKMNTSVRGLMKFVKSIPKPRKIIIEEGTLASWLLEVCTDYGEELIITDPKTNRWIGRADQKNDTIDASKLAQLARGGYIKEIYHPIGHRRRFRELVMLYHATVKSQTRIKNQLKGRFRQDGIKCSGETVYAATFRNKWRKKLPSDKVVQMMVEGLWRQLDQVHEVQEELFGQICKQSRRYSEIKRFKQITGIGPIHAATISAIVETPHRFANKKKLWMYAGFGLAERASGEKVYSRSLTHNYNRLLKNALKQATEAAISAKDNQFRRQYLRLTIEKGIPSHRAKLTVARSILATLYGIWKSGEEYDATIDKRRIESDKTQVRAYHLARNG

SEQ ID NO: 301235 - protein, 338 aa, unidentified
MPLTTLGIDLAKNVFHLHGVDEHGICCLQKVVKRNNLLKVIAKLPTCLIGMEACGGAHHWARAFREFGHDVKIINPQYVKPYVKTQKNDYNDAQAICEAVSRPHMHFVPVKEVEHQDILALHRIRSRLVGSRTALVNQIRGLLGEYGIVMPQQIGQVRRQVPEILEDAENGLSDLFRQSLRLLYEELGELDGRVEVITKKINTVCTSNPNCQRLSTMRGIGPIGATALVAALGDASTFKNGRQVSAWLGLVPRQYSSGGKTVLLGITKRGDRYLRMMLIHGARSTVIAAARKTDPLSRWINALRKRRGFNKTCVAVANKNARIAWALLVTGEDYRYAV

SEQ ID NO: 301236 - protein, 454 aa, unidentified
MSNKVIFNLDELFISVGIDVGADFSWMSIALPNQQFVGKPYKILHNSIDSLTTAVSKIKEAEELYSLESRIFLESTGIYHYPLFCYLRDKGFNCSVINPIITKNSTNINIRKVHNDRFDSKKAALVGLKPDLKVSLMPSDLALNCRNLCREYYDLMDNRSAYVNKLQGELRMAFPQYLGIFSKVTINTSLTLLETYTSPSAFLKADKQEIIDIIKSTAHFGLTYAQNKYNAIIQAATDANQFGYIIDSNIKRIRLYISFIRKYDEEINNILESLHELVDANEDADFVKQIHLIETFKGAGFLSAVSIMGEIGDFSAFSKPKQLFAYFGLDPAVKQSGKFEGTKVQMSKRGSAIARRVIHTLTLQSISISHNGEAKNPVLREYYLKKCDSKPKLVAMGAVSHKVCNMMQQMGYRRCNLAVCDCLGCRMDRTCDWNCNLKATKLRPQPALQLTDTA

SEQ ID NO: 301237 - protein, 275 aa, unidentified
MAKDTIGIDVSKDSLDAFWHSRTEACCLPNTPEGFRQLYDWLANEEDFLIVFEATGAYPRGLEWYLSLAELPFIKVNPKQARRFAQAIGRLAKTDSVDARMLARMGVVLDLAPQVAEGEDVHDLRELLTARRALVKDQVTAKTRLATALNPLAREQLGRRIEGIGADIQALDEVIAQIAKQRGTLEERICRLMTILGIGRPTATTMLIDMPELGHLDGKKITALAGLAPMTSNRESGRARRGSPGVGHQFGARSTCPHLSPSASTGTFTTSISNY

SEQ ID NO: 301238 - protein, 428 aa, unidentified
MTVKDCTSVKEFWQLKKEIRGSKDHLIVGIDVAKDEHKAFFGTANGKTLLKRLTFKNDIKGFDKLLARVKEMKVKHRLNELVLGVEPTANYHKPLGDFLIKCSHMVVLVSGVSVKRNRELLDGRWDKNDTKDSANVADLISQGKCLYYEYAPLVLKDLRGLLSLKRRLKKQEHGLRIRIRNSLLAQYFPELDKYYSKWEPEVLSTVRWCLNPSVIAGLEYDQFVSLVCPGRKNIRQQDRLEWIWKKAVDSIGCDAGEAAEFEAKVMVEELGHIRGIIKETDAKIKHICIRFPEYNYLLTIPGFGPDVSSKVLAAIGDPFRFNSGKQVLKMAGMDLNANRSGKSSDTAVPVISKKGSAHLRYAIYQAAFIASVRNKYFIRYYTNTLRGREREKGIKTKMRVKLAAKMLVIAWTLMKQKEPFDPGYLKID

SEQ ID NO: 301239 - protein, 337 aa, unidentified
MDTETGELQERQLQHREEAEKFYRDLAAQEMRVRVGMEASGHARWFERLLAELQFELWIGDAAEIRTKRVRKQKTDRQDAQLILKLMLKDDFPRIWVPSWENRDLRQLLWHRHRMVQARTRMMNQLQAVALNEGLRCKKRLWREQGRVQLESFRLAPWASRRRHDLLELLDRLNPTIAELSQAVEQEAEKCPEAQRLMTHPGVGPLTALAFVLIIGRAERFQCGKQIASYLGLVPLEDSSGNRRRLGHITKQGNSLLRFLLVEAAQVTVRSLPEWRSKYFHLAMRRGRKIAKVAMARRLAVRMYWMMRKGWNYEQLKKFGSHAGQPGHRDGVRLNTE

SEQ ID NO: 301240 - protein, 344 aa, unidentified
MAQYAALDVSQETTAICLVDESGKVRRHAKVATCPETISRWFAENATGLVRIGMETGALAVWLWNELDARGLPVVCMAARHANAALKMRPNKTDRNDAAALAQIVRTGWFKHVRIKSRTSYEIRSLLAAREVLVRVRVKLENEIRGLLRTFGVLFGKAAGGFARRAHEIVAGELDASPPMRLVVENLMQARLTILDRIKVLNRQVLAVARTNATARLFMSAPGVGAITALSVASAFDDAERFKRSSSAGAYLGLTPRRYESGEISWNGRISKHGNKLTRTHLYEAATTLLTRTVRFSRLKAWGLRLAKRCGFKKARVAVARKLAVILHAMWKTNTGFRWSENAA

SEQ ID NO: 301241 - protein, 403 aa, unidentified
MAKCFAGLDWASRTHAVCLIDQRGSVQSQFEVNHDAAGLAELCRRLKAAHVIAVAIERPSGMVVDTLLEAGLQVVPIHPNVVKATRPRYRSHGGKSDASDAYLLADLLRTDGHRFKPLAPQSDEIRALRALVRGRDDLVATRVQLANQLRALLQSFWPGAAEVFADLDSPIALAFVARYPTPESASRLGPKRMAAFCAQHGYSGRRAPEELLDRLHQAPAVALGELEMQAKGELALSMARVLDRLVEQIRLLTSRVEHSVSSSEDGRLLMSFPRAGRVCAAQILAELGNVRERFNDVERLAAEAGVAPVTYESGKSKAVAFRWACNHRLRAAITCLADNSRHASAWADHIYQKARSRGCDHPHAIRILARAWLRVIWRAWQDRTPYDPQRHAGAMLHFAATGG

SEQ ID NO: 301242 - protein, 476 aa, unidentified
MRRLLGIDLAITADNRACIMEETGRVIVERRFGRTRGELEDLLAVATDGLGQGDELVVVMEPTANAWVAPAALFSSRGAVVHLVPPEQSADLRRYYTKHVKNDRIDAKLLARIPLLHPEGLHPVSLPVGARGTLRRVVTRRARLSAECARHRGRIRSLLQLAMPAMPAALGDELGKGALAVLGRYGDPRALIRLGRARLTQVLIKATRGAWRSERAEQILAAARDGVQLWQGLEGCDFAEVAEDLAAEVRLIRAIESELRELDARAAGLLDEIDPAGLHRSMPGFGERTATTVAGRLGDPSRFSGAPKVRSFAGVIPGTNQSGESESRPHLTKSGDHVLRHALFLAAETARRLDPQLAAIYHRQVVERGNHHTKAVCAVATALASRLVAVLMQERAYEIRDTDGTPVDAAAARAIIAARFTVPPEIRAARRQPRSAQRMKGRPVHGVRSKTSPSSPPVDEASEVDATRVLVGVDLP

SEQ ID NO: 301243 - protein, 326 aa, unidentified
MGIDVSKASLEIALIGPEEGASASQTVPNTEDGFEELIGWLEKQTDAGLEKRPEQVHVCLEASGGYQRPVARFLHERGLTVSVLNPLRTSAYADSQLNRSKTDKVDARLLARFCKKEEPSPWEPSSSEQKSLKEMTRGLEQLKKERDRLKNQIGQSENPTVTGALQSVLESVGEQIARLEEAIDQHVQSTDTLARNRDLLETIPGIGRATAALVLAELGNPERFESARQAAAYAGLTPSHHTSGSSVHRKPRLSKVGSSRLRRALYFPAIAALRFNAAVEALGDRLAERGKEKMVIIGAAMRKLLHICYGVLKNQTPFDASLHPGT

SEQ ID NO: 301244 - protein, 458 aa, unidentified
MKGKRASAEKHSGMVTVHPHAAAIDVGATMHMAAVGADSASDPVRSFGTFTSDLHRLADWFAECGVKTVVMESTGVYWIPVFELLDERGVEVFLVNARDAKHVPGRKTDVSDAQWLQRLHSYGLLRASFRPKGEIAELRAYLRQRERLLDYAASHIQHMQKALTEMNLQLHHVVSDITGATGMRIIRAIIAGERSPAVLASLRDTRCHAGVDTIENALTGHYRAEHLFALEQAVALYDEYQQKVAACDERIEAVLTTLASLRGPKGKPLGSPRRRMIRQANGPAFDVRQALYALLGKDLTQIHGLGPYLALKLVAECGDDLSAWPSAKHFTSWLCLAPSNKISGGKVLSSRTRRSGSRVAALLRLAAVTVGRTETALGAFYRRLSARIGKAKAVTATARKIAVLFYNALRHGMDYVDPGASYYETRYRERVIDNLHRRAKAFGFILQADKVASGIAVS

SEQ ID NO: 301245 - protein, 339 aa, unidentified
MKLTPVGIDIAKNVFQVHHVDEETGEVLNKPIKRAKLLEYFANRTPCLIGMEACGGAHHWARQFVRMGHQVKLMPGEYVKAFNIRNKKDAADALAIWRAVQQPSKAVAVKTEMQQAMLALHRVREQLVKFRTMQINCLRGLLTEYGEVMGTGRAAFDKGMPEVLARISERLPTALIDTLREQWNGLRLLDEQIGAIERRMREWKKDDQDVRAISEIPGVGVLTATAAVAMMGDPKAFRSGCEFAAWAGLVPKQTGSGGKVNLYGISKLGDMYLRTLLIHGARSVLTRGKELDPWLAQMKMRRPLNVVIVALANKMARTIWAILAHDRPYQKGYVSAKPA

SEQ ID NO: 301246 - protein, 455 aa, unidentified
MSKSNRTDTPLRAARAQISNPEITVHAMYRSAIGIDVHLNLLVCCHQKQVAGHREQSESRDFNTDRASIDAFAAWCRECNPDIILMESTGSLWQSPYEALERAGFTSEQLALINARDAKAAAGRKTDRKDASRLASLARTGNFKKSFVPEKAFRLQRVISRDLQKNRNDISRTSNRFGKSLNLTGCRPTTVFSDIRGGKAASLILMAKLRDDPHLFDVIKQNSRRLRASPEQIMQALDFEIEPMMKEQILALRKKIDQLEEYDRSTFERLRQLQAPYEKDIQLLITITGIQERSARMIYAELCADLKDHFPTSEQFTSWLGICPGDNTSAGKQKSGKCPKGNKHLRRTLIEAARGLVVGGTAALKEKFQVLKMRRGYRRAMVAFAHLLARIIYSVLTHQKGFEPYLSTAFRDALIERAKNGVKQLLKLKGTKYVIADGLVVETKTGAILGAVVSS

SEQ ID NO: 301247 - protein, 402 aa, unidentified
MNAVGIDVSKGKSMVAIMRPFGEIVSAPFEIKHTASDINSLVELINSVEGESRIVMEHTGRYYEALAHQLSEANLFVSAINPKLIKDFDNDSLRKVKSDKADAIKIARYALDKWQNLKQYNVMDELRNQLKTMNRQFGFYMKHKTAMKNNLIGILDQTYPGVNTYFDSPARSDGSQKWGDFASTYWHVDCVRKMSLNSFIDHYQNWCKRKKYNFSQSKAEEIYGKAKELVPVLPKDDITKLIIKQAVNQLNSASTTVESLRTLMNETASKLPEYPIVMAMKGVGASLGPQLMAEIGDVSRFTHKGAITAFAGVDPGVNESGSYEQKSVPTSKRGSSDLRKTLFQVMDVLIKTHPQDDPVYQFLDKKRAQGKPYYVYMTAGANKFLRIYYGRVKEYLSSLPES

SEQ ID NO: 301248 - protein, 469 aa, unidentified
MFTALASSPQVHLSSLTNTQGLPHNRLTYIAFAELKACMSLLLNLPLWRGVMQTELSQFTAIIGIDWADKKHDICIQVTETGRREVLQIPHRAEKIDEWARSLYRRYGGPMAVALELSKGPIVAALQKYDFFVLYPINPSSLASYRRTFTPSGAKDDPTDAVYILDLLLRHPDQFRPLEPQSVEMRALMTLVEQRRRLMDDRVRLTNRLRNALKQYYPQALEWFDHIDTKLFCDFIRRWPSAPQARRARKATLEKFFRTHNMNRKTLLEKRIADIKSTVPLTTDEGVVLPYRVLALTLVEQLEVMLVCLNRFDEEIASLAPQHPDFALFNSLPGAGPSYAPRLLVAFGEQRERFGNAAELQKYSGIAPVTERSGQSTWIHWRWQCPTFLRQTFVEWSAQTINKSYWAGLYYYQQRAKGCSYQAAVRALAFKWIRILYRCWITRTPYDEAKYLKTLQERGSPLLKIAETA

SEQ ID NO: 301249 - protein, 371 aa, unidentified
MQGKEVSEQETAVKSNAGIDVSKSWLDVHVVPGGATLRVTNTRDGIRKLKRWLMQFDLNLVVIEATGKWHREVRRSLHAAGIAVAVVDPFRVRMFAKASGVLAKTDRIDARVLAQFAAVMAPAVRAPAPEVLEQMAELVAARVSAVTEETALKNQLSTAMARFLKGQLARRIKRIGKDIEALEREILRCIHADPGLARRYDILISITGIGPVAATTLIACLAELGTCSRRQISMLAGLAPVADESGERQGVRVVWGGRPNVRRVLYLAAVTAARFNADLKAFFDRLTADGKAAKLAIIAVARKLVVLANTSSPRTDPGSRTAQNMLDSQHRCSPDLLRSARKSTSPRKRGEVRARGLGAPSRRVVDSFAPR

SEQ ID NO: 301250 - protein, 351 aa, unidentified
MVIIGIDYHPSDQYIAFVDTETGECGERRLNHSDGEAEKFYRELAARGVSVRVGMEATGYSRWFERLLAGLGIEVWIGDAAEIKTKRVRKQKTDHNDAQLLLKLLLENNFPKIWVPSSENRDLRQLLWHRHRLVQMRTRIMNQLQALAMNEGQRRKKKLWNEQGRAQLEKLSLATWASRRRQDLLELLDRMNPTIEELTRASDQEAKKRPEVLRLMTHPGVGPLTALAFVLIIGTPERFQCGKQIGSYVGLIPCEDSSAGHQRLGHITKQGSSLLRFLLGEAAQAAARWDADWRRRYVHLAMRRQRNIAKVAMSRRLAVRLYWMWRNGWEYSEWVKFGSHAGQLGTRHGVN

SEQ ID NO: 301251 - protein, 408 aa, unidentified
MNTLYVGIDISSKSNVVYMMLPNGDKHSNFSVASSHEGSIQLVKRIYSALTSHSLDTVLIGLEATSVYGDNLVYFLREDATLAPFNSRIHVINPKQVKRFHDAYNDLPKNDYVDSFVIADCLRFGRINKEVYSGDYRYQALRNLTRARSFTVQNLIKEKQRFMNVLFKKYSTMTQEKVFSNTFSATALAVYEEFDSAEALANMDLHELTDFIIEKGKNRFQNPDAVAKAIQKAARSSYRLPKTVNDSVNQVFSISITSMKALESQIKEFDKAIKAQTELLPNVLISIPGICPVYSAGIMAEIGDINRFDNQAALAKYAGLAWKQYQSGGFEAEVTRLIPSGNRFLKYYLCEAAFSLVRCDKEYSDFYHLKYKEVNRCQHKRALALTARKFVRLVFRLLKDNRLYCPAK

SEQ ID NO: 301252 - protein, 340 aa, unidentified
MGDITTIGLDLAKSVFQVHAIDEAGKVMLRKRLRRSQVLAFFARVPPCLVGLEACATAHHWARELIALGHEARLMPPSYVKAYVKRNKHDVADAEAICEAVRRPSMRFVPVKMADQQSALMMHRARDLLIRQRTMLVNALRGHLAEFGLIEGQGLHKVTRLIAIVMDETDGRVPDIARQVLKVIVNQIEDTQTRIAGLETQVIAWHESNPVSQRLATIPGIGPIIATAIAATVADPNIFRSGREFAAWLGLVPRQNSTGGKARLGGISKRGDSYLRRLLVNSAHTVLLCSKQARNDPWLTSLLSRKPRLVAAVALANKTARVAWAVMSRQDTYRHAAVAA

SEQ ID NO: 301253 - protein, 426 aa, unidentified
MLPDVTGEYGKGCGLLFIGDDWAEGHHDVVVHDGAGKTLARRRLPEGVDGLARFHELVASCWGEDSEPDPAQVVVVIETDRGVWVKALAVAGYRVYPVNPKQAARHKETIAVSGKKDDFFDAGALADMGRTRRHQIRELAADSDIAEAVKIAARAHQKLVWERTRHLLRMRSALREYFPAALDAYAALTLAGPDALELLGRAPEPASAAKLTVTQITAALRRAGRRGDLAQRARGIQAVLRTAHLAQPAVIAEAYAASVQAGAAVITTLNAQIQVMEAKVSELFRRHPDAGIYLSQPGIGDITGARILGEFGDAPGRYVSAKARKNYAGTSPLTIASGKKRTVHARYIRNRHLIDALHAQALSSLTASPGARACYDELRARGTGHDDAMRRVASRLTGILHGCVKTGCGYDETTAWSHRSESPAAA

SEQ ID NO: 301254 - protein, 447 aa, unidentified
MKKKSGFPVLHPNAAGIDIASSEHYVAINPEVDEQSIRAFGCFTEDLYAIADWLLECKVDTVAMEATGVYWVSLYLILEEAGLNVVLVNAKHVKNISGKKSDVKDAEWIRQLHSCGLLSASFQPDHFTRTLRTFMRHRKNLTDMAATHIHMMQKAMEQMNIKLQNVIADITGKSGQAIIEAILKGEHRPEVLVQLLDGRIKASHEEVRKSLEAVWKEENLFELKQSFELYRTYRSKIRECDEQIKAHLTTRTNEMEKEISVSKQKVKTKAKSNKNNLSFDATEMLQQIVGTDLTEIFGITDTNAIEIISEIGLDVSKWATVKHFTSWLNLAPNNKVSGGKILSSKTQKKKNKAGQIFKLAAYAVQRSKNWLAMFYHRVKSKHGTKKAITATARKIAVIFYKLMKEKTSFNPLSAELYTRTFREQQLKRLKKQADKLGLMLIQNELVT

SEQ ID NO: 301255 - protein, 345 aa, unidentified
MHNIITGVDLAKEEIQVCVCKRNKVQSNQAMTPTEFASWLASSKPMTIVFEACSTSNYWKQKALEFGHDARLISAKLVASVRQNQKTDKNDALAVAQAAQLTDVSFINGKSKEQQELQTLVRLRELAVKHKVAVQQQIKSLLLEFNIRVSPSQGGLSGVVEAVLEDAENGFSVVFRQALNTSWQHLQQGIESIKQYDLYLEKAANEHETCKSLQALEGVGPLNAVNLYMALGCGGVGQFEKGRDASACIGLTPIQHSSGGKVKLGSVGKYVKNNMLRSCLVSGAMSAVNQAMRRPAKTKKEMWIQQMVERRGKRCTAVALANKTVRTAFAMLANGTEYKAELLAA

SEQ ID NO: 301256 - protein, 314 aa, unidentified
MTACWIGVDVSKARLDVFISRQEQSLGFANTAEGIEQLAQCLLQAEPTLIVMEATGGLERALVARLMLAQLPLVVVNPRQVRAFAKALGRLAKTDLLDARVLAMFAEAVRPTPRPLADEAALALADQLSRRRQLVEMLVMEKNRLKQAADAQVRKDIKEHVQWLQQRLSASESGLRQTVESSEAWQAKRDLLAGVQGVGEITALTLIGSLPELGQLNRKQIAGLVGVAPYNRDSGTLRGKRAIWGGRAEVRAMLYMATLSAVRFNPALRAFHQRLRAAGKAKKVALVACMRKLLTILNAMLRDRRPWTDDPKAA

SEQ ID NO: 301257 - protein, 345 aa, unidentified
MSEVTTIGLDLAKQVFHLVGFDSKGKEVKRKRLTRGKLAEYVANLPPCLIAMEACGGAHHWARRFRDLGHEVRLIAPQYVKAYVRGNKNDYNDARAIGEAARVADMRFVEVKSVEQQDVQAMHRLREARVGERTGLCNQLRGVLAEYGIVLAQGVGTVRKRVPELLEDAENGLSDFLRSLLADAYRQLRELDGHIAFYTDALKAHARENEAVERLQTVPGFGPIVASAFHAFVGNGHAFGKGRDLSAALGLVPRQHSSGGKTVLLGISKRGDRYLRSLLVHGARAVVRMADKKDDPLSRWICRLKVTRGANKAAVALANKLARIGWAILQRGGTYRAQPAPGGAV

SEQ ID NO: 301258 - protein, 419 aa, unidentified
MKSYKAKIIQKLKKESLIVAVDIGKNAHWGYLRAPDGTEVKPFIFYNTQRSFKDFWKRVRQFASKQGLEQIFIGFESTGPYAEPLFHYLKDKAVNLVQVNPMHTKRIKELTGNSPNKNDQKDPRVIADVICLAHALTLVIPEGPAAELRRLTGARERCVEKRTALLNQLQHLIFVIFPEFLGIIKNISTRTGLYLIKNYPTPERILAQGLEPLAAAVNKVSRGRIGYDRIRALTKAAYHSVGVKAGRKAILLEIEHLLCEIESENRFIDKVEKQMAQFLEQIPYSHSILSIKGIGVVTASGLIGEVGDFRKFKTIAEITKLAGLDLYEISSGQRKGQRRISKRGRPMLRKLLFFAAINTIRGGGIMYEKYHQMLERGMLKMKALIAISRKLLAVIFAVVRDNTVYIENYSRAHNYKLAA

SEQ ID NO: 301259 - protein, 353 aa, unidentified
MQHFIGCDVHTRNQFVAWIEEGTGEIRKRRLEHESQEVKEFYGQFPRGTVVGIEATFPVHWFERLMGELGHELWVGDAARIRASEVRYQKTDPRDAEHLLDLLRTGRFPRIWVPSLAERDLRQLLVHRMKMVRARTQVKNQLHALAISQGVCRKRKLWSGKGRKELESLALLPWAARRREELLDSLDRLDEQIRELDRAVEEAGREREEVALLRTHPGVGMVVALAFVLTVGRIERFANSRKLVSYWGLNPRENSSGGRQRLGSISKQGNTMMRWLLVEAAQTAARFDPQLRRIYQRLKKQKGNSGVAKVAVARRLAVRLFWMLRTRNNYTQLVHMSGSPSSAVVPPRAEPKV

SEQ ID NO: 301260 - protein, 361 aa, unidentified
MPTQINDLNFEGQNIYTGFDVHLKSWQVTILSDELTLKTFVMPPKPEVLSNYLQSNFPGANYHSAYEAGFCGLWAHHQLCKLGINNIVVNAADIPGTQKDRFQKEDRRDSRKIANALLGGNLSAIYTPSESTLNDRSLIRSRKLLVRDLVRFKLRIKSFLYFYGIELPEEFKDPNKHWSKRFMSWLEEIPMKEESGRLAMKVLVDEARSQRELLKGITKQIKLLSESDRYRDSVQLLRSVPGIALISAMFILTEVENINRFPNVEQFASFIGLIPMTHSSGEKEKVGEITFRSHDYLRSTFVESAWVAIRLDSALLMAYQNLVKRIEPNNAIIRIAKKLANRTYTVLKYNKPYEFNKTDNL

SEQ ID NO: 301261 - protein, 402 aa, unidentified
MNAVGIDVSKGKSMVAIMRPFGEIVSTPFEIKHTTSDINSLVELINSVEGESRIVMEHTGRYYEVLAHQLSEANLFVSTINPKLIKDFDNDSLRKVKSDKADAVKIARYALDKWQNLKQYSVMDELRNQLKTMNRQFGFYMKHKTAMKNNLISILDQTYPGVNTYFDSPARSDGSQKWVDFASTYWHVDCVRKMSLNAFIDHYQNWCKRKKYNFSQSKAEEIYGKAKELVPVLPKDALTKLIIKQAVDQLNSASTTVESLRTLMNETASKLPEYPVVMAMKGVGTSLGPQLMAEIGDVSRFTHKSAITAFAGVDPGVNESGSYEQKSVPTSKRGSSDLRKTLFQVMDVLIKTHPQDDPVYQFLDKKRAQGKPYYVYMTAGANKFLRIYYGRVKEYLSSLPES

SEQ ID NO: 301262 - protein, 316 aa, unidentified
MNKPEAKPSPAYAGVDISKNALDVSLAGQSPCRYTNDAVGIAKLVKALHRLPVPAWVICEPSGGYERDLLAALWTAGITVSLVNAARIRAFARAQGLLAKTDELDASVLREFGEVLQPTALAAPAPERQKLAALVQRREQLIIILSTEEQRLAQCGDASVRKLGARLLKELQQQVEQLEEMIETQIDEDKTLKAQCERLQQVKGVGAVTASTLLAEMPELGNLSRKEAGALAGVAPYNRDSGVLRGRRTIRGGRAQVRRVLYMAALVAARFNPILKAFYQRLLAAGKPKKLALTAVMRKLVVLLNLLLKNPQFTLA

SEQ ID NO: 301263 - protein, 440 aa, unidentified
MAMRKREDEVFPNAAGIDVGGSSHWVAVPRHLAEESVREFGAMTDDLNAMADWLLACGVDTVALESTGVYWIPVYEVLEQRGLKVWLVDARQLKYVPGRKSDIQDCQWLQKLMSLGLLRAAWRPGSEVCVVRAIARQREVLLTEQASWVQRMQKALVQMNIQLTEVLSDVMGMTGQAIIRDIVTGQRDPQVLARHRHRRVKASAEEVTKALTGNWREEHLFVLAQALAMYDDIARHLAECDRKLQALLAARGQAQVALGRLPRAGSKARSAFDVRQALANWAGVDLTRINGLEVTTVMKILAEIGPDLQRFANVKHFCSWLGVCPGTKISGGKVLSAGTKHSANRVRQALKMAAMNLVHSNSALGAFFRRLCTRMDKPRANTATAHKLARMVYFMLTRGEAFVDQGQQHYEEQQRQRSIAALKRRATALGFQITPATVAA

SEQ ID NO: 301264 - protein, 466 aa, unidentified
MTTSKKLWRNRKERKEWARRLQSEDPGLEVVHPQAAGIDVGNGTHYVAVRPDRDPEPVRRFECFTADLHRLADWLQSCGVKTVAMQSTGVYGIPLYEILEERGFEVYLVNARHTKNLPGRKSDVQESQWLLKLHTYGLLNNSFRPPAEIRVVRTYWRQRAEHVQGAATCVQRMQKALTQMNLQLANVISDLSGLTGQAIIRAIVGGQRDPRKLAELSDPRVHASREEIARSLEGNWRPELLFVLQQEVEMYDTYQRRIDECDHRLQKQLASFTDSVPSRPPEAKPPGKKARPAKNAPQFDLSSELQRIAGIDLTRIDGIDVMVAQTLLTEVGLDMSKWKTEAHFASWLGLCPDNRISGDKVLSRGTRRVVNRAATALRQAANTLIRSRSYLGAQYRRLRTKLGAPKAITAMAHRLARLVYRMLKYGQQYVDKGTEYYDQRYRWQQLQLLRKKAARLGLQVVEAQAV

SEQ ID NO: 301265 - protein, 348 aa, unidentified
MPCQSYCIGVDASSDYLDLDGLPGQSRRRFANTPESHAELAARLSALCAAGHDVLVVMEASGGCERGLHRALVEAGVPAAIVNPQQVREFARSQGLRAKTDRVDARAIRRFGEVSRPRPTPLPEPVRAELIELLGYRDQIVAEITARTLQRSHLRSAFLLRRADAALERLRQEAEMLARLIEATVAGDAELSRRAGLLTSFKGAGPLVAAELVAHMPELGTLNERQAASLAGLAPFACDSGKMRGVREITGGRPKVRRALFHVARVGLRWNPTLKALYERLTARGKPGKVALVACMRKAVVILNAILKSGQPWDPDYEAKKQEAKKAAKAARHQPSPAEGVTEGAAVA

SEQ ID NO: 301266 - protein, 343 aa, unidentified
MKVLLKQTVGIDVAQNELVVSLGRMDEQISIEVYAYKVFPNTKKGFSSLVSWVNKQTSITTEVRYVMEATGVYHESLAYYLCNIKKQVSIVLPNKISNYARTLDIKTITDKSASQAIARFGLERQLESWQPPLKIFNDLRNLCREREQLVQERTMLKNQLHAERTSARSSESSVKRTKKRITLIDLQEKEIRAEIAILIKEDNALVEKMKIVSSIPGIGNITAVTIIAETNGFELIKNKRQLVSYAGLDVREKTSGTSVKSKPRISKRGNRNLRKVMHFPALAAIRTDERFKDIFLRIVSKHGIKMKAIVAIQRKLLELTYILWKNNAYYDSAYQYSIISSEV

SEQ ID NO: 301267 - protein, 364 aa, unidentified
MDVHTTNFTFCCYTADSDRGFAVAQTEPDYRQVIKYMERVQKQRGEECKFVCGYEAGCLGYSLYHQLTRCGVDCVILAPSTMHQEKGKRIKTDRRDAENIARCLAFSLYSPVYVPTTEDDAVKEYIRMRDDIKADLKRVKQQIIAFTTRHGFAFDGKSYWTQKHLKWLETLVFEHPLYKETLQEYLILYYMLDEKVAVYDTRIEEMSHLEHYEENVQKLCCFRGVAAHTALSLLVEVGDFQRFRSAKHFAAYLGLVPGEHSSSDKQIRTSITKAGNTHLRRLLVEAAQSYNRGAIGKKSAALKARQGGNPAEVLAYADKANERMQRKYYRIAFKSRHNIAKTAIARELACFVWGMMTGNISNAA

SEQ ID NO: 301268 - protein, 355 aa, unidentified
MESTKYIGMDVHKDAISIAVLNSSGKLVMESIIETKAITILEFVHGLRGSLHLTFEEGTWAAWLYDLLKPHVTKLVVCDPRRNGYLKQGSKSDRNDARKLAELLRSNMLRPVYHGEHGVRSLKELARSYLTITKDQARVMTRVKAVYRSWAIPCAGKQVYGQRHRLEWLDKIEEPGVRRRAEIYYAELDALRSLRLVVRSELLLESRKHDASKLLSQIPSIGPIRAALLIALLQTPDRFRTKRQLWAYSGLAIETHDSAENQYVNGQLQRSKKKSSIRGLNSNHNHDLKNLFKSASAVAAVKSGPFQMFYAAQIGKGIRPEMARLSLARKIAAITLIVWKKGVSFDASYLNPQTA

SEQ ID NO: 301269 - protein, 341 aa, unidentified
MKKFIRIGVDLAKNYFQIHALVSEGGPAVTRKLRRSKMHEFFSQIEPCLIGMEACGSAHYWARELRAMGHEVLLMPPAYTKPYVKRGKNDAVDADACCEAMSRPGMRFVPIKSAEQQATLMLHKMRELLVKQRTMSVNALRSHLSEFGIIAAKGIGRVDELLELAESDATLPNAARAGVKVLSQALEGLDKAIDDLEDEITSAHAQNEMTRLLYKVPGIGKIISSVIAASVPDPSVFKSERDFAAWLGLTPRQNSSGGKQTLGAITKQGNRYIRKLLVLGATSLLNVMGKRKGALRDWIVGLLAKKPARLVTVALANKLARILWAMMKTGESFRTEMFAKA

SEQ ID NO: 301270 - protein, 352 aa, unidentified
MFHKPGEATLKEIKTIGLDLAKNVIQVHGVDARGKSVLVKQLKRDRVALFFANLPPCLAGMEACGSAHYWARQLEELGHKVKLIAPQFVKPYVKTNKHDAADAEAVCEAVSRPNMRFVPIKNAEQQGVLALHRARQGFVKARTAQANQIRGLLAEFGIVLPQGIGHIAKCLPAILEDGENELPGVFRQLAARLGAHLKELDRQVSELEEQIQRWHRENEASRRLARIPGIGPLTASALVATIGDAKQFKNARQLAAWLGLVPRQHSSGGKPMLLGISKRGDAYLRTLLIHGARSVIRIAERKAEDAQDWLVQLIGRRHKNIATVALANKNARIVWALLAQGRDYQSDYALAA

SEQ ID NO: 301271 - protein, 383 aa, unidentified
MKSVCGLDVHKDSVYLCILSEFGELIEKVFGVLTYQLEEMRDLMLHHHVVEVSMESTSVYWIPIWRVLSPHFKLNLANPYFIKQLPGRKSDVKDAQWIAECTMKELIRGSFVPPETIQQLRQYDRRIFDLNEEIVRKLSKLDAVLQRCNIRLSNYVSNVDSKSYKAVVRAISQGFTAPEELVKLIHGRIIKHHGMDVITASLKGVVSLAEIDMISQLRDELDMAEAHKEKCQARMLEICEREFPEELKRLQTIPGIKERAATSLIAEIGTDMNKFETANHLASWSGLKPRNDESNKKIKSRSITHGNVYLRKTIIECAWAASRTKDCFFSRFSFHQTQVRKKNKMKVMVAVARKMLIAVWHVLHDNTIYIDFTTDRKTSRTKG

SEQ ID NO: 301272 - protein, 347 aa, unidentified
MIIIGCDLHTRSQQIAGLDMETGEVEERRLEHANGEARAFYAGLREPALVGIESTGYTQWFEELRVEFGHELVVGDAAKIRKMEVRKQKHDRRDVEHLLNLLVKGDFPRLWLPSAAERDVRVWLEHRHQLVQMRTRALNGLQAVALNQGLGLRQKLWTKRGQEELKKLPPREGRARRRADLLALRAQLDGWIAELDQRLEPEVAQRPDAQRLMTHPGVGPLTALGTVLVLGPVERFPDARHVTSYVGLIPQEASSGGRQRFGHLTKQGNGLLRFLLVEAGQTASRLDPGLRRAYRRLTFRKGRASAKVAVARKLAIRLYIMLRDKIDYEEFCRRGSHAGMLGEVALA

SEQ ID NO: 301273 - protein, 357 aa, unidentified
MLRCLGLFQVSLLFFLVFNDKVMKKFIIGIDVSKEKLDFCFLQTDAAILEEEIIENSTQAVRTRLAKFKKNNKAASEDILICAEYTGQYTYPLSTVCNELCIDLWLENPAQIKYSSGIHRGKNDKLDARKIARYAERYMDKAQLFTLPDKAIASLKQLISERDMYVVDKAKYQGQLTDQKRFMNKDDYKKKEKRLKSLILELNEAVDQIDKQIKKLIDDDENLSKQHELLCSVDGVGERTAIKMIVETNAFKDFTDARKFCCHAGVAPFEYTSGSSVRSKNKVSNRADKSIKSLLHMAALSTIRMDGELHDYYQRKVAEGKNKMSVINAVRAKIVYRMFAVINNKKFYEKNYVYSLA

SEQ ID NO: 301274 - protein, 372 aa, unidentified
MGQSSVLVKNGKRIPVGERDDVFVGLDVHAKKVNVAVRVNGREVARWVSPPNGAVLAKSFRPLRAGLRNMAYEAGPTGYGLYRTLRAEGLPVEVWAPGKMPRPANRSNKTDRKDAATLAKYAEKDLGTPIAVPTAQQEADRQVMRTRNQLVEKARRVKQQVKGFLLMHGIPAPAGLAGWTKAGLDALRKVSLGAELKFCLELLLDELIHLEGLKKRIELKLRELSQTERHAKAVRLLQSHPGVGLLTAMNFLLEVYRPERFEVDRQLSTYVGLVPRVSQSAERRTEGPLIRSGQNSLRSMLVQAAWQWKRRGGEGEEIYQRILGNTQCAQKTIVALARKISANLWYMLLRGEAYRPPEQRMNSKAILRLETT

SEQ ID NO: 301275 - protein, 337 aa, unidentified
MEYFAGLDISMAETQVCVVAQSGAVIHKAKVPSTPADIAGELAQLPACRRIVFETGRMAPMLYHGLRELGLPVICVESRQAYQALKLLATHKTDHNDARGLAHLARTGFFKPVHVKSLPAHAIRSLIIARKKLVGQRVTLENQIRGLAVVFGVRLPRALSSHFIRQALQASNGIAGLSAAMQGLAAARAAVLAAILAIDADIRRMVRASDACQRLMSIPGVGQLTALAFTAAVDDPGRFRRSRDIGAYLGLVPRRHQSGEMDYTGSISKCGDRRVRTLLYEAANVMLTRYKGPLQLKDWALAVARRSTMRKARVALARRLAIIMHAMLKHGTEFKPA

SEQ ID NO: 301276 - protein, 361 aa, unidentified
MFTERTSVGLDVHARSVVATAIDGVTGEVFRARLTPNNEQVVGWVRSLPGPSVATYEAGPTGFGLARAMATAQIRCVVAAPSKIRRSAGDRVKTDARDAVLLARLLRMDEIVAVTVPSVEQEDARDLVRAREDVRGDLMRSRHRVSKLLLRQGIVYCGGHAWTGAHLVWLRAQHFDTPGLALAFDAEYEAVLAAEARRDRLDEAIAAMAADSQFTPVVHRLGCLRGISTLTSFGLAVEIGDWDRLTGASIGAYVGLVPTESSSGQSRSQGSITKTGNTHARRLLVEAAWHHHKAYRTPGATMRARWELAPAAARARGHAGNRRLHERWLQFTERKKRPVVANVAIARELAGWCWSLAVMDP

SEQ ID NO: 301277 - protein, 338 aa, unidentified
METYVGLDVSQKVTAICVVDRDGKSVWHGCVISNPEEIARAIRLHAPEAVRVGMETGPLAVWLYHSLRADDIPVDCIHARHVHAALATQLNKTDTNDARGIAQLTRSGWYRGLEVKSMASHEVRLLLTARGKLVSMRTGLYNQVRGVLKTFGVILPAGKGVTFERLVEQNMPPSSLVQGVLDILIDSLRHIGTQINALDQAIRRVAQASPVCRRLMTVPGVGSLTAVAFASAVDNPERFSSVRDIGPYLGLTPTKYQSGNVDRNAGISKAGCRLTRHLLFEAASSLISRYRQNCDLRRWALTLIPRIGARKAMVATARKLATVLLSMWKGQTDFKAIR

SEQ ID NO: 301278 - protein, 339 aa, unidentified
MRLYTGFDLHSTNSYVGIIDEDGKKIWKKKLRNDPNLILAALKKFKSDISGVVVESTYNWYWVVDLLIEEGYQVHLANPSRIQQYSGLKHADDEHDAFWLAEMLRLKILPEGYIYPKQQRPLRDLLRKRGHFVKLRTSMITSLQNILARNIGAKMNTNHLKALTKDWVAPLLAGNDDLSLAGKVSKDAIDTFSRQINAIESVVEKKLALRKPYEFLMSMPGVGRVLALTIMMETGPIDRFPKVGNYVSYCRKVPAARYSNEKKKSAGNRKNGNKYLSWAYAEAAEFARRFDPKARSYYDRKRMRTNAPIAYNALANKLSRAAYYIMRDGVLFMPEKMFT

SEQ ID NO: 301279 - protein, 401 aa, unidentified
MTTGQVWAGVDVGKEHHWVCAVDDSGKVVLSRRLVNDEQPIRELVAEIDELAERVSWTVDLTTVYAALVLTVLADAGKTVRYLAGRAVWQASATYRGGEAKTDAKDARVIADQARMRGQDLPVLHPDDDLISELRMLTGHRADLVADRTRTINRLRQQLVAVCPALERAAQPSQDRGWVILLARYQRPKAIRQSGVSRLTKVLTDAGVRNAASIAAAAVAAVKTQTMRLPGEEVAAGLIADLAREVIALDDRIKTTDADIEGRFRRHPLAEVITSMPGIGFRLGAEFLAAVGDPALIGSADQLAAWAGLAPVSRDSGKRTGRLHTPKRYSRRLRRVMYMSALTAIRCDPDSKAYYQRKRDEGKRPIPATICLARRRTNVLYALIRDNRTWQPDSPPVTAAA

SEQ ID NO: 301280 - protein, 345 aa, unidentified
MEIRTIGIDLGKTVFHLVGVNARGEIVVRKKCSRTQLLRFTSNLRECLIGMEACGGSHFLGRALREQGHDVRLMPAQYVKPYVKTNKNDYIDAEAIAEAVTRPTMRFVPIKTDDQLDLQSLHRVRERWVVRRTAVINQIRGLLLERGITIRKGRKHLQASLPRILEDADYQLSGALRVLLTQLQIEMQYLHRQIEESDQLIVRIASELEPCRRLIAIPGIGPVIATATIAAIGNGAAFKKGRGFAAWLGVVPGEHSTGGKQQLTGTSRRGNKYLRKLFVLGAHTVLLQRTKQSSGLSTWLASLTARKRKQVATVALANKMARMVWAVLFKGEAYRPPLLPQPVTA

SEQ ID NO: 301281 - protein, 377 aa, unidentified
MKKDSRFVGLDVHAATIAVAVAEPGGEVRSLGTIPNVPEAVRRLVKKLGPPETLRVCYEAGPTGYVLYRQLTALGVACAVIAPTLVPVKAGDRVKTDRRDAEKLARSYRSGDLTPVWVPDPGHEALRDLVRAREAAKKDQLRARHRLGKFLLRQGRRAPTGSKAWGVKHRAWLQTIRFAHAAQDATLLDYRTEIDHAADRIARLERAIATAADLTPAPVRAVIAGLQALRGIAKLSAVSVVTEVGALSRFAKPRQLMGYSGAVASEHSSGPHRRRGGITKTGNAHLRRIVIEAAWAYRHRPAIGGTLRTRQAGLSEEVKALAWKAQHRLHGRYARLLAKGKAPTQVVTAIARELLGFIWAIGVHIEQHTAGGAPAAA

SEQ ID NO: 301282 - protein, 419 aa, unidentified
MRVHRNCCGLDVHKKMIAACLIREDGEGNSVTEKRLFGSMTRELHELAQWLCSAQVTAVAMEATGVYWMPVWNVLEPYGLQLLLINPEHYKAVRGKKTDLKDGTRIAELLQDGRLEGSYVPPVTIRVLRDLTRYRIKLVQYQSSIANRIQKLLEQCNIKLASVASDALGVSAMAMLRALAQGETDAVRMAGMAKKQLRKKIPQLQLALEGCVLPHHRLLLTEMIEDLDHVGAKITRIEDTIERHMRPFQEAVNRWLTVPGIKHRLAWTLVAEVGPTVEAFPSAADIVSWAGICPGNNQTAGKRKSGTTRAGNPWLRRALCEAAWAASRSKGTYLQAQFRRLAALRGPKRELIAVANSILTAGYYMLQRATTYQELGPDYFDRRNKVRATHRLVKRLEALGHRVILEPHFTAYPLKASSS

SEQ ID NO: 301283 - protein, 388 aa, unidentified
MQTVADRPEAPTAIRTDLGAIFVSLELSRSTWLITSLSPGGGEKMSKQVVRGGDVAGLLERFARLREKARARTGKVFPFVVIQEAGLDGFWIDRALQNEGIESHVVDPASIATSRRRRRAKTDGIDGEALVRALLAYKRGEPRVCAMVKAPTPEEEDRRRLCRERKVLIGERVQHVNRVKGLLFSQGISGYEPLRRDRRERLDTLQTGDGRLLPDHLKAQVCRELDRLELLLEQIKAVEAERDVLLAAQQVAAPAPAAMLLDIKGIGPEFAAILWSEGLFRHFDNRRQVASYAGLAPTPWQSGSVDREQGVSKTGNPRLRTTLIQLAWLWLRHQPQSALTLWFEERVRRNGGRLKKTTIVALARKLLVALWKYVTAGVVIEGAVMKRT

SEQ ID NO: 301284 - protein, 398 aa, unidentified
MDLPVYYELETNNGNRDYRIQIGGHYMNYNTVYVGMDVHKESFTLCSCKYEDEKASHYQRTPASYKNVLRYLAFLRTIYGEDTRFVCGYEAGCLGYSLYHQLENFNVECVILAPTTMLEQRSKRRIKTDKRDAEIIARSLAQHNYSPVHIPTETDNQTKEFIRMRDDHKAELKKIKQQILAFCLRQGYQYDGSGNWTAKHVKWLRSLKPAGLYKEILDEYLLTYTILTDKLNRLDQRIEELASKEEYKESVSKLTCFLGIKTHTALSVIVEVGDFQRFVSARKFAGYLGLVPGQHSSGDDRNGLGITKAGNTHVRRLLVESAQSYTRGKIGYKSRVLRSRQAGNSPQIINYADRANERLRRRYYQMVLKDGKKYNIAKIAVARELACFIWGMMTDNIY

SEQ ID NO: 301285 - protein, 298 aa, unidentified
MSKSIVEARRFVGLDVHAETIAVSVAEKDGEVRSLGVIPNRLSSIRKLMGKLGDASTWRACYEAGPTGYTLYWQLTRLGIECMVVAPSLVPVKAGDRVKTDRRDAERLARSFRAGELTPVWVPDAAHEALRDLVRAREAAKADQLRARHRLGKFLLRHGRRPSERMNAWTERHLDWIRREVKFEQFAQQATLEDYLAEVDHLGQRIVRLEKAINEAIEGAPSTMKAVVSALQALRGVGKMTAVTIVAEVGQLSRFAKARQLMGYSGTVASENSSGERTRRSAITKTGNAHLRRVLVEA

SEQ ID NO: 301286 - protein, 406 aa, unidentified
MSENGKRYLGLDVHKHYLIALGVDTELNVVLPARRVELVHLETWMKKTLSKQDEVVLEMTTNTWQVYDELVEHAGSVTVVHPPHVALITRSQVMNDKIAASILARLLAKGLLVGIWVPPQEIRELRGLVAQRQKMTRLATQAKNRLHAVIQRHHLVPPAGNPFGESQRAWWLALELGTLEKLNLQSDLDTLEFAEKQQARQTEIMTGLVAEQEPLGRLLQLAGFGVVTAVTVWAAIGDIQRFEDAQHLVGYAGLGARVHDSGLTTRTGRITKAGRRDLRVALVEAAQVAANHHPHWKAELARLEPRLGRNKAIVAIARKLLVAVWHVLSGNTVDRFADPQQVSQKLLRFAYQVGKGNRAGQSAAQFVRQRLDELQIGQELTSIPWGSKKPIPLPPSTLKKGERRPK

SEQ ID NO: 301287 - protein, 338 aa, unidentified
MYYTGIDLHKRSSYLTTVDDSGKIVKQKDIKNVDHNFIQYLDSIPGEHITTVESTMTWYWLNDLLISIKIPMVLAHAKYVKAIAYAKVKTDKVDSQTLAQLLRMDYIPEAHKISKEKRVLRDALRARLKIVQRHTSITNSMHLLLAKYNYESPEQLTGIAEYQFEQLAETELLLKKQILNLEKQLYPILIPDEDTQRILWTPGIGKMNAFNIILEVDDINRFADVKNFYSYCRLTPSARNSAGKSKQRSSKDGNKYLKMVFSDAAVHAIQYYPVIRKFNNSLIRKKNKQIAKTIIAKEIANIVFHVLKKKENYNNMFKGKELERRKSFQWPRVTNPYA

SEQ ID NO: 301288 - protein, 428 aa, unidentified
MNIEDTIRREQFCQIKSEIRGSDQHLVVGIDVAKDKHHAFMGSATGKSLLRKLVFENNLQGFRKLQERSEAIGIQNALSKIVFGMEPTGTYHKPLGAYLIGCGHHVVLVTGKAVKNNRELLDGRWDKNDIKDPANVADLICQGKCLYYDYPSASINQLRELLSLRRRLKKEEHSLRMRIRNNLLAQYFPELDRFYSACETESLAIVRWFLDPAMIACMEFDEFFSLVTRTKRGIAQKLRLEKIHRLAVESVGCPMGPAVEFEAELLVKKLDQVRQQLKKTAELMEDFCMEFSEYSWLLTIPGFGPYIAARVLASISNPWRFDSSNQVIKLAGYDLGANRSGKTSNEAVPVISKRGNSELRYALYQAAHVASTRNPEFIRYFTRMLRGRERERGIKTKMKVKLAAKMLKIAWTLMKKNQGFDPDYLITE

SEQ ID NO: 301289 - protein, 393 aa, unidentified
MRISVGIDAAKEVHWATAVAEDSRVVLDRKVDNTAEDIAKLASQLAALDGERLIGIDLLGGIATLISAMLLAAGEHLVHVPGLAVNRARQGSVGGQAKSDPKDARIIADQLRLRPADFRPISLEDDALAELRLLVGRRGDLVTDQTRRISRMRYLLNSIHPDLERALDLTNAGPLLVLARYVSAAEIRSARPKAIARYLRAKGARNAEALAETAYAAALAHPNLKLPAEAATADLIRELAEEAIACRVRLATIDRKLAELVEAHPEGALIRSLPGMGVILAAEFLAEAGDLSRFRSAAALASAAGLAPVLRQSGKSRRLQRPGYANNKLKRVFYQSAFCSLADPLSRAYYERKRREGKRHHQAIIALARRRINVLWALIANRTPFSANHRKAA

SEQ ID NO: 301290 - protein, 372 aa, unidentified
MKQNIIHIGLDVDDTQYHGAAFNKATGEIIDFKCRPTLKGLLQQLDRMAQHFSGCTIKLCYEASYIGYSLQRDLMSNDIHCDIISPGSIPSPRGKVIKTDRIDAGYMAQFYANDLLTIVQPPDEEQEQDRDLLRSRQKVMQQRTQLRKHLQAVLRRSGLHYKAETHYKTHWTKHHYFWLTRTIDGLSGSLKINLELLLRQLKALNQILTEYGQQIEVLANAPRYQDAVQSLTCYKGIKNIFALTMITEIGDIKRFSHPRKLVSWIGMDIREYSSGGKYNRFGITKHGNRYVRTAFIEANQRGYRTAKIGKDLKSRRKHIASELIDIADRCLRRLNKKGNRLLLAGKHPNKVKVACAREMVGFVWESLNKAAA

SEQ ID NO: 301291 - protein, 332 aa, unidentified
MGQNSMVCAGIDTGKYKLDVAIDGRVEQLQVPNDPAGHRTLVAWLRHRQVERVGIEASGGYEQAVVLLLRASGFIVIVFQPAQVRAYAKFLLQHAKNDKIDAALIARCTGAAEKVHEPADARLAPLAKHLTFVEQLTDDIALFKTRRESCHDARIREHWTQEIKRFKLLQTRELKQLITAIRQYGDLAKRFDLIASVDGVGPRTAVAILVRMPEIGRVSREQVAALAGLAPFDDDSASRQGVRHIKGGRDRLRRSLYAAALPAAFNWNPQLKAIYQRLIAAGKPHKLALVACARKLGGFKRSLQRSPCWPTEATGQVPPRAFSNQAFCGVGN

SEQ ID NO: 301292 - protein, 418 aa, unidentified
MGKLIEYCAGIDIGKRFLLCCVLKGAAQEEPRSQTLRFDVTVPGLIRLRDWLIAENVTHVVMESTGSYWIPVFNILEDHFVVVLANPEEVKNRKGHKTDRKDAVHLAELLRHDHIRSSYIPPKPVRDLRDLTRRRLQLTQDATRERNRVQKLLEQVNVKIGNVLSDVFGVSGQSMLLALLNGEASPEQIAQLARGQARHKIPQLMEALEGNRMSDHERLLIRSCLRHLACLQEEVEELDAEILRRMQAPPFQNAFLLTQTIPGVGQLAAASILAETGTDLSPFPTAEQMASWAGLCPGNRESAGIQKGAQTTHGNAYLRTALVQCAWAATRKQGSVFQSRFQQLSPRRGQKRAIVAVAHQMLIILYCMLKLSVPFRGAEDAPQQRRRQRRAHHHLRSLRRLGVTVQVLAPDCLMDETG

SEQ ID NO: 301293 - protein, 371 aa, unidentified
MSNGTTFRLDPTYFIGMDLHSNNVVVCVLQNAITDTQSLTRKIVKKAKIKLSTDLHELHEFLIPFCKDKPHQATVESTYNWYNVADLFEDNHWNLSLADPTTVKKNKIKSANDETDAEFLANQMRLGALNAAVIIPRRDRAFRDLVRLRVELVMDRGRYRTILKNFFNNQRYLKMSTSQLDRLAQECFDNHPETLMKYFDDANIAMKAEHYLRAMHQLSSQIAALEMQIKKQELDNTLNCHRYLPHLSSIKGCGFILGSIIASEIVDIHRFQSDRDFVSYCRLAPATRVSNEKDKGKGEGKNGNAYLSWAMTELANLMVFFNPEVKKKYDKLFKKSRLRAKAIRSLAAKIARCIWHMLTKDEDFDIQRAFT

SEQ ID NO: 301294 - protein, 347 aa, unidentified
MDVHQATISAAVRDSSGNLVMEATLETKAETILEFVHGLRGSLRVSFEEGTCASWLHDLLKPHVTEVLVCDSRKNALLRVGNKNDREDARKLSELLFLNKLHPVYHGETGIRTLKELARSYLTITRDLTRVMNRLKAIYRGWGIACAGQQVYAPRYRAEWLAKITESGVRRRAEIYYQQFDVLAALRQEVRRDLLAESRKHPAMRLLRQIPSIGPIRAALLIALMQTPHRFRTKRQLWAYCGLALRTYDSGEYRFVGGQLKRSKKAVTIRGLNKNHNHDLKNIFKGAATRAAATAGPFQNFYEARVASGMKPPMARLTLARKIAAITLLVWKKGVRFDAEQLKQQAA

SEQ ID NO: 301295 - protein, 402 aa, unidentified
MNAVGIDVSKGKSMVAIMRPFGEIVSTPFEIKHTASDIHSLVELINSVEGESRIVMEHTGRYYEVLAHQLSKANLFVSAINPKLIKDFDNDSLRKVKSDKADAVKIARYALDKWQNLKQYNVMDELRNQLKTMNRQFGFYMKHKTAMKNNLIGILDQTYPGVNTYFDSPARSDGSQKWVDFASTYWHVDCVRKMSLNAFIDHYQNWCKRKKYNFSQSKAEEIYGKAKELVPVLPKDAITKLIIKQAVDQLNSASTTVESLRTLMNETASKLPEYPVVMAMKGVGTSLGPQLMAEIGNVSRFTHKSAITAFAGVDPGVNESGTYEQKSVPTSKRGSADLRKTLFQVMDVLIKTHPQDDPVYQFLDKKRAQGKPYYVYMTAGANKFLRIYYGRVKEYLASLPES

SEQ ID NO: 301296 - protein, 400 aa, unidentified
MAVMIGTGPHKGSHTAVAVGAAEEPLGKLRVRACPDQAGKLVAWAQAWPERTWAVEGARGLGRLLARQLVAAGERVLDVQPKLAARVRLLEAGDTNKTDPNDARSVAVAALRSKGRQEVTADGHAVVLKVRAKRHRDLSRTRNQVVCRLHAVLCELIPGGVPDEITAGQAARILEQVAPAGAVAQARCELAAELLADIRHLDAQRREARKKLAAAVTASGTSLTDVFGVGPVIAATVIGDVITVARFPSRDHFAACNGTAPAGVSSGQRKIHRLSLRGNRRLNHAVHMAAINWIRHKHSDGRACYQRKLAEGKTRKEALRCLKRRISDAIYARLRADARKAGPGGQPGNDTGSSVTGSHPGHRLFGQATSGPEPSLRAPATFTQATPAPEPSAKKIQRAT

SEQ ID NO: 301297 - protein, 354 aa, unidentified
MSQTPNTAIAVIGIDIGKNSFHVVGHDARGAIALRQKWSRGQMEARLANIPPCLIGMEACVGAHHLSRKLASLGHDARLMPAKYVRPYSKGQKNDFNDAEAIAEAVQRPTMKFVATKTAEQLDLQALHRVRERLVSQRTGIINQIRAFMLERGIAVRQGIGFLRTELPTILATRTDALSPRMLRVIEELAGDWRRLDQRIDGLSGEIEALARQDQACSRLMTVPGIGPIISSAMVAAIGTGDVFSKGRDFGAWLGLVPKQISTGDRTILGKISRRGNRYLRVLFVQAARVVLARIKHLERYGLKSWIEAAKKRLHPNVLAIALANKLARIAWAVLAKGRGFELTRTDDAGVRPA

SEQ ID NO: 301298 - protein, 353 aa, unidentified
MGRSIGVDLHRNNFVTATRAENGRTYVRTWKLEEIGRFADQLRPDDRVAVEMTTNTRLFYDGVRPVVAEVQVVNTAQFKVITKSVKKTDRRDAETLALYLEKDMLPTVRLKEMEQGQLAGLVSTRDTLVKQRTSLKNKINNRFAMYGRAIKREQLSSEKGLAAVEVEPFDALVQVEIRVLVAQVRALNASIRELDQTIEASAENLKGYRSITSIKGVGTVGAATLLTVIGDVDDFANAGKLGAYLGLVPRVSNSNETERSGRITKRGSKLARTALVQCGLIAKKYSPYLHAFHERVKQKKGGGKANIALARKLLEIIYRALKNDWVFEDFGRFRLEGGICPVKAKTRRRRQAG

SEQ ID NO: 301299 - protein, 447 aa, unidentified
MLPWRLLPGGHIVGRCRLQGREVRVVFAESEDDEQIIERVAALDIGKAEVVCCVRLPAKPGTKRRVQEITTHTTMTRSLTDLANRLVGLGVERVVMEATSDYWRPPFYLFEAHGLQPWLVNAKDVKHLPGRPKTDVLDAVWLCKVAERQMLRPSFVPPHEIRRLRDLTRYRVDLVGARGAEKNRVEKLLEDACIKLSVVASDIFGVSGRAMMTAMIAGERDPKVLADMARSRMRTKIGQLEEAFTGYFDDHHRFLLARMLGRIDSIDADIDALDTEIEAYLAPFGDAATRLDEMPGIGPTAAAIIVAEIGLDMTRFPTPAHLASWAKFAPEIKSSAGKNKGNGSTGHGNRYLARVLGEAAVAASRTETFLGARYRRIARRRGKKKAIVAVGRSLLVAIWHVLSDPENRFVDLGADHFDRHVDTATKKRNHIRQLEALGYTVTVQPAA

SEQ ID NO: 301300 - protein, 347 aa, unidentified
MKEQNNRSEFTIGLDLGERRHRFCALNGKGEVVEEGTLGNDRVSLGRLSARYRGALAVMEAGAHSPWISRYLERLGWEVIVSNPRKVRAIYQHERKSDRRDALMLARIGRMDRALLYPIHHGSEEAQQDLLRIKLRDSLVRARVALINSVRFSLKSLGYAVRNPSSERFHKVAMEPLPEGVREMIAPSVQALAELSARIAVLEREISVLARTKYPQTLWLQQVPGVGAITALYFVLKIEDPKRFKNVRAVGAYTGLCPRRDQSGASDPQLRISKCGDAYLRRLLVSAAQYILGPFGPQSALREYGLRLAADGTPRAKKRAVVAVARKLCVLLLSLWKNQTPYQPYPA

SEQ ID NO: 301301 - protein, 370 aa, unidentified
MTQCTKTQFVGLDVHKDSIVIAVAQLGREPARVIGTVPHEWNALRKVLDKLGPRCEVACCYEAGPTGYGLARALIAAGWACDVIAPSLIPKKRGERIKTDRRDAVKLAQNHRSGELVAVFIPDEKGEAIRDLERAREDAKKAERVVRHQLSKFLLRNNRRYPGRTTWNAAHQGWIAKQAFAEPAQQYVLSDGLAAVEAATLRVSQLTARLRELTVGWSQEPLVKALQAMRGVEFVTAVTLVAEVGDFRRFATAGDFMGYVGLIPSEQRSGPHRRQGPITKTGNAHVRHVLVESAWHYRRQPRMSKALRERSVGVAPQVCAIAWKAQKRLHGRLNRLIGRGKNKGEAVTAVARELAGFVWAISREEKLLAS

SEQ ID NO: 301302 - protein, 356 aa, unidentified
MQTQVTKKIDFNGKELFIGLDVHKKSWSVTIVVDGMEHRTFTQPPDPLTLNNYLQRMFPGGYYNSAYEAGFCGYGIHRELNSLGIKNIVINAADIPTSQKDKLQKRDPIDSRKIARALEKSSLRGIHIFDREQEELRSLNRTRFYLMRDLRRSKNRIKSFLQYYGESIPPEYDNNQWSLKYISWLKQIQMQTKSGQDAFTNLIRSYEYHREQLLRLSRQIRQRMREYDNELYTLLKTISGIGPLTSSALITELGDINRFPHIDHLSSFVGLIPRVRDSGETTHTGGITFRCNSFLRTMLIEASWQAIRMDPALMQYYQHHVVNSKGHKVIIKIARKLLNRIRYVMKNRQPYVTGVA

SEQ ID NO: 301303 - protein, 456 aa, unidentified
MHGRGVAMKEPQEICDVEHEQILERVAAVDVAKASGMVCLRVPQAGRPDRRRSLVWEVPATTNAVMELADHLIRERVQKVTLEATADYWRIWFYLLEAAGLEVQLVKAHDVKQAPGRPKTDKLDAVWLAKLTERGMLRPSFVPPTEIRNLRDYTRLRTDLTRERTRHYSRLEKLLEDALIKVSVVASKLDTVSARDMIEALIAGERDPQALAGLARGRMKVKHTALVEALTGRFDDHHAELARMLLDQIDSLTGQIGRLTARIEQLIAQIPAAQGVDPDGTTGPGAGLVEGAPVLPAIDRLDEITGIGRNAAQQIIAEIGLDMGRFPTPGHLVSWAKLSPRTIQSGTRSRSGGTGKGNPYLKGALGEAAAAAARTDTFLGERYRRIVKRRGKLKALVAVARSILVIVWHLLTDPDARFRDLGAGYYAGRTDKDRKTRNHIRQLEALGFTVTLAPAA

SEQ ID NO: 301304 - protein, 346 aa, unidentified
MRFYTQNHPYVCGVDLHTKTMYLCILNESGEIVLHTNMPTEPQPFLKAIQPFRDNLVIGVECMFSWYWLADLCLQEKIHFILGHALYMKAIHGGKAKSDKIDSEKIARLIKGGTFPLAYVYPPELRPTRDLLRRRRMLVRMRSEVLAHIKLTHYQYNAEFFQKNINKRGNREGIENLFSDPTVRKNIGVDLSVADHLQDEITQLENYIIRQTKAFDPRTFYRLQTVPGIGPVLALTILYEIGDVDRFPTVQSFASYARLVKCSKESAGKLYGYGGGKIGNPQLKWAFSEAMCLFMRESDRAKAYVGKLEKKHGKGKAMSILTHKLGRAVYFVLKRKDAFDENYFFN

SEQ ID NO: 301305 - protein, 262 aa, unidentified
MEYYAGIDVSLKESSVCIVDAKGKVVREVKIASEPETLSRYFDELELSVCRIGLEAGPLSQWLRAGLVAAGRDVALLETRHVKAALSAMTVKTDRKDARGIAQLLRMGWYRPVHAKSVASQDIREPTSQREAFLAAAPADDKTTAKVIALSTLYGIGANFSAVLGREIFYRDFGNRKQLASYVGLTPMPHQSGSMDKDRRIARAGNGRARKTLVQAAMAALPARKRSVGMVPRARGRSERTDQAHRDRCDGTQIIDRTLALR

SEQ ID NO: 301306 - protein, 392 aa, unidentified
MVISVGIDVSKDKHDCFIVSSEGEVLADAFMIPNNIDGFHCLLQRIQDCATPQDKIKVGLEAAGHYSYNLLGFLLDNGLTTYVLNPLRTNLYRKSLSLRKTKTDRVDARTIASMLLSDAGLKPYTDTAYHNEELKSLTRYRFDKVKERAKLKSSIARLVCILFPELEKLVPSLHIASVYALLEEFPGAKQIAAAHLTRLKALLETASKGHYKRDMALEIRDAARNSIGSWMPAKSLELQHTIRLIRELDVEIAEIEEQIQSIMDELHSPITTIPGLGFRMAAMILAEVGDFTRFDSPDKLLAYAGMSPSTYQSGQLKNCYPHMEKRGSRYLRYALYNATKYVCHWNPTFAAYLAKKRAEGKHYNVALSHAAKKLVRLIFAMEKSRQPYCSAA

SEQ ID NO: 301307 - protein, 370 aa, unidentified
MLDTTTFIGLDVHARSIKAVSLDVMTGEVRAATFGYDAGAVAEWVRSMDPRARCVYESGVTGFDLQKRLSGLGVDCAVGAVSKMIKPSADRRRKNDRNDAEFLARMLSVGNVVEVWVPDDECEAARDLTRALEDARDDLSRSKQRLSKFLLRHGLVFDERTPTGRRKGNWTRAHWSWIESIRFAERADNDVLAYYVDAVRRAAEEKARLEGLVEAEARKPRWRKRVDSLRCLKGVDTASAADLVFEAGEFSRFRNARSFAAWVGLTPSEHSSGESDRRGAITKAGNKHLRKTLVEAAWHYLTCSGRPKGLAKGQAPDRGARRHAAKGVRRLVERREALLARGVHGNKANVATARELACWVWAVGLMAEEA

SEQ ID NO: 301308 - protein, 301 aa, unidentified
MDVAIGQEGERWEAANTSKAIQAVVKRLKDYRPALVVVESTGGLEKRLTQAIQEAGLAIAVVHPGRVRKFALAIGWLAKTDRIDARLLAYFGFAARPHAKPKPSPAVENLSGLVRRRGQVIEMMTAERNRRSTCPDSLRDGLEEHIAWLKAEEEMLTEKIKSCLAEEEEFQQKNEILQSVKGVGLIVSATLLAEVPELGSYSNKQVVALVGVAPYNRDSGKHQGKRKIKGGRSKVRCQVYLSTLSAIRYNPVIRDYYQQLIGRGKQKMVAIVACMRKLLTILNAMMRDMQPWRSPSALITP

SEQ ID NO: 301309 - protein, 375 aa, unidentified
MAKSGVLAKSHDLQESFSAATGAITIGIDLGDRFSYCCVLGPDGTILTEGRVVSTPDGMARHFQQLPRTRVAFEVGSHSRWMSELLTKWGHEVILANPRNLRLISDSIRKSDRVDAHTLARLARIDPKLLSPIEHCGPEAYSHMTLLKGRDLLVRTRTRLTNAVRGVMKAVGLRLPAPGGTTFPSKTALIVPDNLKPSLLPLLETISHLNKQIYQFDKAIERVALQQYPETARLRQISGVGPVTSLHYVLTIGNPNRFEHSRDVGAYLGLTPRRRQSGDIDQQLRISKAGNRRLRSLLVQCAQYLLGRFGPDTDLKRWGARMAERGGKNAKKRAIVAVARKLSVLLHRLWVTGDTYRPLYNALGHSTASALPQAS

SEQ ID NO: 301310 - protein, 419 aa, unidentified
MSFKISKFNCCGLDVHKTWIFACIGITDSNNRTEYKQARFSSFSKGLNELCEWLAKYNCNDVCMESTGKYWIPVFNILEQHNLWVTLSHPKYTKPMKGNKTDRKDAKWICDLYMCGMVKPSFIPPADIRELRDLVRYRYKLTCMITGEKNRAQNCLTVSNFKLDDVFSDVFGKSSRSITEQILQHPGETFDVSPFVDSRCKTPVEEIQAAVDGAISKEQAVKLRQCLDHIDELNRHISEVEQEILRLSDKYETALNLIRTVPGFNKNPLTAVQVLSEIGGDMSVFPTAKHLVSWAGCCPRNDQSNQKIKSTRISRAGSYFKPVLVQVANALIKSKKHSEFTSRYKRIKARRGHKKAIIAICRMILTAIWHILSDLKPYTPEGFLESRPVKKEKVLSTSQALNLLKQRGYIIKDEPLAVS

SEQ ID NO: 301311 - protein, 404 aa, unidentified
MQQCTAGLDLASEEHRLVVVDGKGRRLEERRVSHSEDGIDALIRMLADLQVLRVAIEQPNGLVADRLLDSGIAVVAVHPNQLAAARDRYRTGGGKSDGFDGYVLAELARTDMHRLRLLEPDSDETKALRTLTRTREDLVEQKVALANQLRAQLDAFWPGARQIFFDVDSPIGLAFLERYPSPTDARGLGEKRLASFLARNGYSGRRSAAELLVRLRSAPQGRTGEAELEARRAVVLALVAALKPLVEQIRLLTSQIAGAVRAHDDGHIFLSLFRDPKSVVTAAELLAEIGDNRNRHPTSASLEAIAGQAPVAVQSGKKKVACFRWACNKNLRAAVSVLADSSRKHNPWAQKIYADAIARGHDHPHAIRILGRAWLRIIWRLWQDHTTYDPNRHGSLNRLIAAEG

SEQ ID NO: 301312 - protein, 326 aa, unidentified
MKDPKIVHIGVDVSKDSLRLDGDTLFVGEIPNTAPTIRFMLKKLQKKVEEGEILHICLEATGPYGDLLVGECHKADIRVSVLNPAKVRHYAKAISETAKTDPIDARVIRCFAEARQPMTTPAPSEEEVELRKLVLAREALVKCSTELCGTLESVEGSQAGSVLKQALAGIKKKITKLERLIQETIKRNEKLSGLTATLCKITGVGEITVATTLAYVPEIGTLGRRRSASIAGLAPYIRDSGRFKGKTFISGGRPQIRRALFMPATVARVHNPVLKEVYERMRANGKPYKVVMTAIMRRLFCHMDAVAAAWLAEQNSVARATPVTAT

SEQ ID NO: 301313 - protein, 400 aa, unidentified
MFDIGDVGVFLGLDVGKTAHHGHGRTPAGKKVFDKQLPNSEPKLWDVFDKLAAKFGTVLVIVDQPASIGALPLTVARDAGCQVAYLPGLAMRRIADLYPGEAKTDAKDAAVIADAARTMPHTLRSLELTDEITAELTVLVGFDQDLAAEATRTSNRIRGLLTQFHPSLERVLGPRLDHPAVAWLLERYGSPQALRKAGRRKLVEVIRPKAPRMAARLIDDVFDALDEQTVVVPGTGTLDVVIPSLARSLAAVHEQRRALQVQIEVLLEAHPLSKVLTSMPGIGVRTAAVLLVTVGDGTSFPNAAHLAFYAGLAPATKSSGTSIHGEHTPRGGNRQLKRAMFLSAFAALHDPASRTYYDRCRNRGKTHTQALLRLARHRISVLFAMLRDGTFYEHRTPRLA

SEQ ID NO: 301314 - protein, 316 aa, unidentified
MTTTAVFVGIDIAKTDFVVACRPDGTSWIASNDAAGLTATVDRLRALAPTLIVLEATGGDETSLVAALAAASLPVVVANPRQVRYFAKATGQLAKTDRLDAHLLALFAERVHPTPRPLPDAALQELEALMTRRRQLLDLVTAERNRLEHASLAIRRHITDHLRWLERRVAAVDRDLDDTIQRSPVWRAKENLLRTVPGIGPVVSRTLLADLPELGRLNRTQIAALVGVAPLARDSGTLRGKRTVWGGRAPVRAVLDMGALVETRRNPVLRAFYCRLVAAGKPKKVALIACMRKLLTILNAMMRTSTTWQQSAEVPA

SEQ ID NO: 301315 - protein, 408 aa, unidentified
MRYLIGIDAAKAKNDIAIFNSDMGLVRKPFTVSQSQSDIQKLAKSFAAIDGDVRAVVESTGRYHLPIVEQLSKERIFVSVVNPKLIKQFGDNSLRNVKNDPADAKKICRYGILNWDSLREDTNMDELRTQLQLYNSQFEFFTSQKVSVKSNLIALLDMTYPGINQLFNSPVRPDGSEKWVDYAELFWHVDCVRSLSLHAFSEKYRHFCEKQGYHFQQSKCESLYASAQDLIAVFPKNAQYKALVKMAIGNLKEVITHVETLRAAMNEIASQLPEYPVVMEMKGVGPSLGPQLMAEIGDPMRFKHREALTAFAGVDPGVNQSGTLNQGSNSASKTGNPRLRHTLFKIMEVLIKLHPEEDKVYQFMDKKRSEGKPYLVYMTAGANKFLRIYYGKTREYLHALEADKETNE

SEQ ID NO: 301316 - protein, 406 aa, unidentified
MIKNVESTSAYCGIDISKDTFDYCIVDQNKQILYQGHLPININSLEQLKKIALENVKQNTIFLMESTAKYHRRVSLFLETAGFEVYVVQPLLIKKYNESKDLRKTKTDKKDAKMIAEYTVDNHNTLYLYKPEYDELKDLLRFYHSLVKDLTAYKNRYKEIMESVFPELLKVNDIYSKTLLRVLHEICVPGDIVKKRLSTLDNLLKNPKGKNISLTGKKLKEIAKSSIGISHGSTSLIVRHLIDSINEIILHIETIKKEVEKLTDERFKENKQIVSSINGIGNIMAMSFLVETKDINLFSSWKKISAYAGIDPCISQSGSSINRKGGISKRGNKYLRSTLFLMAQSVIKWCPRYKQYYKKKRDEGKSYKESIIAVANKLVKLLYSLLNKGMFYSEDYEKSNSLLQVI

SEQ ID NO: 301317 - protein, 375 aa, unidentified
MRRRCRRAQKKIAGGTRWAPIEIGLTVGVDLGDRWSQYCILGLEGETLAEGQLRTTQEDIREFFQALTVARVVIEVGTHSAWVQDMMTEWGHEVLVANPRLMEGSKRRKRKSDRIDANKLARLGRVDPQSLYPIRHRSRQVRQDLVVLRARDALVSVRTELINTARGLVKSMGTRLPRCSSPSFAEKVKDAIPVEVREALLPLVQLTETVNDCIARYDQKIEELGQKKYGHTTLLRQVKGVGPITSLAYVLTLEDPQRFSSSREVGPYLGLVPKQEDSGDSQPQLGISKAGDRMLRRLLVGSSQYMLGAFGPDTDLRRYGLRLCERGGKNAKKRAVVAVARKLAVLLHHLWVTGDVYEPLHHPGAETNTVQATAA

SEQ ID NO: 301318 - protein, 310 aa, unidentified
MIYQVGCDISKETIDIYNIRTDSYFRILNNQKGYRQFLDKLPDKDKMHICMEATGNYYEDFADYLNIEGYRVSVVNPLKIQRYAKSKFSRTKTDKQDAKLIAQYCREHQPKADYKMPTERQYQIKRLISHIKQLNQQKVSLKNRIKSSKDIFVTEQLKRQLHDTGRYLEQCNGRLTELSGNEETDRIDSIPAIGRTTAAILAHYLTFHQFDNVNQFTAFAGLCPERYESGESVRKKDRLSSLGNRTIKTALYMPAVVAYRLGLFRALSDRLERKGKSKKLVIAAIMRKLACLAFTLWQKKEYYRCSMQTV

SEQ ID NO: 301319 - protein, 398 aa, unidentified
MHKRQITVCRLQPGAEGGLQQEIRTFGTTTSQLLVLADWLAEGGCTHVALESTGVYWKPVYNLLEGLFTLLLVNPEHVKALLGRKSDVQDAERLAHLLATDQLRGSYVPDRPQRELRELTRYRTALIRERAAEANRLQKTLEGANIKLAAVAADVQGQSCRAMLAALAAGETDPEVLAAHAKGRLREKLPALKEALRGCVGEHQRFLLGQQLAHLAELDERVREISAEVAQRLAPFEAELRQLEAQAGVGRRTAETLVAEVGTDMRRFPTHRHCAAWGGMCPGQRETGGKRKRCPTRKGSPWLRAALVEAARAAARVKDSYYAAQYQRLARRRGANRAAMAVGHSILVSSYYILKGAPFVDLGGHYFDERDREQIKRRSVKRLQQLGFEVELREPATA

SEQ ID NO: 301320 - protein, 391 aa, unidentified
MTILVGIDVAKDKHDCFIMNSEGEVLAKPFTIFNNKEGFDFLYEKIQSVSSSDNIKVGLEATGHYSYNIIGFLLNKGLATFILNPLHTNLYRKSLSLRKTKTDKIDSKTIAMMLLSEVSLKSYSDISYHNEDLKSLTRYRFSKVEERAKLKTSFSRLAQILFPELEKLVPTLHMTSIYQLLEEFPSASAIASVHLTRLTNLLSKASKGHYDRETAIKIRDAAKNSIGSNMPAKSLELKHTIKLICALTIDIDEIEAEISKMMDKIASPITTIPGIGRNMGAMIISEIGDFSRFSSPDKILAYAGFSPSIYQSGKLDNCYAHMEKHGSRYLRYALFHAAKLVCHWDKTFADYLAKKRAEGKHYYVAISHAVKKLVRVIFHIEKTKQAFLKAS

SEQ ID NO: 301321 - protein, 341 aa, unidentified
MRTFIRIGIDLAKNFFQVHAIEREGEPAVTRKLSRGKVLAFFAQAAPCRVGMEACGSSHYWAREIRALGHDVVLIPPAYTKPYVKRGKNDANDAAAICEAMSRPDMRFVPIKSADQQAVLMLHKTRELLVKQRTMAVNALRGHLSEFGLIAPKGIHRVKELLALAQADETLPEEAKQATAMLASHSDGLDEKIDDLEKTIARASGKNQTSRLLDEIPAFGPLIASAMVAFNPDPSVFRSGSDFSASLGITPSQHSSGGKDKLGGITKRGNRYLRKMLVVGCTSVLRVAHKYKGALAEWIVAMRARKPERVVAVALANKLARIAWAMMSTGEAFRTELYTKA

SEQ ID NO: 301322 - protein, 343 aa, unidentified
MQAVMTIGLDIAKSVFQVHGVDAEGNVIIRRQLKRRYVLAFFQKLPPCLVGIEACASAHHWSRQLQALGHTVRLMPPAYVTPYVKRHKNDAIDAEAICEAVTRPNMRFVATKTREQQSCLTLHRTRHLLIRQQTSVINAIRAHLAEFGIVAPVGRNGVDQLLGIVADASDKRLPELARACVAALGTQLGTLKAQILQFDRLIMAWHRSSEASRRLDEIPGVGPALATALVATVADPRAFRSGRNFSAWIGLVPKQHSSGGKDRLGSISKRGDRYLRFLFVAGALAVIRYAKIHGTKHRPWLTALLARRHTKVAAIALANKIARMTWAIMAKGEHYKEPVALAA

SEQ ID NO: 301323 - protein, 371 aa, unidentified
MGESSKMLFVGLDVHKDTIAVAYAPEDRGADVESLGAIGTRQCDIDKLIRRLESKGATLVFVYEAGPCGYWLYRYLTRRGVSCAVVAPSLIPRKAGDRVKTDRRDAVTLARLLRSGDLTSIYVPTVADEAIRDLSRGREDAVGDLKRSKVRLKAFLLRQDIRYEGRANWNAAHLRWLARVVCPTPAQQIVFQEYVHTVTEQSERLRRLESELHTAVKTWRLYPVVEAVQALRGLDLTGAGTLIAEVGDLTRFDTPRKLMSYLGLTPSEYSSGAHRRQGGITKAGNGHARRALVEGAWAYRYPAKVSRHLQLRLEHVPPQARAIAWKAQVRLCKRYRLLSARGKHVNQVVVAIAREMAAFAWAIARTVPVAS

SEQ ID NO: 301324 - protein, 449 aa, unidentified
MKKFSSGRHGLPVIHDRAADIDIGSRFHVVAVPADLAEESVRTFTAFTADVERMANWLTDLGITTVAMESTGVYWIPVYEILESHGLLVVLANARDARAVPGRKTDVNDAQWIQRLHACGLLRASFHPEREIAALRSYLRLRERHLDYAAAHIQHMQKALTHMNLQLHHVVSDITGATGMRIIRAIVAGERSAATQATMRDTRCKSSTETIQSALVGNYQPEHVFALAQALAMYDAYQAQLEICDQQIAQSLQRLSQQKPTPSEPLPKPRHRTRQPNALNFDVRTLLYQLIGVDLTQIHGIGPYLALRLVAECGTDLSRWRTAHHFTSWLTLAPGCRISGGKVLSAHTRKTKNRVTAHLRLAAVTIGKTNTALGAFYRRLSARIGKAKAVTATARKIAILFYNAMRFGMAYQDPGADHYEQKYRERVVKGLHRRAAEFGFTLQAVEGVS

SEQ ID NO: 301325 - protein, 371 aa, unidentified
MKKSIIFVGLDVHKNSIEVAFADFGRDSEVRSYGKIDGSLDALDKVIRKLVSKNCNLSFVYEAGPCGYDIYRHLIAKGFDCIVAAPSKIPRQAGNRIKNDRRDALMLARLHRAGELTAVSVPLAEDEAMRDLTRAREDAKALELRAKQRLLAFLLRHGHRFTGRSNWSKAHFRWMSNLAMPHPAQQIVYQELIDSLRECSQRVERLTRQIQELLPNWHRYPVVQSIQALRGVSTIVATTTIAEIGNLGRFEHPKELMSYLGLVPSEHSSGQTTRRGGITKTGNGHVRRVLIEAAWAYRLPARVSETLHFRQKDLPQNICAIGWKAQLRLCARYKRLMAKGKSQKLIIAAIARELCAFIWAITREVEIQTEG

SEQ ID NO: 301326 - protein, 360 aa, unidentified
MMPAAHRAVIGGVDTHKDSHHVAALTTNGVLLAATSFPATAKGHRALLVWLKSHGPIEAVGVEGTGSYGASLARCLTNAGERVVEVNQTNRQLRRARGKSDPLDAEAAARAVLAGTATATPKAKSGPVEAIRVLRVARSTAVKGRTQAMNALHGLIVAAPDSLHDELVELSGRKLVRRCAGLQPQTTDLVSLSDQPDRLVLAATETAIQALAVRWLQLDEQIKQLRSQLEALTCLAAPELISLPGVATEIAGQFLVTAGDNPDRLTSEAAFARLCGVAPQPASSGRTSGRHRLNRGGDRGANTALYMVAITRLRDHQPTRAYVTRRQAEGLTKREIIRCLKRYVAREVFRALPRPALDGT

SEQ ID NO: 301327 - protein, 377 aa, unidentified
MKENNSKKQSKKESKCYKQMAPKDGAKEKFPFYIGIDLGDKNSEICVFDEDGEVSKRLRLRMKEADFQSYFASIPRSAVAIEAGAQSRWVADTIERCGHKVYVSNTRKVPYISQSDDKDDPGDAYKLGELAYLKPRLLHPIQHRSQATQADLSWIRAREALVESRTQLINTIRGISKAFGERLQKCSVESFTAKRAEQIPEAIRGPVAPLLEMVDQLNERIRNYDEMEEHIARTRYPKYWLLDQVDGVGVHTALSYMLTIGDPGRFERSRLVGCFLGMRPKRQESGEQQPQLGITKGGDVYLRKTLVNCAQYILGPHGADSDLRRFGLRICERGGKNAKKRAVVAVARKLAVLLHRLWVSGEVYEPLRNDPEATAAA

SEQ ID NO: 301328 - protein, 301 aa, unidentified
MKKIVKYVGLDVHKDSITIAIADQGRNGEVRIYGKIPNNLNQIDKFVRKLTSKNAQLHCVYEAGPCGYILYRHLTNKGIDCAVVAPALIPKKSGDRVKNDRRDATKLATLHRAGELTAVYVPDQEDEAIRDLVRARADFRTALRKVKQQINAFLLRHGICYPGKTKWSKAHRTWLTTIKMAHPAQQIALTEYLDAMENNEDRVTRITNQLESFCHTWRLRAVVQALQSMRGISFVSAVTIIAELGDLNRFDKPTQLMSYLGLVPSEYSTGNSIKRRHHQDWKHSCAKGVDRIGSGVSASGP

SEQ ID NO: 301329 - protein, 476 aa, unidentified
MARRKLSTFERLQRGERLQRRERRELQRKLEAGDAELKIVHPDAAGIDVGSASHFVSVPAGRDPEPVREFGSWTADLHKLAEWLKACGIRTVAMQSTGVYWIALQEALEKAGLEVFLVNAQGTKNLPGRKSDVQECQWLMKLHTYGLLRNSFRPPDEIRGVRTIWRLRNRFVEEAGSKIQQIQKALTTMNVQLTNVISDISGVTGMAIVRAIVEGERDPRVLAKLRDGRIQASEEEIAHSLEGNWREEVLFELKHVVEGYDFQQKQIGECDAEIEKRMGMLSSHPTREQKEGEAGARKKSAQKPRKNQPGFDLKGELHRIFGVDLTRIDGIHVMTAQVILTELGPDLSAFPSEGDFTSWLELAPRNDITGGRTIRKKARKSKNRVANAFRMAAESLCRSDSYLGARYRKLRGRMEGQPAVKAMARFLACLVYRLLTKGQEYVDKGAAYFEQKRKQRDLVSLQRKAAELGLKLVTAR

SEQ ID NO: 301330 - protein, 334 aa, unidentified
MGLDLAKHVFQVHGVDAEGATVLRKQLRRAQVLAFFSRLPPCLVGLEACATAHYWARELRALGHEVRLMPAQYVKAYIKRNKHDAADAEAICEAVGRPTMRFVPVKTADQQAAVLLHRGRERLVRQRTGLVNALRGHLAEFGVIAPQGLRNVGDLIAIVRADGDTRLPDVARQVLQVLANQIEQIEAAISALERQLLAWHKSNPVSQRLASIPGIGPIIATAIATTVADPNVFRSGREFAAWLGLVPRQNSTGGKIRLGGITKRGNRYLRRLLINGASANLLRSKATKADPWVIGLRRRRPPLVVAVALANKTARIAWAVMLRQKEYQPRAVAA

SEQ ID NO: 301331 - protein, 412 aa, unidentified
MTAIDQFAAHVGLDWADRKHDVCVQFKNGERTFHVIKHTPEALDTWLNELHQKVRGRIAIALELKKGPVVYALQKYPFVTVFPVHALSLARYRQTFWPSGAKDDPQDAELALDLMLRYPQKIKAIEPDNADIRLLLQLVEQRRLLVEDKRRFVNRLINTLKQYYPQPLEWFSHRGSLLLCELIIRWPSLQKLKRARRDTVRHFLNAKGGRATALTEQRVASINNAIPLTADPSVIEANALMATALATQIKVVSEIIKTYDERIETLFDPLPDAELFKSLPGMGPCMGPRMLAALGDNRDRFNSAEEIQNYVGIAPVTERSGQKSWVHWRWQCAKFVRQTFIEWAAKTVNSSYWAKLYYQGMREKGKSHQSAIRALAFKWIRIIYRCWKTRTRYDEAKYLLALEARKSPLLMP

SEQ ID NO: 301332 - protein, 398 aa, unidentified
MTESSDYESVQVFIDDDVGKDTHHAVAVNRSGKRLFDKTLPNDENKLRSLISDLKQHGQILLVVDQPATIGALPVAVARSEGVLVGYLPGLAMRRIADLHSGEAKTDARDTAIIAEAARTLLHALRTLKLADEQIAELSMLCGFDDDLAAQTTQASNRLRGLLTQIHPALERVLGPRLDHPAVLELLQRYPSPEKLASLGEKKLAALLCKLAPRLGKRLATDITRALTEQTVIVPGTNAAVVVLPRLALQLITLRKQRDEVALEVEQRVLAHPLYPVLTNMPGVGARTAARLLTEVACRDFASAAHLAAYAGFAPVTRRSGSSIRGEHPSRRGNKPLKRALFLSAFAALREPISRAYYTRKMSQGKQHNQALIALARRRCDVLFAMMRDGTFYTPTAS

SEQ ID NO: 301333 - protein, 311 aa, unidentified
MNPTDVFVGIDVSKDTLQVAVRPTGEEMTFNNQEDGVALMGDFVKSCSPRLIVLEATGGWEMAAATRLAVQGLPVVIANPRQVRDFAKSTGLLAKTDAIDARIIARFAEAVKPEVRPLKDEEGQKLDAFLARRRQLLQMLTAEKNRLVTAPRWVKKNIQAHIRWLEKEVEKSNRDLEEFIKKSPLWREKLEILQSAKGVGPVLSITLLSDLPELGTLNRKQIAALVGVAPLNRDSGRFRGRRAIWGGRAHVRTALYMGTRVAIRFNPVLRVFAQRLRDAGKPYKVIVTACMRKFLTILNTMMKNHTRWQTA

SEQ ID NO: 301334 - protein, 359 aa, unidentified
MIVIGVDPHKQTHTAAAVDRQTGELLGELTVRGNEEGHARLLEWARELGGERGFALEDCRQVSCRLERFLIGRGEPVVRVPPKLMAGARRSARSRGKSDAIDALAVARAAIREPDLPEAHLEGASRELRLLVDHREDLVCERTRIQNRLRWHLHEIGPELEPSRRSLGTLKVLDGLGRRLARRPQSVQVRIARELVAHCRELSRQADRLEREIETLVRREAPQLLALPGCGALTAAKLVGEVAGIERFRTDAQLAMHAGVAPLDVSSGRQQRHRLNRAGNRQLNRALHTIAIVQKRTYAPAKAYIARRQADGKSNKEALRALKRQLARRVFNILHLIAARANNPQRIQTSTPPQVPCLT

SEQ ID NO: 301335 - protein, 409 aa, unidentified
MRVIGLDIHRAFAEAVAWDDGKLNRLGRVDMRRHLLEAFAKKLSKEDVIVIEATGNAASVAAVIAPHVKKVVIANPKQVRVIAHAKIKTDTIDASVLAQLYVSGFLPEVWVPGEPTQALRRQVTRRNQIVRQRSRLKNIIQSILHSHLIPSCPHADLCGASGRAWLFHQVLPEDERLAVERHLREFDRLAEDLKVIERDLARSALKDEGVKRLMTIPGVDMVVALAIVAAIGEVGRFDRPEKLVSYLGLNPSVRQSGPGPAYHGRITKQGRGHARGMLVEAAWAAARAPGPLRAFFLRVRSRRGQHVAAVATARKLAVIIWHLLRKGESYAWARPALHARKLRDLELKAGHKPERGQKGPAHAYNIKSQRDQERRWVEQAETAYARFVAGWNPRGPKRARTDAANEVRQ

SEQ ID NO: 301336 - protein, 342 aa, unidentified
MEHYAGIDVSLECSSVCVVEVNGRILREAKVASEPEALIAWFRSSGFDLERIGLEAGPLSQWLYAAMREVGLAVELLETRHVRDAFKAMPVKSDRNDARGIAQLMRLGWFKPVHCKSIGAQETRAVLTARKLVQSKLLDVENHLRGILRGFGLKVGKTTKLSFARRIRELAANHASLETIAEALLSIHAVLLREFKAFEKQVRSMARHDAKTRLLMSTPAVGPIVALTYAAAIDDPARFKSSKQAGSHFGLTPKKHQSGETDRSGRISKIGDASVREALYQAAHVMLTKPTKGCSELKGWAMRIARRAGMNKAKVALARKLAVILHRMLANGTPFNPAAAAA

SEQ ID NO: 301337 - protein, 341 aa, unidentified
MTTTLYAAMDLHANNSVMVILDEQDRIVYERRLPNELPFILAQLAPHKENVKAVAVESTFNWYWLVDGLMEAGYTVKLVNTAAVKTYDGLKYTGDEHDARHLAHLMRLGLLPTGYIYPKEDRAVRDLLRKRAQLVRTRTAQILSIQNLVSRNTGEGISMDEIRDLDEKAISRVCGGDTCRALAIQSNLAVLRVLDEQIKGLERVALAKAKLKPSFEKLLSVDGIGNILGMTIMYEVGTMERFAKVGQFASYARCVGSSRWSNGKKKGEGNRKNGNKYLSWAFVEAAHFAVRYNERIRRFYQRKKAKTNGIIAVKATAHKLARACYHVLKDQVPFEEAKAFA

SEQ ID NO: 301338 - protein, 340 aa, unidentified
MKQFSRIGIDLGKNVFHSHALESEAGPAVARKLSRTGMRKYFASIAPCLIGMEACGSAHYWARELRAMGHDVRLMPPSYVKAYVKRGKNDAVDAAAACEAVSRPDMRFVAIKSEAQQATLMVHKTRDLLVKQRTMLVNSLRGSLAEFGVVVAKGVHRVAELAQKAAEARLPEQAMMATQILLEQLARLDAAIAGLSRHIIQAKNHHATAQLLTEIPGIGALFASRVTASVPDAAVFKSGRDFAAWLGLTPRQDSTGGKIKLGQITKKGDRALRRLLVIGAVSLLRMRHKRKGALADWLSALRARKRGKVAAVALANKLARIVWAMMMTGEAFRTAIFARA

SEQ ID NO: 301339 - protein, 440 aa, unidentified
MSQSILAVGVDPAKRLHRAVAVLFPDQVVLDAELPNALDAIANLDDRAFELARQHGAKLVYGLEDHRHYGRLFCQVLTQRGRDVRVVNPLWTNRQRAFYGQDKDDSIDGRSIAAVVLRRHHELPLAGDFGEVAQAIREAERSIQDLSRARTRLINRLHLQLNDTYTSVYEAYFGKLSSPLTLRFFRRFPLPQDLLGQDETMLAPLLLDLAGGKVGPHKGDERLIVMRSKAKSILESSAAQRASPRTLALELKAELIRQLCDEGLAIHDRVRRLERLLREQLLPATDQTITTIPGISTILAATIIGEIASIERFRSPAAFAVYNGTAPARHSTGGRERHKARHDCNRRLKRAFFLAARAAALHDPLAKAYHERCKSRGLSYDEGLKRVARRMSDLVYALLKSDKSYDGSIIERAIERRREQMAHVATSHAKEPCSLPTQAV

SEQ ID NO: 301340 - protein, 355 aa, unidentified
MSENNKAKTVSKFEVIYIGIDAHLEKYVVVRQLDGLTPQPAQCFRKEETLLNWIAKQQKQATRVVCCYEAGPLGFTLYRQLTAMKVTCHVVAPKRWAENEDRVKTDKRDAKILCQRVESYDRGNHSVLSCIRIPSPEEEHLRALGRQREALKKEVMRNAQRGRGQALLQGIRLKGKWWHQKRWEQLKEENLQTFALLEPLRKIILVIEEQLLEMTRMLEQDSVAQKDRPKGLGALTWRMIKGEVCDFTRFNNRREVASYTGLCPSETSSNKSRRQGSITKHGNRLLRHYLVEAAWRLIKWQPDWYAWQKWKSDFAKASPGKRKQIAVALARTLAIDLWRLYTGQTTMKNLGLQPA

SEQ ID NO: 301341 - protein, 404 aa, unidentified
MEFTAIYQCVAALDVHQAKLTVCILHVDEAGQVITELKEFGGFKKDRRAMAKWVASFCPDVVVMESTGVYWKSPYVALEKHGLNIEVVNARYVKQVPGRKTDIADAQWLAILARNGLLRGGFVPPVEFRELRLISRQMQKLSGILSSEKNRLHKLLTDAGIRLSVVLSDLNGKSARAMIKGLLAGETPQQVLQYASKRLKATQEELLDALEGEISPSHHFVITEVMAHIEELEIRIKTFQQALLQGLSPFKTVMECLQTIPGVDEMGAAMLLVEIGDDMSAFGTASNLASWAGVCPGNNESAGKKKSGKTRKGNPYVRQILCEAANAASRTQCSLQDKFKGLLIRRGRKRAIFAIAHKLLKIVFLLIDRGEYYRDAKIDYEALSVQRNAPRWIKKLRQYGYITA

SEQ ID NO: 301342 - protein, 342 aa, unidentified
MQQSIYVGLDLGSSRCHQTVINSDGSLQLSRSIPTSEQHLRFAFTALGDHVRVHLESGELSTWVYSIIKPMVAEVVVSHSRTLAWIGKDSQKDDSIDARKLAELLRLNRVHPVYCETADERRLFKQLVTHHEDLSREQARLKAKIKARLRTLGIIRFDARLFTKSGNALLLDELKEPSVKLMLAQSFAVLNRLLEAETQAKQAMTAASKQFPEVRLLQTAPGVGIITACRFVAYIQTPRRFSNKRKLWRFCRLGITRRESNGKRLAHPRLDSAGVGSLKDVSRKVFEAARRTKKDNSFKRFYERSLTNTKNAVHARLSVQRKILATLRAMWLTMQPYRDTGT

SEQ ID NO: 301343 - protein, 402 aa, unidentified
MYNAVGIDVSKGKSTVAVLQPAGVIIRKPFNVNHTSSELDELAKYIGSLEGETRVVLECTGRYHEPVVKTLSEAGLFVSAVNPHLIKNFGNNSIRKVKSDPADAKKIARYTLDNWIELRQYSSMDNTRTQLKTLNSQFSFFMKQKVAAKANLIALLDNTYPGVNKLFDSPVRDDGSEKWVDYAYSFWHVDCVRKIGLKTFTERYQAFCKKHHYNFQPAKPAELFLASKDLIAVFPKEASYKLLIQQSIQQLNLASSHVEELRSKMNELASTLPEYTTVMGMYGVGKTFGPQLIAEIGDISNFSHREALTAFAGVDPGVDQSGTHNSKSNKASKCGSNRLRKTLFQIMSTLLQTAPEDDKVYQFLVKKRAEGKPSYVYMTAGANKFLRIYYGKVKECIRNLEQ

SEQ ID NO: 301344 - protein, 400 aa, unidentified
MRFVGWDWASTSHDVTVLDEQGRVVERWALRHTEQALGETLARLARHGQPAELPVIIERSTGLVVDRLVAAGHPVVPVHPTAFHAARPRWGAAGAKSDPGDSYKLADYLRTDGHRLRRLQPLDPGLRELQALVRLREDHVRARTAASNQLGALLDASWPGPKAMFCKLASDIALAFLTDYPTPQAAARLGQARLAGFCRRHAYRGGKPPAELLARLRAAPIPPAGLAPAVLAQLIGAQVQLLRSLQATIGELETAITQRVAQHPRAKLLRGLPGVGTINLAQLLAEVGPILDRVSTAEQAAAECGAVPVTRASGKSSGVYFRWAANPRARTARTAFAHNARMQSPWAGRLYADARARGKRNPHATRIVARAWLRVIWACWHTNTPYDPCAHRAEQRLTAA

SEQ ID NO: 301345 - protein, 453 aa, unidentified
MSQSRPRSKELKVSALQKQLQHVNLNAAGIDIGSDRHLVAVPEGRDDVAVREFGAFTADLQALANWLSKCGVTAVAMESTGVYWIPVFELLERLGFEVKLVDARRVKNVSGRKSDVLDCQWLQQLHTYGLLTGAFRPSDEVCVLRGFMRQREMLVQASSMHIQHMQKALQQMNLLLHNVVTDITGMTGMKIIKAIIAGERNPHVLAKHRDNRCRSSAATIAKSLVGNYRAEHLFALKQAVELYETYQAKVRECELAIADYLSTQVNRTEAEPPASERTIRARDCMRGEVDMRVQLFKLTGVDLFSISGFGADTLLTLAGEVGFDMSAWKTEKHFTSWLSLCPGTNKSGGRVLTGKTKRSANRAAAAFRIAASCVAKSKSALGAFYRRIKARAGAPKAITATARKLAVLYYTMLKNGSSYVEVGQAAYEQRYRQRRFSAMQKQALAMGYQLVPA

SEQ ID NO: 301346 - protein, 321 aa, unidentified
MVCVGIDVAKDKHDCCILDSDGTIRADCITIPNNMDGFKQLLQTIRDCTKKSDKIKVGLEATGHYSYNILGFLLDNDLAVYVMNPLHTNLYRKSLSLRKTKTDRVDARTIATMLLSDVDLKSYTDIAYHNEELKSLTRYRFDKVQECAKLKQSVSRLATILFPELEGLVSSIHGTSIYALLSEYPGAKQISEVHLTKLTNLLTTASKGRYGKEKAIQIREAARASIGSVIPAKSLELKHTIKLIQELASEIDEIEDSIQKIIDELNPPILSIPGMGVNSAAVILAEIGDFSNFSSPDKILAYAGCSPSTYQSGKQIGRAHV

SEQ ID NO: 301347 - protein, 316 aa, unidentified
MNTQDHNEINIGIDTGQAMLDIYIRPIGEYQSFENNAEGIRAAIRFVRKFKPTRVLIEATGRLEMAFFCAANKADLPVCVCNPIQVRQFAQSCGRLAKTDKLDAQDIAYYGDIMKPELSRLKPEKLRLLSDLLTVRGQCLDMSTMQKNRLQRMPKTVHKPIRNVLKSIAKEIAGIDQQLDQLVAEIPHYQARVDQLTSVKGVGKVLAYTLLSDLPELGNLNRKEIAALVGVAPMNRDSGKHKGKRKIRAGRRKVRTVLFVSMLSAIQCHPTLKPMYQRLVAAGKPKKVAIIACMRKQLTILNTMVKNGIYWDENMA

SEQ ID NO: 301348 - protein, 421 aa, unidentified
MDILYERVAGFDVHKDTVVACVRIVGGGKTTRECRTFATTTEQLLELRSWLEECRCTHVAMEATGVYWMPVFRILDAGKFELIVANAAHIKNVPGRKTDMNDAMWIADLLACGLIQASFVANEEVQELRALTRTRKQLVREQTRHVQRIEKTLAEANIKLSSVISDIMGASGRRMIQAMIDGVRQPNKLAELAGKQIKATPKELYDALHGRLTDHHRFLLALHLKQSDSIDETIRKLDVEIDQRIGQMEAEGNRTPFRTLIGLLTTIPGVSAVAAPAILSEIGPDMSRFPTAGHLVAWAGLCPGQNESAGKRKSSRLRKGAPWLKTMLVQCAWAAKRAKDSYYRAQFFRLQAKRGPQKAICAVAASILTAIYHILKHGTEHHDLGSAYFDRRPVEAKASHLVARLKKLGFTVKLQPIAEVA

SEQ ID NO: 301349 - protein, 347 aa, unidentified
MRFYTQQHRHYCGIDLHARNMYICILDQTGKTLVHKKIDCDRDELLRTLRPYRKDLVVAVECLFCWYWIADLCTEEGIAFVLGHALGMKAIHGGKVKNDRRDSYTIAALLRGGNLHYSYVYPRDKRATRDLMRRRTFFVRKRAELLTHIQNTNTQYNLPAFEERIDKTEDRGAIIEHFDDSSVQMSMAADVALMGAYDEVIRDLELFMLHEVRKDHGHEFSLLRSIPGIGEILALTLLYEINDLKRFARVQDFLSYARLVKGRHESDSKVKKSAGSKMGNVHLKWAFSEAAALFLRWNAPGRKYFTRIEKKHGKGKALSILAAKLGRAVYYMLLRKKPFELKRFVTV

SEQ ID NO: 301350 - protein, 429 aa, unidentified
MRTESTPGARGPVFCGVDTHADSHWLCVLDWRGRKVLSRQFPADAAGYEALAGAIAAAGEPACVAMEGTSSYGAGLTRHLASLGMPVREALSPARMQRRRPGQGKCDEADAERAARAAMSGSKLGTPKSQDGWVDGVRCMLAARSGAVKARTSAINTARSLLTTAPEGLRSRFRGMGGPRLMEELPSVRAEGALGAALGALADLWEAARDAALDMERAIEASLEENCPALLAMYGCGPVSAAKLAVAAGDNPGRLRSEASFAAICGACPIPASSGKTVRHRLNRGGDRQANSALHEIARQRVMRDPETAEYAERARGRGKSDREVMRCLKRYVAREAYRALMHPHEIRRPGDASELVAARRTAKVSQARAASILGTSEKYISMLERGQRELKPIRRAYEAWVEAGLPLDWDRRAFEAERKMDSKKHLAK

SEQ ID NO: 301351 - protein, 320 aa, unidentified
MLPPSTAWVIIGADIGSVEIVLACNDASRPTATIANEKKAIDRWLKTLPQGSSIGMEATGRYHRRLADQAAALGLTVYVLNPKDVAYYARALGQRGKTDRLDAQTIARYVAREGKDLHPYCPPTAAQRDIATLLQQRATWVKHAVALEQSLSDVACLQREAQRAITAIRDLIAAIECKLKAQIAANQALEARRKRLQSIAGVGPLISIALAQRFDRIAYPNSDAAVAAYGLDPRPKESGQFVGKRKLSKRGNPEERRLVYMAAMSAARTQAWKPYFAKLLAKGLSKTAAYCALARKIIRVAFAIWNSNATFNPELLGIKG

SEQ ID NO: 301352 - protein, 345 aa, unidentified
MDVHKESISIAVRNDAGKIVMECVIETKANIILDFIHGLRGELQVTFEEGTWATWLYDLLKPHVTKLVVCDPRKNSRQGNKNDRIDARELSDRLYMNKLSSVYHGQAGVRTLRELARSYLTISKDLARVMNRVKAIYRSWGIPCAGKQVYAPRHRAEWLAKITEVGVLRRAEFYYQQLDALRSLRHEVRRELLAESKKHKATKLLCQIPSIGPIRAALLMALIQTPHRFRTKRPLWKYSGFAIEMHSSADYRSVKGQLQKSKKQVSVGGLNRDCNHDLKNLFKSAATIASVKPGPFQEFYAALVAKGMRPEMARLTLARKIATIVLIVWKRGVSFDAQYLKSQTA

SEQ ID NO: 301353 - protein, 322 aa, unidentified
MSERPDRFVGIDVAKAELVVVERPGATPWTVSNDDAGVRTLTQRLRTAAPTLIVLEATGGYELPAVGALGAAGLPVVLVNPRQVRDFARATGQLAKTDRLDAHVLALFAERVRPAVRPLPSAAQLDLDAVLARRRQLVEMLVAEQNRLHQVRGRETKVVKKSLKKHIAYLELELRITDTELGERIKASPLWRVQDDLLQSAPGVGPVVALTLLAEVPELGQLTRKEIAKLVGVAPLNRDSGTLRGQRVIGGGRSTVRAALYMAALVATRCNTVIRAFYQRLLAAGKPKKLALTACMRKLLTILNAMVKTNKRWQAPNALTTA

SEQ ID NO: 301354 - protein, 445 aa, unidentified
MSPETQVFGGEFVPQAGFTLSPEGLALIAERGGLKIYQPIPPDKRGWARFIGLDVHKHYLVAVGADAQLNQVLGPQRVQLSRLTQWANKTLLPYDAVALEMTTNAFQLHDDLLPYAYSVTLVHPPHIKLITQAQVMTDQIAASRLAYLHAVGLLPPVWVPPAEVRDHRALVAQRTKMTRLSTQAKNRLHAVLHRHQLPPTESELFASDTRDWWLGLPVSSLERVRIQCNLDTLAFARSQLDLLEDALVVLATQDERVILLIQLPGIGLITAVTLLAAIGDISRFPTEKHLVGYSGLGTRVHDSGLKCRTGRITKAGRRDIRAAMVEAAHTACRIHPHWQAELARLEPRLGKNKTIVAVARKLLVAVWHVLTEECADRFANPELVARKFLAHTERLGKANRPAGQTRAEYIREQLDRLGIGADLTAIQRGKRTIALPPSHLIPEAD

SEQ ID NO: 301355 - protein, 608 aa, unidentified
MSTTVSLDRIGVGIDTARYGHRVSFLRPDRKPAAKPLTVMENRAGYQALRDRLNQLHEQHPTAHFHVRIDAAGQYAVNLELFLRDLKLPMTISVGEPKRNKDYQKAHFPKRTTDDTESQAMARFAVVELPNATPAPSPPMILLREVAGRLQSKVKQTTQAINRLHNLLARVFPELATLTEDISAGWVLKLLDKYPTAERIAQAQIASLEKIPYLSVEQAHAVHQAAKQSVASLRGDLAEALVRDLVAQLRFCQKAEQHLHQLLLKAFSDLPASPHVQVLTITGIGEATAAALVAKIADINRFATPNHLVSYFGVFPEESSSGVDKRGRPLPPGTLIMSPKGNDLVRYYLWNAVRSAIQHNPAIRALYRRLRAKGKRGDVAFGHCMRKLLHLVYAVWKTDRPFDKEHFAWSGSSNTEPSTTTPPSADAGPIPSANEKAVGHKRDLPAEEVVTTADSTLEPASPAVKPTSQSAAAHRPKVDFACMREHVTIEQVLQHLGYFASLRGRGQQRRGPCPVHSQPTAPERTFSVHLGKNAFQCFHAECAVKGNVLDLWAAIRRLPLYEAALDLAETFQVPRNREEEPVKGTRSPQTATANMSALAAATGTDGAR

SEQ ID NO: 301356 - protein, 419 aa, unidentified
MSFKILKFKCCGLDVHKTWIYACIGITDSNNRTEYKQARFSSFTKGLNELCDWLAKYNCTDVCMESTGKYWIPVFNILEQHNLWVTLSHPKYTKPMKGNKTDRKDAKWICDLYMCGMVKPSFIPPADIRELRDLVRYRYKLTCMITGEKNRAQNCLTVSNLKLDDVFSDVFGKSSRSITEQILQHPGEKFDVAPFVHGRCKTPIEEIQAAVDGAISKEQAVKLRQCLDHIDELNKHISELEQEILRLSDKYEAALNLIRTVPGFDKNPMTAVQILSEIGGDMSVFPTAKHLVSWAGCCPRNDQSNQKIKSTRISRAGSYFKPVLVQVANALIKSKKHLEFTNRYKRIKARRGHKKAIIAICRMILTAIWHILTDLKPYTPEGFLDSRPVNKEKVLTTSQALNLLKQRGYFIKDDPLSVS

SEQ ID NO: 301357 - protein, 355 aa, unidentified
MTNTKYIGMDVHKESISMAVRNVDGKVVMECVIETKASMILQLIEGLRGDVYVTFEEGTWAAWLYDLLRPHVTKVVVCDPRRNALLQEGNQNDRVDARKLAELLHHNQLRAVYHGDHGLRTLKELVRSYLTITQDLTRVMTRVKAIYRSWGIPCSGKQVYAPGHRSEWLGKINEPGVRRRAEFYYQQLDALRLLRQEVRRDLLAESKKHKAWKLLWQIPSIGPIRAAVLLGILQTPHRFRTKRQLWTYGGVGIETSSSADHQVIKGQLERKKKQVEIRGLNRNYNHDLKNLFKGAAIVAASKPGPFAEFYAELLAKGMRPEMARLTLARKIATIVLIVWKRGVRFDAHHLKPQTA

SEQ ID NO: 301358 - protein, 355 aa, unidentified
MNSVRYIGMDVHRDTISVAVLDEQGRLIMESVLATRAVAILDFIHGMRGTLHVTCEEGTHSAWLYDLLVRRVAKLVVCNPRKNALLKSGSKSDAIDARKLAELLRAGMLSAVYHGETSALEVQHVARSYTLLTEDTTRVMGRLKAVFRGQAVACAGKKLYGKRHREDYLAQLGTGGLRRRAECLYQELDALQQLRREVRRELLVECRKHAAAKCLQSVPFLGPIRAGLLIGRVQTPHRFRTKRQFWTYCGLALETRDSGEYRVINGQVERKRKAALIRGLNWNHNHEMKNLFKAAATTASMREGVLREFYLGLLAKGMRPEMARLTLARKIAAITLKIWKKGEAFNAEHLKLQAA

SEQ ID NO: 301359 - protein, 487 aa, unidentified
MTEQRLRKHVKGRRGEKFRAKIKGLKAGEIIGVAIDVSKSFYRVIIFNLKGDLLREPFEVDVLKRGYRDLLSEVNKAVKQWKAKKVFWVMEPTACYHHNLARHLVGNGQEVIFLNPSQVASNRDQTMLHGLKSDDIDLGAIADLLIRGEGYFYNLEEGIYLELKERTWWREKKLKMQTQLKNQIRARLERIFPGLTSKYGGNQPLFSDLWEQGASRGLMKVGLTPQQILQLPIMSLKKQFKDVGHPISTNRARKIKTYFETMLLPEDKVLGPLIELLMRDVKLLETLESEMAEVEGEMIEGVKKTSWSHLLGKIKGIGDIMVASFAGAVGDIGKFKWGSQIFRKSGLDSKSKQSGQYEAKGLPIRRMGSKLLRCILYKMADSVIKHNPYFGLYYEYLVEKRKKLSKKAHIAVSNKLTRVMFALVRDKAEFAPPTAKIDYLEVLFAKTKQERKERREERKRRREKASHDSRILDLEAPSLGKAVSLNF

SEQ ID NO: 301360 - protein, 408 aa, unidentified
MKTLHQRCAGLDVHKAEVVACLRVVTNRKVGQQVRRFPTTTQGLLALAEWLENAGCTHVAMEATGVYWKPVWHILEGHFVLILANAAHVKNVPGRKSDVNDATWLGDLLAHGLIRSSFVPPPEIQELRDLTRTRRQLTREIVQHVQRIQAVLEEANIKLCSVITDIMGASGRRMLKAMIAGETDAEKLAALGHERLGCTRAELVEVLTGCVREHHRFLLGQHLRTIEQLEDSIAAFDARIEGALSPFHDIVERLKEVPGLGATATETVIAEIGTNMSPFPTAGHLLSWAGFVPRLDESAGKRRSTRIRKGAPWLKPVLVQAAWGAARKKNSYFKAQFLRLKARHGAKKAAIAVAASILTTVYHMLRDGTCYQDLGPEHFTRRNPAKAAARLANRIRNLGYHVEIRAAA

SEQ ID NO: 301361 - protein, 409 aa, unidentified
METVHQRCAGIDIGKRSLTVCVITTGTRGEPAKETRTFRTLTRDLLALADWLDERGVTAVAMEATGSYWKPIWNLLEDRFELLLANAAHLKAVPGRKTDVRDAEWIAELFRHGLLRASFIPPRPERELRELVRYRTSLIRERASEINRLAKVLEGANIKLGSVSTNIGGVSGRAILAALTQGASDPEALAQLAKGRLRNKHEVLVEALAGSVGPHQRFLLAAQLRHLGDLDTLIESLDAEIKERLRGAQELIERLSTIPGVGRRSAEVILSEIGADMTRFGSARQLASWAGMCPGNYESAGVQHGGQTRKGSPWLRTALVNSARSASRTKTYLGAQYHRLAARRGAKRAFMAVGHTILGIVYELLTTSQSFRDLGTTYFDQRDAERIRRRLTHRLEALGYTVTLAPHAA

SEQ ID NO: 301362 - protein, 315 aa, unidentified
MTKPVIGIDVGKDKLDVGLATEKRVRVWNNDDSGRAELSDWVMAQGASLVVVEASGGYEAALVSELAGREQAVALVNPTRVRAFAKAEGVLAKTDKIDARVIARFGATMKPQARVRRDEAQVKLNDTINRRRQLVLMLTAEKNRLHTASVDMKTHINSHISWLQANIEELEKQISQAIQANPTWAEAAKRVESAPGIGFITAATLVADLPELGHLNRQKIAALVGVAPFNRDSGKQRGKRRIFGGRGSVRSVLYMATLSAIRHNPVIKKFYHRLLEKGKLKKVALTACMRKLLVILNTMVKTGQDWNPPSSSPAI

SEQ ID NO: 301363 - protein, 371 aa, unidentified
MTKNNTFIGMDVHKNSIDIAIADQGRNGQVRHYGKIDGTLLALDKVVRKLVSKDKQLHFVYEAGPCGYQIFRHLTSKGFDCAVVAPSRIPRPSGAQIKNDRRDALMLARLHRSGDLTPVYVPLAEDEAIRDLVRAREDAKGDEKKSKQRLQAFLLRHGHRFTGRSPWSKAHMRWISDIKMPHRSQQIVLQESIDTMNQCKSRVQRLTEQIQKLLPNWHLFPVVQALQSLRGVSMLVAATTVAELGDLKRFQHPSELMSYLGLVPSEYSTGAKIRRGPITKTGNGHVRRVLVEAAWAYRLNARVSRVLLKRQEGLPQHICDISWKAQLRLCSRYRHLWNKGKSKQVVVTAIARELCAFMWAIANETEVPANV

SEQ ID NO: 301364 - protein, 411 aa, unidentified
MDKIYDKCCGIDVHKKLIVACFQCGRKQEVREFGATTRELLTLADWLKEGGCEMVAMESTASYWKPLYNILESSDLNAMVVNARHMKAVPGRKTDVKDAEWIADLLQHGLLQPSYIPGKDQRELRELVRYRKSLVGERTRELNRLQKMLEGANIKLSGTVSDINGKSARSILEYLLTGESFDEAKYNEMYEQKVIAHNLKAPKEQIIDDLNGVMSPLQRRMMKELLAHLDELNEHIKNLDDEIDNFMKPEEKQASQAIQDVTGIGNTSAQAIISVIGTDMERFPTDKHISSWAGLCLGDNESAKKRKSGKTRKGNVLLRTTLITCAHAAVKNKKSYFYAQYMRIRTHRGPKRAYVAVAHSMLIAIYHILKDGVIFKDLGAEYYNQFNKERKINAYLKKLKALGWEAPVVAA

SEQ ID NO: 301365 - protein, 405 aa, unidentified
MAKPPDIQRWIGLDIHKSYFVAVGVDAEKQPVFGPHKIMNGQLEEWGSSHLQSTDAIVMEMTTNTYLFYDTLLPLVGSVIAVHPPNVRLVTGVKVKTDKKAALSLAQLHAAGLLTGVWIPPAEVRELRAVIAQRAKMVRMATQAKNRLSSLLIRIHQERPARAFKPQTRAWWESLPLSAIEKSILRTNLDTLEFAEKQIKLIEDGLRQEAAREERVPLLVQLPGIALLNALTILAAIGPIERFEDAKHLVGYAGLGASVHDSGQTHATGHITKAGRRDLRYAMTEAANIAVLHHPYWKKEFERLEFRLGRSKAIVAIARHLLIAVWHILKKETLDRHAEVNTVAASMLTLAYAIKKRNLPKGVSGRAFARAQLDRLRIGQDLQAVTSGKKKLPLPPSRLTQTEKE

SEQ ID NO: 301366 - protein, 455 aa, unidentified
MDTRIIGIDLAVKGAHKAVVLDQASNTFVSKLLTFHTDPADLDRILDAARAGASEDIRVIAVLEATGMAWYPVGLYLQGHGVEVYRVNGQQVAALRRVYQRHAKSDRIDARVMARLPLLYPERLHRCHFPSGPQMALQRACREVARLKGQVVASKNRILATDQFAWLGWLDILPPYEAAAFWVRAHYYDPWLVLEVGESELAQAWQAVAPEQPADITWISALVQRAERVIALYGDPNCIDYAQLQASLQREQARLSQAEEQAHQLRLTTVRPLYRQLHPERHLESIQGVGQDSAAVYIAFIGDILRFPSLRNFRGWSGLIPFSRQSAGAQARGLRITKAGPDLVKATAFLDAQVARLWDPQIAAIYYNQMMALGKHHLQAVCACATHLLDRIYVVLRENRPYELRDVDGTPVDKHEARRICLEQYRVPDEVRRRNNYRVRRARKEKRLERRNKQR

SEQ ID NO: 301367 - protein, 394 aa, unidentified
MKLVGIDIGKHKHFVSIVDKLTGEIILQPVAFSNNAQGFEFLISQIALYPVDSVLIGMEDTGHYHFALLRFLLQKNYSVALINPKTTDLNRRMDGGITKNDKLDTLNICDILSSNKLKKPYRLTSSKKFDLYEQKQLTRLHHSLKEQINVLSNRLQKCIDLVFPEYNSLFKSRYTKVYMSILKQFGSAKAIAQADIRTLRKCFDITGRGNRISLTAEKLKESAKTSVGISSLADEMQIKHLIAHIELLNDQLKEIDKKIEEFSTDLNSPIISVPGISHFSGTSILAEYGDIFNYSKPSKIIKAAGVAPFHYESSQYEAKHSAITKQGSSYLRKTLYQIIVPVIRFNKVFKDYYDLKRSQGKSHRCAQGHCIRKLLRVIYHLVTTNQQFDASLLR

SEQ ID NO: 301368 - protein, 442 aa, unidentified
MKKEAKNEFQLVHPNAAGIDIAKDVHYVCVPSDRDETPVQHFGSYTEDLHLLAQWLKQCKIDTVAMESTGIYWVQLFLILEEYGFDVFLVNARHIKNVSGRKSDVLDCQWIQQLHSFGLLNKSFQPENEIRELRAYLRHRKSLTLSDASQVQLMQKAFEQMNIKLQNVLTDICGKSGKLIIEAVLAGERNPEVLVELVDSKVKASKEEIMKSLVGNWRNEHLFELRQAYELYQVFREKISECDVQIEDVLQKISTGSLSEQNDTKSLRGVYSKNRFNFNATNYINSIVGVNITKIFGISEILALDIISETGIDMSKWPTKKHFTSWLNLVPNNRISGGKQLKSKKVKKKNKAGQAFLMAAFSIQRSNNWLGSFHRRMKAKHGPGIATKATARKIALVFYDMIKFHKEFDPINIETYDQIFADQKIKYIKNQALKLGLKLVSA

SEQ ID NO: 301369 - protein, 361 aa, unidentified
MYTEPTTVGLDVHARSVVAEAIDWRTGQAFSKRLVPANEQVLAWVATLPGPVAVTYEAGPTGFGLARAFAAAGIRCLVMAPSKMERPPGDRIKTDRRDARRAARLLHIGEITGIRVPTVGEEDARDLFRARDDARVDLMRARQRCSKLLLRHGIVYSGGKTWNGVHERWLRSQRFELPGTRAAFDEAFDAVLSTTARRNRLDEAIIDMAALPEWSPMVSRLGAIRGIATLTGFGLAVEIGDWDRFTGASIGAYLGLVPSESSSGPSRNPGSITKTGNTHARRLLVEAAWHHQRLLRPASTAVAARRAKVSPAVRARGEAADQRLHRRWTTMAARRKEPSVIAVAVARELAGWCWSLATMTG

SEQ ID NO: 301370 - protein, 377 aa, unidentified
MKRIKFVGLDVHAETIAVAVAEQDGEVRSVGEIGNREESIRRLVKKLGPVEDLRFCYEAGPTGYVLYWQLTALGAKCEVIAPSLVPVKSGDRVKTDRRDALKLARNHRAGELTAVWVPDAEHEALRDLVRAREAAKKDQLRARHRLSKYLLRHGRRPSVEIKRWTAAYLEWVKREVHFEQRAQEFTLLDYLHEVEHLGARIARLDGQIEEVVKLAPARMRAVIEGLQALRGIAQISAVTIVAELGEVSRFSRARQLMGYGGIVSSEHSSGASVRRGGITKTGNAHLRRIVVESAWAYRHRPSVGVTLGRRQEKVSEEIKEIAWKAQHRLHARYRKMMARGKNKSVVVTAVGRELLGFIWAIGVKVEATHQKSVKQAA

SEQ ID NO: 301371 - protein, 344 aa, unidentified
MKRITIIGIDLAKNTFQLHGVDAEGRVVLRRMLRRDQVATFFANLPSCLVGMEACASSAYWARVIEECGHTARRIHAKFIKPYLMADKNDANDAAAICEAVSRPHMRFVPSRTQEQADIQAVHRVRRCLVQSRTATINQARGLLAENGIVIRQGACHVRSHLPAIVGDQDNGLSGTMRRLLASIYENITSLDAKIIEQDQALQEIAKAHEACKRLMKVPGIGILTATILLTMAGSVTDFKNGREFAAYLGLVPRQYSTGGKQRLLGITKRGDSYARTLLIHGARAVLRAMKAGRAPLGDGIRANWQARLIDRRGYNRTSVALANKMARTAWSMLSQGTEYRMVA

SEQ ID NO: 301372 - protein, 357 aa, unidentified
MAALSIADVPSNVTVGVDTHKHSHIARAKDGLGRHLGQLEIETDPRGYAGLLAWAQEFGPVVTFGIEGTSSYGAGLTRFLRAQGQAVIEVLRPVRRDRRFRGKSDPIDADAAAGAVLSGKATAIPKAGDAGVEMVRALKIAKQTAIKARTQAVNAVKGLIVMAPDPIREQLRHMRTPALIRKCCAYRVEGASDPTSAVKLSLRSMSRRYVALDHEVRALEKELDALTVRLVPQLRELFGVGQDVAATLVLAAGNSGDRFRSEASFSMLCGASPIPASSGMVKRHRLNRGGDRQANAALHQIVLVRLRYDEATKAYFAKRKAEGKSKNETFRCLKRYVAREVYRTLVGPREQAIRSAA

SEQ ID NO: 301373 - protein, 409 aa, unidentified
MELLHPRCAGLDVHKDSVVACVRLAQAGTVSQEVRTFATTTDGLLALAAWLAEQHVTHAVMESTGVYWKPVWHLLDDGEVQLSLANARHARNVPGRKTDVNDATWLADLLAHGLLRDSFVPPAPIQQMRDLTRTRKQLIRERAQHIQRIQKVLQDANIKLDSVLTHLMGKSGRAMLDAMVQGVTDPDRLAALAVGHARKKTAALVAALTGKVTAHHRALLQLHLGLYDALSKAIAEVDASLGKVLAPMKARAKLLTTIPGVSDWVAQVLIAEIGIDMTRFPTASHLVSWAGLCPRCDESAGKRHNTRIRDGAPWLKATLVQAAWPAVRTKDSYLRAQFYRLKSKRGAKKAIIAVAASMLTAAWHMLRDGVEYHDLGGDYFAQRDKSKVAGRLVRRLQDLGYEVDIKNAA

SEQ ID NO: 301374 - protein, 390 aa, unidentified
MAQSHMRKEPVVKKVRFVGLDVHAETIAVAVAEPGRDGEVRALGVIPNRLESVRKLLKKLGPADQLRTCYEAGPTGYALYWQLTELGVKCEVVAPTLVPVKAGDRVKTDRRDAAKLARNYRAGELTPVWIPDAAHEALRDLVRARLAAKKDQLRARHRLSKFLLRHGRRPPTGVKAWTLNYITWAKKEVHFEQPAQEVTLADYVYEVEHAHERILRLERGIDAAVETMPARMRAVVEALQALRGIAKISAVTVVAELGEISRFKKPRQLMGYSGAVSSEDSSGERTRRGAITKTGNAHLRRIVVEAAWAYRHRPSVGTTLAMRQKQASPEVKEIAWKAQHRLHNRYRKLLAKGKDKQKVITAIGRELLGFIWSIGVRVECEFPTSRQHQA

SEQ ID NO: 301375 - protein, 283 aa, unidentified
MNQEKYIGMDVHAATISVAVMNAQGKVLLECVLETEVATILEFIQGQRGTVAVTFEEGTMAAWLHDLLKPHVSRLVVCDPRKNALMRDGNQNDRADARNLAELLRTNQVHAVYHGKHGIRALRELGRSYSTLTQDSTRVMNRIKSVYRSWAIPCAGTSVYSRRHRAEWLAKLVEPGVRIRAEHLYQQLDSLEPVRQAARRELLRESRKHAAVKLLRQIPTIGPIRSALLVAILQTPHRFRTKRQLWAYSGFAVQTYDSGEFRFERGKLKQPRAHHRTWSESQP

SEQ ID NO: 301376 - protein, 358 aa, unidentified
MVQRKELNFEGQNIYIGIDVHLKTWHVSILTESGCLKKHSQQSSAQALFEHLKKHYPNGNYLSAYEAGFSGFSTYYSLLDFGIECLPVHAADIPTGQYESVMKTDAIDSTKIARALKSGLLLGIYIPKKEVLDDRNVMRLRITLKRQLSGYKSRVKHLLYNNGVIYPECFQNSKSHWSKRYLKWVHEDVQLLSESRNSLDLLLRQVELFRKSLLEITRLVRTLSRNGRYGEAYENIVSIPGIGMITGMCLLTEIGDIHRFRNERQFASYLGLVPTSHSSGEKTSHGEMTFRGNKRLGPLLVESALVAIRQDRALAAAYGEYCKRMLPQEAIIRITRKLSNRILIILKSGKKYEHDRCY

SEQ ID NO: 301377 - protein, 408 aa, unidentified
MNQLFVGIDVSSKNNVVCLMKPDGTKYNTFSVQNNLGGAKILSEKIVSALDKLQLSEVKIGLEATSIYGDSLVYALREDGRLGRYQRHIHVLNPKQVRKFKEAYPDLPKNDYVDAFVIADNLRFGRIASEVYMDDYRYRSLQTLTRARFDAVQSLTREKQRFANYLFLKCSGIAQDREISNTSATTLALMEAFESVDELANCDFETLTAFVSAAGRGRFAAPEATAKAVQAAARGSYRLPKTVNDSINQAMSVSISSMRALESQIKVLEKAIEQQFEIVSNTLTSIPGIGPVYSAGIIAEIGDIHRFESQASVAKYAGLVWKQHQSGDFEAQNTRMIKSGNRYLRYYLLEAANSVRRCDSEFRRYYDLKFREVNKFQHKRALALTARKLVRVVFRLLKDNRLYIVPES

SEQ ID NO: 301378 - protein, 341 aa, unidentified
MKVTRVGLDIAKEVFEVHGVNEHGKAQVRKQLRRARVLEFFANLEPCLIGMETGSGAHYWARELQKLGHTVRLMAPRFVKPYRKNDKSDRNDAEAICEAVGRPNMRFVAVKSEEQQVMLSLHRMHAGLKSERDALANRLRGLLCEFGFVLPQGAARLRSGLPAVISQERLPVLMNQVLADGWQRLRELDDQVNRHERQIRALAQQSEPARRLMEARGIGPMTATAAVATIGDAKLFKNGRAVTAWLGMVPRHNGTGGKIWMGRITGRGDTYLRTLFVQGARSVMNTTRGKNDPLSLWVERLRARGGDNVAAVALAAKNVRMVWAMLARGEAYRPPLQGVGA

SEQ ID NO: 301379 - protein, 390 aa, unidentified
MERPMQKLNDLSRCLTPLQPDGTLIAVIEMSLSSWLVAGIVPGVERQPLKKLAVDENALLKLLHRWREEAEKAGRRIERIAVAFEAGRDGFWLARWLRARSIEAHVIHASSVAVSREHRRAKTDRLDTELLKRAFLGWLRGERDHCKMVAIPTINDEDAKRPNRERESLVGEQSRIVNRMKAALVRLGIRGFNPKLKRAAERLEDLHTPESEPIPPNTLAELRRDMERRRLVRDQIRQIESARLDRLEHAPGEGAHAMVRLLARVMGIGIETADMLVQEVLSRNLRDRRAVARYAGLTGSPDESGKKRREKGLARSGNPRVRRGMIQLAWRFLMFQKDSALAQWFRARTENARGARKTMIVALARKLLIALWRLVREGVVPDGVILRPAQ

SEQ ID NO: 301380 - protein, 443 aa, unidentified
MTGESDEPRTPPSPWLHLGSRRDPDRLLPFFSVSPCLVSCECRVRGLNFGVGFYANLASLRCEKAPWPGSLSGPWSSFSAWISGDSSESPVIVTELGTRGPLWGIHPNSRLSTASRSSLLQDRENFQMTTVYLGIDVAKKDFCLANSQKSLRVLANTPEGFQQLIALLHQQYEQPHVVLEASGGYERNLTDALQDAGIAVSVVQPGCVRHFAKSLKVLAKTDAIDATVIARFGEATHPTPSEKTAPATRRLRALADRRTQLVEDRVREKNRLETCSDKLITTDIKRHIKQLSGVIEKLDQQVQTLIAEEADLVAKSATLQTATGVGTQTATVLLAHFPELGTLSRQATAAIAGLAPHPQESGSWTGKRRIYGGRAAVRKALYMAAKSAAQHCPLLSPFFKRLRHEGKKPYNVALIAVARKLLVRLNTLLKHLKIQTPNATLAT

SEQ ID NO: 301381 - protein, 344 aa, unidentified
MDHFAGLDVSVKETSVCIVDDTGRIVREVKVASEPDALLAVLTNPAYQLKRIGLEAGPLSQWLFSALAEAELPVVCVETRHMQAVLKAQINKTDRNDARGIAQMMRVGIYRPVHVKTLRSQKLRMLLTHRKLLQSKAIAIENDLRGTLRNFGLKVGIVGKVRFEARIKELVENLPDLAVLVEPLLLVRRVLREQIIILHRHLLAIVRDDDVCRRLMTTPGVGPVVALTYRATVDVPARFRKSKAVGAVFGLTCSRYQSGETDRSGRISRCGDEMMRVMLYEAAQSMLRSKKWSWLKAWAMQIARRRGMKKAIVALARRLAVIMHRIWVDGTEFRWTREQAPAAA

SEQ ID NO: 301382 - protein, 356 aa, unidentified
MNKISKLNFEGQQIYVGMDVHKKSWSISILTDKFEHKTFSQPPEVGTLVNYLKRNFPGASYKSVYEAGYCGFWIHDLLQEHGVQCLVVNPADVPTKDKERTKKTDRVDCRKLARSLRSGEIEGIYVPSRPKVEDRSLIRTRQSMVKKQTRCKNQIKSILHFYGIQIPEELANGSWSKRFINWIEDIRMERASGNFALKVHLEELNNIRKIISDITRGIRTLAKSEEYRQNVRLLKTVPGISTLTAMILLTELYDISRFKNFDKLCSYVGLIPDTDSSGDTDLKKGITSRRNAQLRGILIECCWVAVRKDPALLMSFNELSKKMSKNNAIIRIARKLLNRIRYVLKNQQEYVSAVVQ

SEQ ID NO: 301383 - protein, 412 aa, unidentified
MEAAYYVAGIDVHKKMLAVVVANARDRELCFECRRFGTTVSELRKLSAWLRERAVQEVVMESTAQYCKPVWLALEGQFQLWLAQARSNRGPRGRKTDFRDAKRSVSRSLSDDLILSYVPEKEQRSWRTLTRTKYQLTRDRVRLQSQLESLLEECQIKLSSVVSDLLGASGQRILRAIATGETDPARLRELGDRRLHATDEELRDALDGQPQPLHRKLLLRYLQQLDLIEAQIAETESMIAEAMKAHEDAIVRLAELPGLGVDSAQQIIAEIGPGAEAFPSAPQLASWVGVCPGRQESAGESTSNRSAKGNRAMRRLLNQLAHAAVRKRDCYLQIVFKRLSARLGYAKAVWAIAHRLCRLIWKVLHEEVHYVEYGPAVSALTLKRRKQRLVTQLKKLGYSDQLVPTTAPAADL

SEQ ID NO: 301384 - protein, 345 aa, unidentified
MENMYYIGLDVHKKTISYCVKDGSGRIYAEAEIPATRLDLDMWMKTLPQPWTAAMEATIFTAWIYDHLKPHAAAVKVAHPLMLRAIAAAKKKNDRIDAHKIADCLRCDFLPECYMASTEIRERRRTLRYRNLLVRQAVQMKNKIAVLLMEAGVSYNKQKLHKVGYFRELLATNQDIDEGLKPLLRLCRETVVRLGKTESALVRSLQRDSLLMERVERLMTIPAVGPITALTWALEVGDVQRFSSIKKAISYCGLCGAENSSANLIKRTPLSKQRNKHLQTTLIEAAKMAPRNSVDLAMLYDREKQKGNANRATLAVARKLVAYLVAVDRRQKDFLVVENENRTAA

SEQ ID NO: 301385 - protein, 348 aa, unidentified
MAHFVGLDVSVKETSVCVVDDVGKVILEQKVPTEPADIIALLTSLGVTYSRIGIEAGPLSQWLVNALMAADLPVICVETRHMKALLTAQQINKTDRNDARGIAPMMRVGLFKPVHVKTLVAQEQRMLLTSRKLLQRKLLDVESDLRGTLRNFGLKVGVANRSRYEARVRELVEGFPRLAAIVEPLLNVRRVMRQQLAVLHKMLLDTVRDDPVCRRLMTAPGVGAVVALTYRATVDQPQRFVHSRAVGAHAGLTPKRYQSGEADYDGGVSKCGDALLRTVLYEAAHSLLTHNGKWSWLKAWGVRVAQRRGMRRAIVAVARRLAVVLHRMWVDGSEFRWRKDSATVPAVT

SEQ ID NO: 301386 - protein, 370 aa, unidentified
MNSIIYVGMDVHKASFTLSCFSVTTQETFATVKISPNAKAIKKYLDGVSLSRSEECEFVCGYEAGCLGYTLYHQLTAMNIRCVIMAPTTILRNGKRVKTDRIDAENLARCLAYGGYKSVYIPTAQDEAVRDYLRMRDDHKLMLKKIKQQINAFCLKHNKIYPGNKSKWTQAHVKWLNVLEFDGYLQDAFNEYMITYRELADKVERLESQIEQLAELEEYRDKVKKLICIKGIKTHTALSLIVETGDFSRFQSAERYASYIGLVPGEHSSSEDQKRLGITKAGNRHMRMLLIEAAQCYSRGVPATKSKDLKSRQKGASPEVIAYADKASIRLRRKYIRMELVNKKKANVAKTAVARELACFIWGMMTDNIA

SEQ ID NO: 301387 - protein, 411 aa, unidentified
MQVIYERCCGLDVHKRTITACRLKWLGSEWQKEIRQFGTMTKDLLALSDWLVGEGCTHVAMESTGVYWKPVYNILEGQFELLVVNAQHLKAVPGRKTDVRDAEWIAELLAHGLLRGSFVPPPSVRELRELTRYRTSLVRDRSRTINRLQKVLEGANIKLASVVSDIDGVSARLMLEALVAGERDTQQLASLAKGRLKEKHAQLVEALSCRLQPHQSFLIAEHLAQIDYLEGAIERLSHEIEERLRPFEQEIGWLDTIPGVNRRTAEVLWAETGGDMGRFASARHLASWAGMCPGNNESAGKRRTGRTRKGSPWLRHCLVEAAHGAAHTKNKYLSSQYHRLAARRGKKKAQVAVGHSILVIAYHLLTRKQAYSDLGANYFDERDRQAVTKRCLNRLQRLGYQVTLEKLQMAA

SEQ ID NO: 301388 - protein, 343 aa, unidentified
MQTVTTIGLDIAKSVFQVHGVDAGGHVVIRRQLKRRYVLAFFQKLPRCLVGIEACGSSHHWSRELQALGHTVRLMPPAYVKPYVKRHKNDAVDAEAICEAVTRVNMRFVATKTPEQQSCLTLHRTRHLFIRQQTSVINAIRAHLAEFGIVAPVGRHGVEQLLGVVADASDKRLPEVARACVAALGVQLQTLKAQILEFDRMIRAWHRCSEASRRLDDIPGVGPVLATALIASVGDPRAFRSGRDFSAWIGLVPRQNSSAGKDRLGSISKRGDRYLRSLFTTGALAVIRYAKIHGTKHRPWLTALLVRRPTKVAAIALANKIARMAWAMMAKGERYKEPAALAA

SEQ ID NO: 301389 - protein, 488 aa, unidentified
MPALHNNSKLKGAFTAQAAVAHPAASPKKKSKPVKKSPPDPTAGLSITHPNAAAIDVGGDTHWVALPPDRAPKPVRTFGCFTADLEALADWLIAHRIDTVVMESTGIYWVILYEVLEQRGLKVFLINARLAKKLLSRKTDLLDCQWLQRLHAYGLLNNSFRPPEAIRVLRSYLRLRERAVGAASQSVQHMQKALIEMNVQLSTVISDITGETGLRIIDAILAGERDGQRLAALKDRRIKASEQTLTQALRGHWKDEQLFALEQARLTWAHHQIQIAQCQDRIDGQLRAMNAEPPAPGKTSDHAAPGATMAPSSEAGPKPASTFCLREQLKQLAGADLVSIDGIGELTAQIILSEVVFDMNPGPTEKHFSSWLALCPEHEISGGKILRRGRRRKVSQRAAQALRMSAYGLERSDSALGAKYRRLKRRLGAPKAIVAMAHHLARLVYRLLKHGQDYVDKGAAWYEARYQAQRLKWLQKQAQELNLKLVPA

SEQ ID NO: 301390 - protein, 352 aa, unidentified
MQHFIGCDVHTRNQVVAWIEEETGEIKKRRLEHAGEEVGKFYAQFPRGTVVGIEATFPAYWFERLMGELGHELWVGDAARIRASEVRYQKTDPRDAEGILDLLRTGRFPRIGVPSLAERDLRQLLVHRMKQVRARTQVKNQLHALAISQGVCRKGKLWSVKGRKELESLALLPWAARRRKELLESLDRLDEQVRELDRAVEEAGGARPEVALLRTHPGVGRVVSLAFVLTVGPIERFSNRRKRVSYWGLNPRENSSGGRQRLGSISKQGNTMMRWLLVEAAQTAARLDPQLRRTYQRLKKQKTSAVAKVAVARRLAVRLFWMLRTRHNYTQLVHMSGSPSSAVVPPTAEPNL

SEQ ID NO: 301391 - protein, 320 aa, unidentified
MENIALIGIDLGKNSFHIHCQDRRGKAVYRKKFTRPKLIEFLATCPATTIAMEACGGSHFMARKLEELGHFPKLISPQFVRPFVKSNKNDFVDAEAICEAASRPSMRFVQPRTESQQAMRALHRVRESLVQDKVKTTNQMHAFLLEFGISVPRGAAVISRLSTLLEDNSLPLYLSQLLLKLQQHYHYLVEQIKDLESQLKRKLDEDEIGQRLLSIPCVGTLTASTISTEIGDGKQYASSRDFAAATGLVPRQYSTGGRTTLLGISKRGNKKIRTLLVQCAGYSYKNWNTSLANWPIGSGIYCVGKATLSSLVLWQTSWPE

SEQ ID NO: 301392 - protein, 449 aa, unidentified
MKKHDLKQRGLPVIHDRAAGIDIGSRFHVVAVPADLAKESVQTYQAFTADLERMANWLVNLGITTVAMESTGVYWIPVYEILETHGLRVVLANAREARAMPGRKTDVNDAQWIQRLHACGLLRASFHPTQEISALRSYLRLRERHLDYAAAHIQHMQKALTHMNLQLHHVVADITGLTGMRIIRAIVAGERNPSSLAAMSDKRCKAGIDVIEASLVGNYQPEHVFALTQALSMYDAYQAQVVVCDQQIAQTLMALSQQKVAPAEPLPKPRHNTRQPNALNFDVRTLLYQLVGVDLTQIHGIGPYLALRLVAECGTDLSRWRTCHHFTSWLTLAPGCRISGGKVLSAHTRKTKNRVTAHLRLAAVTVGRTNTALGAFYRRLAARIGKAKAVTATARKIAILFYNAMRFGMNYQDPGADHYEQKYRERVVKGLYRRAAEFGFTLQPADGVS

SEQ ID NO: 301393 - protein, 317 aa, unidentified
MSDAVNVGIDVSKDRLDVAILPHGEVLDVPNNETGHARLVARLASEPTLVRVVLEATGGYERQAAQALFRAGLPVVIVNPRQARDYARAIGRIAKTDRLDALTLAEFARAVKPALRQPDTPAQRLLASLVGRRRQIISMIGGERQRLSGATTDFVRQDLMASITSLKARLANVEAEILVTIELDPTWKARMSILTSVPGVGKITAVALLAELPELGTLTGKEAAALTGLAPMNRDSGRMRGKRRIHGGRARARKALYMAALTASRYNPTLRDFYQRLISAGKPVKVALTACMRKLLLILNALLKHHSTWQAPQPDSA

SEQ ID NO: 301394 - protein, 443 aa, unidentified
MINPDAAGIDIGHREHWCAVPIARSTEPIQRFGTFTEDLEKLADWLKECGIKTVAMESTGVYWIPAFQILERRGFEVRLVNARAAKNVSGRKTDVLDCQWLQRLHSYGLLNASFRPADEMCVLRSYLRYRDELVCARSVQCQHMQKALQQMNVQLHQVLSDITGLSGLRIIEALLAGERDAQKLAHLADRRVQASQATIQRALKGDYRAEHMFLLKVAFELHGIYQKKIHECDEKIVAQMAKLPTRIDPKQEPLPPRKPGRAPVLDRVCGTDMRLELYRWTGVDLTAIEGIGVLSAQVILSEIGTDMSRWRTEKHFTSWLGLCPDHRISGGKILSSHTRHVVNPVADALRMAATTLQRSKTALGAFYRRMKARLGPASAVTATAHKLARLIYRLLKHGEAYVRQGIEVYEQKYRERLIYNLRKTAASFGFQLTEAKELTKCVS
